United States Patent Application Publication US 2012/0017338 A1 - sequence listing, part 7

SEQ ID NO: 23610 - DNA, 381 bp, Zea mays
  Peptide Sequence Number=SeqID_65389
atggcgacgcacggagtggcgtcgtcgcgcacggccggctttcggcagggcccggcggttacgttgcgcgcggccgccgctaaccacgcggggggggaggcgaggtgcattgaaccgtcgcggctggggcggttagcgatggagcggaaccagtggcccgcgcgcggcggtggattcgactcggttacgggctggcggccacaaatttatattccaaagacgggggaggcgccggccgctggctgctcgtgctcgtgctctggcgcgttcccatcccagcgcgacgccgccgtcgccctacgcgggccgccggggggtggtgactcggactcggacgtgcgatgcggctgccgccccccgccggcccgccagtgcgtatga

SEQ ID NO: 23611 - DNA, 3201 bp, Zea mays
  Peptide Sequence Number=SeqID_65390
atggctatgatcctagacgccttcgtgcccatgctggggcgaatggtcgctggtgccgtgaaggagaggctcgacacgctcctcggcgtgcccggggagatggaaaggctggagagcacactggaggacctcgtgaatgtcctcggcgacgccgagatgaagcgcatcacggacacggccgtcgacgcctgggttcgggagcttaaggacgtcatgtacgacgccgacgacgtcctcgaccggtggcagatggaggcccaggcccgcagcagcagcgacgcgcccaagcgctcgttccctggcgctggctgctgcgcgcccctcctcacgtgcttccgggacccggcgctcgctcacgccatggcggcgcagatcaaggagctgaaccggaggctggagagcgtgtgccgtcggagctccatgtttcgcttcgtcagcgcctcgtcgtccgtccccctccggcagcaactaccaccggcatccagcggcaacggtaagacgagctcggtgatcgtccacgccgatctcatcggggagaagatcgaggaggacgggaacaggctggtggaggcgctgatcgccgacgacctgcgcgagaacgtcctcgccgtgggcatcacaggcgccggcgggatcgggaagaccaccctcgccaagagggtcttcgctgaccagcgcgtgcgcgacgagttcgacctcagggtgtgggtgtgcgtgtcgcaggacgtgaacgaggctgacctgctgtggtccgtcctcgttggcgccggaggcggccaccagctccagcagcagcacgacgccacgccggacaggtcgtcgctggagcccgcgctccagcgggccgtctcgggaaagaaggtcctgctggtgctggacgacgtgtggagcgacgtggcctggaaggaggtgctacagaacgcgttcagggccggcgctcgtggtggcagcagggtgctcgtcacgacgaggaaagagacggttgccaggcagatgaaggccgtgcacatccaccgcgtggagaagctgcagcctgaagatgggtggcgcttactcaagaaccaggtagtcttgggcaggaatccaaccgacattgaaaatttcaaagacattggtatggagatcgtcacaagatgcgattgcctgccgcttgccatcaagacagtgggtgggctactgtgcacaaaagagagaacgttcagagactgggaggaagtctcaaggagcgccgcatggtccgtggcaggactacctgaagaggttcacaacgccatctacctgagctatgccgatctaccgcctcatttgaaacagtgtttcctgcactgctcccttttcccaaaagacgaagtcatcaaacgggtggatgtcgttcagatgtggatcgccgaggggtttgtacaagaggatgggtcctcagcgctgctcgaagatgtagggaacatgtattacagagaactagtcatgcgcaacctactcgaacctgatggccagtattacgatcagtcaggatgcacgatgcatgaccttcttcgatcgtttgccaattatctggcaaaagatgaagcgttgcttcttacgcagggccaaagcttatgcgacatgaagacaaaagccaagctgcgtcggctgtccgtagcaaccgaaaatgtgctccaaagtaccttcagaaatcagaagcagctgagggcgctaatgatactccgaagcaccacggttcagctggaagagttcctgcatgacctgcctaagctgcgactgctgcatctcgggggtgtaaacctcacaaccttgccgccttctctgtgtgatctgaagcatctaagatacttggagctgtctggtaccatgatagatgcaatcccagactcgattggagacttgaggtatctacagtacattggtctgctaaactgcataaatctgttcagtcttcctgggagcatagtgagactgcataggctgagagctctccacatcaagggggccagtgtgaatgacatccccagggggatagggagattacaaaaccttgtcgagctgactggttttttaacacagaatgatgctgctgcaggttggaacagcctggaggagctaggccacctgccccagctcagcctcttgtatctaagcaacctagagaaagcacacaccggctctgtggccaagaaagcagacctccaaggcaagcgccaccttagatacttaagcttggagtgcacaccaagagccgctggtggaaatcagatcaaagataataacacacagcaggagaaacgtcagattgaggatgtctttgatgagctctgtccaccggtttgcctcgaaaacctctcactaatcggcttcttcggacacaagcttcctaaatggatgagctcaggcgagatggatcttaagtacctaagatcaataaaactcgaagattgcacctactgcgagcagctccccgcattgggccatctcctgagtttagatttcctgctgatcaaacatgcgccatctattatgagaattggacacgaattcttttgcagcagcaatgctacacaaatagaccctcggatgctgttcccaaggctggagaaacttggatttgataggttggatggatgggaagaatggatatgggacaaggaacttgagcaggcaatgccaaacatcttttctctcaaagtcacaaaatgcaagctcaagtatttccccacagggcttgtgcatcaaaccaggaccttgagagaattgatcatatctgaagcttgcaacttgacatcagttgcaaactttctcctcctcagcgatctgcatctccatgccaacccaaatctcgagatgatcgccaatctccctaaactacgaaggctttcggttatccaatgccccaagttgaatgcacttgtgggtttaacagaactgcaaagcattacattgcaggactatgccgcagaactgtttccacagtacttggaagaaactagtgctgcaaagctagaggttttctgtaatgaagaactcttcaaacttataaccctgcaagaaggttcagagtggtgcaagatcaagaatatccaaaatgttaaagcatatgctcccaaaggaggcgaccgtaaaggatggtacgcattatacactaaggaaccgtttagcctgaccacaaacaacaaggggtgcgaaatatttgaagttgcaaagtcctaa

SEQ ID NO: 23612 - DNA, 312 bp, Zea mays
  Peptide Sequence Number=SeqID_65391
atggcgagcgcagccgcggcagctcaagcagtgtggctgcagaagctacttgaggaggtcgttggcatccctgctaagccaacaattattctcatggataacacggctgctattgcgttggcaaagaacccggttcaccatgatcgaagcaaacacattgatgtgaaatatcattttaccagagaatgtgtggaacgtggtgatattgaattggtgcaggttgggactgatgaacagcttgcagatacgttcaccaaagctttaagcaggctgcgtttccaggagattcgcaggaagattggagtcgtttag

SEQ ID NO: 23613 - DNA, 351 bp, Zea mays
  Peptide Sequence Number=SeqID_65392
atggtgtgccgcctgcttggatgggatgtgccggtgttcggtggaaggattcgcgccgacgccatcccccggcaaactcgtgctctttatctcctgcatgttggcgctgctgatctcacctttcttcttgctgctggaagtgcacgaccccgtgggggtggcgctcttccgccggtgcttagcctcaaggatgttcatcagccttgcgggggtggagagcgagctgagctgcggctccgtcttccgcatgggctggtgacccgcctcttcctccagcattcggaggaaatgatgttcaccagccttgtgaaggttgaaggcgacgaactccggctacgccgcaccggctag

SEQ ID NO: 23614 - DNA, 264 bp, Zea mays
  Peptide Sequence Number=SeqID_65393
atgaggcggcatgggtggcagctcccgtaccatcctctccaggtggtggccgtgtccgtcttcttggcgctggccttcgcgttctacgtcttcttcgcacccttcgttgggaggaatgtgttccagtacgtggctaggtgctgcctgatgggcctagcaatggttgctggaggcctggagctaaggaaggcgccgaataaggctgatttggtgacaaagagatcacaaaggggattgaagaggattgagggggaaatgaactaa

SEQ ID NO: 23615 - DNA, 312 bp, Zea mays
  Peptide Sequence Number=SeqID_65394
atggatcctaagggaaaggggatggtggtcaacgataaggagaatgagtccatcttcaacgagccaagagatgacaagcccactgactctggctcgagtcacaagaagaaggacgggaagaagaagaggcgcatcaagaagatcgtctactacgacagcaacaaatcttcttcttcaccaagagacgacgacgacgagaaaaagaaaccagttaattcaaattattcatttgattcttctcgtattcctttcaattccaatgctcatttgcgttcaattcctcttagtaaacctccacactttgatggatag

SEQ ID NO: 23616 - DNA, 1518 bp, Zea mays
  Peptide Sequence Number=SeqID_65395
atggcttacacaaaatatcatcatcaagttttatgtgtcttctttctatacatctggtgtgctgcagcaaacccagcagatcccggggtcttcaaatcaaagaagtatctgagcttgtacggaagcggcaaacacaggcatctgaaggaatgcagaaagggttcttcagatgttcggttacaacttgagggaactggagaaaagcaagagcatgaggtcgcagcatctagcgagatgtcaatgactcaatacaaggacaatattccatcttgcatgagttcaactttctctgcatttctccttctattctaccctctgtcttttgttctctcctgctgtcagtcacatgaatggtcctctgaacagcaagccactgaggaagggatgtttttctgcagtctatgtgaagttcaagtgttgaagtatagtaagcattgcagagtttgtgacaaatgtgttgatggttttgatcatcactgcaggtggctcaacaattgtattggaagaagaaattatgggaggttttttattctaatgtcaaccgcccttatcttgggaatcagtacctatgactacatcattgcgctgagagagcaagaacaagatgatttgagtgggcagcagagtccacagatgtctcgtgtaagctcgtacactggactcagcagtactagttcctttggtccacttcgtcgtggttcatggtgcactccaccaaggctgtttcttgaggatcagttcgatgttattccatcggaggctgcttcttcgcataattctgctatgaagagaaaagaagacgagggaaagaggaagaagggctcaggggctgtgcaaataagcccatgggcattagctcgtcttaatgctgaagaagtctcgagggttgctgcagaggcacggaagaagtccaaagttttattaccaatcagaaaagatgactattcgcgagaccacgaaacagatagtagctacggaggcatgagcaatggcaggattgatctaggcaccgatagcaagaggagaacgaacagaagaggaagacagcccagtgatctctctctcaaacctgttgcaaagatatctacagatgttattgattctaccagcagggacatggccccagaagcactgtccaacttagcaccattgcaacttgaggcactgagcgccttccatcccagtagggctgcatcctgtgtgaatgctggtgggtcatctccagatagcagcttggattcgcctgacctgcatctgtaccgagtctcagctgtctcctcgtctggagctgaagacttacaactgacagctctcactgctccaggaagcactccacagcaagggatccaactgtcgaggtcgaccagcgatgggtacgaagcgtcagggggtgaagacagcgaccgcattccgtcacggatagtgcaccgctcgtcgaactgggcaagcatcatcctcaactctgaccagagtgcgtcctcatctggcattcttgtgccaaagaacagactgtcctga

SEQ ID NO: 23617 - DNA, 528 bp, Zea mays
  Peptide Sequence Number=SeqID_65396
atggagcatggaaacaaacatctggcagatgtgataactggagaagatatagcaggcaagttaatcctcgtgaggtcaaaaattttcaatgaatgtggtgttgtgtataagagtatagggctcagattaagaactttgcttaagacatgggaagagaagtcgtctcttgagcaagtatgttttgatagcagttttgaagcctatttgtggccattctataaggttttgtgttgtggtgtttatagtggagttgaagcccatatgatgttgaacaagtttattcaagtttatgggtcctcatcagataactctgttctgaatacctatctgtctgctccactttgtgggcttgcaaaggctgttccgtgtagctttgtgcccaagtatctacagcaaagtgggagaggtagtatctatgaacaatatttattaaaggaccatagcttaacactatacaaagttggaagattcaggcgtccaaagatgataagtcagctgcgcaagactgaaggatatagttcagactga

SEQ ID NO: 23618 - DNA, 213 bp, Zea mays
  Peptide Sequence Number=SeqID_65397
atggcggcctctcctccatctcctccctccccagcgcctccctctctactcctgcgctcggagcccagtactccagctcgccagcgctccctccctgctcgccggccaccaggaaggtccgagctcgcccatcctttgctcggtttcaacttcggtcgtgcctgcagaccgctccctccctacttgccgaccaccaggaaggtagatgtatga

SEQ ID NO: 23619 - DNA, 198 bp, Zea mays
  Peptide Sequence Number=SeqID_65398
atggaggggagaggaaaggtcgccggggagagacagaggaaggggcggtcggtcgggttcaaggcgccattggtggcgggaggaagggaagattaccatacaatagcaaacataaatgaatcctccaaatcctccacctgttggaatcgatcaagtggttgccgcccaaatgctggaggaataataaggtctatttga

SEQ ID NO: 23620 - DNA, 129 bp, Zea mays
  Peptide Sequence Number=SeqID_65399
atgagggcgcaacaaccgcgcatgcatcagcgagtcaagcggcggtggcttcggagatttgtttcacacccgcggccatcaggagaagatgaccctggcaacacgggtccacttgtctgcgactggtaa

SEQ ID NO: 23621 - DNA, 240 bp, Zea mays
  Peptide Sequence Number=SeqID_65400
atgtcaacaatccggttccgccattatcgcggtcagctaggagagaacgacactctagtcgaaataagcataaaagggtgttcggatagcaccggtgatggagcccaacacgaggaagaaactgtggtagaagaagatgttgtctccgaggctgaaaatcctccagcggagaacaccttttacttcgacatctacggagtggaccctgaacctcctgcaacacaaggcaagccccggtga

SEQ ID NO: 23622 - DNA, 216 bp, Zea mays
  Peptide Sequence Number=SeqID_65401
atggctatcactggcgaccagttgcgacgtggtaacatggctgatggcatggcgcgaccatggttcacgatggccaccatgacgacggctgcacgaccacatctctgggcaagtgggtacggcaagatcaccggcggcgaggtgcactgcacctgggatcttgttcagttactgtaccatgtgatcttctttagtgtgcctgacaaagcgatttga

SEQ ID NO: 23623 - DNA, 225 bp, Zea mays
  Peptide Sequence Number=SeqID_65402
atggccatgcgtgccatggggctcgaccggggagctagccggccgacccaggcgggctcgccggagcagaagcgcaggggacagagggggctcggcaccaccggccatcctcgcgtactcgaagaaacgtttcaaaggttcccgaaaaattctggaaacatgatcaagataattcgatacagttcgaaaaacatttgcactcataaacactatgcaatgacatga

SEQ ID NO: 23624 - DNA, 327 bp, Zea mays
  Peptide Sequence Number=SeqID_65403
atgtccggtgcaccaggaccgtacatggtcaaaccagccactctcggtaaaactgagctgcgctccgctataatttcaccagactgtccggtgtgccaccggactgtccggtgtgccagcggagcaatggtttactcgctccaacgatcgactgcaaaagctgttgatagaggaacagtgcgcgcagagtcagagccgcaaagtcagaggcacaccggacagtgtccggtgtggcaccggactgtccagtgccacaagaggacaaagcctccaacggtcgaccgggctccagaccctaacggttgggtgacgtggcggcgcacctga

SEQ ID NO: 23625 - DNA, 210 bp, Zea mays
  Peptide Sequence Number=SeqID_65404
atggcttccccttcttgggcctgcttatgcgacttgggcttcattctcggaagagcggcacgccggctcaggagtagtggacgtaacattcgtcgcgacatcattgcctcactggagagtccatgcctgttgtcatgctcatgccgccgtcttccaccatcggcgcccctctgcgctaccgctcgtcgccttccagcactcccatgttga

SEQ ID NO: 23626 - DNA, 621 bp, Zea mays
  Peptide Sequence Number=SeqID_65405
atggatcccaatttcaaaccgatcttcgaagaagcgatgaagatgatgcgagtcgagatcacgaaggaaatctccaagtgcttcgccgaccatgatgcggttgtcaaccaacacttcgccgattttgtggtggctgcagaacacaacaacgcccgtgacacatctctggaagaggccgcatccaagttcgatcacaccttctccaactggcagccagagatcgaggcctccgtcgccgacatcagtctcgaaatctccaagctctacaaattcttcgatcacgacgctcgtgaacactccgggtttcaaccgggtgttctgggcaccgagtcgacgtccgcgcgccatctactagattccgcgtcaacgggcctcgtggccaccgcaccgaacctcattaccaggatgatggtcctgggttccacaacacccagacccatcacccggtcaagggtggcctccatgtatttggaaggaccagccactcgttggttgcagtccatcgaacacaaacttgcttatattccgtggaacgacttctgttccttgttcatggaatgttctgggagagatgagcatgaggaagaagcagctgacactgaccagcgcaaaaagtattga

SEQ ID NO: 23627 - DNA, 312 bp, Zea mays
  Peptide Sequence Number=SeqID_65406
atggcgacgcggtggaaaggcagactcacgcggcgcaaggccgagaagcggtggttcaccggcgttcttatcggttccaccgcggtgaacacgggttttccagggttccaatgggggtttttggtatctcagggggttaagtttcctatccagggttctatttgcaaaattgtcggcgtttcgaccccggggggtccctggaccgacgagtcgggtgcgtttgcagtagggggttacaagcgtccacgtgggagggagcgagaggcctgcacgcgacatcccgtcctcctcgcgcggccaaccctctcgtaa

SEQ ID NO: 23628 - DNA, 692 bp, Zea mays
  Peptide Sequence Number=SeqID_65407
atgtgtgaggatgatagcacgatctgggaggaggagacgatgtcgaggacgatgtgcgggtcaagtgaaaactgtatttactatatggaatatttgattcgaaaaaggtggactctgctgccctacttgaccgacgctcgagaagtcgagatagagacaaccggcacccgccgatcgctcgctggtgggatgaagaaatgctccggcgtgctcttcatcctcacactcgccgtcgtgctcttcctcctctcgccgtcgccctcccccactccaccccccaacaccgcacccaatggcccgatcaccgacctcctccccaccctccccggcctttcggacctctaccctcccgctcccaactccactgcacatctctcctggggcctcctccgcccgctcctctgccgctccgacgcgctcccgggaacctctgcaggcgtcctcgaggcagccgaagcctggcggaatctcaccctgcctgtcaccgccgcggcaagcgaggaggaggcgcgtctccaaggactccccctgctcatcgtccgtgtgaagggatctacacacgggacgtgccacactctactgcgggatctcgtagggcgcggattgacggtggtcgggattctcacggagggggcggccgagttctgggcggaatgctggatgagaccggtgaggttgtgctgcacgccaat

SEQ ID NO: 23629 - DNA, 597 bp, Zea mays
  Peptide Sequence Number=SeqID_65408
atgctcggactgataaaggcattctatgttctgagtttgaccagtccagtggacggccttgttcattgcaatgagaaagtgggtgcaaggatcgtccaggagagtaataatactgtggtaaatattactgggaaccaacctgaagattggcagagtcaaacaggacatggtcagttaagtggacgtttctcaattgttgaaggagagccttttacagtaacactgtgggctggtgtagaggggttccatatgacagtaaatgggcggcatgagacatcatttgcctatagagagaggtcagagccatggttggtagcagaagtcatgttttctggtgatttggagctcttgtcattcttggctaatgagttaccagtatcagaagatatagacatggaaaatgttgcagttttgaaggccccacctctgccaaagaagcaaacttttctgctggttggtgttttctctactggaaacaacttcaagcggcggatggctttgaggcgaacatggatgcaatatgaggctgttcgctcaggcgatgtagtagtccgttttttcactggtcttgctttcacctcatggaagcttctttag

SEQ ID NO: 23630 - DNA, 357 bp, Zea mays
  Peptide Sequence Number=SeqID_65409
atgaccgcgcgttctccggccacgttcgagccccgtgccctgctcgcccacctcccctctctcatttgtgccctctgcccagcccccttgccatctctcttgctctgcccacgcgaacagggagctccaccaccgtccgccgacgcctaccgcctgttccgcggccgccgttgcgcccgtgccctgtccagtgccatggtgagcttcaccttgctatcagctgctcgggacacccttcggtgtgccctctccatccctgctgcgtccgatccacgcttaccagagcgttttcttgcacagccggagtccgccaccgtcgtctcgtcgaatccctgcgcctccgtcgttgcttcgtga

SEQ ID NO: 23631 - DNA, 441 bp, Zea mays
  Peptide Sequence Number=SeqID_65410
atgggagaggtggcgctggaaggtggagcttgggcgagcaaaagggaaggagcgagctcgccacctagggacgaggcaatgggaggccatggagcttgcttgcttgttgcatacatgctgccaagtacagtggcacaaccacacagtgcacactcgcataggccacagtgtcacagactcacagttacaggctcacagccacacagattacctagagagagcacgccgattgcagagttagagtatcagctcagagagcaggccagcacgagtacaatagggggctaccgcgtgcaggcagcaggacgcagccggaggtgccagcgcccaccagagcgccaagctgtggagcggttaagcgcgggaggtgcgaccgtccaccatcgtgtgctcgtgcgcgtgcaggtcccgatgcgggactggatggaggagcgattgtga

SEQ ID NO: 23632 - DNA, 249 bp, Zea mays
  Peptide Sequence Number=SeqID_65411
atgggtagactgctccgacgagggatctcggcacatcgacttcggcaaaaagcagagcatgcaggccgtagaggcttcggtggcggggtcgtcatgatgctggcatgggagtttggacggatgtatgatgtcgggaggagaatacggcgacctgagctcgatgaagggtgttgtcgacgagatgcagcagcaggggcagcagcaggtgtgtggcaacgagcggtgatggcgcaaagcggttccccctaa

SEQ ID NO: 23633 - DNA, 522 bp, Zea mays
  Peptide Sequence Number=SeqID_65412
atggactccgcctcgcccgacctcagggctcggcctcgacctcgacctcggaagatggactccgcctcgcccgaccccagggctcggcctcgacctcggccgcggaaggtggtctccgcctcgcccgaccccagggcccagcctcaacctcgacctcgggcggaatcgcgtcctcgcccgaccccggcctcggcctcaggaggagtctccgcctctcccgaccttggactcagacccaccacgtcgcaaggggataaaactgagtcacgatctgtcacgagtttggcctcggcctcggaagaagatctccgcctcgcccgacctcaggcctcggcctcggcctcggcctcggaagaagatgtccgcctcgcccgaccccaggcctcggcctcagcctcggcctcgggaggagtcacaacctcgcctgagcccagcctcggcctcaggagaagtctctgcctcacccgacctgggcctcagaccgactacgctacaagggatacatcattaccctactcctag

SEQ ID NO: 23634 - DNA, 786 bp, Zea mays
  Peptide Sequence Number=SeqID_65413
atgcccagcttacccatcgaccaggcccagctcgcggcccagctgtggcccaccccgcttccccgctggcgcgcgcgcccaaccctagccgcgtgggcgccgtccacccagtcgccgccactgcccactgttcatcttcctcaaaccaccactccctcacgtcttgcgcgcagccgccgctcacgttgcctcctccctcaccaagaaccacatgcggcctggcggctaggacgcggcggccggcggtgcggcccagccagccgtccccactcggcgcggccccatcgcggccccggtgcgagcgcgcggccgtggcgtccgcggtgcggccttagtcggtctggcgtggcgtggcccagccccctacgcagcctcgacgcggcttcctacgcggtgcgcggtctagcgcggcacggcctctgcacacgcactcccgcctccccggcgcggcccctgccccggcacggccccatgccagcggcctgctcgtccgatgtggcacacggtctgctcgcctggcgtgacccgccgcggcgcgtggtgcccccggcgcggcccggcgtgcggcaaacgtcgtcgagcagggagacacgccccatcaacacatcacgcccaaagcctgtatgcgtcgagcctatctcacactgtggtggtgacatggatgatgtttatgattatggtaatggtaagtggtattctttccgtttggaaagggtaaagaagaaggagaacggtgtcaaggcggatctccaggagttccaggacttcgacgagttcgaggattag

SEQ ID NO: 23635 - DNA, 1026 bp, Zea mays
  Peptide Sequence Number=SeqID_65414
atggccggatttatagacagaggtaaaaatcgttttgacatctcgaaagataactctttcatggacgacaagagttccatcatcatctatcgtcgagttcctgacagtgacgcgttccacttcgtagggttctacaactgctggaacaagttcgtgggcgaccacacgacgcaggcgttcgtgttcaccgacaaggcagaggacgcgagcgtggtggtggtgtcgttccggggcacggagcccttcaacatgcgggactggtccacggacgtgaacctgtcgtggctgggcatgggcgagctgggccacgtccacgtcggcttcctcaaggcgctgggcctgcaggaggaggacggcaaggacgccacgcgggcgttccccaaggccgcccccaacgccgtcccgggcaagccgctggcctactacgcgctgcgcgaggaggtccagaagcagctgcagaagcacccgaacgccaacgtcgtggtcaccggccacagcctcggcgccgcgctggcggccatcttcccggcgctgctggcgttccacggggagcggggcgtcctggaccgcctgctctccgtggtcacctacgggcagccgcgcgtgggcgacaaggtgttcgcgggctacgtgcgcgccaacgtgcccgtggagccgctccgggtggtgtaccgctacgacgtggtcccgcgcgtgcccttcgacgcgccgcccgtcgccgacttcgcgcacggcggcacctgcgtctacttcgacggctggtacaagggccgcgagatcgccaagggcggcgacgcgcccaacaagaactacttcgaccccaggtacctgctgtccatgtacggcaacgcgtggggggacctcttcaagggcgccttcctgtgggccaaggagggcaaggactaccgcgagggcgccgtctcgctgctctaccgcgccaccggcctgctcgtgcccggcatcgcgtcgcacagccccagggactacgtcaacgccgtccgcctcggcagcgtcgcctcggcgtag

SEQ ID NO: 23636 - DNA, 564 bp, Zea mays
  Peptide Sequence Number=SeqID_65415
atggcgcaattaccctatgacgatcataagagatcactcaagttactacatgctctagatcgggagggtttgggagagacgcaggttgagtgtcttgaggatgaggagttgatgcttatgcatgttgagggcaaggatggttgcttcaacttcagagactctaaccacttcattaccaactgccccaagatgaagggaaagttacaggctagcaaccacagctaccacatcgttcggcgcaagggtaagcgtgactatacctccagtaaggacaagcctaaggggtggttcgataagaaggtgctcaagcaaaacaacgacaagctcgagaggcaagtcaaagacaagctaaacatgttgtgcttcttcgccaacaccgagagaggcctctatgccatggcggttggtaaggaagtagtgggtggcgatggaaaggacatcgacaacaactgcatgtctaaggtatcactttctactaatgaacttttcgctgaggtagatgagctaacaaatgctttagctagtcaagacaagttacttatgcttgcagcgcatgagaggtga

SEQ ID NO: 23637 - DNA, 279 bp, Zea mays
  Peptide Sequence Number=SeqID_65416
atgacccttgttgttcccactacaacaccaggtgaagagatgtgcaaaagagataggacaacaccatccgcctgctccactatgcaagacgatgagctagcctatgctgcagcctacaccgttgcctttgctcgcacgctgacgagacaagacgatggcaagacaaggcagggaatccacacgatgaccaagcgaagaccttggaccagaggattaatagctccatgctccatttattatacagctaaagcccacaagtcggggctccttagtacccat

SEQ ID NO: 23638 - DNA, 1314 bp, Zea mays
  Peptide Sequence Number=SeqID_65417
atggcgttaaaagggccagtgtttgaatccacaggcacagaggcgggagcagagcctgcgctctccatcattgacctacaaagccaccaggacccctcccagccgccagaaacccgccagaacccttcccagccgccagaaaccctactcctctcctctgtcctctctggtttctgccgacgtctctgctccagcctccaagtgctccagccagcagagaggcagagagcagatcagccgagggggagggggagctcgccgcggaagggggagggggtggagcctcaccagggagcaggggaaggggacttcaccagggagggagaggtcgcgggctcacggtatggggccgccgccgttggtgaactgagagctgccgtcacctggacctcacgtgaagccctaaccgcgtccttctctggaatcacatcaccgttgttaccttgtttggtgaagaacaagattgtacgagagatagtggacttcgcaaagcagcatcagtcagtttttaatagcattttaagggagaacatgactggaactaatttgctcacgttggagcagcttagcatggcggtttctattctcagcaaggtttgggcgtatgaggaaaatgaggaatgcagctacattcaagatctattttccttgatgcattctctttttagcgttgactttgggattctaaattttatgcaatcaccaaacatgattgagaatcagaagtcagaattgatagcatttggtctttgcttcagccttgtctcttacctttatgttctcgctacaaggaaaaacatgcgatttcaagtttcatatggccgtaacagtgatcagcagcacccaacactacaaatggtttctgatcttctgaattcagcaacacttgccctagaaagagttggtgaagaaaaatatatgcttttaaacaagatccgtgacttaaatgagttgtccagaaaggaggttgatgagataataaaagtgtgcatgaagcaagattgcatatctcctaacgataacatccgtaaaaggaggtacattgcaatgatagatttgtgttgcatggctggcaaccgagaccaactcattacccttctactccaaataacggaatgtgccgttactattctcctcattcattttcaggacgatgcttctgcaaaaggtctttcttcattttctgatgaactccttcctgtgctggagagactagagcatttgaaagaggacaaagttggacgtagtctgaagttgttccacagatccattactacactaaaggagatgaccatcagaaccataaccatctga

SEQ ID NO: 23639 - DNA, 1947 bp, Zea mays
  Peptide Sequence Number=SeqID_65418
atggattacaagtctacactctacaggaatagccgaataggatggactgatggagcgcttaagctgagtgatgaactcaatcttaatgagattgagtgtgttcgtttgctagttgatgctaacagagagtctgttgcacttgaccaaggtcttgatgccgatctgatgtctgaaatcgaggatcaaatccaacctttattcaatgatggtctccgacaacggataattactcttgtaaagttatatctgaagctagttaattccagctatttagtatggcttaaaaaccattttaaaaatgcaccttcaaaggagctgaacagggaagaaccagctggaattggcagtccaagctctgagcgttatgtgcttgatttcagaggggctcttgtggaaagaagggcaattgtctcgagagagagattaagtttgagccactgccttgccctttctgcacttattaaactaacgagccccaaagaggttaaggatgtattttcaatattgaaagactgtgcagctgaagcaaatcaaaatagcagtgtggagctccagatcacctatggacttctgttctttcttgtagcaacttttatttctgatgccctaagtacttctcttgagaaagcatcattgtcatcgtctgattcctcatttagacgtgaatttcatgaacttgtgatgaggacaggtaacaatatgactattgaagggtttgttggtgttgtgcggcttgcatgtgccttagcggtcaaagttggtttccgagtaatgtttttcttggctatcattatcagtgttaaaaaaggtggtgtttcgcgctcgcctaggcacacctctgtgctgggcggttgggtaccgccttgcctagggggtaggcagtaccctaggcagtggaggaggaagggacatcacatggaggtcactggtgggggaggagcagccttgggtggagttggacggcggcatggactgagagaaagggagatggagaggagccgacggcgtgagcatggactgagaggaatgtgggagagggagaggaatcgccaacggtggaatgatgatgaggacattgtctacatgtacactggctacactcacaagctaatgatgtgctttatttcccacccaacttccagagataagataaaggaaatcaaggagaaagcaatgactgccctcagtccatatgagccaccacgaggtcaacgagaagatcttggtagaaatggggaacaagctgatcagcctactaaggagccttttgtatccctgctggaactggttagagaaatctatcaggttgtgtgttcaaaccctcacaactacatatttttgaagggcgggcctggtgcagcggtagagcctaccgtctgtaaccggaagaaagtgcctgagctagggaatggaaatgaggaattgtggacttttgttatatatgcaggagaagaccacacaaacacacaaactcttgtggcctttcttggacttcttagtactttggcttccactgaagttggtgctgccaaagtctatgagctgctccagggaaaaacttaccgttcagttggttggagcactttgtttgattgcttatctatctatgaggagaagttcaaaaaatcaattcaatcttctgcaaacatactgcctgattttcctgagggggatgcacaagcgcttgttgcatatttagctgttcttcagaaggtggtggaaaatgggaatcttacggaacgcaggaagtggttccctgacattgaacctttattcaagcttctcagctatgaaaatgtgcctccatacttgaagggggctttgcgaaattcaataactgcatttataaaagtgtcacccatactaaaggatgcaatttggaattatcttgagcaatatgatcttccggtggttacagctccattaggtcaccatacagcaacacag

SEQ ID NO: 23640 - DNA, 465 bp, Zea mays
  Peptide Sequence Number=SeqID_65419
atggccgcgcgtaggtgggtcgctctcgctccccaccccgtcgccttcctcctcatcatgataattgactacaaattaacttacccaagtggtactgcaacagctgttcttataaatggattccacacaactcatggagatgcaacggcaaagtttacccctcctgctcctgtgtcagtctcagttcctagctctgcatctcaaggcagcaacattttcaagaccaggattgaaggtgcaaacaacgttgatgcaggacaaatgttaatttctctttatcattgggcctttgtctttggcaacgcgagcaagagcaaggatcctcttgccttcacaggaaatggactctcttgccttcacaggaaatggactggctccccaccagcaagtatcctctttgccccttttgtaatgatgacactaaacatgtcctatatccttgtgattgttggatttgcagtataa

SEQ ID NO: 23641 - DNA, 687 bp, Zea mays
  Peptide Sequence Number=SeqID_65420
atgcccagtccgccgaaggaccgcccctctggccgcgtcggccgcctcctcgccgcgctctgcccctcccgcgccgggcccctccccgtccagaccggcttccccacctccctcatcgtcaagaaccatggccgcctcaagaagcagccctccccgtcctccaagcgcgggaggcgcgccgccgccgccgcggcttctctttcgccgtccccatgcagtcccaccacctcgccgtcaccgtccccgtcgtccgcctctccgcctcccccggtggccgctagcgcagtctcgccgtcggatcggccgcggcccgaccttccgccggcccagccccctcgccgcaacagcggcctcggcctgggcttcctcgcggtcagcgacaaaacatgtatgaatatgagtccaagacgcggacagggaaaagaggagaggatagaaatcaatggaggcgagcgtgcgaaagacgtgcacctcgagaaggcggtcttggggtccgtcgtagatgagcaggatgatgcgcgtgccggcaacctcgacgatgtaggaggtcgtggtggtgttgtgatcctgtcgcccgcgccatccgccaggtgcgagacgatgccagggcgtccacaagaatcggacgacacctccgcccaagtcgccaccgcgggggttggaggaggaggaatcactgtcgtttag

SEQ ID NO: 23642 - DNA, 180 bp, Zea mays
  Peptide Sequence Number=SeqID_65421
atggctagctcggtctaccaaagcaataatgaagctggcctttgtttggaacctttgtttgagcggtgtacatgtgaaggcgaagccaggaagcttcagctctacgacaaggtatcaaaaatgaaggaggaaagattcgaaggcttgttcaaatgtgctctccaaggaaaaagacaatga

SEQ ID NO: 23643 - DNA, 504 bp, Zea mays
  Peptide Sequence Number=SeqID_65422
atgaagtcacttatgctggtggtgtttgggactccatctgaggaaggcaacaaaagtccaagcttggaggtagatgctgaagccactgttgctgcttctataaaaaaaataatagaggccctagagcctgaaaaaatcgttgaagaaacattgaaactattgaaggctttagagccaagggaaaccaaaatgaaagccctagagctaagggcaaccaaaatgaaggccctagatccaaaggaaaccgaagcaatatctcttcctgtagaggggccaccatctttggttggggagagcgatgttttggcgtgtgttcctgatcgagaggaagatgctttagtgaaaaacttgacatgcgatagtggtttcctgaagttcgagcatgaactccacagcttgaaaaagcaaaagttcacccaatttctatcctatactaatattaaggtgtggagcacagggatgatggtcgacaacgatggtgaagatcatgcaggttcatactga

SEQ ID NO: 23644 - DNA, 237 bp, Zea mays
  Peptide Sequence Number=SeqID_65423
atggctcaccggagttgctctggcccgctcgaggccttctcaccgtcgctctaccctctctgcctgtggattcatggcctcttcctcgccattgagttcgccgtggcgccctctccctctctgcccaactccggcgacctcggagccaccctagctcgcgtcggcctcaacttcagtgacctcaccaccgcagagaagagcagcgccgcccgcagtcgtccttttcccccggtctga

SEQ ID NO: 23645 - DNA, 663 bp, Zea mays
  Peptide Sequence Number=SeqID_65424
atggaaccggataccaaggtgttatggcgtggctggctgtctagggttggtagcggtggcggtgcatctcctggtgagggcactggggcaactatgtctgacgatgaagacaatcaggtggacagtgagagcaacatgtttgatggaaatgaggggtcagatggaatgggatttggcccattaatgttgactgagggtgagagatccttagttgagcgcgtccggcaggagctaaagcatgagcttaagcaggggtacagagacaaacttgtggatattcgggaagagatattgcggaagcgaagagctgggaaactccctggcgacactgcttctaccttaaaagcatggtggcaggctcattctaagtggccgtacccaaccgaggaagacaaggctcgactggtgcaggaaacagggctacaactgaagcagatcaataactggtttatcaaccagcgaacactgcaggtgatgggaacgcagaaccagcctggtagggcatggtcggggaacgaagtttatgtaaataatgcttctactgtgaagagttccatcatatttgttgctccagaaaagaccctcagaccggtgtttcctgaacccatattcatacaaagacatcagacgatgaataatgttgcgagtagtcaaataaaataa

SEQ ID NO: 23646 - DNA, 213 bp, Zea mays
  Peptide Sequence Number=SeqID_65425
atggcagtcggggtcagtgaggcattgtacgccaaggcggtgagcccctctctgctgacggggaatcgatggggacggttgatgtgtgtggggacagagtgccccggttctctggaggacatggttgctagagtgacttggccgtccatcttgccaccgggttggactgtcgagtgggaccctacctcggctgaggaggagcatgaggagtga

SEQ ID NO: 23647 - DNA, 246 bp, Zea mays
  Peptide Sequence Number=SeqID_65426
atgaacgtatgtgagctcactcttgctgtctcacacccccacaggtcaagaacagcacaaagagaacagaaaagactattggtgacagagaatgctgatatgttaatggtaactgcaaagctactggacagggtgttcaacatccttcacgagaacaacccatatgttgctggcaattggcctgggaccgttatcaccacaagttctcagacacacaaaattctgcttcggatgttccatcagtag

SEQ ID NO: 23648 - DNA, 1392 bp, Zea mays
  Peptide Sequence Number=SeqID_65427
atgggggatcacgctgagatgttgcatgccgctccggccatgtacaacggcgctggcgctgcccctcatggcgggtggtggaatacggcggtgcccgcgacgacgtgctcgacgacggagctggctgggttcaccacgtggtcgtccgccctggctgctagctacgacctggcggccgaggggacaaaggccaagagcgccgccgcctcttcggagtcccccgggaacaacagctccgtgaccttccaagaaccggcctgcgtcacggatcctcccggcgtcggaaccgccgtggtgcaagtgcaacagcctcttgccaccggttacgccgactggacacatccctatatgagcagtggcgctactactttgcatgggtttctgcaagacggtcaccagcaggacatgagctcagcaactgagcagagctccatgaccgcatcaagcctgatgaacccttcatccaataacctagccctggcgctgcaaggtcaccaccaccaccaccaggagcatgagcaccagcagcagatgctgtccagcttcggatccgagctgctcttgtcgccgacgacctcaccctacgggttccagtcctctctgctacgaagcctcatggagccggccgcggcgacgaagcaggctttgccggggtaccagcagcagcagtatgatcagtaccagcagcagatgggcatgggccaggcgaggtttgcaccaccggcggccggagctgccagcagggaggcactccagttcagcaacgacgcgctgttcagctggaacccttctgctgctgggttcggcttcggcctcggcgtgccgccggcgccggaccaagctagcagcgtacgttctgtcgtcaaaccatcgccggcagcggcgcgtgctacagcgacccttgcattaaagactgcgctggaaggagtaggagagtctgctagctcgatcatcaccaagaagaaggcgaacggcgagccggccttgaagaagcccaggctcgagacgccgtctccgttgccaacgttcaaggttaggaaggagaagctaggggacaggatcactgcactccaacaactagtcgctccttttggaaagacggacacagcatcggtgctccatgagaccatcgagtacatcaagttcctccacgaccaagttggtgtccttagtgctccatacttgaagaacaacggccatcatcaagtgctccgccacttgaagagctcaagtcctgacaagtcgtccaaggacgacgacagccatgccagcgagatttcgctcaagggccgggggctgtgcttggtccccatatcgagcacgttcgccgtagccagcgaggtgcccgtcgacttcgtgtggagcactccgttcgctgccaactttaggtag

SEQ ID NO: 23649 - DNA, 285 bp, Zea mays
  Peptide Sequence Number=SeqID_65428
atgattgccggcccaaatatggtcttaaatgtgaaggcacacttgcacagtggtattaggggcttgggacctagaggtcctagttctttgatgcccttggagtatgaggtcgaaaaccctaggagcctcggggcctacaaaggggcccaagtggctaagtgtcatagtgcccagaggatggactacaccatgcaccttttccttgttaccctgagacatgagaagcctcggggacctatacttaaagtgtcccaggacacgagggcccccgaggatttatactaa

SEQ ID NO: 23650 - DNA, 432 bp, Zea mays
  Peptide Sequence Number=SeqID_65429
atggctccagagtacgttcagagcgacggtagcgagacgacgctcaagtgcgacgtgtatagcttcggagtcactttaatggagacactgagcggacgaaagaactgtgacacgccaggcctcgtctcagaagcctggagactctgggtgggccgctgcgtcacggcactccttgatccagcggttgcaccggcgcctgccaagcccgagcttgcgcaactgcgcaggtgcatccaggtcggcctcctctgcgtccaggagaagccggacgagaggcccgccatgtccgcggttgtcgagatgctaggcagcccctgctcggagcttgccgagcccatggtgccgacggtcgtcggcaatgcagccttggctactctcctggaggccgatctctccagaccgacggtgtacgagacaatcgattttagataa

SEQ ID NO: 23651 - DNA, 1872 bp, Zea mays
  Peptide Sequence Number=SeqID_65430
tcttcaatcctgcttttcctcggaacttttgccgccgcacaagctgcatccgacatcctcagcaagggcagtaaccttactaacggcgagaccctggtctccgctaacgggtcgttcacattagggttcttcactcgcggcgtgccggcaaggaggtacctgggcatctggttcacggtggccaactccagcagcgacgctgtatgctgggtggcgaaccgggacctccctctcggcgacacctccggcgtgctggtgatcagcgacacgggaagccttgtcctgctcgacggttctggccggacggcgtggtcttcgaacacgactgcaggcgccgcttccccgacggtgaagctactcgagtccggcaacctcgtcctgctcgacgggaacggcggccgcgacgactacgacgtggtgaagctgtggcagtcgttcgatcacccgacgaacaccttgctcccgggcgccaagatcggcatgaacctgtggagcggcggcgggtggtcactcacgtcgtggcgggacgccgacgacccctcgacgggggaattccggtacgcgatggtcaggcgaggagggttgctgcccgagatcgtgatgctggactcgagcgatgccatcaagtaccgcacgggagtgtggaacgggcggtggttcagcggcatcccggagatgaactcagcgaggtcagcttcagctacgccgcccaatgccggcgcgccgccatccctttcccgcgtcctcctcaactacacggctgaggccgtgcgcgtcgtgtgggtgccggacaagcgagggtgggcaaacttcttcacgggaccccgagaagactgcgaccactacaacaggtgcgggcactctggcgtgtgcaatcagactgcagcgtcgacggcgtggccgtgcagctgtgtccagggcttcgtccccgtctcgtcgtcggactgggacgggagagacccatctggcgggtgccggcggaacgtgtcgctggactgcggcgacaatggcaccacggacgggtttgtccgtttgccgggagtgaagctgcccgacacgctcaactcgtcgctggacacgagcatcacgctggacgagtgcagggcgaagtgccttgccaactgctcctgcgtggcgtatgccgcggcagatgtgcaaggcggaggcgatgatgttagcactggatgcatcatgtggcctgaaaacctcactgacctacgctacgtggctggaggacagaccctgtacctacggcaggctactcccccatctggcggttcggataaggcgtatgacctctatattcctatccctgccccctccccctccccggctccccctctccatgtttacaagcgaattagcgtgaatatagaaggcaagttgcccagagggcatccgctcctacacgtgctagccgggagaaccattgccgtgaagaggctgaaatcgatcggcgatcttccggacataatcgtcaggtatttcacgagagagatgcagctcatgtccgggctcaagcagcaccggaatgtgctccgcctccttgcctactgcgacgaagccagcgaacggatcctggtgtacgagtacatgcacaggaggagcttggactcctacatattcggaacacctagagaacgcgcgctgctgaactggcgccggaggctgcagatcattcaggggatcgccgacggcgtgaagcacctccacgagggagaagggtcgtccggcaacgtgatccaccgggatctgaagccggccaatgtgctgctggacggcggatggcaggccaaggtggccgacttcgggacagcaaaattgctcgtcgctggagctaccggaactcggacaaggataggcacagcgtaa

SEQ ID NO: 23652 - DNA, 2103 bp, Zea mays
  Peptide Sequence Number=SeqID_65431
atgacgaagacgaacaccatgagaagccaccaccatggatacagccaccgccactgccacctactcgtacagtcttcaatcctgcttttcctcggaacttttgccgccgcacaagctgcatccgacatcctcagcaagggcagtaaccttactaacggcgagaccctggtctccactaacgggtcgttcacattagggttcttcactcgcggcgtgccggcaaggaggtacctgggcatctggttcacggtggccaactccagcagcgacgctgtatgctgggtggcgaaccgggacctccctctcggcgacacctccggcgtgctggcgatcagcgacacgggaagccttgtcctgctcgacggttctggccggacggcgtggtcttcgaacacgactgccggcgccgcttccccgacggtgaagctactcgagtccggcaacctcgtcctgctcgacgggaacggcggccgcgacgactacgacgtggtgaagctgtggcagtcgttcgatcacccgacgaacaccttgctcccgggcgccaagatcggcatgaacctgtggagcggcggcgggtggtcactcacgtcgtggcgggacgccgacgacccctcgacgggggaattccggtacgcgatggtcaggcgaggagggttgctgcccgagatcgtgatgctggactcgagcgacgccatcaagtaccgcacgggagtgtggaacgggcggtggttcagcggcatcccggagatgaactcgtactcgaacatgttcgtcttccatgtgacggtgagccagagcgaggtcagcttcagctacgccgccaatgccggcgcgccgccatccctttcccgcgtcctcctcaactacacggctgaggccgtgcgcgtcgtgtgggtgccggacaagcgagggtgggcaaacttcttcacgggaccccgagaagactgcgaccactacaacaggtgcgggcactctggcgtgtgcaatcagactgcagcgtcgacggcgtggccgtgcagctgtgtccagggcttcgtccccgtctcgtcgtcggactgggacgggagagacccatctggcgggtgccggcggaacgtgtcgctggactgcggcgacaatggcaccacggacggctttgtccgtttgccgggagtgaagctgccagacacgctcaactcgtcgctggacacgagcatcacgttggacgagtgcagggcgaggtgccttgccaactgctcctgcgtggcgtatgccgcggcagatgtgcaaggcggaggcgatgatgttggcactggatgcatcatgtggcctgaaaacctcactgacctacgctacgtggctggaggacagaccctgtacctacggcaggctactcccccatctgctggatcaacattgggtttcattggccttgtcatgctggccatcttcgttgtgcaggcgggcaagttgcccagagggcatccgctcctacacgggctagccgggagaaccattgccgtgaagaggctgaaaccgatcggcgatcttccggacataatcgtcaggtatttcacgagagagatgcagctcatgtccgggctcaagcagcaccggaatgtgctccgcctccttgcctactgcgacgaagccagcgaacggatcctggtgtacgagtacatgcacaggaggagcttggacgcctacatattcggaacacctagagaacgcgcgctgctgaactggtgccggaggctgcagatcattcaggggatcgccgacggcgtgaagcacctccacgagggagaagggtcggccggcaacgtgatccaccgggatctgaagccggccaatgtgctgctggacggcggatggcaggccaaggtggccgacttcgggacagcaaaattgctcgtcgctggagctaccggaactcggacaaggataggcacaccaagtaaagaccatactgaactgcctcggccgttcgagatgctaggcagcccctgctcggagcttgccgagcccatggtgccgacggtcgtcggcaatgcagccttggctacgctcctggaggccgatctctccagaccgacggtgtacgagacaatcgattttagataa

SEQ ID NO: 23653 - DNA, 2361 bp, Zea mays
  Peptide Sequence Number=SeqID_65432
atgcaaggaggcccactgagcccggatgagtactgggtgatatcgccgccggcgctgctgcaccagccggcgtccaccatcgtcgtggccatcgaccgggaccggaacagccaactggccgtgaagtgggtggtggaccacctcctctccggcgcctctcatatcgtcctgctccacgtggccgtccattaccacacgacccgtacgtcgttcatctcccgtacccatttcgccagtgcagcagcagcagctgagctctggtttgcttggacatgcgcagatgggttcgccatggttgagaccacgcagggtgcgctggaggctgaaatgaaggagatctttgtcccctacagaggattcttcaaccggaatggggtaaatgtaataacaacaataatgcaaaaaacatccaaaacgtatcaagatgattatattgttggtgaaatcgtatcgacgctgctgctgctagcaggtggaagtatccgagattgcaccgtctcagctctcgcctcgggcaggaaattcaagaacgcggacgtgccgtcgaccctgatgaagtgcgctccagactactgcaacatctacgtcgtggccaagggcaagtccgtcaatgtcaggctcgccaagtgcggcgtcccgccgatgcacactggcgccgacatcgcttcggacaccgactccctccgggaatcggtgctctacatgcgacgcggctccagggggcacctgccgcgggtgacgcctgacgcctggcgctccattgacgggcgcacaccgccggagctatccacgcggccactgttccgcgagcgcttgctctcgtcatcggccaccaccaagaactttgtcgtcctgccaggaaaggacaacttcgagacgtcctcccgctcggcgagacacgactcgttaggcggcgacctcgacttcggcccgagcacgcgcttctcctacatagacttgggcgagaacctcgatatgtccaccactctccccgctctggaacccatgtcaccggccaccggcgcgcagcgggataccgaggccgagatgcggcggctccggttggagctcaagcagaccatggacatgtacaacgcggcgtgcaaggaggccatcaacgccaagcagcgggccaaggagatgcatatgatgaagctggaggaagcgcgtcggctggaggaggccaggaacgccgaggaggctgctctggcagtggccgagatggagaaggccaagtgccgcgcggccatggaggccgccgaggcggcgcagaggctggctgacctggaggcgcagcggcgccgcaacgccgaggtgcgcgcgcgccgggaggccgacgagaaggtgcgcgctctggatgccatttccaaccacgacttccggtaccgcaagtaccacatcgacgagatcgagatggccacggagcgcttctccgacgagctcaaaatcggcgagggcggctacggccccgtctaccgcgcctccctcgaccacacccccgtcgccatcaaggtgctccggcccgacgcgcaccaggggaggaagcagttcctgcaggaggtggaggtgctcagctgcatccgccaccccaacatggtgctcctcctcggcgcatgcccggagtacggctgtctcgtgtacgagtacatggaccacggcagcctcgaggaccggctgttccgtcggggcggcacgccgccgctcgcgtgggcccagcggttccggatcgcggcggagatcgcgacggcgctgctgttcctgcaccaaacgaagccggagccgctggtgcaccgggacctgaagccggccaacatcctgctggaccgcaactacgtgagcaagatcagcgacgtcgggctggcacgcctggtgccgccgtcggtggcggacaacgtgacgcagtaccggctgacggcgacggcgggcaccttctgctacatcgacccggagtaccagcagacgggcaagctgggcgtcaagtcggacatctactccctcggcgtgctcctgctgcaggtggtcaccgcgcggccacccatggggctcacgcatcacgtcgagaaggccatcgacgcgggcacctttgagcagatgctcgacatcaccgtcaaggactggcccgtcgaggaggcgctcggctacgccaagctcgcgctcaagtgcacggagatgcggcggagggaccggccggacctcgccacagtcatactgccggagctcaaccggttaaggaacctcggccacgcgtacgaggcacgcatgagcgccgccagggccaacggtggaagtggagagagtggtgcccagatcagcggggactcgacaacggtgggtggttcatgggaaacggcggacagctag

SEQ ID NO: 23654 - DNA, 1620 bp, Zea mays
  Peptide Sequence Number=SeqID_65433
atggggctctcgggcgcgacgatctcggcgccgctcggctgctgcgtgctgcggtgcggggcagttggcggaggtaaggccctgaaggcggacgcggagaggtggcggcgggcgggatggagccgacgcgttggcggaccgaaggtgaggtgcgtggcgaccgagaagcacgacgagacggcggcggtcggggcggcagtgggcgtggatttcgcggacgaggaggactaccgcaagggcggcggcggcgagctgctttacgtgcaaatgcagtcaaccaagcccatggaaagccagtccaagatcgcttccaagggcgagctatcgcccatatctgatgaaaatacagtgcttgatttggttatcattggttgtggtccagctggtctttctctagcttcagagtcagctaagaaaggtctcactgtaggtctcattgggcctgaccttccattcacaaataactatggtgtgtgggaggatgaatttaaagatctcggtctagagagctgtatcgagcacgtctggaaggatactattgtctacctagacaataacaagccgatactgattggccgttcttatggcagggtgcaccgtgacttgctccatgaggaactgctgaaaagatgctatgaagctggcgtgacatacctgaactccaaagtggacaagatcatagaatctccagatggacacagagtagtctgttgtgacaagggtcgcgagataatttgcaggcttgccattgttgcttcgggggcagcatctggtaggcttctagagtatgaggttgggggtccccgtgtttgcgtgcagactgcatacggagtagaagttgaggtggaaaataacccatatgatcctagcttaatggttttcatggactacagagattgtttcaaagaggaattctcacacactgaacaagaaaatcccactttcctgtatgctatgcccatgtcacccacacgagttttctttgaggaaacatgcttagcttctaaagatgctatgtcttttgatctacttaagaagaggctgatgtatcggttgaacgcgatgggaattcgtatcctgaaagtttatgaggaggaatggtcctacattcctgttggagggtccttaccaaacacagatcagaaaaaccttgcattcggtgctgcagcaagtatggtgcatcctgcaacagggtactcagtggtcagatctttgtctgaggctccaagatatgcttctgtgatatcggacatcttaggaaatcgagttcctgcagaatatatgctcggaaattcacaaaattacagtccatcaatgcttgcatggagaacactgtggcctcaagagaggaaacgccaacgatccttcttccttttcggattagcgttgataatccaactgaataatgaaggcatacaaacattcttcgaagcctttttcagggtgccgagatggatgtggcgaggatttcttggctcgaccctttcatccgtcgatctcatactattctcattctacatgtttgcgatagctccaaatcaattgcgaatgaaccttgtcaggcatctcctctctgacccaactggctcatccatgatcaagacctacctgaccttataa

SEQ ID NO: 23655 - DNA, 2079 bp, Zea mays
  Peptide Sequence Number=SeqID_65434
atggtctccgcccgcctcgtcgcgctggccgccttccacctcctcgtcctcttggccatgggcccgggcgaggcgcgcgcggcggacggcggcgaggtgcgcgcgctgctggcgctgggggccgcgctggacccgacgggccgcctgctcccgtcgtgggcgcccggccgcgacccctgcgcgccgccgccgtccgggggcttcgatggcgtcgcgtgcgacgacagcggcgccgtcgccaacgtctcgcttcaggggaaggggctcgccggcacgctcccgcccgccgtcgccgggctccgctccctcacgggcctctacctccactacaacgcgctccgcggtggcatcccgcgggagctggcggcgctcgccgcgctcaccgacctctacctcgatgtcaacaacttctcggggcccgtcccgccggagatcggcgccatggcatcactgcaagtggtgcagctctgctacaaccagctcactgggagcatccccacccagctgggcaacctcagcaggctcaccgtgctggccctgcagtccaaccgcctcaacggcgccatccccgccagcctcggcgacctgccgctgcttgcgcgcctggatctcagcttcaaccgcctcttcggctccatccccgtcaggctcgcgcagctgcccagccttgtcgcgctcgacgtcaggaacaactcactcactggcagcgtgcccgccgaactggccgccaagttgcaggccggcttccagtacgggaataacagcgacctgtgcggcgcggggctgcccgcgctccgtccgtgcaccccggcggacctcatcgacccggacaggccgcagcccttcagcgctggcatcgcgccgcaggtcaggccctccgacgggcgcgcgccatctaccagggcgctcgcggcagtggtcgtcgtcgccgtggccctcctcgcggccacgggggtcggccttctcgcgctctcatggcgtcggtggcgccgacagagggtcgcggggggatcgccgtcgacggtctccggcggccggtgcagcaccgaggctgcgccgtccgcggcgaaggcgtcgtcggctcgcaagagcgcgtcgtcggcgctggcgagcctcgagtactccaacgcctgggacccgctggccgacgcgcgcggcgggctgggcctcttctcgcaggacgcgctggcacagagcctccgcatcagcacggaggaggtggagtccgcgacgcgctacttctcggagctcaacctcctcgggaggcgcggcaagaaggccggcggcctggcgggcacgtacaggggcacgctccgcgacggcacctccgtggccgtgaagcggctgggcaagacgtgctgccgccaggaggaggccgacttcctgagcgggctgaggctgctcgcggagctccgccacgacaatgtggtcgcgctgagggggttctgctgctccagggcgcgcggggagtgcttcctcgtctacgacttcgtgcccaacggcagcctgtcgcagttcctcgacgtcgacgccgacaacgccggcggcggcagcggccgtgtcctccagtggtccacgaggatctccatcatcaagggcatcgccaaaggaattgagtatctgcacagcacaaggacgaacaagccggccctcgtccaccaaaacatctcagcggacaaggtcctgctggactacgcgtacaggcccctcatctccgggtgcggcctgcacaagctcctcgtggacgacctcgtcttctcgacgctcaaagccagcgccgccatggggtacctggcgccggagtacaccaccgtgggccgcttctcggagaagagcgacgtgtacgcgttcggggtcatcgtgttccaggtgctcaccggcaagagcaaggtgacgacgacgcatgcgcagctgcctgacaacgacgtcgatgagctcgtcgacggcaacctgcagggggataattactcggcggccgaggccgcccagctggcgaagatcggctcggcttgcaccagcgagaacccggaccagaggccgacgatggcggagctgctccaagaactgagcaccgtctga

SEQ ID NO: 23656 - DNA, 1260 bp, Zea mays
  Peptide Sequence Number=SeqID_65435
atggatgaagtgtggcgcggcctagacctgcagctgcaggcgggcgacatcgacggcctccaccctgtctctgaccccttctggccagcactagcagagtatgggtgctctgccagcttcctcgccgccgtcgacgacaccgcctgcttcggcatcgccaacatggacctcacggcggcctccgccgacgccgccgccggcaaatcggatggcgtggacacgagcgccttcttcgcccacaacgaccaccgcggcgccctgccgatgcgccaagacgagcagcagccagtgtactcgtcgtcgtcgctgtcctccacgcgctctctctccatcgacagcgggggctcctcctccacgttcttcccgctcgactacgacgctgtcgccgccttgcccgccgccaccttctcgccggcgcccctgcagcttcagcaggacccgttcgccggggacgaagaggccatgatgctggccatgctggccgtcatctcctccgccgcgtccacgtcgccctcctcctccgagtcctcgtcaccgctgcacagagccgccgccgccgtgcagccgcgcctacaccctcacggcggggacgacagcgccagccacgtgactgtcaggagtaccagcctcgccgtggcgccggagaggaccaccagcgccgccgacgcagcagggcagcaggacgacgcctgcaaggcggctgcggcggcggcggggagcaacaacagcagccaggtgtaccacatgttgtccgagaggaagaggcgggagaagctcaacggcagcttccacacgctcaggtcgctcctcccgccgtgtcccaagaaggacaagacgacggtgctgatgaacgcggcgagctatgtaatggcgctggaggcgcaggtatcggagttggaggacaagaacagcaagctgcagaggtacgtcccctgtggggacggcggcggcggcggcggcgccaccacggccacggcggcacaccggagagccagagttcatatctccagggcagcgtcggacgagcagcaggtgagcctgatggtgatggtaatggtggagtgcgacatcgtggacctggtgttgcacgtcctggagcgcctccgttggacgagcggggtcagcgtgctgtccgtcaacgccgacacctactcgccgcaggcgctgctcaaggcgctcgccaacatcaagctgcacatcatgggcgatccagtaagctcctggatgcctcagatcttctgccaaaggtttgctgtgtag

SEQ ID NO: 23657 - DNA, 3207 bp, Zea mays
  Peptide Sequence Number=SeqID_65436
atgcccggcataccgagggatgtcgccgagcactcgctggatattcgggccggagcccaacccgtcaggcagcctctacgccgattcgacgaggagaagcgcagagtgataggcgaggagatccacaagctaatggcagcagggttcatcaaagaggtattccatcccgaatggcttgccaaccctgtgcttgtgagaaagaaagggggggaatggcggatgtgtgtagactacactggtctcaacaaagcatgtccgaaggttccctaccctctgcctcgcatcgatcaaatcgtggattccactgctgggtgcgaaaccctgtccttcctcgatgcctactcagggtatcaccaaatccggatgaaagagtccgaccagctcgcgacttctttcatcacgcccttcggcatgtactgctatgtcaccatgccgttcggtctgaggaatgcgggtgcgacgtaccagcggtgcatgaaccatgtgttcggcgagcacatcggtcgcacagtcgtggcctacgtcgatgacatcgtagtcaagacaaggaaggcttccgacctcctctccgaccttgaagtgacattccgatgtctcaaggcgaaaggagtcaagctcaatcccgagaagtgtgtcttcggggtgccccggggcatgctcttggggttcatcgtctccgagcgaggcatcgaagctaacccggagaagatcgcagctatcaccagcatggggcccatcaaggacttaaaaggcgtacagagggtcatgggatgtctcgcggccctgagccgcttcatctcacgcctcggcgaaagaggtctgcctctgtaccgcctcttaaggaagaccgagtgtttcgcttggacccctgaggccgaggaagctctcgggaacctgaaggcgctccttacaaaggcgcctatcttggtgcccccagctgatggagaagccctcttggtctacgtcgccgcgaccactcaggtggttagcgccgcgattgtggtcgagaggcaagaagaagggcatgcattgcccgttcagaggccagtctacttcgtcagcgaggtactgtccgagaccaagatccgctacccacaagttcagaagctgctgtatgcagtgatcctgacgaggcgaaagttgcgacattacttcgagtctcatctggtaactgtggtgtcatccttccccctgggggagatcatccagtgccgagaggcctcgggcaggatcgcaaagtgggcggtggaagtcatgggcgaaacaatctcgttcgcccctcggaaggccatcaagtcccaggtgttggcggacttcgtagccgaatgggtcgacacccagctgccgacggctccgatccaaccggagctctggaccatgtttttcgacgggtcgctgatgaagacgggagccagcgcgggcctgctcttcatctcgcccctcgggaaacacctacgctacgtgctacgcctccatttcccggcgtccaacaatgcggctgagtatgaggctctggtcaacgggttgcggatcgccatcgagctaggggtaagacgcctcgacgcccgcggtgacacgcagctcgtcatcgaccaagtcatgaagaactcccactgccgcgacccgaagatggaagcctactgcgatgaggttcggcgcctggaagacaagttctacgggctcgagctcaaccacatcgctcggcgctacaacgagactgcggacgagctggctaaaatagcctcggggcgaacaacggttcccccggatgtcttctcccgggatctgcatcaaccctccgtcaagatcaacgacacgcccgagcccgaggcaccctcggtccagcccgaggtaccctcggctcagcccgaggcgtcctcggttcagcccgaggtaccctcggcccccgagagcgaggcactgcacatcgaggaggagcagagcggggccacgcctgatcgaaattggcagaccccgtacctgcaatatctccgccaaggagagctacccctcgaccaagccgaggctcggcgggtagcgcgacgcgccaagtcgttcgtcttgctgggcgatgaggaggagctctaccaccgcatcccctcgggcatcctccagcgatgcatctccatcgccgaaggtcaggaattcctgcaagaaatacactcgggggcttgcggccatcatgcagcgcctcgagcacttgtcgggaatgctttccggcaaggcttctactggccaacggcggtggctaacgccactagaattgtccgcacctgcgaagggtgccaattctatgcgaagcagacccacctgcccgctcaggctctgcagacgatacccatcacctggccctttgctgtatggggtctggacctcgtcggtcccttgcagaaggcgcccgggggctacacgcacctgctggtcgccatcgacaaattctacaagtggatcgaggtccgacccctgaacagcatcaggtccgagcaggcggtggcgttcttcaccaacatcattcatcgcttcggggtcccaaactccatcatcactgacaacggtacccagttcaccagcagaaaattcttggatttttgcgaggatcaccacatccgggtggattgggccgctgtggctcatcccatgtcgaatgggcaagtagagcgtgccaacggcatgattctacaagggctcaagcctcggatttacaacgacctcaacaagttcggcaagcgatggatgaaggaactcccctcggtgatctggagcctgaggacaacgccaagccgagccacgggtttcacgccgttcttcctggtctacggggccgaggccatcttgcccactgacctggaatacggctccccgaggacgagggcctacaacgatcaaagcaaccaagctagccgagaagaatcgctggaccagctggaagaggctcgggacagggccttactacactcggcgcggtaccagcagtccctgcgacgctaccacgcccgaggggtccggccccgagacctccaggtgggcaacctggtgcttcggctgcggcaagacgcccgagggaggcacaagctcacgcccccctgggaggggccattcgtcatcgccaaagtcctgaagcccggaacgtacaagctggccaacagtcaaggcgaggtctacggcaacgcttggaacatcaaacagctacgtcgcttctacccttaa

SEQ ID NO: 23658 - DNA, 1617 bp, Zea mays
  Peptide Sequence Number=SeqID_65437
atgggtgatgcgtgtttctcaacacagctaattgatggagatgggatcttcaacgtctccggattggagaacttcatgaaggatgtcagattgggtgaatgcgggctgtcctatgctgttgtatcaataatgggcccgcaaagtagtggtcacagactaccaaaggatgatacagcatttgagaagcaaagtgcattgtttgctttggccgtttcggacattgtgttgattaatatgtggtgtcatgacattggcagagaacaggctgcaaacaagcctcttttgaagactgttttccaggcaacatttgaggtcatgatgaggttgttcagtcctcgcaaaacaacattgttgtttgttatacgtgacaaatcaaggacacccctagaaaatcttgagccaattctaagggaagacattcagaagatatgggatgctgttccgaaaccccatgcccataaagaaactccaattagtgaatttttcgatgttcaagttgtcgcactgtcgagttatgaagaaaaagaagagttattcaaacagcaggtttctgatttaagagataggtttcagcattcaattgcccctggtggacttgctggggatcgtcgtggtgttgtcccagcttcaggtttctcatttagttcccagcaattttggaaagtcatcaaggagaacaaagatcttgatttgcctgctcataaagttatggtggctactgtacgttgtgaggaaattggtaatgagaaagttaccagctttatagctgatgaggaatggcaacaatttgaggaggctgtccaacatgactttgttactgggtttgggaagaagctcagcagccttctggatagatgtttatcagagtatgacatggaggctatttattttgatgaaggtgtcagaagctcgaaaagacaacaacttgagtctaaactgttacagcttgtcaatcctgcctatcaatctcttctaggtcacttacacactagaactttagaagcatttaaggagtactttggcaaggccctagaaaaggagggatttgctgttgcagcttgcaattgtactgaaactttcttggagaagtttgatagaggatctgaagatgctgctattcaacaagtgaattgggacacctcaaaagtgagggataagcttagacgtgacattgaggctcatgtagcttcagttcgggctgctaaattgtctgaactttgtgcgaaatatgaggcacaacttaccaaagctctggtggaaccagttgaatctcttctagattcagccagtgaagacacgtggccagctattagaaagcttcttcaacgcgagacaaaaactgctgttttaggtcttgaatctgctgtgtcagcttttgaactcgatgaagcaactgagaaagaactgcttgcgaagctggagaagcatggaaggagtgttgttgagtcaaaggcaaaagaagaagctggaagggttttgattcgcatgaaggacaggttctcaacattgttcagccgagatgctgactctatgcccagggtgtggacaggaaaggaggacataaaagctataactaaaaccgctcgctcagctgtactgtcaaatgctaatatttaa

SEQ ID NO: 23659 - DNA, 795 bp, Zea mays
  Peptide Sequence Number=SeqID_65438
atggcgtcatctcggcgccggagcgcgttcgacgactactatatcaaggattatggcgtcatctcggcgccggaggtgacgcagaggaggaccgacaacaatgaccactcgccatcgtcggggcgctacaccaagctatggttgcgacgaactactgaggggccaaacttaccagatttgggaaccggacgaagccacccgcggcgtacggcggatcggggccgaggtgaagactccggcgaggaattacttgcgccccggttgccgatcccgcacggagatgtcccaaaccccttcggcaagcccaagggaagcgccacgacgaaacccggtgcccagggagcacgaattcggtgtcacggctgcggcgcgtcgacgacgatttctgtcggtggtgaactggatgtggaggcgctagtctacgattgcgaagtccgcggagctgcggcatggaaggaggcaagggcgactggggttttatcgcccttcgtggtcaaacggttcacgcggtcacgccatgctgagaagctcggtggcagctgcgccaaccgtgcgcgagtgaaggtcgaggaaatagctgacagcaaggccccacccatcagtgagaatgagaggcaggtgtggtaccggctgacaggtaggtcccacgtgacagagactatatgcgcgcagaacggtggagtccaccagtcagtgaaagagcaaggcgcgcgacgcggtggtgtgactgacttgctaggcccacttgtcggcgcccgcagggtggaggagtgggctggcgcggctgaagagaac

SEQ ID NO: 23660 - DNA, 521 bp, Zea mays
  Peptide Sequence Number=SeqID_65439
gccacgatcccgactccgagggctcggtggataaaagtcgagcgcacgcgctttttctcccctatcccctctttagcccgatttctcctcgccaccagaacgccaccgcgagccgtgtgaggggattcagtccgccgtcgtcgaccggtcgatttctcagcgattggaccgaggtctggggtgcgggagctccacctggtccggtgggtcacggctggaaccttgcctgggcgcatcgcgcggcggacgaccttgaatttctcgtcgtcgctgcatcttcgccgtgcgccgcggaccgggcagagcgccactcgattcccggtaagaaccttaccaacgcgttcgcaatgttatcctattcatttagtagtgttctgagcgaaggtcgtgagctgggggcgctaatggcggaatgccggcgatggcgccgccgcgtagagtcgccccgacggccggagttgggtgatgcagctgagctaatgcgtggggccgttgatcttctaagcgacggtcgtgattag

SEQ ID NO: 23661 - DNA, 229 bp, Zea mays
  Peptide Sequence Number=SeqID_65440
atggaaggggagatgcatggcgtgggcgaggttcgtggggacaggggtgtccttggaatggcgcccatggaagagcgagatcgtagggcggtagcgagggaggccgcggaggattctggaatggcgcttttcatagccgtgaatggcgggcattgggagatggcggggcatggtcggatgcggagcgaggactacccggtaaatacacggatattcgggtcggatacgg

SEQ ID NO: 23662 - DNA, 555 bp, Zea mays
  Peptide Sequence Number=SeqID_65441
atggcgttcatggagcttgaatggagggagagtgaagaagaaacggaagcattaacgtgctggcgagcggtcgcggaacgtcggggtcgctgcagctgcgctgcgcgcatggctcctggcgcggcggtgcttggcttgctcggctctgtcgcggcggctcggatgcgtggctgcgcgggtctgggcgccgataaaggttgggtgcatgagctcggccgccgggttcctgagagcggtcgtcgaggtggtcgagttggggaagggagcgagggccggtcgggctggcggctccacgggcgcggcgcggcgaggtggctcggggtcgtgcaggcaagcgggcatcggggcttcgggtgtgggcacgagcgggtcgcggccggttgcctggcgctgctcgcggtgtcgcggctcctaggcggtgctcggcttcctgctcagtgtgcgcgcggtgaagcagataggcatggaggaggagagcgagagtggttggcggcggctgggttaggaggagccaggagcggcggctacagggagggagcagggcacgcggtttag

SEQ ID NO: 23663 - DNA, 357 bp, Zea mays
  Peptide Sequence Number=SeqID_65442
atgggcttctgggcgtgggcggggcttgggctttgctttggctctgtcgcggcggctcggatgcgcggctgcgcgggtttgggcgccggtaggggttggggcgcaggagctctgcccgctgggttcctgagcacggtcgtcgaggtggtcgagttggagaagggagcgaggggccccggtcaggctggcggctccacgggcgcggcgcgtcgaggtggctcgtggtcgtgcaggagagcgggcatcgggggcttcgggtgtgggctcgagcgggtcatgggccggttgcctggcgctgctcgcggtgtcgcgcctcctgggcggtcctcagcttcctgctcggtgtgcgcgcggtga

SEQ ID NO: 23664 - DNA, 213 bp, Zea mays
  Peptide Sequence Number=SeqID_65443
atgaggtcgggtgaggttgtgagtcctcccgaggccgaggctgaggccgaggcctggggtcgggcgaggcggagaccttctcccgaggccgaggatgaggccgaggcctggggtcgggcgagtagtcggaacggggtgaatagtgttgtttccctgtcagaacgatcagtaaaggggcgaagtgactgcggtcatttcgaccttgccaactga

SEQ ID NO: 23665 - DNA, 378 bp, Zea mays
  Peptide Sequence Number=SeqID_65444
atgacccacgcgcccgagccttttctggagcccacccacactcactcgcctctccccgctcagttgcgcattcagccgagcaccaccgccctctccctcgctctgcgagcgcgcccaggaagaccgccgtcgttcaccgtgtccgcgcacccgttccgccaccacagttgggcgctcgccgtgccctttgcctcggtaagtcccgcctcggtgtccgcaacttgggatgtgcctcaatttacactctccctctctggttcccactacctgtgctcaccggagcattcctcgcgtagccggagagccgccaccgtcgacccaagccttcgtcgtgtctctgtcgtcgttcaaggttcccagagtctcttctcaaggtaa

SEQ ID NO: 23666 - DNA, 309 bp, Zea mays
  Peptide Sequence Number=SeqID_65445
atggttgggggagaagggaagaggggtcggccaggacgctcgaccacacaggccagccatgcacagggtggggctgcgcccgaggggggctgggttgccggggagccgagcgctagacaagcgagcatggggcacatcggagcagcagagctgcggcgagaaacaaagagggaaggagatctcaccttcaatgaagcagactggttgacaacggcgcgcagcgatacggctagcccagcgaggatcaccagacggatgagggggttcccgatggcccgcgatttatacccaggcggtttgaatttttaa

SEQ ID NO: 23667 - DNA, 396 bp, Zea mays
  Peptide Sequence Number=SeqID_65446
atgccgcacgtttctccctgtgtcgacgcagtgctcgtgccctcctcctgtcattgcgttttccctaaacgcgtcttcaacctcgacgcagtatctctgtatcctggtcggcgttctttctcaactccatggccgcggtcatcccaagcatctccggccgccgtggcgttttctgccggtttgtcgtcggatgctgcgagctctggctggagctcgtctctgttcgtcccatcctggcgcgtcacccttcatcaccttgctggcccgctcttccttgccgtgatgcttctgttgggaatagtcccacatggtgtggtcacggtggatgagaagtcactcaacagtggcgcctggggagtttggcttgctccaccgcttgtgtgcctgaccggttag

SEQ ID NO: 23668 - DNA, 3447 bp, Zea mays
  Peptide Sequence Number=SeqID_65447
atggggcttcttttgattgaaaagaaagaatgggcagcaaaatttgaagaaatcagtgaagtgctgacacagaaagaggagatactgaagagggagcaggcggcacatctgaatgctatatcagagtatgaaaggcgggaggagaacatgcggaaagcactaggtgttgagaagcaatgtgtcgctgatcttgaaaaagccttgcgtgatatacgagcagagatagctgaggttaaatttacatctgagaaaaagataacagatgctcagtctcttgaggctagtttggaggaaaaatccttggagatcgagggaaaacttcatgctgcagatgccaaacttgcagaggcaaaccgcaagaagtctcaagctgaccgtgatttagaagaggcggaagctcgtcaacgtagactggagaaggagaaactgcggaaggcccgagaaaagcaacttaaggagcaggaggaatcactgcaggaatgggagaaaaagctgaaggaaagtcagaatagacttaatgagttgcagagatctataaatgagcgagaggagagagcaaataagaatgatcaacttttcaagataaaacaggacgaactggaggaggcacgaaggacagtggaggccgctaaagttactctgaaagtcaaagaggatgatattaacaaaagactaaatgaattacatttacaggaaaaggatgctgactcaaagcgcagtgcattggaagagcaggggaaaaaattggatgagagagaggcaaaggtcactaatagagaaaaggaggggctccagaagcttcttgaggatcatcaggtggagcttgaatccaaaagacgggattttgaattagaattagagagggaaaggaaatcttttgatcaaaatatgacacagaagcaagcggatttattgaaaagggagaaagatgttaaatctttggaggctaaactttctaaaagtgagcaggcattgaatgataagaagaaatcaatggaaaacttgcagaatgatcttgatgccaaatctaaggctctgaagagttgggatgaatcattgaaaaatgacgagaaaaggttactgaaagaaaagcagcaaatggatcatgaaagagaacaattggagacatacaaattggagcttgaaaagatcaaatcagcattagaagctgagaaggaaaaaatatcagaagagcagaataatctgaaactcacagcgcaagagaggcaggagcatagcttgttgatagcaaaacttaagaaggagattgaggaatacagaatgcgaagcaactccctatctgaggaaatggaggatttaaggaagcaacggcagaaatttgaagaagagtgggaacaactagacgaaaagagagccctccttgtagaggaggacaaaaggttgaacattgagaggatgaatttagaacggtggcgtgacaacgaagaaaaaaggttaaatgatatgaaactcaaaatggatgaagaatacaagcagcagctggagagtcttgagcgcaaggaaaaggctttgagtgatgatatgaagcacaagcaaatggaaaatgatgaatttctgaagggagaacgtgctgatgttcaacgtaaattgcaactcaaacggcatgaattggagatggagatggagcaaaaacaagccacgaaggagaaggaactggaagaaaaggaaaatgagttaaataagaaaatagattttgtggaaaataaactccgacatgcaattgagttgaatgagtccaagattgagaagttattattggagaaaagggaggtgcagatggaaagagaattactgctggaggaaagaaagaaaacggagactgacaaggcagatattagaagggatattgagagtctgcactcattgagcaagagtttgaaggaacgtcgagaggcatataacagggacaggagcagactcatcgaactatttgaaaagtacaaggcgtgcaaaaactgtgggatttctatttttgagggattggattctctgctgcttaaagacagtgctgaaattgagcatccaagtttggctgttgagggagatgatcatgccttgaccaccgatacatcaggtccagatacaggaacccttgttaattcaggtggtcgtttttctttgttacagaagtgttcaaggcttttcaagttctcccctagaaaaaagggtgagcagtcatcagaacaaccatcagagaggaatatatcttttggtgcaagactcgaggaagcaacacagagcgatggagattatgtgccaactcctgtctatgagatagcccacgattctttcaatgcagaggatgagctcccttctgacggtgaaaccagggagaatgaagagtctgaaaggcatgacatagctgataatgcccagatggagtcttctgttggtgtagcagataacagtatagatattctcggtactaagtcatttgatggtgctaacgacatggcagttgaagcaactattgtctctgttgatcaaaatggcgaggactctgtagttcctgctgaagcaggtgtagagcctgaaacatcagagcaaggtcggcgccagcaaaaccagagaggcagaagaaaaggtggtatgaaaagaacacggtctgttaatgctgtagttgaagatgctaagatgatacttggcgaggtttttgaggagaagactgatgatcagggagatacagtcaaggtgggtgctacacgaaagcggcggtttgctggagctacaataagtgaacaagatgaagaagggagcgaagcacattcagaaagtgtttcacttggagggcagcgccgtaagaggcggcaaactgctggggcagtgacagatgccccaggagaaagacgttacaatttgagacacagtagagctgcaaatgctggcgctgcaacagcccaagcagacaaaaaaaaatcttcaaaagcaagaaataaacatacagtagaagcttctgctgatgacaccgaaggaacatcaaaggttgttgaggaacctgcccctgagagcaagagggtatctgaatctgcagactacgatgcatcccagttgcatgagttttcccaggttgaagttggtgatgcccatgctgtagacggtgagggtgctggtgaggaagatggtgatattttggatggccaagatgcactgcctgatgtgccaatgacaccttctggaagcgagtttggagcggaacaggaagatgaggacgatgatgattcagagaggcgaaaccaatcaatcagcaagaagctatgtggacatagtttgatggcactcacagaagtagctgatgagatgtacaatggcgatgatggtatgccctgtaaggctgtaacaccagtagcttggtttgtaattgttcttttcccccgaataccacagtccacaggagcttcggagacttccatcgtcaagattccttag

SEQ ID NO: 23669 - DNA, 605 bp, Zea mays
  Peptide Sequence Number=SeqID_65448
gggagaagcggcggggcctgttggaggagccaacgtggcgcgcgtactgcaacggccgcaagtgcgggttcgcggtgcgccgggactgcggcgcggacgagtggcgggtgctgggcgcggtggagccggtgtccgtgggcgccggcgtgctcccggacgacgacgtcgccggctccgtctccggctccggcgcggcggagggcgacctgatgtacatgcgggcgaggttcgagcgcgtggtgggctccagggactcggaggcgttctacatgatgaaccccgacggcagcggcggcccggagctcagcatctacctcctgcgactcgtagtaaacaactcaccggccggagcgtccaacgccagcgccagcggcatgaagaagaaaaaggttcagagaatggtaggccggcaggaggcggcacgcatgattggcgtccgcaccttttggcgcgagttgtactgtgtcgacaagtatggcactcagtgccaccagtattcagaagaagaagaagaagaagaaaagaagctgctcctacaggcttgtgcacgagcgagtccttggattaaggaccgccttggaatgtgcagcaccgtcaccttctaa

SEQ ID NO: 23670 - DNA, 1165 bp, Zea mays
  Peptide Sequence Number=SeqID_65449
atgcggggactactgcgctcgccatctgggacggcaaaacgccgcacacctcacgtcgcctctgccacggccctctttcacagcgaagcaacgaggagctccagcctcgtctcgcgacacaccggcacggcccgtgcgggcagcggccgtgcttcatgccctctcccacctgcctgcggcctgccgccgcgcgccgcgcccgcttcactcttcagattcacccagccaggcaggaggcagccactgagccacacgctcgtgcacgcgtacgccgccatgctgcggtgcggtgcgggccccggccccggccccggccctgccctgccctcgcgcattcggatttcggaccgtgcggaccagtgcatttacgcagacaccggccgcacgccgggcgtccccagcggaccagcgcccgcccggccgctttgccaaaagcgctcgagtcgcgccgcgcatgcaccagcccccaacttgccccaagtgccaagccaagcccttaaaagcgtctcggcacttgggctccgcctccgccatcaaatactcccgccgcgcgcgcgcgcactcgccctcggaacctaccattactgccatcacgcgccgcgctcacgcacgctccggccgatcgagcgagcctatcccacacccaccatggcgagagccttccgcgctgcgtccccgctgcccctgccgagctcgaggagcgcggccgcggcggcgacgagcggcggcgggagagggaacttcccgtggctgacgaagaagcagggctcgtcgtcgtcgagcaagccatcgccgagcggcggcggccaggagagcaagggcgacgagcacgagggggcgagcgccgccgggtccgtcgagcagtctccctcgccgtctccgtcgccgtcgaggaggcgcgcggacgcgctggcgcggctgcgggcgctgttcctggcggcgatcacgcaccggcggcggcggcggcagctggggtcgtgcgtgacgggcaccatcttcgggcggcagactgctcgactgaccgtgcggctgtcgacccctcctgcttctccgccttggtcctcttggaaaatgaccgcctactccaccggcgcgctggtccgggagatgtcgtcgggcctcgtgcgcctcgcgctcgagtgcgagaagccgccgctcgccgccg

SEQ ID NO: 23671 - DNA, 513 bp, Zea mays
  Peptide Sequence Number=SeqID_65450
atgaggtcttcagaggtgtcgtcgcggctcgtgcaggagctcgtgctatacgccgccagcgtcgcgctcagctgcctcgtcctcttcgctggcctccgccacctcgaccccaactgtgccgcttcccagaaggcgcagcagaagaagaaggagatcaccaagcgcctcggccggcccctcgtctccaccacgccctatgaggacgtgattgcgtgcgacatcatcaaccccgacagcatggcgttgttcgcgtcggcggcgtcaaccggtcgcgggtcgcgggtggagaaggtgaggaggatcttcgagcgcttcgacaccaatggggacggcgggctggaccgcaacaagatggccaccctcatcgtcgccatcaaccctcggggcaagttcagcgaggaccagatcttcgccatcctcgacgaggtgttccgcacctacatcgagttcatcctcctcgacggctgcgcgggggcggctgcgcggggaaggaggtgggggcggctgcggtag

SEQ ID NO: 23672 - DNA, 745 bp, Zea mays
  Peptide Sequence Number=SeqID_65451
tctcatgcgcagggaggggctcaacgagagggagcacggcggccgagcaagagcatggcggacgacgaggcagcgaggattagcgagtgactccagcgtcaactggaggcgggattcaagctccgggttatccggcactccagcagccgtggcgccacctccacggccacccggcccaccgaccgtcacggggacggccggagcagcctcccctgctcctccccgacctccaggacagggagtttctcttcctccccgacctcctttgcgtccgtgtgtccttgctcctgctgctaccgacggccaactcgagtcgtccaccatttctatggatgggaactcgaatcgaatcgataataacaccagccaatcatttaccgatcctctgactttgacttccactgattgcgagaatgctttggatgcagatataggaggtacagctgcgacaccgtcgacagcgacagtgagtaccgcaagcacggagactatatgccacaagcgcggccgcaagagcacctccgatgtatggaatgacttcgagcaatttttcaaggacataaatggtaagaaggttaggtatgccgccaaatgcctttactgcaagtctcaacttactgcttcttcaactgctgatcgtgttaaaactgttattgctgattttggattgactgataagaaggggcacgacggggtcggctcggctgggctgctcgacgcggtgacccgacgcccacgcgcgtag

SEQ ID NO: 23673 - DNA, 843 bp, Zea mays
  Peptide Sequence Number=SeqID_65452
atgatgaccgcgtcaaaaaaggtacgccacgtcattcgattttgtatccttttccacttcctctttctctctcttaccatagggaccgggaaaggggatactccgaaaggaatccttctccgtgaaggaagtgggccccgagcccccctactgatcagaggttcgaaggctggcccctcggaagggttcaacagccgcctcagagcactcgggctccgcgcccactactggtcaaaggttcgaaggctggcccctcggaagggttcaacggccgccttaggccactcgggctccgcgcccactactgatcaggggttcgtaggctggcccccgaagggttctgatagccgcctcagagcacgcagagcgagggatgaccctgggtaccttcgatacataaccaaggctcgggctacgctcccgagagtgaggctgacagcagccaagtccggcctcgggcgccacaggaagctccgcctcgcccgaccccagggctcggactcagcctcggctccgaaagacgacaaactctgcctcgcccgaccccagggctcggactcagcctcggctccgaaagacgacaaactccgcctcgcccgacccagggctcagactcagcctcggctccgaaagacgacgaactccgcctcgctcgacccagggctcagactcagcctcgggcctcagacgacggtctccgcctcgcccgacccggggctcggactcgacctcgacctcggaagacagactcgacctcgacctcggaggagcctccgcctcgctcgacccagggctcgaaccgaccacgtcataggggggcatcattaccctacccctagctag

SEQ ID NO: 23674 - DNA, 390 bp, Zea mays
  Peptide Sequence Number=SeqID_65453
atgttgctgcgcgcggccccctgcggcctcggcggcgcgacccgcccctgctccctccccacggcagcgcggcctgcccctgccccttctcctgccccgcggcggcgcggccccgcccctgctccccacgcggtggtcccagccccctatgcgcggccccggctcccggcggcgcggcccggccccctgcgcgcggcgtctcggaccctggcggcgcagctccccggccccctcgcgggcggcccctccgccccgatgcgcggcccctgccctcggcagcgcggaccccggtgcggctcgcgtggcctcggcgcggccttgcgctcccccgtttaccccaacgcgttcccgcgttgtttaatgtgtgacgtcgcgcgtccagtcgcgtga

SEQ ID NO: 23675 - DNA, 444 bp, Zea mays
  Peptide Sequence Number=SeqID_65454
atgatggatgaggagaagaacttagccacagaaagacgactggagtctctgccttggtgtgattgtggagatcgtgttgtggtatgtgaggacaccgtgaagtacttcgtgtgtcccaacagtaattatccatacaatggacgtaagtgtattttcagagagtggttgtatgggctaaggtccaactggcctgagctagaggcaaaggagaagaaaaaaatgagtggggcagaagagtggaagtccaatcctatactctgtaaatgtggtattgaagctaagtatggactagttcgttttgagcttagtgtgggttatttttgtggatatggagatgaggaaatgcagctgggagagatacgccgagaaataagaggtgatgcatacaataaagtcaaagtgactcatgggatagaagatgcgttgtggatctcagcttgttga

SEQ ID NO: 23676 - DNA, 483 bp, Zea mays
  Peptide Sequence Number=SeqID_65455
atgtcgttgtgccgccctcgcgccgcccgcgccaacgaggtgctccctcgccggaccgcccaccgcctggcctgctcctcccgtgccccgctaggcctgctcgccggacagtcgtcgcctcccatgcaccgccatcgccgagtgtgcatgtcagccatcgtgttgttcgtttctctgcaggtttcagaaacctcattgtatagggaagatacgagaccatcaggctccacctccgccatcggtagcttgtctccactggaacctcagatgaacgtcctaataacattataccatggaggaaatgtggagaaaaatgtttatgggaatcttagttttgatggaatgaagaagtcgcctccatttcccttgcctcttgtgctctcttctcgtttgccgccttcaaactcctacgctcaacacgcatcgggctgccataacccagcgattccacgaacctacgcatctcctgtctgtgatctttaa

SEQ ID NO: 23677 - DNA, 138 bp, Zea mays
  Peptide Sequence Number=SeqID_65456
atggcgccccccggggccgctccgccgccggtagccgaggaagggcgaggctccgcccgctgccgcagcgccgacctgggagcaggaagttggcatgcactgcgggtcgcgacggcggaggccgtggagacagcgtga

SEQ ID NO: 23678 - DNA, 420 bp, Zea mays
  Peptide Sequence Number=SeqID_65457
atgaggataactctctgtgtagctagaaggataccccgtcttgttgtcaccagtggagcaaaaggtgatgggaagcttctactatggaatgctttaagaggtgaacttgcttctgatctaaattcgaacttgaggtctcaggatatgatctatccctcagttgatacaatggagttctatagtgagaatcatctggcatgtggaagtgattgtgactatggtggctcagctgtggtacaattatgggatattgattctccagagtcttatttatctttctctgcaagtgactctgttctggcgatgggactattggcttatttgacatccgtacttgttctgcaattagccacttgtcagtgggatctagttgtgaggtattgttgcatagaagttggaattgagagttgtatagtttga

SEQ ID NO: 23679 - DNA, 246 bp, Zea mays
  Peptide Sequence Number=SeqID_65458
atgggcgtcaaccggcgagggaagggagtgagggagagactacggcagtgcggcactgggcggccagcgacggacgatgtccaagaagccagctaccaggaggatggcaggcggctaaggcctagtggcggaggtgttgggataacaggcacagtcaaagaatcaaaggtgggcataggagggggttgtgctatacagggtgaagtgggggtgggtgactcaccgccttcgagggaaggcggttga

SEQ ID NO: 23680 - DNA, 1359 bp, Zea mays
  Peptide Sequence Number=SeqID_65459
atgccggagccccaggccatcctcccgctgcgcgctctcccgccggacgcgccgctgcccttccccgtccccgcgccgttccacccccaagcccccggccccggtgggaccgccccggccacgcccccgaacccgacccctccgcaaccgttaacccccgccgcgccgccttcctcctcttcgacgcggccgccgcacccatgggagatctccgcgcgagcatggctagagtccttccccgacggacggccgcccaccgagcccgaggtcgacgcctacatcgacgtgcaccgccccgagctcccttccctcccccgctcccagctacaccagcgcctcctcgccctccgcggcgaccaggttctggatgcagaccagagcgcattcccgtacaggttccagcgtactgatctatggaagcctgtgtaccagtggttggaatctcttgagctggactcactagttgctacacagcagatatcagactggcttacatcgaacccaaagataatggacagaatggttgagaaacattcaaaataccatttgattcactacacccagaggatgcacttgaagatgctaaaaaagaagggaaagttgccaaagactctgcaactttctgcggctagagccacagttcgaccaattgctgctccgttcactccagaagaaaacattgtgccgttacagaaaactataactccagtgacaggtttactttctatgtattacatattttacagaagtgctactagtgtcgttcatgaaaggagacaacagagcggtaccacaggcagattttccagtgccagttcagggagacaacagagctgtaccccaggcagatttcaaggtggaaatgcaactcttagggacaagaagacgtcattgtccaaaaagaaagaagctttgctcaaatacgaacttttgacagacttacagaaccaattgactgctgtgctgttaaagcaatgccgtactgttgccattaaagaaacagattcatcatatgtggaatctccaaatccagagactaacatgagtatacaagggaccactactgcaaatgcttcagccccttcagaggcaaagaatgtgtttatcaatgaacagtcagttccagcaggagccacagaaagtgaacctgggcataagaggaagagaaaccctatcatcgttacacctgcatggtgttatagtgaagcatcagcaggatggaattcacctgcattccagtttgaagggcctgctgtacatgttgttagaaaaagttacctatcttggtgtccaacatcatgtgcttatacgtcaagtgcaccttctgctcagcctcatggcagggaaaaggtcgcgtag

SEQ ID NO: 23681 - DNA, 348 bp, Zea mays
  Peptide Sequence Number=SeqID_65460
atggagattagatgccgcatgtcaggtggggccattaacagttttcttccatttttaacagacatgcgcgattgcttcaggtcatggcgtttctctaggagaaaatatcagggagaaagaaaggcttcaggacgactgttggggaagggtctcacggaggagcagtcccaccggaggagacacgaccggctcgccagctgcaggactggggagcaaccatggctgtgtggcacgtccagattccgccccagcagcaagcgcggccgcggcgaggtgtcaccagactcaccaccagagtggcgtgagcaaggccagcgccccggtgaagtgggacccagcgggcagtag

SEQ ID NO: 23682 - DNA, 345 bp, Zea mays
  Peptide Sequence Number=SeqID_65461
atgcagatgaggaaggaggccagtgaagcagttcatggaggacgcttagggaacgaagctgtcgctgtggatgaagaagatctgtcactaaagagactccaggagttccaaagcgaactgcaaagactgaaaagagaaaaggtatatgtgtgcctcgttcacttgatgaggaacatgaactgccatgaacatattatagcactcctggatctgatttcagaattctatttcctccagagtgatcgcctctgcaaagtggaagaatacaaagctctagttgacaattttgcaaaagtaatggtaatggagccttcaaatatacttgctaatgttcaccccaggtag

SEQ ID NO: 23683 - DNA, 339 bp, Zea mays
  Peptide Sequence Number=SeqID_65462
atggctggaaaagcacccggtgctgctgcgctgccagagtcctcatgtgcctacttgcttcaagaactaaagatgatatgggatgaagttgggcaagaccaaagtgaaagggaaaggatactgggagagctcgagcaagaatgccaggaagtttacagaagcaaagtaaatagcgccaacatgtctcggattcagctgcaccaagcgttagctgaatctgaggctgaatttaccaacctgctgctgtcccttggggaaagatcattcccagcacgagtaaacatcctgatcttgcgggtctcgccatatctagcaggaaatagtgggaaactaacctga

SEQ ID NO: 23684 - DNA, 216 bp, Zea mays
  Peptide Sequence Number=SeqID_65463
atgacggatatagaggatgtatatagaggacgttgctggagacagtctaagtccttgagagcaatacatgtgctccaacgagtactagtggagagtgttaactcttctatatccagcttctggccaccaaaagccgctgcggactaccaaacactcagcttttcagccagcttctataaaattcgtttgggtaaaaaacattcaaaatcaacataa

SEQ ID NO: 23685 - DNA, 342 bp, Zea mays
  Peptide Sequence Number=SeqID_65464
atggggcagggagttccagtgctgcccctgctgcccctcctgccattaaccctgctctggctgcggtcctccagactcttactcagtagcaggctcatatggcagcggttcaacagcagccagtcaccctggttttctcgtcgccggtcaccagctcccgctgttaccactgctgctgtggtggtgtttgcgacctcttcagctccggcagctcctgcagcacaacctccgtctgagtcagtaccagctccagcttctacgacagatcctggatccgagactgactctgaccctcagctgagacaaatgttgttgggggttgaaagttgggctcgtgcttaa

SEQ ID NO: 23686 - DNA, 348 bp, Zea mays
  Peptide Sequence Number=SeqID_65465
atggagattagatgccgcatgtcaggtggggccattaacagttttcttccatttttaacagacatgcgcgattgcttcaggtcatggcgtttctctaggagaaaatatcagggagaaagaaaggcttcaggacgactgttggggaagggtctcacggaggagcagtcccaccggaggagacacgaccggctcgccagctgcaggactggggagcaaccatggctgtgtggcacgcccagattccgccccagcagcaagcgcgaccgcggcgaggtgtcaccagactcaccaccagagtggcgtgagcaaggccagcgccccggtgaagtgggacccagcgggcagtag

SEQ ID NO: 23687 - DNA, 159 bp, Zea mays
  Peptide Sequence Number=SeqID_65466
atggagaggtggtcggagaagacaacgttggcagcgcacgaggtcgtgcatggggtagcagcgcctagagatggtggcgacgggtttccacacatgattggtattcctctaatgagaagtatctcaattggtatatcccaaaaccctcttgaaagctaa

SEQ ID NO: 23688 - DNA, 795 bp, Zea mays
  Peptide Sequence Number=SeqID_65467
atggcctctctcttcgccccggcacgccgcctgctcagccttggccgccgccgccaccgccgcggaggacagctccccgtgcccccctcgtctcgtagcaacagcgcggaggagcgaccaccgccggcgcggtcgctgagccttgattccacgctgtttccgctgggccacccgagcacactccttgtgccggagatcgaactgtgggcggcgcggcccagaaacctcctccgagccgttgagctccaacgcatcgtcaaggagctccgcaagcgccgccgccaccgccaggccctcgagcttgatgagatcacagaagctgaagacttgctgaaggagtgggagtctagccaaaactcattcgacttccgtgtcccaaacgtcctgctcacagggtaccgccagaaggccttgctggacaaggccgagatgctgctcgacggcttcttgaagaagggaaagacgcctccttcgaccagctgggggattgtggcaatcggctatgcggagaaaggtgatgtggcgaaagcttatgagatgaccaagaacgccctctctgtgcacgcccccaatactggctggatccctaggccttccatgcttgagatgatacttaagtacctcggagacgagggggaggtcaaggatgtcgaagctttcgttagtctgctgaaagctgctgtgccagtggactctgatatgaccgaggctttgtcgagggctcgggctcgtgcgagggaagaaaggaaggctgaagaggcaacggaagctcctcgcggggatgttattgcctga

SEQ ID NO: 23689 - DNA, 282 bp, Zea mays
  Peptide Sequence Number=SeqID_65468
atggccgccgggcgagtaaaatactggcaagctgtggagtgtgttcgtcgggaggccgcaccaggccatggcgacaaactgctgccctgtccaacaaagatggcgatagacaggcaggcgcggcccagcgacaaccttggatgtgtccaaggatggtgtgacgcctatggctcggccgaccgagtcctcgcctccggcctgatgaactccgttgtccacatcgcccactcgggcatagacccggatcactcgacgaagagaagcatgtgcctctcggactag

SEQ ID NO: 23690 - DNA, 927 bp, Zea mays
  Peptide Sequence Number=SeqID_65469
atgccggcgtcgctgcgcaccatccagaccaggaggaagcaggcggcggcgcagcgaggggtgccgcgggcgacggccacgagcgcggccgggtgcgccgtggcggctcttgtcaaggccatggaggccgtccagggcgcggcggctgggggcgccaccgaggccgcgcgcggcgccggggacgccgtggcgtgggtcttcagcaaggttcacctccagtcgccggacctcgccgtcgggctgccgctgctcgggatggtcgcctgctgcctcggcacgatcgtggaggcggcggaaatgggccgcgtggaggcgaagaagcccgaggcgtcgtcgggcgacgcagaggccgaccaccccgacggcaacggggacgcggccgccgaggaacccgaggacgacgacgacgacatgccggagctggtggaagcggacatcgagaaggagctgtggggccagatcggcatcttgcatggcggcggcctattcggggacagctcctacgtccatgaggaactcgacgaggaagagatcaaggagatcgacagcgcccgcgcgcggcgccggaaggcggcgtacgagagggccatcgcctcaggcggcgccaactcgctcatcatgtccaactacgcgcagctcctctacgagttcgacaaggacatcgacagggcggagatgtacttcaagcaggcggtggccgccgagccagcggacggggaagcgatgcggaggtacggcatgttcctctggcacgcccgcggcgacattggcggcgcggaggacatgtttaccggcgccattgacgaggagcccgagagcagccaccaccggagcagctacgcgtggttcctatggatgaccggcggcgtcgagacctgcctcatcgacaccaccggaaagcagaacaatggcaacgacgtcgaatga

SEQ ID NO: 23691 - DNA, 897 bp, Zea mays
  Peptide Sequence Number=SeqID_65470
atggacggcggcttctggtcgtccccggcgccgcacgccgagggcctgaaggaccgggcgttcctcctctcctcggccctagcgggcgccgggaacggcgccaacgccaaggccaacgggacgctcctgggcatggcgaccacgctcgccggcgtcatcctcgcgacccaccgaccgaccgccaacgcaacgcaagagactctctcaaacagaagggtgttgtgttgtgttggcgcgaacgaccacgtgctgggccgagagggtgatatagggcctgggatgagaggtccttgtatctctagttttcatgagggttccaagccatttctcagtgttgaatcgacaacactaaacgaaaggtggaatgtgcagttaacttcagctactggtgtagatggccatagttggatgtatcctattgcgtttggatttttttttcaatcggagactcttaacagttggacttggttcatgaagcagttgaagaaagccatgggggatcttccaatccttcttgtttgtttagatgctcaaaaagggttgttacatgcaatgagggatgtcttccctaatgttgagaaacgagagtgtttcgggcatttaatgagcaattatatcaagagccatgcaggtttagagcatatgtatctagcagccacgacatataggaaggaggtttatgaacaccacattagccaagtgcatagtgttgctaagattgctcagtacttggatcaacatcacaaattcttgtggtacatgagtggtttcaacccagctatcaaatgtgactatatcacaaacgacatggccaaggtcttcaacaattggataaagtaccacaagtaccatcctgtttgtgatttaacgaagaagattagggagatgataacataa

SEQ ID NO: 23692 - DNA, 789 bp, Zea mays
  Peptide Sequence Number=SeqID_65471
atgtggctgtgcaatacatcaagcgggtggcatgcaagcgacacggagggaatccggggctgttgtggtcttgctgttttgggggaggggaatggtgaaactcgacgacgacgcaaggcgaagaacggtgttgctgcagcgcgcgtcttgctgcgcagaaaagaccggccagaggtagaagaaaagaggggcgctggggaggggatggagcagcggcgctgcgtagggctgctgctgggcgccagccatggagcaaggaagtcgttggagattgttgccgctgcgagcagggaggaagaaggggcgctgtgcagggcgtcggctgcaccaagggagctcctacagcaagggacagagggaggagggcgccatctatggaagctcggctgccatgcagagaggagccaacctccatgcctgctaccgtggggagaagaagacagggagtcggctgaaattttctgggcgccatgggtggagcagacctgcgtaggggagggaaagggcgagcagcagcaggggagggacgttgtccttgggagggagctcggttgtgctgagggagatggtcggctgctgttgcgcgagggagaagaagctgggggcgtcgagcagctggaggagagagctcgcggcccatgggggagaaggaagtggcgccgtggagggaagtgcagggctgatgcacgaccggaggaggaagaagagtgtgggaagagaaggctgctggcggctaggggtggtagtgcaaaattgccaagtgcaaggggagagggatcctatttatag

SEQ ID NO: 23693 - DNA, 1647 bp, Zea mays
  Peptide Sequence Number=SeqID_65472
atgtacgcggcggacccggcggccaagtacaggggcgcgctggccgcgggcgtcccgggcgagctggcggggctccacgccgcgtggtcgcggtacgggcggctgccgtggcgggacctggtggcgccggcgatccgcctcgcgcgcgacggctacgaggtggtcccgtacctggcccgcgcgctgcaggagtgcgagggcgacgtgctcgcggaccccggcctgcgcgccgtgttcgcgccgggagggcgccgggtgctggcggcgggggagacgtgccgcaacccggcgctggcggccgcgctggagcgcgtggcggaggagggcgccgcggcgctctacggcggcgccgtcggggaggccctggtccgcgacgtcagggcggcgggcggggtcctgacggtggacgacctcagagggtacagggtggaggtgggcgccgccttgcgagccgacgccatggggttcaccttcctcggcatgccgccgccgtccagcggcaccctcgggatggcgctgatcctgaacatcctgcaagggtacagctcgctcgagttcttgaaggagctccttggcatccaccgcgtcatcgagtccatcaagcacatgctagccatccggatggacctcggcgaccccgacttcgtggacgtgaccagcgacgtcgccgagatgctgtccacgacattcgccgacaaagtccggcagaggatcgtggacaacacgacgttccctcccggctactacttccccaagtacgtatgcctaatttggcgttgcggattctatcggtcgcagccttgcagccagcgggcatcactcattcctgttctggttattggcggcaatggcatcaggtggagccagctggacgaccacggcaccagccacctgtgcgtggtggacggcgaccggaacgcggtggcgatgacgacgaccgtcaacgcatacttcggcgccaaggtgctgtctccgtcgacgggcatcgtgctgaacgacgagatggacgacttctccgtccccgcgaagcgcacgccggaccgcctcccgcccgcgccggccaacttcatagcgcccgggaagcggcccctgtcctccatgacgccgctgatcatactcaaggtatctctattctattcgccgcgtgccgtctggcttgcactgcatgagcccgacgttggtcgtctgagtctgacggcacgagcacgcacgtctcgctccgtaccgaagctgaaagccgttgagctgtgcgcgcaggacggtgagctcgccggcgtcctcggaggcagcgggggcacgaacatcatcgccacggtggtccaggtgttcgtgaaccacttcatcgtcggcatggaccctctggcggccgtccagcatcccagggtgtaccacaagctgatcccgaacgtcgtgacgtacgagaaccagacagtgggcgacggcgaggtgatcgcgctgggcggcgcggcgagggcgttcctggaggagaggggccaccggcttcgcagcacggactcgggcgccgtgtgccagttcatcgtgcacgagctggcggagccgccggccgcgcccggacacggcgtcttccgcgggaggctcaccgccgtgagcgaccccaggaagggcggcagccctgcggggctgtga

SEQ ID NO: 23694 - DNA, 1521 bp, Zea mays
  Peptide Sequence Number=SeqID_65473
atgggggagcccctcctcacctccctctccatggaaaacagcaacagccacccctgcacgctcctctccatggaccctgccggttcacgcccggcctctgctgagtcttcgggtggtggcggcgctgccaccaatggggttggcagtggtggtgatagggaactcttcatcgttccacggcgtgagtcggcgcacccaggcccgccagacatcaacctcccgctctctgcagatcccttaccgccacctccgtcgtggagcctcgacacgtttgacatacttgatgtcactcttggaacacacaattatgagtccgaggtcgcgcttacgcttccaaagtcgaccggcaacggcaatggcagtgctactgctactgtcagtgtcggcacgaggaagtgtgctaagagaggagacagcatctggggtgcatggttcttcttcaatcactacttcaagcctgctcttgtggagaagccaaaggggaaggtgacgcgagacgcgtctgggagcatctcgggcttcgacaagtccgatctacgccttgatgtcttcctggtgcagcatgacatggagaacatgtacatgtgggttttcaaggagcggcccgacaatgcccttgggaagatgcagctcaggagcttcatgaatgggcattccaagcacggggagccgtctttcccattcagtgccgataagggcttttccagactgaagaggtgggctgaactgacaggcagggaacttaatttctcaataccatctgaagccagcgacttcgaggcatggagaaatcttcccagcactgattttgaacttgacaggccacatccaccggcagcaaagagtgccactcatggatctcatagccataagaagggattgaatggttcaggtcttaacctttcaactccaccatcatcagacgatgggatggacctttcaccaaaatgtgccaaacgccgcaagggtttctttggccatggcgtagaggaggactgtgtgatggcaaacaattcttgttctgacagagagcaagaggtagaagctcacgcgggcgagccatcatggatgcacgagttcaccggtgttgccaagcacgcaagcgggcctgtcactgctgccaagacaatatacgaggacgaggaagggtacctaatcgtggtgagcatgcttttctccgacccgcatagcgtcaaggtgtcctggaggaacacgctcacgcatggcatcgtgaagataacgtgcgtgagcactgcccggatgccctacatcaagagacacgacaggacgttcaagctgacggacccttcccccgagcactgccctcccggcgagtttgtgagggagatacctctggccacaaggattccagaagacgcgaagatcgaggcgtattacgacgagacgggaactggactggaaatcatggtcccaaagcaccgggttggaccggaggagcatgaagttcgggtgtgcatgaggcccccgcatcttggcgacagcgatcttgtgctatcctag

SEQ ID NO: 23695 - DNA, 153 bp, Zea mays
  Peptide Sequence Number=SeqID_65474
atggcgcaccggctgttgtgggacgtgcaggcgaacgggtgggagcgatcaaatttcaccatcgtctgcgagtcatgcctcgacgacaaaccctacgtccggatgttctaccacaaagcatataatgaagtattctcaggtgacctgatgtaa

SEQ ID NO: 23696 - DNA, 411 bp, Zea mays
  Peptide Sequence Number=SeqID_65475
atggtgaaatttgatcgctcccacccgttcgcctgcacgtcccacaacagccggtgcgccatccccctcctcttctccagcgtcgagaagccggatggaaagaagcgaaggggctgcgggcaagcgagacgataccccgagcccgagtgtcgattcccgaccgaattatcgacgtgctaccaccacctcgctctccctcagttgagcagattaggccgcgggcatgaggcgagtatgctcgaggtggaggcgtcgaccacaggagggcaagggcgtcatggaggaggaatacttcatgaagaggagcgatcagtaggtgtcatcggtgtctgcctcttcctcgtcgctctccagctctgccatctcagccagcagcgatcagtaggtgtcatcggtgtcagcgatcagtag

SEQ ID NO: 23697 - DNA, 219 bp, Zea mays
  Peptide Sequence Number=SeqID_65476
atgacgcttgctgagtatgttgatgtgtactcacccttgctctacacacctaacccccctaggttgttcgcgttgcaaccactcctaagagttctttctaccctagttcaagcacttgacctgcacaaggagtcttttatcaacccgtttagttcactggaatgctacattctgcccgaggcaaagcttacccatgatgaggtaatcaagaaatggtaa

SEQ ID NO: 23698 - DNA, 309 bp, Zea mays
  Peptide Sequence Number=SeqID_65477
atggtgaagttccagtggggtggtcggcgacgtcggggaggtcacgagggtcacgtcgatggccgactcgttgcccgtgcgggcgagctcgtcggcagcgagaagctcggcctgaacacggcggtagactttgatccagtgagtcagggagcttcacggaagggccttggctcaagcttggaaaggcatcacagcctctcagggaagttgtccaaggtctcaggcgaggttggggttctacaggaatggctggccacggtggccggttatttagtgtactacaactttgttaatgggtccaaatcatga

SEQ ID NO: 23699 - DNA, 429 bp, Zea mays
  Peptide Sequence Number=SeqID_65478
atgttgagcaaaggtatatcgagatggatcaagtatgaaggaactcaattaagtcaagtccaaacagagcaaaaggagttaagctggaacagccagacttgcaccagcatgcgggtgcaccggacactgtccggtgcccaggctcgtgcagccacaaactcgctcctcttgggaatccccaaggacgctgcgactaaaattcaccggactagcgcgcaatcaacgggcgacacgtggcaagagccaacggtcaccaggccgcaccggactgtccggtgtgccaaggggatcgtggctacaacggtcggcttcgctaaacaaggaaataaatcgtgcactgttcatgtccggtggtgcaccggactatccggtgtgcccacggatagaaggcaagaattgcgtaccaaatggagctccaatagctcctag

SEQ ID NO: 23700 - DNA, 336 bp, Zea mays
  Peptide Sequence Number=SeqID_65479
atggtctggacctatggctcggatcgcgctgccatgaccagattaagaggggcgagagtacttatctcatgcgaggttatcctaacctatccgagagccgacccttgcggttacacgggcgagtgttggttaggggttcgggtatatagtgcatggcgcatgtgggcccagagtggtcacatgacatatgactacactagacacgcagacgtggccaagaggggagttatctacacattggtgaccaaccgcagacgatccggtgacctaccacagactgtctgctgccaagcagagtggttccccaaggtcttgttccctacgagccagatctag

SEQ ID NO: 23701 - DNA, 228 bp, Zea mays
  Peptide Sequence Number=SeqID_65480
atgggcgataggaatggaagatgggaattgaaatggcgtgcggactatggagtttgcacattgggaatgggcgatgggactggaggtgaagtttgcacgatgggaatgggcatcgggaatggaggccgagatgttgggcctgaacagctgaagaagggcgtgcatcagggaatggtttccacgatgttgaaacagtgttcactctccactattatgttgaattgttaa

SEQ ID NO: 23702 - DNA, 261 bp, Zea mays
  Peptide Sequence Number=SeqID_65481
atgccgcacggaaacaaagcacattcatcactgtttttccccagtcattgttgctccaaggataacagtcaggaaaccttccattacgaccttatttctgcagaaatacaaatggatacaccatctggtgtgaagggttccattctttcctgcatcaagttttctgtgcaggttaaagggccatacttcatagctattttcccctcaatgtttcaagtgaaagggcctaagagtattggagcactctatgttacctgctag

SEQ ID NO: 23703 - DNA, 534 bp, Zea mays
  Peptide Sequence Number=SeqID_65482
atgagggggagtgataggcccgtcctctgtgttccctccagcgggaggctgctaaggcgaccccgtcggcgcacccatagggacgatgatgacttccacgggaagaggtacgacttccccctccacgacctctgcctcttccatcttggcagggacgggagcaggctcggcaaatacccacaccccggacaaggacgctgccagcccctacaagggaggggctgcgccgtcagaaggatccatggaggctggcacggaactgaacctggcctgggggctgaagccctcgtggacctccatcccctcgtcgtcatcattatcgtcatcctcctccacctcagttttgggagaggactcgagcgggagcccctccctcgcctgcactctgcaacacttctccatcacatcatgggccaccatcttcttgcgggctcgcctcttcgcctcatccttcttctgcttctgctctttggctgccagccagtgcacctcattggccgccgcatcctctgggaccgggggtcgggcggttag

SEQ ID NO: 23704 - DNA, 609 bp, Zea mays
  Peptide Sequence Number=SeqID_65483
atgaatctacgtagaatcccggggccgaggggttgtccatacgcccgagcccccgagggagaggccgcccatgctatagtggttgtaaacagcgtcgggaagtcttcccgaggcgctggccgagccatgcgctacagtcgggcagagtggctcacgccatgcccccgccccgccccgcctgacatcatcagcgtctcccgctatccccgctctgtaccgctcgctactgcaatcccagcccggccatcccacgcccgcgccggcgatagctatcctcctcgcctcgcgtccaccacctcctcctcgccccgcatgctgatatctggggagatctctccccacatgtggcggaaggtccgccacctcacctccctcccgcacccgcgccgtcaatggaaggtccgccagatctcctcgtccttcatgcgccgattcgctgaggtctacgccaccatgggggaggacgacaagggcgtcgtcgagcgttgtgccaggaagcagctcctcaccaccggcttccaccggcagctcctcaccaccggcaggaagcagctcgtggagatgctcaagcggtcaccctacttcctctccacctgcgtccacctctag

SEQ ID NO: 23705 - DNA, 426 bp, Zea mays
  Peptide Sequence Number=SeqID_65484
atgccccagaccctcgtcagcaacgccttcaggcaagggttctactggccgactgcagtagcgaatgctatcaggatcatgcagtcctgccgaggctaccagttctacacaaagcagacgcacatgctagctcaggcccttcagatgattccaataacgtggccatttgtggtgtggggattggatcacatcggtcctctacacaaggcacctggggacttcacgcacctgatggtcgccatcgacaaattctccaagtcgatcgagcaaaatatcaacaacccctacgacgctaccacgaacggtgcgtctgaccccgggggttctaggaaggtgacctggtgcttcggctatgacaagacaaccaaggatgccacaagctcattcccccctgggaaggacccttcatcattgccatggtgctga

SEQ ID NO: 23706 - DNA, 645 bp, Zea mays
  Peptide Sequence Number=SeqID_65485
atgccgagcataccattgggagtcgccgagcactccttggacttccgagccaactccagaccggtgaggcaacccctgcgccgattcgacaaggataaatgcagggtcattggggaagaggtccacaagctattggcggatgggttcatcaagaaacgcaacacaggagccgcgtatcaacattgcatgaaccacgtgttcggcgaccacataggctccacgattgaggcctatgtcgatgatatagtggttaaaactaggaaggtcgacaaccttgtcgccgacctagagactgcatttgcttgtctacgagccaagaacgttcgacttaaccctgaaaaggttcataatctcgaagccaacccggagaaggtctcggccattactaacatggggcccatcaaagatgtcaagggggttcagcgggtcatgggatgcctcgtggccctgagccgcttcatctcgcgactcggcgagaagggcctgcccctatatcatctcttgaggaagaccgagcgcttcgcttggacacccaaagtcgaagaggcccttaagaacctcaagaagcttctctctgacgctcccatcctaatatccccggatgaaggggagccccttttactctacgtagccgcaaccacctag

SEQ ID NO: 23707 - DNA, 183 bp, Zea mays
  Peptide Sequence Number=SeqID_65486
ggcttcgacaccatttgggtgttctgcgtgtcacgtgatttggcggaatcacgggcgattctggtccgaattgctcgtcagaggtgccgcgccgcctcggatccacgcttcaccgtgaacaaggcatccacgccaccgccactgaagagccagtggctgaggatcccggtgttcaacagatag

SEQ ID NO: 23708 - DNA, 845 bp, Zea mays
  Peptide Sequence Number=SeqID_65487
gataccaaatgcatgatcgatcccacaagccgcagccggcggaggccggcaacggcgggccggctggcgagggcggcggcgggaacgtggatcgggtgctcttcaagaacctcgtcgagatggtgccgctcgtcgagtcgctcatggaccggagggtcaacccggcatactcgcgtcgcgcttcgctggtctacacgccggcgccgcccaagaaggcaagcgatttgaaaagtgtcaaattgccacagagcgtatcagccaaaaagcggagagaccctggtgatatagccaagaagagcaccccagattctaacggcgacaacggttcagttgtgccattatctctgtcaggtgctgaaaatatgcccaaggatgaggttgctgtgctaagcgagcagatcaatgacctacaaaagaagctgcttgagaaggaggaggcactgaggtctgcggagagctctgtgactgagatgaatgcagcatatgcaactatcgatgaactcagacgcctggtggctgacaaagaagctttgatcagatctaccaattctcagttgcatgatgcaaagattatgcttgcagacaagcaagcgtctttagagaaacttgaatgggaggtgaagatgtcaaataaaaaggtcgaagatcttcaaggagatatgtcgaatatgggattcgagataagctcattgatgagtgaaattgacaagattgaggtcgacaagctagacaaggaaagggttacatatgctgaagctctggcggcagcgagagagaaccctgacgaggagcacttgaatatagctgcggaggcgaggtcaaggctgcaggtccttgtactttag

SEQ ID NO: 23709 - DNA, 363 bp, Zea mays
  Peptide Sequence Number=SeqID_65488
atgaacgtatgtgagctcactcatgttgtctcacacccctcccacaggtcaagaacaggtgtgacagttgacatccccgtacaccgtcgtgggaacctgttggctgtggtctgggatttcccaaagacatcacgtgactacccatgggcgttccaggagcagattgccgatcaatctgcggcaatttctagccgtagcatcgtctccgcctcggttctgcacctcttcatagattgcgccccttctgcactattacctacacgctgggaatcaccatatgacgaacaagtgactgaggacccaagtactcagcaggtggaaaatactgagcaggagctcattgagggcaagttctacccttga

SEQ ID NO: 23710 - DNA, 786 bp, Zea mays
  Peptide Sequence Number=SeqID_65489
atggcgggcggaggagagctcgccagagctaagggaggggtgtctggccagcgagggatccggttcagcgaggagtacttcggcgatgcgtgggcggcgcagacctggtgggcagacaactacgactgcatagtagagctctacagtatcgtcgtccagcccgggctggcgcgcggggtggcggaggggcgcgcgcggcgagtcgctagtggcggcagaggagccgcggggtggcgagggcgggccgcgctgggtggcacaactcggcccgcggcggactgcggtacgttccggtggcgagcgctccgacaaggaattcccggaagagccaccgattccgatgcccacaacatccacccccgcactctaggtacaccggcgaagggtttcgaccgcgacagaggccccgagcggcgatgtgctcaagatgacagcggcggtgcgagtctcacactcccttacggttttctacgcaggcatttttttggcgacgggaggaagaagggacgcaaacagagaagagcaggagaggtcacgggtctgattttaaagccggggcgagacggggtcatagagagcggagatctaggaagcgcgattcgcgccgagctccccgtgctgaccccagaggaggtggtcgaattggttggggatgaacctgacgcagcgaccccacgtggaagcgaaagcatgcgcgcagtatcgccagcaatgaccaacagatgggccctggtgtgcagtgaggcgcggacgtgggcaagttgggctgcgctggggaatcactag

SEQ ID NO: 23711 - DNA, 342 bp, Zea mays
  Peptide Sequence Number=SeqID_65490
atggagttattccacaccctctcatcgaaaagatcgggcaatcacccaacgggaagggaagattatcaagcaatagcaaacagaaatgaatcctccagatcctccaccggtgggaatcgatcaagtggttgccgcccaaatgatggtaatacaacaaatggcaaacatagtaccgagatgcaaaatcagataagacaagaacaccaggaaatacgtcagggccggctggagatacgtcaagaaataaggcaagcacggttggaaagacgacaacaacaacgcccactgcctccaccaccaccagcagctccaccaagctatatatatatattactattttag

SEQ ID NO: 23712 - DNA, 207 bp, Zea mays
  Peptide Sequence Number=SeqID_65491
atggcgcaagagtcaactggggaaacaccacctagattagatcgaactcctcgctttgaggctcctcctgaaccacttgatcttcacctgaggggggttatgggaaaagcacttgcaagaatcccccgtctgaccgccatcgcagcaaaatcaacccgagaacctccttgcatgcaatcccctactgcccttacccctttcgggtaa

SEQ ID NO: 23713 - DNA, 3207 bp, Zea mays
  Peptide Sequence Number=SeqID_65492
atgcccgtcataccgagggatgtcgccgagcactcgctggatattcggaccggagcccgacccgtcaggcagcctctgcgccgattcgacgaggagaagcgcagagtgattggcgaagagatccacaagctaatagcagcagggttcatcaaagaggtattccatcccgaatggcttgccaaccctgtgcttgtgaggaagaaaggggggaaatggcggatgtgtgtagactacactggtctcaacaaagcatgtccgaaggttccctaccctctgcctcgcatcgatcagatcgtggattccaccgctgggtgcgaaaccctgtccttcttcgatgcctactcagggtatcaccagatccggatgaaagagtccgaccagctcgcgacttctttcatcacgccgttcgacatgtactgctatgtcaccatgccgttcggtttgaggaatgcgggcgcgacgtaccagcggtgcatgaaccatgtgttcggcgaacacatcggtcgcacagtcgaggcctacgtcgatgacatcgtagtcaagacaaggaaggcttccgacctcctctccgaccttgaagtgacattccgatgtctcaaggcgaaaggagtcaagctcaatcctgagaagtgtgtcttcggggtgccccgaggcatgctcctggggttcatcgtctccgagcgaggcatcgaggccaacccggagaagatcgcggccatcaccagcatgggacccatcaaggacttaaaaggcgtacagagggtcatgggatgcctcgcggccctgagccgcttcatctcacgcctcggcgaaagaggtctgcctctgtaccgcctcttaaggaaggccgagtgtttcgcttggacccctgaggccgaggaagccctcgggaacctgaaggcgctccttacaaaggcgcctgtcttggtgcccccggcggatggagaagccctcttggtctacgtcgccgcgaccactcaggtggttagcgccgcgattgtggtcgagaggcaagaggaagggcatgcattgcccattcagaggccagtctacttcgtcagcgaggtactgtccgaaaccaagatccgctacccacaagttcagaagttgctgtatgctgtgatcctgacgaggcggaagttacgacactacttcgagtctcatccggtaactgtggtgtcatccttccccctgggggagatcatccagtgccgagaggcctcgggcaggatcgcaaagtgggcggtggaaatcatgggcgaaacaatctcgttcgcccctcggaaggccatcaagtcccaggtgttggcggacttcgtggccgaatgggtcgacacccagttgccgacggctccgatccaaccggagctctggaccatgtttttcgacggatcgctgatgaagacaggagccggcgcgggccttctcttcatctcgccccttggaaagcacctgcgctacgtgctgcgcctccattttccggcgtccaacaatgtggccgagtacgaagctgtggtcaacgggttgcggatcgccatcgagctaggggtcagacgcctcgacgcccatggtgattcgcagctcgtcatcgaccaagtcatgaagaactcccactgccgcgacccgaagatggaggcctactgcgatgaggttcggcgcctggaggacaagttcttcgggctcgagctcaaccacatcgctcggcgcttcaacgagactgcagacgagctggctaaaatagcctcggggcgaacgacggtcctcccagacgtcttctcccgggatctgcatcgaccctctgtcaagatcgacgacgcgcccgagcccgaggcaccctcggcacagcccgaggcaccctcggcacagcccgaggcaccctcggctcagcccgaggtaccctcagcccccgagggtgaggcactggacgtcgaggaagagcagagcggggccacgcctgatcgagattggcaggccccgtacctgcaatatctccgccagggagagctacccctcgaccaagtcgaggctcggcgggtagcgcgacgcgctaagtcgttcgtcttgctgggcgatggagaggagctctaccatcgcagcccctcgggcatcctccagcgatgcatctccatcgccgaaggtcgggaactactgcaagaaatacactcgggggcttgcggccatcatgcagcgcctcgagcccttgtcgggaatgctttccggcaaggcttctactggccaacggcggtggctgacgccactagaattgtccgcacctgcgaaaggtgccaattctatgcgaagcagacccacctgcccgctcaggctctgcagacgatacccatcacctggcccttcgctgtatggggtctggacctcgtcggtccattgcagaaggcgcccgggggctacacgcacctactggtcgccatcgacaaattctccaagtggatcgaggtccgacccctgaacagcctcaggtccgagcaggcggtggcgttcttcaccaacatcatccatcgcttcggggtcccaaactccatcatcaccgacaacggtacccagttcaccggcaaaaaattcttggatttttgcgaggatcaccatatccgggtggactgggccgccgtggctcatcccatgtcgaatgggcaagtagagcgtgccaacggcatgattctacaagggctcaagcctcggatttacaacgacctcaacaagttcggcaagcgatggatgaaggaactcccctcggtggtctggagcctaaggacgacgccgagtcgtgccacgggtttcacgccgtttttcctggtctacggggccgaagctatcttgcccactgacctggaatacggctccccgaggacgagggcctacaccgaccaaagcaaccaagctagccgagaagactcgctggaccagctggagaaggctcgggacagggccttactacactcggcgcggtaccagcagtccctgcgacgctaccacgcccgaggggtccggtcccgagacctccaggtgggcgatctggtgcttcggctgcgacaagacacccagggaaggcacaaactcacgcccccctgggaggggccattcgtcatcgccaaagttctgaagcccggaacatacaagctggccaacaatcaaggcgagatctacggcaacgcttggaacatcaaacagctacgtcgcttctacccttaa

SEQ ID NO: 23714 - DNA, 420 bp, Zea mays
  Peptide Sequence Number=SeqID_65493
atggcgtcaaccacaccctccccgatcgatcccaacctcatagcagcgatcggcgcggagttcgacaagcggatctcatcgctggacaccaaatgggagcaacgcttctctgcgctggagaagtccgtcgcgggctgcaacgctgggttcacaacgttcaccgaggaaatctccagcgacttcaccaaccaaatcgttctctccgagtcaacaacttccgcatccatcacccgcacagagcagaccatctacgagcacatcgaccgcgtggaagggtctctagccacatggctcggtggcctggaatccgccatgcacgcgttcgacgattggcgcccccggatcgagtcctccgtgaccgatctggaacactccgtcggcgccgtccgcgcggatctctcgcgcctctccatccgctag

SEQ ID NO: 23715 - DNA, 972 bp, Zea mays
  Peptide Sequence Number=SeqID_65494
atgtactcggaccagatctccaccgggcgcaagcgctccatccacgaccgccttgacggcgacctccccgccggcacgggcgccggcggccgtgttcgtcacacggtgtccaagaggcaacggcagatagatgaaaaatggaagcatgatctgtatcgggaagacgatgaaccagcttcaaaatcaatagatccgaaggatttgcgattgaagcttcagaggcgaagttcacaacaaagctttaccagcacaaggagttctggtgtgcgtgatttacgtgagaagctatctggtataatgcacccacagccatcaaatgctgatccaaagcccaagccaaagccagtatcagaggttgttaacatctcaaggcgtcaaactgctgatgaaatgcctgcacgtcaaagcaagagagcaccaaaacagacttcattgaagaagacatctcagccaaaggttgaaagtccactcagcagtttcctgagttcccttgggcttgagaagtactcgattaccttccaggcagaggaggttgacatggcagccctaaggcacatgacggagagtgatctgaaagctttgggcattccaatggaaaacaacgtcgcctgccctgctccgactgctgtgccacccgccaggtttgaggctgacagcagccgagtccagcctcaggcaccacaggaagctccgcctcgcccgacccccaggctcggcccccgcctcggcctcggaaggtggtctccacctcgcccgaccccagggctcaacctcgacctcggcctcggaagatggacttcgcctcgcccgaccctagggctcaacctcgacctcggcctcggaaggtggtctccacctcgcccgaccccagggctcggcctcaacctcgacctcggaggagtctccgcctcgcccgaccttgggctcggctcgaccacgccacaggggggaccatcattaccctacccctag

SEQ ID NO: 23716 - DNA, 537 bp, Zea mays
  Peptide Sequence Number=SeqID_65495
atgaacgtcgacgaggggtttcgacgggcaggtaacgacgaggtttggacggggttcggggacgtctccggcgagcaggggaacgggtgcgatcgtcggtggacagcgagagaagaacgtgggggagtgaagggggaggagaaatggctcattgaaactccatttacgcacggacggcgcgggtgctacggatcttggcgcttggacgtggtcgggctcggcgctgtctggtgcgcgggtcggtgcaggggcgtccgcggggccgtgcggcgcgcgcgggtcgctggcgcgggcagaggcgctcggcgcctggcgcggctgggcttggggctggggcggtcgacgcggtcggccggagcgtcggtccagcgcctgggcacctggcgtgtcgttgggcggctccacgggcgcgaacgtagcgcgggcgtcgcgacagggagagaagcaaggggaaggagaggaatggaagggagagagagatgccggtgggagaagcacagggcgcggcggctggaagacagggagcacgcgcgttag

SEQ ID NO: 23717 - DNA, 1347 bp, Zea mays
  Peptide Sequence Number=SeqID_65496
atgcagtttatcagccacggcccacgggcccaacctgaccgacatgggccgagctggagagggtgggcggcggcgcccgaacaggtcagatcaatagtgcagtttttcagcaacggaaagaatcagcccgccggttgccaacaagtccccctgggctgtgggtctctgacaaatgacaatcctttccccatcactcttgcagcgtccgcgtgtcaaattcctattggagccggatcctcaagttcccagcccactacgaaattgtacccatccccaaccagatcccccgcttctcccgcaaccgcgtcggcgatggcatccgcggcggcggcgaccggcgacggcgagaaggcgcacgcgcacctagggcagcctctcctcgtgccgccgcagccccctcaacaaccctactacgcctacccggccgcctcctacgtgcagcccgccccaccgccgccgccggccccgacgctcgtcttcgtgccgtccccctgctccccgatgctcgtgcgcctccgccgcctgcgcccgcgccgcgcgtcctgcctccgccgattctgcgcgcgcgcgctcccgctcctcctcttcctcgcgctcctcgcggggctcgccttcctcctctacccgtccgccccggccgcccgcgtcgccgacctccgtgtcgacagcttccgcgcgcagccgcccgtcctcggcctcggcctcgcgctgcggctccgcgtcagcaaccccggcttcgtcctcccgctccgctaccgcgcggtctccgccgccgtctcctaccgcggacacctgctcggggccgccaaagcgtggcccgggtccggcgagcttgcggccaggaatgaggtctatgcggatgctgaggtgtgggtggacgccgggaaggtgctggatgacgtgatcgagctcatcggggacgtggccgcggggtcagtgccgcttgagatcgtatctgaggtagtcggctcgatcaaggtgttccgtttccacattcctgtgaaggataatgcaaaagtacttgtccatgtagatccatttgaaaaaattgcgagaattgctataacacaaagaacatattccaaagaattggaatgtattgagccattaaaatgcaaaaacacacctcaatttatatcttcacgttatttcttcatgcaattcctcgtgtgggtcaaaatcaaacctcttaacactcctgcttatccaggggctcatatcgtgctcggatcacgttacgaatcttgctgctttcttctgcagcgcgagtgtgggaggctcccgattcccgaggatattttaaacctgcagagcctgctcgatggaactgaagctggaataatgtag

SEQ ID NO: 23718 - DNA, 1809 bp, Zea mays
  Peptide Sequence Number=SeqID_65497
atgagggagcattctataggagttgaggacatgaaattgaggaagcctttcagcagcagtgcttctactagtagaagcgcaaccgtgccaagagtaaccaggacccctcttttttccaagaaccagtacaaaccgcctcttcggcctcttaggagtagttcagtagtaaggcgatcgttgcagcaggagcaagaggagagggtgggcccggcgtcctctgtctctgtggcctccggcgagcgacaggaggaggcgacggcgtcgcatcatgttggaggggtggatgaggccaaggcgtcgggccatgttggagaggcagataaaggaggccaaggagaaggcgacggcgaggagaagaggagcacagacgagcagcaggaggtggactggaagtcagacgaggagttcaagaagttcatgggcaatccctccatcgaggccgccatcaagttggagaagaagcgcgccgacaggaagctccgcgagctggaccgcgagcccgacgccaaccccgtcgccggcctgttccggggcttggtgaaggaccagctggcccgcgagaagcagaggctggagctggcggagcagaccttcaaggcactcgacctcaacaagctgaagagctgtttcgggtacgacacgttcttcgccgtggacgtccggaggttcggcgacggcgggatcttcatcgggaacctgcgtaagcccatcgaggaggtgcggcctaagctggagaagaagatctccgaggcggctggaacagaggtcaccctctggttcatggaggagaagaacgacgacatcacaaagcaggtctgcatggttcagcccaaggcagagatcgacgtccagctcgagatcaccaagctgagcacgccgtggggctacctcagcgccgtggcgttggcggtcacgaccttcgggacgatcgcgctcatgagcggattcttcctcaagcccggcgccacgttcgacgactacgtctctgacgtgcttcctctgttcggcggcttcctcacgatactcggcgtctctgagctgatgatcatgcggtggcagattgcgactaggctgacggcggcgaagtacggtgtgaagctgagcccgtcattcctcgtgccgtccaactggacggggtgcctcggcgtgataaacaactacgagtcgttgctgcccaacaagaaggccctgttcgacataccagtcgcgcgcacggccagcgcgtacgtcacgtcggtggtgcttgccgtctcggcgttcatcgtcgacggcagcttcaacggcggcgagaacgccctgttcgtgcggccggagttcttctacaacaacccgctgctgtcgttcgtgcagctggtgatcgggccctacgcagacgagctcgggaacgtgctcccgaacgcggtggagggcgtgggcgtgcccgtggacccgctggcgttcgcggggctgctgggcatcgtggtgacgtcgctgaacctgctcccgatcgggcggctggagggcgggcgcatcgcgcaggcgctgttcgggcgcggcacggcggcgctgctgtcgttcggcacgtccgtcctgctgggcgcgggcgccatcagcggcagcgtgctgtgcctggcgtggggcctcttcgccaccttcatccgcggcggggaggagatcccggcgcaggacgagatcacgccgctcggcaacgagcgcctcgcgtgggggttcgtgctcgccttggtctgcctcctcacgctcttccccaacggcggcgggacctactctgcctccttcctcggcgacccgttctttagaggcggcatctag

SEQ ID NO: 23719 - DNA, 921 bp, Zea mays
  Peptide Sequence Number=SeqID_65498
atgaggagggagcaccaggtgaatgagatactgggtcacgctaacgtcgaagctggcggtcttggtgcaggcgtggtcggcgacgttgacggcctggcaggctgggacggtggccaggctaggcttccgcttctccccgcggtgcgcccgcgcttcttcccgcccgccggaggctgtgcccctgccgccacctgcccctgcttgtcgtcctcccccttgggacgctcgtccgcacaggcgcccgacgaggccgacgccgacgcgccgcccatctccggcacccgccgaaatatgtcatgtcacgggttgggcgcggcacctacctccttccgtgaggttgttgcaagcggagctggaggagcgctcgctgctggaggggagcgagctcgtggtgctcgtcttcgcctgctgcttctcctgctcctcatctccgcgtcaatcttcttctcctcctcccacgcgctgctcatttccttctcgccgctcccctctgcggcctccgccgagcccctcttcatcgaggccaatctccgcaagcagatgcgggctgaggagcgccccgcgcggggcgccgtgcccaggatcgcctaccttgtctctggctccgcgggggacgatactgcgcggttgtggtgggaggggcatggcgggctgcttccatcgcgcgtgggacggtgcacaggcaggcgggggtacagcaggggctggccgagattgggggcatggtcgagattagctgttgtgacgagcgcgagatccacgggggggcgagatccgcggcagggcagcgggggaagagtggaagggcaggcgggggctggcgtgagatccgcgaggggcgagatccggggcagcggggaagggagaaacatgaagaggagtggtgggagatcgcaagacagagtgtgcaatccaaggtag

SEQ ID NO: 23720 - DNA, 345 bp, Zea mays
  Peptide Sequence Number=SeqID_65499
atgcccccaatctcggccagcccctgctgtacccccgcctgcctgtgcaccgtcccacgcgcgatggaagcagcccgccatgcccctcccaccacaaccgcgcagtatcgtcccccgcggagccagagacaaggggcggagagcgacgaggagatacggcgggtgccggagatgggcggcgcgtcggcgtcggcctcgtcgggcgcctgtgcggacgagcgtcccaagggggaggacgacaagcaggggcaggtggcggcaggggcacagcctccggcgggcgggaagaagcgcgggcgcaccgcggggagaagcggctgctgcggaaccgcgtgtcactactaa

SEQ ID NO: 23721 - DNA, 657 bp, Zea mays
  Peptide Sequence Number=SeqID_65500
atggcgacggccatctcgttcccgcgcgcgccgctggtcactccccgcgcgtgcaccccccgccggcttgtccacgtgtcggcggcgcgcgcctctcccccgcgcggaggagggcgcgtcggtcgccgctccccgacggtccccgctgtagcgggagcctcctcctcctcctccggcttggctccggacacaagcgtgccggcgtgggacgctctcggcggcgtctccgtcctcgccgcgggaacaggcaacgctgtggcgctgacggacctgtgggactccgccgaggtaccactgtcttcctccgtgatctgcggccgctgggagctggcctctgttctcaaggacgccatggcggagttcgactcggcgggggctaagctgatcgccatcggcgtcggaaccccggagaaggctcgcatcctcgccgaccggctgccgtttcctatggactccttgtacgcggaccccgagcgtaaggcttacagcgtgcttggactgtaccatggtctgggccggacgctcttcagtccagctagtgcaaagatatattcgaggctcgactacatcaagaaggcgacggagaactacacgctggaaggcacgcccgccgacctcaccggcgtcctgcagcaggttgaagtcgtcgtcgtctga

SEQ ID NO: 23722 - DNA, 450 bp, Zea mays
  Peptide Sequence Number=SeqID_65501
atgagtaacaataatatacaagacaataatcaacaatcagtaataaaatttatatctatattccacatcgagattgagagactaagagctaattacctgagcgtgtggtgcccctggtgctacggtagcggcgcggcagtgctggtgcaggggcggcgcgaaggcgagatggtggcgcggccccggctggtgcaggggtggtgcaactgtggagcaagctgcacgggggagggcacgatgcggctgtggagcaaggccgtgcgtggcaggggaagacggcggcggcagcagggagcggcgcggcaggagcaatggcacggcggcagcagcagcagggcgcgtcgcggtaggagcagcgcgtggggacggcgcgacgcggcgtggcggcagcagaagcagggcgcgctgcggcaggagcagcgcgcgggggacggcgcgacgtggcagtag

SEQ ID NO: 23723 - DNA, 384 bp, Zea mays
  Peptide Sequence Number=SeqID_65502
atgccgccacaccatggcatgccggatctcggcatgcccttggagacatgttgtgtcaataggggaagagaatcaaggatctgtcgtggcgcacccagttctattatgttacaggaagtaattgttatacccccatgggttgcactttccatccgccctcagcctggtgtgtgggaatatgtgagggtcaatgtcatcaagctcgctgttgaggagctgagggcccctgagtacctgcaattcaaggaacaacttatcgaagaagggttgagactgagagaacttaccatcagagagttcttgagatacttgaccaattggaagaaaagtatcgacattgacttagaatgcatgaaggggttgagagcacctagaggggggtga

SEQ ID NO: 23724 - DNA, 731 bp, Zea mays
  Peptide Sequence Number=SeqID_65503
gtgcaaatcccaacctccctccctcccaggccccctccccacctccacctccaggcaccactggtcccacctcctcacctgcgaggatgctgctcgtgagtcaggcagcgaacggctccctctccgcgcggcggctgccgtcgaagccgccggggccgtccaccaccaacccctacccgctcttcgccaaccctcgcctcctgcgccgccgcctggcgctctccggcgctggcgccgaccaagccccgcgccgcgccgcgccgaccccagccgccgcgggcgagggcccctccgcctcctccaccgaggacccggtccttgtccgcgtcgccgacgacggcgtgccgctcgagggcgtcatccagattgagaagcccggggatgcggccgccgagtccaagctcgtctcctacgcgaagctgggtcttctggccggcggggacgtgttctgccttctgctgttctctgcgattggaaggttcagccatggcctgcccgtcctcgacgccgagacgttcaagacggccgaccccttcattgctgggtggctgctgagcgcctaccttcttggcggatttggcgatgatgccaaagggcgcaatggcgtcggaagcgcggttatcaccgcagctaaatcatgggctgttgggataccgcaaaagcagcaggatgatgtctaccggcgtggaagtccttttgagctttttgaggtcagtagtttcacgaactga

SEQ ID NO: 23725 - DNA, 321 bp, Zea mays
  Peptide Sequence Number=SeqID_65504
atgagtcgaggaggcagcagcggtggtggccgaagctctctcagctacctcttcgagccggaggaaaccgtcctgtatcgcactcgcacgagcaaccaggaaaccgagaaggctccggataccaacagcggatgcgtcaagcaggacgacgacgagaagaagacggtcggaaccgaagcagttcattctcctcccaagagggaggtctccaacccgatactctcgtctcacaaacctccctgcaacatctaccataccggccagttaagctccgggcttcttatcactgattggaagggtgtttgcaaatgtttgatgtaa

SEQ ID NO: 23726 - DNA, 816 bp, Zea mays
  Peptide Sequence Number=SeqID_65505
atgcgtattgtgtgctccctccgctccgcgccgaatgcaattctagcacaaggacagccgaaagggcaaagtgaggaacagtgcctgctggccgggtacgtggcgtttcacaagacgctggccgagacagcgaccgcggcgagccgtttgagggcgcatgcgcagaaacccgtcgccggatcccgttcccgtggcgcgggagccgagaccgcgacgtccccctcatcctcccgctcggagaacgccgtcctcaaggccgcctggtacggctccgagctcctcggcatcgccgcgtcgcttctccggcccgcgccgtcgtcgcctcaggagggggatgctggcggtggcggtgacgcagagggcgaagcggcggcggtggcgggggccctggacctggaccacgcgggagtggccgaggccattaaggcggacttcgcgcggtcgtacttcgtcacagggaatctcacgctgagagcttacgaggaggactgcgagttcgccgacccggcgggctcgttcagaggcctgcggcggttcaaacggaactgcactaattttgggtctctgctcgagaaatcgaacatgaagctcactaaatgggaggacctggaggacaagtcgatcgggcactggcgtttcagctgtgtcatgtcgttcccctggaggcctattctgtcagcaaccgggtacacggaatactatttcgatgctgaatcggggaaggtgtgcaggcacgtcgaaaattggaacgttccaaagatggcgctccttcggcagattttcaggccgagccgatgggtctgggagaagcgttaa

SEQ ID NO: 23727 - DNA, 1401 bp, Zea mays
  Peptide Sequence Number=SeqID_65506
atggccaaaaagcacgaggcccgtgagcccggcacgaagcccgctttttgggttcggtccgagcccggcacgctcacgaggactacgaggcaaacgacccagcatataaggtccagacggccggtggccaccgtccaagactcctgtgagccgcgagcgcgacacgagcgcacacgtacactcttctacgccgcgagagtgctagggatgagccccggcgccggtactgccaagaagcgtctcggcgttggcgccgtcgccggcggggggttcgcgctcgggtgcggctgcagggacgccaaggccgtggcggtggcggtggcatcgtcgtccgtgtcaccctactctgccgccaccagcgccacggagacgacgacatcgacggcgacgaccgcgacgtggcgcagggcgaggacgacgacgcacccgtcgtcggcgtccgggtccacgggcacgctcaccgtgccctccgcgtcgtcgtcgtccttcccgtgggaggacatggacgccgagggcgatggcgaggaggtggactgcaagagggagagctcggcggccacgacgagcttctccggcctgctgcgccagctcaacgagctcgagcagagcgtcgtgtcgtgggggcggaagagcgccagcaaggattacttgtcgccgcctccgccgccgccgttaccagcgcggtcatcagcgaagcaacgagctgtgcacagcggtggcggcgacagcaaagaaggtcacggcaacttctctccgccgccgcaggcgctgcgtcctttccagttccagactacgcagcagcaccggaagtcaaagagcatggacaaggacaaagcagcaagacaagttgaagtggtccactccaagcaaccgccgccgccgccgccaccaccacctccatcattgtcagtaccgccggagcagctcaaggtgaagagcacggacgacaaaggctgcaagaaagaagccgccaacgtttccccggcaccgcaggccccgaaccaccggaaagcaagaagctgcgacgccggcgccggcactggccccggccccgcgaggctcgacgggagcgtggccgtggccgtggtgaagcagtccgacgacccgctgagcgacttccggcgctccatggtgaacatgatcgtggagaaccggatcgcgacgtgcgacgagctccgcgacctgctccgccacttcctcgcgctgaacgcgccgcaccaccacgacgccatcctccgggccttcaccgagatctgggacgaggcgttctccgccaagacggcccgcggccaccgagagcccgtcgtcgccaccaggacgacgactccgccgcggccgcggcccagggcaccgacgccgccgcgccgccggcacgccccgcctccgccggcatggcgctaa

SEQ ID NO: 23728 - DNA, 255 bp, Zea mays
  Peptide Sequence Number=SeqID_65507
atggggctcggtgtatgcggctcgctctgccaagatgatgatgaggataatgttggtttctattatgattatgattatggtttctggtattctttccgtttggaaagagttgcctttggtgcaatctatgctcaggtaataattgaagttaaacacattgaagccaaagctgaagcagctgccatcgagaccgaagctatagctgccagagctacaaagagagctgtagacgacatagtttcaaaaaatatatga

SEQ ID NO: 23729 - DNA, 291 bp, Zea mays
  Peptide Sequence Number=SeqID_65508
atggagctcgcttgtggagatctgtgcttcagttcttgcggtgtcattgcttcggatccatacatcaagcgggaaggttaccttgtgctgtgggcagtggtccaacgatgtctagtcaccaacgttgtagtggccagaggggtggtagtggccttgaagataaagggtgattggtgctcgctagtctttggccattatcggattgactatccgatgcccatcggcgtcttgtgttatttgcagaccctcggggtttcttacagctggcttcgaatagcggcgagatactga

SEQ ID NO: 23730 - DNA, 270 bp, Zea mays
  Peptide Sequence Number=SeqID_65509
atggccacgcctgttgctgcagaaaccgcacgcagggcccttgcagctggggtgggccacgccacacggctggccatggccgtgcacaggggcattgagggcgggccgagtggccacgcaggcacgccggcggtcggcctcgccggcaagagctgcgccgagaggaacttgcccgtgccgcggggacaagggagagggttcgctggcggtttgggaagaggagagaatgggcgcgaggcgtggaggaaaaagagaaggaaagcaaagtaa

SEQ ID NO: 23731 - DNA, 232 bp, Zea mays
  Peptide Sequence Number=SeqID_65510
atgggaaccccggcgttgcccggtttgtcccgaacacggccgaaagaacgtttagcccatccgtcgcccagcgctgggcggggcaccccgcgggcgcccgggcaaaggaggtcccacccgcccgacccgcacgtaacttcggcagtcacccgccgcctttcgcctccccgcaccagctcccaccgcgttgcccagccccaggccccccccgggggtggcccgagcaaaccgg

SEQ ID NO: 23732 - DNA, 3129 bp, Zea mays
  Peptide Sequence Number=SeqID_65511
atggcgactctgcattccatggtgaccctgctgctgctgccgctgcttctactcacagctcggccggcgtcttcctcctcctccatcgacaggtacgaaaaacaccatgaccgtgaagcactgctggcactcaaagaggctctgataggcagctcgggactactaagctcatggaacagcagcagctccgacgtgtgccgttgggccggcgtgacatgcagccgccggcacgcgggcagggtggttgctctgagcctgcgccagagaaacctgggaggcagcatctcccctgccatcggcaacctcaccttcctcaggtcgctcgatctcttcgacaacatgctgtcaggggagataccgcgcactatgacacggctgcgtcgcctgagcttccttgagctggcgtacaactatcttgctggcgagatccctgaaggcttggccaactgctccaacctcgcgtacctgagcgtagaggtcaatcagcttcatggcgggatccctagcggtctgggcttgctgtctcggctacaagtcctgtatgtcggcgagaacagtctgacagggcatgtaccgccatcgctcggcaatctctcggcgctgcagaggctggcactgtatcagaacaagctggaaggagccatcccagagggcctttcccgtctgaggtatctccggtacatccaggcggcgaggaacagcctctccggcacgattccgcctcgcttcttcaacatatcctctctccagtacttcggtttcagctcaaacaggctgcatggtagactgccaccagacgcaggcaggcacctgccggacctccaagtgctccttcttggtggcatcgggaacaacttttctggaacactcccggcttccctctccaatgccactaaactacaagagcttggtcttgctcacaacagcttcgaaggaaaggtgccgcctgagatagggaagctctgcccagagagcgttcaattggggggtaacaagctgcaagctgaggacgatgcggactgggagttccttagacatttcaccaactgcacccgtctagcggttctagatgtcggtggcaacgcccttggaggagtgcttccacgcttcgtagctaacttctctgggccggtgaatactctgatcatggagaagaaccggatgtctggatcaatccctctgggtgtcggaagcctcgttcaccttgaagacctggaattcgggggaaacaacctgcgtggtgttatacctgaggatattggaaggcttcggaacctcaagtttttcacgctggaggagaatctcctgtcaggaggtatacctacctccttcggcaacctcacgcagctgctcagccttttcctgtcgaacaataggctcaatggctccatccctgagaaccttgggagcttgcgcaggttaacgtccatggcattgtccttcaacaggctcaccggtgcgatccccggagcattattcagcctcccgtcgctagctgattcattgctgctttctcataactacctttctggcgtacttcctccacaaatcggtagcctcaagcatgcgacaacattggatctgtcaacaaacaacttatctggagaagtaccaggagcgcttggagactgtgcaagtctagtatacttgtatctggatggcaatagcttcactgggagcatccctccatcgattggtaatctgaagggcttgagcacgctgaatttcacaaggaacggtctgtccggtagcatccctcaggagttgagccagattcatgggctgcaaaggctttgcctagctcacaacaacctgtctggagccattccacagctcctccagaactcgagcgctcttgtagagctggatctctcctacaaccatctgggcagcgaggtgcccacacacggggtgttcgctaacatgagtgggttttctgcaactggaaatgatgggctttgtggtggcgttgcagagctgaaattgcctccgtgtgaggtcaagccacacagccaccggaagcggttgcgactgaagatttttcttccagccattggcatcgctatatgtttatctcttctattggttgcgctccttctgttcaaagggagaaaagggtcggacaggatcagtgctacgcgaaaccatttgttggagaacaagtatccgagagtttcatacctccagctctttgaagcgacggatggttttgcccctgctaatctgataggagctggaaaatatggatctgtttacaaaggaagactgtctatcacaggtgttggggattctgtagtggctgtcaaagtgttcactcttcagcatcctggttcttccagaagctttttggctgaatgtgaggcgctacggcaagtgaaacataggaacttgatcaatattatcacctgttgctccagtatagaccctagagggaatgacttccaagctctagtgttcgacttcatgcccaggtacagcttggacaggtggctgcatccaagaagcgatgaggagacacacaagttgagtctaacccaactgttggacattgcgactgatgtagcagatgcgctagactatcttcacaacagtagccgtccaacagtgatccactgtgatttgaagcctagcaacatcctccttggtagcgactggactgcttatgttgctgactttgggcttgcaaagctgatcagtgaatccatggaccaaccaaatttgaatattgggactgaaagcactattgggatacgaggaaccactggatacgtccctccagaatatggagcaggtggtcaagcatcagttgctggtgatgcctacagctttggggtcactctgcttgagatgttcaccgggaaagcaccaactgatgacatgttcatagaaggcttgaccctgcacttgtttgctgaggcagggttacctgacagggtatcagaaatcattgacccagaacttttcaatgcggagctgtatgaccatgatcctgagatgctcagttgcttagcttctgtgatacgagttggtgtctcatgttcaaaggacaacccgtcagaaagaatgaacatggaacatgctgctgctcagctacacagaatcaaggagtacattgaagaaatcccttag

SEQ ID NO: 23733 - DNA, 417 bp, Zea mays
  Peptide Sequence Number=SeqID_65512
gcgtccacttttttttgttctgccatcgcgcgctctgcctccctccccgcgcccgcagtccccaccgccgcgcccgcagtcctacagtccccgccgccgagcacagccgccgcagtcccgccgcgcccgcagtgcgacggcggcgccggtgccggtgagggggagctgtggttctacttctgcccgcggcaggagcgggaggcgcggggcgggcggcccagccggacgacaccgtcggggtactggaaggccgctggcacgcccggggccgtctactccaccgaccgccgcgccatcggggtgaagaagaccatggtgttttattacggccgcgcgtcgtcggggaccaagaccaagtggaagatgaacaagtatagggcgttccagttgaaacttaatgccacaaaacttgattag

SEQ ID NO: 23734 - DNA, 243 bp, Zea mays
  Peptide Sequence Number=SeqID_65513
atggccatgggcaagcacatcggcggggctgaccatccaggatacgggagctttccggggcttccgggctacgcaggggcgctggctactgggcacaggggcttgctcggcagccaggaacggaaggccaggggctgctcggctgccaggagcggagggagggacgcacgagagggagaaggcgagggctcatctgtaaccgctcaagggacgtctggatctagaaagtgggtatctgcgtag

SEQ ID NO: 23735 - DNA, 738 bp, Zea mays
  Peptide Sequence Number=SeqID_65514
atggcatcgttcgtgccgctgctgcacaacgcttgcaagcacgacgtccgccaccacctcaacacgatgcccgccacttggtccggcagcaccaccaacaacgttagcgccacgggtgcgatggccgcagcaactttcggcagcaccagcaatagcaacgccgccccaagcggtgcgactgacatggcctcctacctccagcagctgcaggacatcgcggccgccaagagtagcggcggcggcggtgctgcgcgtggggagcagtgcccgcggtgcgcgtcgcacgacaccaagttctgctactacaacacgtcgcagccgcggcacttctatcgcgcgtgtcggcgctactggacactgggcgggtccctccgcaacgtgcccatcggcgggtccacgcgcaagcgcccacgcctgggacagggcggcggcggcctcctcggctcgatgtttgcgctcggcgccgcggggctgctgcttgaaggccgcggcgcggggtcatccttcgacttcgacttcgacctcgggctcgggctcccgaccgggcccttgcacctcggcgctggcgcgggcgcgggcgccggcgaggcggccgccttgcaaatgcaaggactcgggctcaggggaggtggctccgcagccgggtcgtcggccttcctctggcccgctggggccgggatgctggtggacaacgacagcgtggacacgtggaagttgcatcgcgtgagcgatgcatga

SEQ ID NO: 23736 - DNA, 1065 bp, Zea mays
  Peptide Sequence Number=SeqID_65515
atgattgccacccatctctccccagcccccaagcagtaccgcttcccatccctgctccactccacctctcacaatcaccaccttcccgtgcacctctcgctcccccgccgccaccgcaacttcgctaagcccaccgcggccgcgcaagacctcctcgccagcgtcgagtccgtggcctccgcggcctccgtcctggccgccatcgtgctcgtccatgagtctgggcacttcctggccgcggcgtcccggggcatccacgtctcccagttctccatcggcttcggcccgacgctcgcccgcttccgcctcagccccgtggagtacgcgcttcgcgccatcccgctgggcggctacgtaggcttccctgacgacgactcggagtccgggttcgcgcccaacgacctcaacctcctccacaatcgccccatcccagaccgcctgctcgtcgtctccgccggcgtcgccgccaacctcgccttcgccttcctcatcgtctacgcgcagttgcgctcaccatcggcgtccccgtgtaggcgcagctccctggggttctcgtgcccgagtttcgcccgggattcgccatggatgccatgcaggcggctgagagggcaccaaccgaggcaaggccaacaagcccagcccgatcccgcggctgtggccacgccagacctcctcgccagcgtcgagtccgtggcctctgcggcctccgtcctggccgccaacggcatccacgtctcccagttctccatcggcttcggccccacgctcgttcgcttctgcctcggccccgtggagtacgcgctccgagccatcccgctggacggctacgtaggcttccccgacgacgacccggagtccgggttcgcgcccaacgaccccgacctcctctgcaaccgccccgtcccggaccacctgctcgtcgtctccgccggcgttgccgccaacctcgccttcgccttcctcgtcgtctacgagcaggcgctcaccatcgtcctgcggcggtggcttggccatggatgcggagcacacggaggcaggcgggcgagtgatgaggatgtgatgtag

SEQ ID NO: 23737 - DNA, 291 bp, Zea mays
  Peptide Sequence Number=SeqID_65516
atggttggtttacaggtggtgacgaggatgatggttttggttatgcctatggtaatgctagtccactacagccaaacgggacattttgctgagtatgttgatgtgtactcacccttgctttacacaccaaaccccccaggttgtccgcgttgcaaccactgctcaggtgaagatgaagtcgtggaggaggacttccaggagttccaagagtactatgtcaaagaagatgaggtatgtagcgaggaggtcactagggataaggagtatctcgaggagcagctctacaagtga

SEQ ID NO: 23738 - DNA, 1173 bp, Zea mays
  Peptide Sequence Number=SeqID_65517
atggaggccgccgatctgcgctggtgctgtggtagcagcagcaacgactgggacctacacgccgtggtgcgcttcgccagctgcagtggtggtggcagccgcgtcactactagctcgccgctgcgggcctcggacgaaccattctcatcctgcctgctgccgccgccgcagtcacagacgaaggacgaggtgacggacgccgcggcgccgcagcagctcccgaccggccctgccgtcggcgtcgacgacttgtgcctgcagcaggccttcctcggcctcgccacgccgcagccaagaaacaacgaagcgccgccgccggccaaacgaccacgaactccctaccgcagtaataacggcgttggcggaccgacacgttcgaagagaaagtatgtatcagcccgccgtaggcggccggcggcccatctaaatctctatttttttcgattatttcctcgcgaaatactggcagtacctgcctacctgggagggaaggaaacgacttcagctcgcgcttgtattcgtattttcgtagaaagaagaagagccagacgagcaagaaggaggtggcgcgggtgcccgtgggcgcgtctccggacccctgggcgtgggcgcaagtacgggcagaagccgatcaaggggtcgccgtacccgcgcggatactaccggtgcagcaccgacaaggactgcagggcgcggaagcaggtggagcgctgccgcaccgacccctccaccctcatcgtcggctacaccggcgagcacagccaccccgtcccgctccatcgcaacgccctcgctggcaccacgcgcaacaagccgcagccagcaccgccgtccacctcctccccggccgagcagcctgatccagctgcatcgccgatcgatgacactactactccgctgctttgtccgtccgtgctgggagtggagtgcgaggaggaggaggagaacactgtcgccgccggtctgctgctcgaggatgcggagatggagggatatgaagacgtgctgttgttcctcaagcccgctccgagtcccagcaacggcagtggctccaaggacgtcatgctatttccggatccccataggcctgctccgggtgcggacaataccggaggctcggagaaagtcgtgccactctcgaacctccagtccacgagctaccacttccagtaa

SEQ ID NO: 23739 - DNA, 1815 bp, Zea mays
  Peptide Sequence Number=SeqID_65518
atggtggtggagcaatttgatgagggcggtgagttcggctgtgttggaatcccccatggctgccccaagaggctccttctctggctggcataccagctggcggacagcacggcaatgtacgccctgggcaacctctccctcagcagcacgctgcggcagcaccggctggtcgccttctgggcgccgttcctgctgctgcacctcgctggccccgacaacatcacggcctactccctcgaggacaacaagctgtggaagcgccacctgctgacgctcgtggtgcaggtgctgggtgcagggtacgtcatctacaaccatatcgccggcggcgggatcctcttctcgctgggcgcggccttgacgacggctatcgcggtcgccaagttctgtgagaagacgtgggctctccggtgcgccaacttcggcgtcatccgggagtccatggaggcggaggacgccgagcagctcggaaaatgtgatctttacctggaggacagaccgcctcgaggagggttcagagagaaggtggtggagaaggaagagttcctcatgctgcgcgcgcacgccgtgttccgggtctgcaagtccgccatggtggattcctcgaagaacccagggagctacatagttggcatacttaaaaacctcaaggagaaggagatggggtacatgtggacgctggtggagatggagctgtccctgatgtacgacatcctgtacaccaaggcgcccgtgatccacactctgcgtggctactgcatccgcgtcgtctcgccgctcgccgtggctgcttccctcctgctgttccagttctacggcagggagggcgccaggaccgcggacgtcgccgtcacctacgccttgctgggcggtgccttcctcatggagacgacggcgctgctgagcgcgctctgttctacatggacgttctccttcctttgcgcgacgcggtggagtagtcttcggcactctgccctgctgtcaaggaagtggacgggcaccatggggcagtacaacatgttagagatgagcaccgcgaggcctggctggtgggcaggctgtgacatgtttgggatgtgcactgtgatgcatgactggttggcaggccatggcatgccggctgttgctgttccagatggtctgaaagatttggtggtcacttacatacagcacatgatcagaagtgggtacatcaacacaccgggaatggtcagagggagttggggcacggaggcgctggagcgctggaaggaacatagtggcattagtattgatagcaagttccttggttctgagctccaagaggggatcatcatctggcacattgccactgacgtcttcctcgccagaaggcaggccgagatcgagggccgagataaagtgaaggaagtgcaggtactgtccaactacatgatgttcctcctcgtcaagcgacctgacatgctaccgggccttgctcagaacaagctgtaccagtggaccaagacgagcttggccaccaacgtggctaattctgacgacgtcaatcctgccagcgccctatacaagatggagatcactggacatcatgtccagaagtttcgactattgctggcaatcgagttggctaaaacactggtacacaccaagaacgcgctggagctggtctacgaggtctgggccgattttataatctacactgccaaccggtgcagcagggagtcccatgccaagaagctcaacagtggtggcgagttcacaaccctggtatggcttatgacggaccaccttcaccaagtgcgtttcaacaaggatctttacccacctagtgaataa

SEQ ID NO: 23740 - DNA, 276 bp, Zea mays
  Peptide Sequence Number=SeqID_65519
atggcccccacggccgcccaagaagagaccaggtgcaacgacaactcaatgtcggcaagtttgtacgacaaaggcgacccggagtcaccgtcccttgaaagcgccccacttccggatgatgataggttgcgcattgccagcgagtttagaattgtgccacatgaccttttaaaggcaacatgccacacatatctttgttttggtgttcagagctacatatggaggtggggtttgaacctatgccctgatggaagaagggcaggagacactgggtga

SEQ ID NO: 23741 - DNA, 138 bp, Zea mays
  Peptide Sequence Number=SeqID_65520
atgccgcggacacttccgccacaacctgatgaagcctccgcactctccaagaccgatcgaggtggcaacgaagagcggtccgacgtcgagctcgcggtgaccgaacaccctagtgttgagatggttgttaatatttaa

SEQ ID NO: 23742 - DNA, 390 bp, Zea mays
  Peptide Sequence Number=SeqID_65521
atgccgcggacacttccgccacaacctgatgaagcctccgcactctccaagaccgatcgaggtggcgacgaagagcagtccgacgtcgagctcgcggtgaccgaacacccggcaggggaggtgcggcgcgtgggtccttatgccccggggcgcgcggaagattccgtccctaactccccgatcgatccgcgcgtgttcgttgtaacgcccgaacgcgaactatgcggtgaggaagactctgaccgcgtgggtcccgccaatcagtggaacacggccgcgcgaggtggggagcaggcagtcctgacgcgtcgggcccaccaaccggtttaccttgcaaggttaaaactcgattcgaatcgtctgcttctcgcagctaatcagactgcttga

SEQ ID NO: 23743 - DNA, 276 bp, Zea mays
  Peptide Sequence Number=SeqID_65522
atggcgacggcgagaaattggggagcccccagccagcaccgagccgcccgagtgggtattacatcgaaggtccaagaaattgtttcaataactccgaagagaaggagaatggctagtgtactggatgccgttatggaatccacaaagttactaactcctgcctctacagaggcacctagcatgggagacaaaaattcaaaggaatctaccgaagcctctatgcgcaggttgaaactgaagctgggccgtcagctatcgccgaagcggggcctgtag

SEQ ID NO: 23744 - DNA, 945 bp, Zea mays
  Peptide Sequence Number=SeqID_65523
atggcggcagtgacgctaggaacagaaaccgacgggtccatactctgcccatcctcgttgaactccgtggtaggaatcaagccgacggtgggactcacgagccgggccggcgtcatccccgtctctccgcggcaggacacagtcgggccgatctgccgcacagtggctgacgccgtccacgtgctcgatgcgatcgtgggctacgacgaacctgacgcggtggctacgggagcagcggccaaatacatccctgacggtggatacgcgcagttcctcaagatggatgggttgcggggcaagcgaattggcgtcccagctgggttcttcggcttcccagatggatccgtcaggcagatggtgtaccagcagcacctcgacacgctcaggcgacatggagcggtggtgacagaggacctttcgattgcgaacctggatgtgatacagaacgccactgtgagtggggagctggcagctctagcagcagagttcaagatcgccctgaacgcatatctgtcgtccgatctgtcacgctcccccgtggcctccctggctgaactaatagtgttcaacaatgcgcacccggatgaggagatgctcaaacagttcgggcaactcatcttcttggtggcccagaacaccaccggcatcggcgcggcagagacggcggcgatccagcagctggacgatctgacggcgggtggcgtggagaaggtgatgcggcagcaccagctggatgccatcgtggcgccagactcgagctcggccacggtcctcgccatcggtggcctccctgggatcgccgttccggctggctacgatgagctgggagcaccctttggtatcaccttcggcgggctcaagggctatgagtcaaggctgattgagatcgcgtatgcgtttgagcaggctactaaggcaaggaagcctcccatgttcaagaactag

SEQ ID NO: 23745 - DNA, 294 bp, Zea mays
  Peptide Sequence Number=SeqID_65524
atgatgaagtcatggaggacaaatgagggcaagagaagtaccaagggggtcacaacaacaaagtcttcacccacataccagaaaggacaagacgacacacctagtgcgtgctcgcacatgttggagggtgacatagggacattggcagaagatggagttgtacttaacacgaacctcaaccttaccaagagcacgttctacgggacccatcaagtatggcagcacgggcgtagagcgagctatagggactcgcacaccggatggacgagacagaacgtcgtgccaagagtatga

SEQ ID NO: 23746 - DNA, 807 bp, Zea mays
  Peptide Sequence Number=SeqID_65525
atgtcctcctcctgctggccatcggccttggcggcgggcctgtccgtggacttccacgcggcgtcgtgcccggacctggacggcatcgtgcgctccgccgttgaggaggcgcggcggtgggacgcccaggtcacggcgggcctcctccgcatcttcttccacgactgcttcccgcagggctgcgacgcgtcgatcctgctgggcaggaaccagggcggcagcgagcaggacgcaccccagaacacgggcctgcagcaggcggcgctggacctcgtcgagaggatccgcggcaggcgacagcagggggccccgctccaggatgggccgtcaacaggctcccgccccccaccgatggcgtctccgagctcctcggcaacttcggaccgtatcgacaagaagaccggcaaggataacttcgagtgggggctcaccggctactgcaacggagacaaggagaagaagcacgcgctggaccgtacgcccttcaacttcgacaacagctacttcgtggagctgcagaacggcagaggggtgctcacctccgaccaggcgctctacagggacggccgcaccaggtggctcgtcgaccgctgcgcctccagccaggacgaattcttcaagcgcttcgtggaatccatgctcaagctcagcaggctcaggggggccgatccgggcccagtgcgcaacaactgcttcgtccgcgccagcttcggcgctagtagcgctaccaaagacgaccttgtcattgacaccaccgccggagacggagacggagacgaggaccttattcttgcagcagctgcatga

SEQ ID NO: 23747 - DNA, 120 bp, Zea mays
  Peptide Sequence Number=SeqID_65526
atggcgccgccgcgggcggagctccgccaccgtcgggccgtgtctgaggagagtgatagcgaggacccattggatcctagccaacggtggagatttgaagggaggattaatctattctaa

SEQ ID NO: 23748 - DNA, 302 bp, Zea mays
  Peptide Sequence Number=SeqID_65527
atggagtcaagtcgaagcggtgcgttgattagatcccaaccgtttaacgccagatccacggccaagagcaattcactcacaccggtcggactctggtggcggagtgaagttcccacggcggtgccattgccactcccgcaacacaggtcccagcccacgtgcgtgagcggcttctctgcggtaccgatgctccggcgagcaatttgccacaagccgactcccataagcggccacacaactaacccatggatctcgcaccgattcgtgcgtgcatttgaggacgaacccgtggagcggatgag

SEQ ID NO: 23749 - DNA, 189 bp, Zea mays
  Peptide Sequence Number=SeqID_65528
atggtggtgctcagggggtggggagtggtggtgatggagcaggtgccacgcggcagcaggtgcgtcaagggcctggtgccggcaatgatggcggcggtgggtgcgctacaaaggggacgtggggcggtggtagtgcgcatggaggaagggcacgcgtgctgggaggggggcacaggggcagtgctttga

SEQ ID NO: 23750 - DNA, 495 bp, Zea mays
  Peptide Sequence Number=SeqID_65529
atggcgctttcccccctcctccttgcggaaagatattcaccttatacgattagttaccccaatctggacattaaaggaagattaaaccctaccaaagaatcttcagttcataatcagttatttgcctattcgtctacttgccaaatagttttccttgcaaaaattatattaccatattctactaactttgatggtcaataccagggaggaaagattaccaggaaacaacaaacagaaatgaatccttcagatcctccaccggttggaatcgatcaagtggttgctgcccaaatgatggtaatacaacaaatggcaaacaaagttaccgaaatgcaaaatcagataaggcaagaacgccaagaaatacgtcaggaccggctggagatacgtcaagaaataaggcaagcacggttggcaagacaacaacaacaacgcccactacctccaccacctccaccaagctataaatatattattactatttgtaagacctaa

SEQ ID NO: 23751 - DNA, 234 bp, Zea mays
  Peptide Sequence Number=SeqID_65530
atgaacatcggtgctgcgcagaatgccaccattcgcgttgtgctcgtcgtcttccagtggtggggattgaacgttgctatcatcatcaacaagtggaaacttccagctgaagcgggtcacagggtgctccttacaatgccaaccacaccaacagatcggatgaaggaaattgcacaagcttcacaagaatttctttatattgatgctgacgggagggctactgatgttgcttaa

SEQ ID NO: 23752 - DNA, 1005 bp, Zea mays
  Peptide Sequence Number=SeqID_65531
atgcacttcggcaacggcgccaccacgcgctgccgggacgtgggccccgaaggcggcggcgcgcgctgctccgacctcaacaccacgcggttcctgcgccgtgtcatcgaggccgagaagcccgacctcatcgccttcaccggggacaacatatttgggggcagtgcaactgacgcagcagaatcactactcagagcaatcagccctgctatcgaatacagggtgccatgggctgccatcttaggtaatcatgaccaagagtcgacaatgacccgggaggagctgatgaccttcatgtctctaatggactactcggtatctcaagtaaacccacctggttttttggtacatgggtttgggaattatcatgttggcatccatgggccattcggatccgagctggtcaatactagcctgcttaacctttacttcctggatagcggtgatcgtgaaatggtgaatggagttaaaacatatggatggatcagagagtctcaactcgcctggcttcgttctacttccctggagcttcagctgatctgcgatcgtctcaacaagcggataaagatcccttttggtaagcttcctggtggagagtggcaaaccaagaaaaaaatacatgccccagcattagcgttcttccacataccaatcccagaggtccgagggctctggtactcaggcttcaagggtcagtaccaggaaggggtggcttgctcatctgtacattctggtgtccttgggacccttgtctccatgggagatgtaaaatctgtctttttgggtcacgaccatcttaatgatttttgtggcaatctcaatgggatctggttctgttatggtggtggctttggttatcatgcctatggaagaccccattggccaaggagagctcggataatttacagtgaactcaaaaaggggcagaggtcgtggttggaagttgactcgatctcgacttggaagctgctagatgatgaaaagctctcaaaaattgatgaacag

SEQ ID NO: 23753 - DNA, 570 bp, Zea mays
  Peptide Sequence Number=SeqID_65532
atgtcccgccaggctctccccacccttctccgttcgccctggcctcagcgccgcatcctccgcgatgcttgcgcgccagtctccgctccgtgtccgccgcccacgctcccccgtccccgcctcccaccaaagatcgatcaaggcggcgatcttctccgccagggccttcgcgctggcggctgtccgtgcgcaggggcagcatcacggcagcgggctcttgaaccaccagaacttctactcaccacgcatggcaatctaccctctgtgatcgccactgagaacgtcgacgcgctgctcgggcagggcctcctcgtcgcgcggctcaagtcgcacagtgtggttagcctaagatctgcatgtggccaagcaggcatgaccagtcgctgtggagccagtggcggtggtgttggtagcgggtgctcacaagctgagcactgtaaatattacattttggttgtggtggagctgtccaagcacctcaccaatgcagaatggaaccttgtgaaagcagctaatccctgtgcggaagacgtactcgcagaacatgactctactgcagatgagtcataa

SEQ ID NO: 23754 - DNA, 594 bp, Zea mays
  Peptide Sequence Number=SeqID_65533
atgggaaagatatgcgaagttagagttaatatacgacgccaacaacgaggagaaagggaaagcattcattgtggttctatggttggttgtcatgtaaaggtaaggacaacgctgttgatcgcaactcgatggtgcgtgcggaagcacgtcggaacaaaagagagttatacagatgctcctgctcattcggagttcggtcgcctttcctccgagtatctagctcttcaagtacatgcgaattgtgcaaaaggttcaacacaaaccaataaaaagagcaagttaggcttcaaagaaaggagcaaaaaggaaaccgaagtgtgccctggtctggcgcaccagactgtccggtgtgccaccggacagtgtccggtgcaccagggtgaatcagctcaaactcctcagcttcggatttcccagacgcagctctgctataattcaccggactgtctggtgtgccatcggactgtccggtgcaccagcggagcaacgactatctgcgcacaacggtcgactctgacggatgaacagtgcagcacaatacctcagcagaagtcagagcagcaggtcagaggggcaccggaatgtccggtgtga

SEQ ID NO: 23755 - DNA, 672 bp, Zea mays
  Peptide Sequence Number=SeqID_65534
atgcggttgtctcgtgggcgtgcttccgttaagagacccgggggcacccgcaatcataaaggcgacgtggcagttcctaagaagccaaggttgagtttgccttttgttgccgggccgagcccgagccaaggggtcgggcgaggcggaagtcgttcggccgaggccagggcggagtccgagccctggggtcgggcgaagcggagtttcgtcgtcttccgggtgctagcccgagtccgagccctggggtcgggcggagcggagttcgccgtcttccgggtcttagcccgagtccgagccctggggtcgagcggagcggagttcgccgtcttccgggtcttagcccgagtccgagccctggggtcgggcggagcggagttcgccgtcttccgggtcttagcccgagtccgagccctggggtcgggcggagcggagttcgccgtcttccgggtcttagcccgagtccgagccctggggtcgggcggagcggagttcgccgtcttccgggtcttagcccgagtccgagccctggggtcgggcggagcggagttcgccgtggcgcctttggcaaggcctgactgcctgtcagactcactctgtcgagtggcactgcagtcggagtggcgcaggcggcgctgtccttctgtcagactggccagtggagcagtggagtga

SEQ ID NO: 23756 - DNA, 1584 bp, Zea mays
  Peptide Sequence Number=SeqID_65535
atgtccggtgcaccagaggactccaacgcaaactcgccaccttcgggaatttccagaggcgctcgcgctataattcaccggactgtccggtgtacaccggacagtgtccgatgcgccaaggaggagcgacttcaggaactcgccagcttcgggaagctccaacggctagtccgctataattcaccggacatgtccggtgtgcaccggactatccggtgcaactccggagcaacggctattcggcgccaacggctacctgcggcgcaattaatgtgcgcgcagcgcgcgcagaagtcaggcgcgcccatactggcgcaccggacaagaaacagagcatgtccggtgtgcaccggacatccaggcgggcccacaagtcagaagctccaacggtcggaatccaacggaactggtgacgtggcaggggcaccggacatgtcccgcctcgtcgccgctgccggagaaatgccgccgaggaggcgagatcgccggagactccgcgacccgtcgccgccgtcctccgatgcaagagcaccaccctccgccttaggcttgcgtctcaccctcctcgttcccctccttatcctggttctcgtcctcgccgcccttggcttctccggcctcctctcccattcccctccccactcccaaacgctacagacaaccgcccactccgtctacgagcgcggtctggtcaagcgcgacgtctccgcacgagagatcctctctgagcacacaagggtttccgagaaccggtcgcagcggaacttcgcgaaccccgtcctcgcctatgtgaccccctggaactccaaaggttatgacatggcaaagttgttcatcacaaagcttactcatgtatcaccagtgtggtacgatttgaagaggctagttctggaaggagaacacaattttgatgccaaatgggtctctgaacttcaaaccaatgggtctctggtagtgccgagaattgtcttggaagcacttcctgctgttttactattcgaaaagaagcaaaaggcaaaagctattgatataatagtgagtgaatgcagggataagggctatgacggtattgtgctcgagtcctggtcaagatgggctatttatggcgtgctggatgatcaagagctacgttacatggcacttgaatttgttaagcagctgggagaggctttgcattcagtcaattccaaatcaagtagccaccatttggaactaatttatgttattccggctccaagaatgcaaaagctcaataatcaggactttggacccaaagatctcatgcatctggctgacactgtagatggtttttctcttatgacatacgacttctcaggacctcagaatcctggtcccagtgcacctctgaagtggatacatcattctctagcagcacttctttcagcaaaaggttcctctcatagcaattcacattcacggatgatattccttggcatcaacttttatgggaatgattttctactgtctggagcctatggcgccgaggtaacacagctcgccgccataggctatgacgccgagcgcaaggctcttgaccttgaggtcgtgggttcgagccccacg

SEQ ID NO: 23757 - DNA, 972 bp, Zea mays
  Peptide Sequence Number=SeqID_65536
atggggagggaggaaggggcggagaggagcgtggaggagcttagcagaaccttctggtatcacttacttgcacaaataaaccttcaggctcttgctccccaggttggtgaaggctgcaccatgcattggtggcaaagaagtagtgatcagctgcatgctaggagacaccgggttccccttcctgaagatcctccgtggtggactgtctttgatgctgatgaagcaggaattcaggaagtttgcagtgttcttgctcacctctacagcctgcccaaggctcaatacattccagtgtataaagaatatgattcctttactgttaagagaatctctgatccacaggctttaaaggaaagtccagcaagggctgttgctagcgataagggtacccctataccctcaagttctaaccaggagaaggattcagtggctaagactataccgaatagggtgaaggaaaaaagtgatgacgaaggtagacacttgcctgctgaatttgatggaaaagaaaacctggtggtgaactcaaaaattgagaagtctgattctggtgttgactggagtcgagaaagagaaagagaaagagagagatcaagagggcgggaacgtgatgctaggggtagggattctgatcatgatagcaggggtcgtgactctgatcgcgagagggatcggagacgtcgctctagggatagaagttcagggagtgttcaaagtctcctagtattctcagtctcagatgactcattgtatcttgaacgcaggacactcagacaaggagaaatcaaggcgccatccatcacacggacttgtgtctcttatgttgctttcgtgttacgatttcagaccgagttgactactacagttcgcattcatctcgtgaaaaagatcggcatagacaccattgatcaagagcaacatgaatttgtagaaccttcatctccactagttcccaaaattctcgagaattaa

SEQ ID NO: 23758 - DNA, 1608 bp, Zea mays
  Peptide Sequence Number=SeqID_65537
atgggcagcctaccgctcgacgcgtcactgcggccactggaccccgaggccttcgccggcgattcacgcgccatcgtggacttcctcgccgagtactaccgtgacgtcgataagtaccctgtgagggcggccgacctcgagcctggcaggctacggaagctgctccccgaggctgcgccagagcacggtgagccgatggaggacatactggaggacgtgcggcgggacatcctgccgggtctgacccactggcagagccccagcttcttcgcctacttccccatgaacggcagcgccgctgggttcgcgggggagatgttgtcggccggcctgaacgtggcgccgttcgtgtgggtggcgtcgcccgccgcagcggagctcgagagcgtggtggtggactggatgggtacgctgctcgggctgccgcagcggttactcttctcgggcggcggcggcggcgtgctacaggggagcacgtgcgaggccgtggtgtgcacgctcgccgcggcgcgggaccgcgcgctggctaggctggggcacgagagcatcgtgaagctggtggtctacgcctcggaccagacgcacgccaccttccagaagggcgcgcggctggtgggcatcccgccgtccaacttccgcgtcatccggacgacgtcggcctccgggtacggcctgacggccgacgacgtccgcgccgcggtcgatcgcgacgtcgcacgcggcctggtgccgctgtacctctgcgccacggtgggcaccacggggctcggcgcggtcgaccccgtgcgcgagctcggagaggaggcgcggcgacacggcatgtggctgcacgtggacgcggcgtacgccggcagcgcggccatctgccctgagttccagggcactctcgatggcgccgagctcgccgactcggtgagcatgaacccgcacaagtggttcctcaccaacgcggactgctgctgtctgtgggtggcaagcccaggtgccctgacctccgcgctgtccaccgacccggagtacctcaagaacgtcggcacggacggcacggggaagccggccgccatagactacaaggactggcagatctccctgtcacgccggttccgcgccatcaagctctgggtggtgctgcggcgctacggtgccgtcggcctgcgcgcgcacatccgccgacacgtcaccacagcaaagtggttcgagcggacagtggcggcggacgaacgcttcgaggttgtggtgccgaggaagttctcgctggtatgtttccgcctccgggagaggttcgcaggggacgacgcggcggacgagttgaaccgggagctcctcacggcggtgaacgcgagcgggcgggcgttcgtgacgcacttcgtggtggacggcaagttcgtgatccgcctcgcggtcggcggtgctatgacggagatgcggcatgtcatggacgtgtgggaactgctgcaggccagcgccgaccacgttttacgccgctactcctactacttcaccactctgcacgccatgtactttcgcacgctgaggaccggaaatagcaaagagtcaatcatcagcggccacacgacgctgggagcttggaacgcagacacggcgtag

SEQ ID NO: 23759 - DNA, 240 bp, Zea mays
  Peptide Sequence Number=SeqID_65538
atgggggacaccagcaaaagaggtaccaaagatgcccgcacaaaccatatcagctggctcatgctgacagggaacctgagtggacagcaaaatctccggagcttcaacattcgcctggggaagcagcaagtcttcaataggggtattgcagcgccgaatcttggggacccatgcaaatccttcctcctttggaaagggggagctttttcgtgggtttcacatggcaagttgcggcgatga

SEQ ID NO: 23760 - DNA, 354 bp, Zea mays
  Peptide Sequence Number=SeqID_65539
atgcagctgatcactacttctttgccaccaatgcatggtgcagccttcaccaacctggggagcaagagcctgaaggtttatttgtgcaactccaccgctcggtgcttacggcacacccacactctggcgcccatggcgtccccgctcgtctcgtgcccgcacctcatccagcgcccagcccttgccaccacgctcgactctcctacccgcgctcgcctcgaggttggggccaaggccataggcgggcactctcgtgcgcaggctgtgatggacttggacgcccactacatgggggcatgcgtggagctggcgcacaatgcaaggcggccgaccacaccagccccagcccaatag

SEQ ID NO: 23761 - DNA, 1479 bp, Zea mays
  Peptide Sequence Number=SeqID_65540
atgccgaggaagattcaaaatcgtaaatcctgttttaccagttttatgaacaccccttcactaccaccccaaagtggtcaagactcaagacttgaccacttagtagtatacgctgcagcatatatccctattctggcttcagcatttttacctactatagaatccccatttgttccaaattcgtttaccgggaagagaaaatcaactgttggtaattctcccgtagtccaacctcatgttggatcacgggctgtccatgagtaccagttccttcctgagcaaccaagtgatacatatgagagggcaagtcctcactactatgacactccagtggaagcttcaaattccaggataccttctctcacatcaggatcacaacttctccatggatctgaggaggctgcgcctagttatgcttttcaaggtcacacatctggttctagcctgttgcctccttccagcaggccccaggtgtttccagtagcaccaacagattatgagatgacccagtttaatagcaaccttagttctgttcctgttgaaggccagtttgatacgtctcaggttgctgcatttgaagacccacctgtatcgtctgaaagaagagcttatcatgatgaagatacttctcgagtggaaagaaaacgaaaacataatgaagaagcaaagattgcaaaagaagttgaagctcacgaaagacgaattaggaaggagcttgagaaacaagattttttgaatagaaagagagaggagcaaaggcacaaggaaatggagagacttgagcgtgagagaagaaaagaagaggagagattactgcgtgagaggcagagagaagaagagaggttccaaagagagcaaagacgtgaaaatgagcgcatggagaagtttttgcagaagcaatctagacgagtttgtttctgggttcctagaatgttaattgaagagaaacaaagacaaaaggagcaactccgaaaagagaaagaggcagcaaggcaaaaggctgccaatgaaagggctgctgcacgtagaattgcacgggactatatggaactggtggaagatgagcgtttggaattaatggaattagctgcacaaaacaaagggttgccctcaatgctgtatcttgacagcgacacattacagcagcttgattcttttcgagctccggtggtcctcagctccggcgaccgtctgctcccgtgctccgtcgcgctcgcctctgctcagctccggcgctcgcctctgctcactggtcagctctggcgaccgtctgcaccagtctgttctgaactctgttcagtgttcagtgctcactttagagttcagtgcttatcttcggacccagggtggaaatatggatttttttgccaaaaagttacaactttttggcaaaaaaatacactgaaccatctcctttgcaatatcttgccaaaatccatatttcctttcctgggtccgaagatcgagcctttctcttag

SEQ ID NO: 23762 - DNA, 231 bp, Zea mays
  Peptide Sequence Number=SeqID_65541
atgatgcgggtgggcacgttctccgacgacatgatgacgacgaggatgtccctgagcgtcgccgactccttgacgcgcttgagcactcgtacccagtcatcccaggcacccggggacgccgccacagacgctggagcggcagcggcggtggccatcgcagagacggacgagacaaacgccgttgccatcgggcctaaggatctgtccgagtgccccgaggaccccggataa

SEQ ID NO: 23763 - DNA, 2100 bp, Zea mays
  Peptide Sequence Number=SeqID_65542
atggagcagagtgtgagagggggcagaggcggaggcttaggcatggtaagtcaatttcctcctgcaacagtgaaaatgaagttgccattttctataaagccttggactggatctgaggataacattggaaagcttttgatggtgtggaaattcttaattactttcactgatgttctgggtctttgtccagttacacttgatgagtttgttcagtctcttcatgattatgattcaaggcttttgggagaactgcatgttgctctgttgaaatccattatcaaggatattgaggatgttgctagaactccatcaattgcactaggggtgaatccaggaggtggtcatccacaaattgttgaaggggcatattcctggggattcgatatacgtagctggcaacgtcatcttaatcttcttacatggcctgagatattaagacagtttgctttatctgctggttctggaccccaattaaagaaaaggactgtggaagattctcactatcattatgataatgagggtcatgatggtgagaatgttatattggcacttcgaaatggtacagcagcagtgaatgctgttgctaagatgaaggaaagaggttacaccaatcgccgtagatcccgccaccgtctgactcctggaactgtgaaatttgccgctttccatgtgctctcgcttgaaggaagtaatggtctcacaatattggatgtagcagaaaaaattcagaaatctggattgagagacctcacaacaagcaagacacctgaggcatccatagctgctgctttgtctagggatgcaaaactttttgagagaactgctccttcaacatattgtttgaagtcgccttatagaaaagatccagctgattctgaggccgtgttgtcagcagcgcgtgaaaaaattagggcctttcagaatgtgctttctgactctgaagctgaaaaggaggcagatgaagctgagagggatgatgattctgactgtgatgatgctgatgatgaccctgatggtgatgatgtgaatattgaggtggaagaagacaaggatcctcttcttgccgtcaaggcacaagacgaagtaccgagtacaactacagttattggcataaagaccaagttagatagtgtaggtaatgcattgaactcatcaagtagttttactaaatcagcaaaaggtgctcctctcccttatttaggcaggtccagtgcagcagatacttctaatgattcacctcttggaggcccatcagctaatcatgaagtaacccctggcgattctgaaaatactcaaattgatgaaagcaatcaaattgagccttgggtatgtgcactagcagaaggagactactgcgatcttagtgttgaagaacgccttaacgcactggttgctcttgttggtgttgccactgaagggaactctattcgtggtgtacttgaggaacgtttggaattagcaaatgccttaaagaagcaaatgtgggcagaagtgcaacttgacaagaggcgtttcaaggaagaatttgctagcagagtacaatataactctggcatgagttttaagcctgatatatatcaagaaaacaacatgacagagattacttcaactcgagcctgtgatgcttacaaagaaaacgatggacatgttgggacaatcaacaattgtgagatgcttgatcagcatagtcagggtaatgctggtggtataacttatgatagaaatgtcgtaggccaggaaatccatgcaaccccagatacttcgtatgttcagcagtatgcttatgctgataaaacacgatctcagttgaaatcgtacattggtcaccgggcagagcagctctatgtttacagatccctgcccctaggtcaggatcggaggcgaaacaggtattggcagtttacaacttcagcatcaccaaatgaccctggctcaggaagaatcttttttgaatcggaagatggatgttggagagttatcgactcagaggatattagggatcccaaggcccccaagattaataggccttgtaaccatgtcctaagaaaccagacagctgccaccattaacctccttcctacccttctcacccccttctaa

SEQ ID NO: 23764 - DNA, 192 bp, Zea mays
  Peptide Sequence Number=SeqID_65543
gaagatgcagaggatgagattgtgtccatagatgctaggttgcacatccatgaggaggaggtcacatccacagatgctggggtgcagggccatgaggaggaggtcgtgtcgacagatgctggggtggagggtcatgaagaggaacatgcagatgaggacaaggacgaggccaccgaggctcctaccttatga

SEQ ID NO: 23765 - DNA, 1437 bp, Zea mays
  Peptide Sequence Number=SeqID_65544
atgccgccggccaactccacgccgcccaaatggccgaagaccctcaccgcagaccacctccaccgcctggttcgggccgaacgggaccctcgccgcgcccttgcgatcttcgacggtgccaccgccgccgcttccacttcggcgccagaccccatcaccccgtctctggccaccgtctctctccttacctctcgcctcgcctccgccggccacctccccctcgccacctccctcctctcccgctcacgcggggtcttcccctccgttgccgctctcgagcctcccttcctcggcctcctccgcgccttctcccgcacgcaccgcccgctcgccgctctccacctcttccgctccgccccctccgacctcgcgctcccccactctgctcgctcctacaacgccgtcctcgccgctctcgtcgcgcactcgcacctccccctggcccgctccctactcgccgacatgcgcgccgccggattcgcccccaccgctgccacgtacaacgtcctcctcaaggcccactgctccgacgccgccgctcacatcgaagatgctctccgtcttttccggaacatccccaaacccgatgtatgctcctacaacaccatcatcgacgggctctgccgccgcggccgcctggcggaggccctcgacatgttctctgagatggttgggaaatgcattgcacctaccgtcgttacttacaccactgttatccattggcttgcaagggagggctgctttgatgatgccttaaagatatttcatgaaatggggaggagaggggtctcgcctaatctggtcacttatagttcactgattgatggactgtgcaagggtggacgtgccacatcggcattagaattgctggatagaatgatcaaggagaagaaactgccaaatatgatcacatatagctcggtgattgatggactctgtaaggagcacatgctgagtgaggcaatggagatcttggaccggatgcgactacaggggaggaagcctgatgctgggttgtttgggaagctaattgttgggctatgtgatgcaggaagggctgtggaagctgcaaattacctggatgagatggttcttgccggtattgaaccaaaccgggtgacttggagcttgcatgccaggataaacaataccgtgctgacagcattatgtgataagggtgaacttggcagggcttttcaggtctaccagagcacaaggactcgtagtatttctaccgacccaaccactttccatcttcttgttgagagcttctccaaaaataacatagagaaagctgcccgtgttgtgcttgacatgctgtcggagagatgcatccctgagagggagacatgggatgttattatcagtgggtactggagtaagaaaaaggtgaggcaagaagccaaggaaatctgggaccatataacagttagttga

SEQ ID NO: 23766 - DNA, 627 bp, Zea mays
  Peptide Sequence Number=SeqID_65545
atggttgctacacacctcgacgctgagttgcagcacaacgagagacgtcctctcttgacgaacagagctgatggaaacaacaacatgagccccatgcaaaaggcaataggccaaacataccagagcactgcccacctcgccaaactccttccttctggcactgtcctttctttccagatcctggctcccaccctggcaaagcaaggccactgcagtgacatgaaccggatgatgacaggaggccttgtggtgctctgtgcgttgtcctgctgcgttctcagcttcacagacagtttcagggatgaggaagggaaggtccgatttgggttcgccacacccaggggattgtgggtcattgatggtggggctcctcttgatccacttggggcagcaggattcaggatgcggtttctagactttgtgcatgccattgtttcagctatgatttttgtagcaatcgcactgtttgaccaacacgtggtgtcttgcttctatccaacaccatccgaggatacaaagcaactactcacagcattgccagtaggaattggaatcattggaagcatgctgtttgttagcttccctaccactcgtcacagcattggctccacactctcttcacaataa

SEQ ID NO: 23767 - DNA, 840 bp, Zea mays
  Peptide Sequence Number=SeqID_65546
atggacgccggcagggacggggacggtgccgggaaggcgccgccgaagggccccgccgatgccacgaccgtgcctccggcgccagtggcggcttctgcgcctgggtcgagcgcggggacctcagggtcgggggagaagccggtgaagcgggtgatgaaaaccccctaccagctcgaggttctggagtacacctatgcgggtttgtggaatgaggattttgatgaatccattcaaatgtttttttttgtgttcttcctccccgctggtttttttgggtgcttttatcgattgagcatttctgggtggtttgctgcagtggagcattatccgtccgaagctaagcggctggagctgtcagcgaagatagggctttcggacaggcagctgcaaatgtggttctgccaccgccgcctcaaggaccgcaagccaccatcgaagcggcaacggcgggatgaagagtccgcactagcaccagtgatgcctccaccgccggtgttaccagcacctgtgatgccagtggcaagcagtgaccttatggtgggcgctcctgggccgtatgataagctgctgcagccggttcacttgcgaaggggtgctgggcggtcctcagcagtccctaggatttccatgccggatctcgggaggaggtattatgagccaccaccagttatgataacgccgttgatgcagctcacacaatatgagctccgtgtgattaattctgtggagtcacagctcggggaaccgttgagggaggatggtccagcacttggcattaattttgatccccttcctcctggcgcctttggtgcaccgattggtatgcatattgaaatctga

SEQ ID NO: 23768 - DNA, 432 bp, Zea mays
  Peptide Sequence Number=SeqID_65547
atgaaaaacttgagccacttcagaataaaagagctcaaggatgttctacaccaacttggactttcaaagcaaggaaagaaagcaggacctagtggacagagttatggcagtgttgttgagccagcaagatcaagaaaaatgcaagaccctacaaatactgttgcagtctcaaggagccacgaattaggagacagtgttacgtgtaaaaagaaaccggatgattctgctcaggcagttaaggttcgttgcccttgtggtgactccaagccaaatgattccatgattaagtgtattgatccacaatgcaacatatggcaacatgttggctgcgtcgtcatacccgatactgagaaatccgcggacaatatttctcctgaattaccttcctgcttttattgtgaagtgtgccgacttagcagggctgatccgtaa

SEQ ID NO: 23769 - DNA, 501 bp, Zea mays
  Peptide Sequence Number=SeqID_65548
atggcttatggcaagagaaaaattgaaacctttgcaaatttgaatgttgagctaacaactaaaattgagcaattaaaatatagtgcaccttcctcaactatcgacgaaagcccaatcaagcagaatgaaaaacttaaggctaagttagctatctctcttgatgcttatgaaagtttgctacataaactggaaactctttatattcacaacaatgagctagcaactaagccagaaagcatcaacaacaccccagatgctcctacaattgaaattcttgatatcaagaagtgtctctccttggaaggccataagtcttaccaatgcaaggtgaataccgagggagataaaaagaagaagccaacaagcaagatctctaacacctacaccaacaaggtggacaaaaaggctacaacaccttacttaatcaagaagaataaaaatggaaaggtgatagccatcaaggtgaacaaaaaagctaacaagggtaaaggagccaaatga

SEQ ID NO: 23770 - DNA, 2829 bp, Zea mays
  Peptide Sequence Number=SeqID_65549
atggtggcagcaggggtggtcggagcgccgactggggcgccgaggggtggggcgggcggaacttggtcgctggccatggagcagcgcaaaggtgcagcagctgcagacgtgcagcgcgcagttgcagcagactgcagatttcagcggaaggtggaaggaacgggaatgtcccgaactcgtgataccatctatattacttatgccaaagaagaagaggccatccggtgtattcaagctgtacacaattttgtcttggaagggaaagtgttaagggcatgttttggtactacgaagtattgccatgcatggctgcgaaacatgacatgtgggaatccagattgtctctatttgcatgatgtaggcagtcaggaggatagttttactaaagatgagatcatctcagcatatacaaggactagagtccctcagatggcatctggtgtttcgcaaagacgcacaggcactgtgttgcctcctccaggagatgatttctcttacagtgcggtggtttcagccaagcatacatttaagaatggaacacttaataccaccagtcagcccagactttcacctccaaacagtagttctgggaggtccacgcttccatcagctgcctcatgggggcagcgtgatttgaatgccaggacaacagctactggagcgacatcgtcacaatctcatacaaaaccaaaatcagaatcacaaagtaatccattttcaagttcttcagtattttcctgtacaaaaacaccctcttcatggaatgatgatacaagtacagcagcaaaaatatctgaaggacagcaactgtcagaaaaagagtctagaaccttgcagccgtataagcctggtatttcaaaggaaacacaagctttatcatcactggagtcatcactggacatagacttctcaacaataccttcagcttggaatgacgatgacattgtagtaccagatgtgatgccaaaaggaagtgatgaaaatcaagttgcaaataaaaatggtgagctaacccatccagcatccaagtcactggttttatctaagaaagacataaaaatgaacattaccagcaaaactccttcagattttgtatcaagtccagcaatatctaaatcagatgtaagtactagtgatggtgaccactcactcaccaatattactcctaaatgccttgcttcaaatgctgtagaatgccaatctagtcatactgctgtggagaaaatgttggaggatattggatccaaggacactgacatggagaagctatctgctcagatatcttcagtaacattaggtggcaacgacgagattcagagtatggcaggaaatcaacaaccagatgtaatgccatgcacatctgttgatgtgctcatggatcagaattttggcagagacctagctcatcccaatcctgacgagctcttattgccttctgaaaataaggatagtattgtttcttgtcaatatagttctgataagcgtcttgattggagtttggagatgcaaaattgtagcgttactcctttaaatgatagaatggactctgcactgctcactgacaaaattcatagtagacagctggatggttcagagcaatcatcatattcatcatttgttgaatttcctagtacagtggatacctcattgtggaatgatacagaaaataacgctgcattgacgattgacaatataacttcttcacagatgcagccagggttttcttcaactgataacacttatgccttgctaaatggaggtcaagatgggctaggtactgtatatacacatgataatgtttctgtatatacacatggcaatgtttctggacatcctggaatgggaagtcatcaccatagagcaatgggttcattaagaaacaatagtataggaagttttgacaagaccataagcgtaaataagtatgaaagaagaataatttctgatacgttgtcagagtttaatccatgggatgattcatattcgactgctaacaattttgctaggatgcttagggaatctaaaaataatgatgtccattgcattgcgccttcatggaaatcaggaaccgggatcaaagagtccagattttcatttgctagacaggataaccaaggaaacttgtttgattcatctctcagaaactgtggtactggtactgagcagaatttcagtttgctaccccagaattctcgaggaaatatttaccagaatggccttgcattccaatctctagagaatgaattttcaaacaataactctcctggtgtattagatatggcaactactgaaaatcttctccggggtactgttcagggtggcaacagtaatcattatcaatctcagtttggaaggcactcaagtgacatggagtttgatgatcctgctatattagccatgggcaaagggctgatgcctggaattggcgattcagggctggagatgaaaaatactcctgcttttcaagcacagttgcaaccagcaagtagtgatccaagatttcagttacatgtacagccaaatgtgcagtctcgtcaaaacatgagattcacagaccctatgcaagatggtttgaaccatatgaacgataattacctggcatccagatttttagctcagaaccagggtcctctatctccttatgtgcagattccgcaacaacccagaaactcgcaggttataaatggtcactgggacgggtggagtgatttgagacaagggaataacgctcctatgtcagacatgtccaggatattatatccaagtgaagtgaacaagttgcatatgctgggttcaaatgatgtccataacagagcctttggaatgtga

SEQ ID NO: 23771 - DNA, 231 bp, Zea mays
  Peptide Sequence Number=SeqID_65550
atggacgactacgcccgggagatgatggagctcaagacgctcgtcacccgcaccctcgagaagaagggcgtcctcgccaagattaggcccaaggacttctggaagaatgaactgaaagacttctctaacaaaagtggagctgaagggagcaggagtgctgaaagtggtccaatgcttttagatgttctcgaagaaaagatagtatattactatattgagctggagcaataa

SEQ ID NO: 23772 - DNA, 513 bp, Zea mays
  Peptide Sequence Number=SeqID_65551
atggccggagggaagaaaggcaagaaagggcgccgccccgccgatgggaagcgcaagcgccccctgagtcctccctcggaggactttggggactcagagtactcggaggaagtctcctccgagtatgatccctcgctcattccggcgtcccccgtggcgtcgtccgatgattcggacgactccatggggctgtccaccgcagagcggtcttacatctggtccgtcgagagcacggggctcggtgggtcggatgactcggaggaggcctcctcggaggaggtggaggactcctcagactccaaggagggcagcgccagcgagggcggcggcgacgacgacaagggcgacggaggcagcagcgatgtcggcgacgacagcaacagaggcggtgacggtagcggcgatggcaacggcaacggtgacggcggcaaaggcagcaacaggggcggcgacggctacgacaagggcggcggcgacgacagcaatgccggtgacagagtgccactggcttaa

SEQ ID NO: 23773 - DNA, 564 bp, Zea mays
  Peptide Sequence Number=SeqID_65552
atggttaaaaattttggcaggaaaacaatgcaaatagcaatgaatgctgtggtaacttcacacctactcgtctgtttatatagtgctgcagattctggtatttttgcaatcgcatctgtcggaattcaaccttttgccaaggcaaaggtttctgggaagtgcttcgcgcacgtcttctcgggttcctctacaaaactcgtggaaatcattagctgttgtttacccacattggccaaccccagcaatgatgtatccccttgctatgataatgttggtccaatgatgtctcaggcacacaccttcaaggtgcttcctgaacatgtgaaggaggttccaaagttcagatatgcgatctacatgaatgagctaaccgaagtggcgtccgccgtctgtgatcatatttccaccagacgtgcatcaaggctgccatttaggcacataagaattgacctacctgctagaggagacttattccaatccagcaacaccgagtgtacctcccattgcagtcattttgctacaagtttgtcacagccggttttgggggaaaaaccaaacacatag

SEQ ID NO: 23774 - DNA, 171 bp, Zea mays
  Peptide Sequence Number=SeqID_65553
atgggggatagtcacattttgcccgagcgcaattatgactcgcccgagctcatctcaggtgactgttcgtcgattgtaaaggacataaatgtaattttacgcaggttgcaccctgtgcctattgaaagggaaatgtgcccttgggccatttctaagtattttggtgattga

SEQ ID NO: 23775 - DNA, 411 bp, Zea mays
  Peptide Sequence Number=SeqID_65554
atggtcatgcatggtagtatgtacagacctaaaaacaagggtataggactacttgctgtgcttatacaataccaaccacatgtgttcatgctcagttttgcaatcataaatgattcacaaaaaatgcccctatgtgctcatgatcaggtgcatgaattacttggtataggaatcactgggagattgtctacattccaaatcggggacggagattgtgcgcattccaaatcagggacggagactgtgcttgacattgccacaatcggcgtcgatggcggggtggagcggcgcattgccaaatctggcttccgtggtggtgcttgtgggatgtgggggagcggagtgggaggcagagtgcggtcaaggttgcggattacttgctggatccagggagttggatggggacgctga

SEQ ID NO: 23776 - DNA, 546 bp, Zea mays
  Peptide Sequence Number=SeqID_65555
atgggtgtgttcaaagagcgccttgtgttcgtggtaggagacgagcagttggctctggcctctataaatagactgcttgcttcgttggtgtcttcacatatcttccgatcgtctgtttcttcttcccccactctcctcttctcctcctaccaaccatgggcagaggcaagagaggtagaggccagtctcgtcgtgtcggcgacaaacgcaagcgctccccaagtcctccctcggaggacttcggtgactcggagtactcggaggaagtctcctccgggtccgaggggttgccggtctatgccccccccggcgtcgtccgatgactcggacgattcccaggggttagctactgaggtgtggatgtacatccgctccgtcgagcgcgccgggcttgaaggctcggatgagtcagaggtctcctcggactcgtccgaggaagagagcgacggcagcgacggcggtgacgacggcgacggcgacaggggcggcggtgatggcggcaggggcggcggttgtggcagaaccgcccaaactattctagcttaa

SEQ ID NO: 23777 - DNA, 774 bp, Zea mays
  Peptide Sequence Number=SeqID_65556
atggaggctaatgaggagggcatctacaataatgatgggaaactttcggcgcgcggacaatcacctccggcgatcgcctcggcccggacccatcgcggggggcggcaggactggagcccggccggcgcttcgaaccagcttcgcgaccaccggcctgcctccctccgcggcatcacgccaccgccgctggccggctgccgcgaacccgccggccaggcacccgcgacggggacacgcacggcggctgtcgaatggggaatgtcgatgacgcacgggaccgacgtctggtcacgtcgcgcacggcacgatagagacgacctggaggagcagaccaggacttgggggctctctgccgagtctcctggaggagcagaccgtaccagtggcaagcagttgcgccccgtgacgacgcagcgcaacggtggccactacaacagcaacggccacggcgacggctaccccgcgcgcacggcggctgccggcgccgaggcgggccgcaaggcgaccaacgacgtgaggagcggccccgtgcacgccggcgcgcaggagaaggcggcgtcgtacccgtacgccggagccgacgggacgctgaagcagcagcagcagcagcccgccgccgccgccgaaggccatggagcgcgcggtgccgcgccgcacagctacggccactacgaacgtgcacagccgccgcctgcccacagagacagaggggacgccgcggactcctactactacccgcctgccgccgctactgccgatcacgaaagggtttag

SEQ ID NO: 23778 - DNA, 105 bp, Zea mays
  Peptide Sequence Number=SeqID_65557
atgtacattggacaagttgggttgaacagattaagacggatcgagatcttagttgttaagcagcttgacagtgcagtacgaaaaggagaaaccaaggccagttag

SEQ ID NO: 23779 - DNA, 1998 bp, Zea mays
  Peptide Sequence Number=SeqID_65558
atggagccgctgccgtcggcaacggccgccggcgtgggggcccccggccctggtcccgggtaccccgagtccacggagtcttctccgcgcagccggggtggggattcgtgggacgagccctttccgtcctctgcagcggcggctgccggcggcgggggccggctccgcctgatgtgcagcttcgggggccggatcgtcccgcgcccgaccgataagtcgctctgctacctgggcggggagacccggatcgtggccgtggaccggcacgcgtcgctcgccgacgtccacgcgcgcctctcgcggtcgctgctgggcggtcgccccttcacgctcaagtaccagctacctaacgaggacctcgactccctcatctccgtctctacggacgaggacctcgacaacctcgtcgacgagtacgaccgcatcgccgcgacctcctccggcagcggatcctcgcgcacctcccggatccgcctcttcctcttccccgccacccccgagtcctcgtcctcgctcggctccctgctggacgactcttcgaagtccgagaactggttcgtcgacgccctcaacagcgccatctctggctccctcgacggcatcccgagagggatctccaccgactcagcttctgtcaactgccttctcggcctagaggacgactcctccgtgcactcccgcagcggcgtgaccaactcggctcccgcggaggaccagcgcgccagccagccgaagctcccggcgggcgccaccgccgtcgctgccgccgccggtgccgggaggcacccgcacgacgtccagtccgtgccagactcgccgatgctggataagaactcttcgttcgggtccacctcctcggccccgtcgctatcgaaccttccgcctatacgcgtgcggccggaggaccgcccgtcggacgcccgcatcatgcaacctaccgccgtggaggaccacttcgcgcagatggggatctccgagcagcagctgccgccgtacatgcaacatcaacagcaggtgccgatccctgccatgaccggcatgtcgccctctgaggcgtccagcagagtgttctctgacgatgataagtccgatcacggtggcggaggtcggaaagcacaacttctcaagcaggaggttccggcaattgttgatcccaccaacagagccgtctactataatgacagatctcctccggccgacttgaaacgagacatgccggtgggaacggaagctgccagctaccgcctccctgtatcagctccggacgctgcagctgccgctgcaacacaggtcccagctggatatgtccttgcccagatgcacgcgccacagcaacatccaccaccgcagcaacatttaccaccgcagcagccacagcaaccagctcctcagcagcagattgtttctgccggaaaccagcatttcatccacaacccggccactggcaccttcattccaatccagtcctattaccaccaccaccctgttccacagcaggcaccccagaccgtgccgaggcagcagcaggcacccgcattcgacccaaacacggggatgtactaccttcctatgcagcagaacgcacaccagccatacagcatgcctcctggcgcccaggccaccttgccaccacctcctcctacccttgttgacacagcgccaaagccgaccgtgccaatccctcagatggctgtaaggcctgaactgcaacaacagcctggcgtctatcgaacaacagctgccgccacgcctgctccagcgcccagcgcagctcctcctggatatgctgggatggcataccaccacatcattcagtcgcaccaccacccctcgccacagcctgtctcaaacatgatggctggcaactttggttacgagtacgctgatcctacgcgcccacaggtctactactcgcaggcggctgcagcacctccaacgttgccaccgcagtatcagcccatcgtctctcctgatgccggacaggccgaaaaacattga

SEQ ID NO: 23780 - DNA, 174 bp, Zea mays
  Peptide Sequence Number=SeqID_65559
atggcaaggggcgatgacgcggataatctctgggatagggcaaggaggcctgatcgcgggtggccggggggctcgggtcttgttgggctggtgagagttggagctggctgtgctatggtggcgtggcgtggcgcgccgttattggtccaactaatttacggtgaggagcagtag

SEQ ID NO: 23781 - DNA, 588 bp, Zea mays
  Peptide Sequence Number=SeqID_65560
atgccggccggagggttctcggtctcggcgccgtccggcgtcgagttcgaggctaagatcacgccgatcgtcatcatctcctgcatcatggctgccacaggcggtttgatgttcggctacgacgtcggcatctcaggtggtgtgacgtcgatggacgacttcctgggcaagttcttcccggcggtgctgcggaagaaactggaggacaaggagagtaactactgcaagtacgataaccagccgctgcagctgttcacgtcgtcgctgtacctcgcggggctgacggccaccttcttcgcctcgtacacgacgcggcgcctcggccggcgcctcaccatgctggtcgccggcgtcttcttcatcgtgggggtgatcttcaacggcgccgcccagaacctcgccatgctcatcgtcggcaggatcttgctcggctgcggcgtcggcttcgccaaccagaacctagatggcagccagacgagcgtggacacctgggcatcggtgacggtgccgagccgactagcttgcactgtgtttaattttcaagcttcaagattccccacacagggtcttgcagtttacgattgctga

SEQ ID NO: 23782 - DNA, 966 bp, Zea mays
  Peptide Sequence Number=SeqID_65561
atggcacctgcgggcaatggcgcggacgaccatgagctgccactcttccatccgtccccgtgcgctcactactacgtgcagagcccctccgcggcgtcgcacacgctgagccacccggcgtccgactccatggcgctcatcctctccccgttcccgaacctccaccacgacgcggacgcccgccactccagcgacggccgcgaccacgagcacgaccacgaggaggcctcgcgcctgaccctgtcccgctactcctcctcgcgcggatccaacagctccttcccggtcggtgacaagaagcccggccgccggcggcatgcgctgtcggggcggtcgtcaggccgccacgacgatggcgacgacgacgcggacggcgaggcccagaggagcggggcgtggaggtacgtgaagctggacccggaggccccctgctgctgcatcgcgttccaggtggcgtggagggtggcggccagcgcggcgttggcgctgctcgtcttcgtcctggccaccaggccgcggcacccccgggtgtccttcagggtgggcaaggtccagcggttcgcgctgggggaagggctggacggctccggcgtggagaccagcttcctcaactgcaactcctccgtggacatggcggtcgagaaccactccaagggagacggctggtcacacgacgtcggaccgcgcggcacctcgacggtgaggctctttgtggcggcgcaggacaagcccatgtacgcggcggggcggggcatgcaggacctgctcgagtccagccacggcctgccactcaccgtcacggtcagggcgcggtcccggtaccgagtggtggggagcctggtccggctgacgtaccgccacgactccgagtgcgtcgtgctcctcagaaggacgcccgacaggagcaacggcatccgtgccgctgccggcagcagggccacgaccacctgctccgccttaagctag

SEQ ID NO: 23783 - DNA, 1179 bp, Zea mays
  Peptide Sequence Number=SeqID_65562
atgcgcgcgttccaacagtccaagccaacgtatacgacatgcaccgcgcaattatgtcagagcaggcgagactgggacagtgttcatgtggccgttcccctgttcctgtctgagatcgcgccgacgaggatccgcggcgggctcaacatcctgttccagctcaacgtcaccatcggcatcctgttcgccaacctcgtcaactacggcacgtccaagatccacccgtgggggtggaggctgtcgctgtcgctggcaggcatcccggcggcgctgctcaccctgggcgcgctcttcgtgacggacacgcccaacagcctcatcgagcgcggccgcctggacgagggcaaggccgtgctcaagaggatccggggcaccgacaacgtggagccggagttcaacgagatcgtggaggcgagccgcgtggcgcaggaggtcaagcacccgttccgcaacctcctgcagcgccgcaaccgcccgcagctcgtcatcgccgtcctcctccagatcttccagcagttcacggggatcaacgccatcatgttctacgcgccggtgctgttcaacacgctggggttcaagagcgacgcgtcgctctactcggccgtcatcacgggcgccgtcaacgtcctctccacgctcgtctccgtctactccgtcgaccgcgtcggccgccggatgctgctgctggaggccggcgtgcagatgttcctgtcgcaggtggccatcgccatcgtgctgggcatcaaggtcaccgaccactccgacaacctgggccacggctgggccatcatggtcgtcgtcatggtctgcaccttcgtctcctccttcgcctggtcctgggggcccctgggctggctcatccccagcgagaccttcccgctggagaccaggtcggcggggcagagcgtcaccgtctgcgtcaacctgctcttcaccttcgtcatcgcgcaggccttcctctccatgctctgccacctcaagtacgccatcttcgtcttcttctccgcctgggtcctcgtcatgtcgctcttcgtcctcttcttcctgccggagaccaagaacgtgcccatcgaggagatgaccgagagggtgtggaagcagcactggttctggaagcgctacatggacgacgacaaccaccacatcgtcaacggcaagctcaccggcgcctccgtttaa

SEQ ID NO: 23784 - DNA, 660 bp, Zea mays
  Peptide Sequence Number=SeqID_65563
atgcgcactgtccttatgtgtgacatgttcggagttttggtgcagataaatcctgaaaaggcccgggaggagtttcggacacttggagagttaaaattgggggaattgttggacacaccaccacctggcttggatgaagcaattgcaatttctaaggttatgcaattccttgaagcacaagaatacagcatgtttagtcgcattgtatttgacactgcccctacgggccatacactccggttattatccttgccagatttcttggatgcgtccattgggaaaatcttgaagctgaggagtaagattgcttctgcaacatcagctattaaatcagtatttggacaagaggcgaacaaattagagcaactcagagaaaggatggtcaaagtgatggcaatcagtgagtcatcaagactgcattcttcgttgcaaaaggaaagtgttcctgtaaggagactcattgtgaaccaagttctgccaccttcaacatcggactgtaaattctgttctataaaaagaaaggatcaaacgcgtgcattggatatgatacggactgacccagagttaaaaggtttgaacattatccaagcacctcttgtggacatggagattagaggtgttccggctctcaattttttgggtgatatactgtggaagtaa

SEQ ID NO: 23785 - DNA, 471 bp, Zea mays
  Peptide Sequence Number=SeqID_65564
atgacgcttgggcccaaagcctacaaaaccggcccatttccccttccacttccgccggcccacgcgcgcggagtcgctgccatatgggcccactcgtcagcatacctgtttgctcaagccggctactgcgttgtagggtcagcgggtcagcttcttcctcgtgagaaccggagcgtgcgagagactaccggaatcgatcgcaacggcgctggctcaactgcgcgcgaaaacctcgcccggatccctattcctcagccgttttcctcgggcgtgagatccgctgttggctctgctttcaaccaccgtgacagactccaacgaagcttgccatggccgccgggatcggggcttacggttgtatcgcgagccgtggacggggagagattcagtgggaaggagatggtcgccttgtgcttcgattccgcgggccgcaccgagcgggagcggagtactgcctcggcgcaggatctg

SEQ ID NO: 23786 - DNA, 261 bp, Zea mays
  Peptide Sequence Number=SeqID_65565
atgttggagctgctggtgctgccgccggcgctggacctcctcctccacagctgcctcatcgtgtcggtgtcatctctactgatcatgctcgcgctccagccgctactgcccggcggcaccgacgtggcctcagcgagcaggggcgtgcgctccgcgtcgcgggcgggtcctcgcgcgcctcctgccgtcgtcgtcccgcacccgcaacggcttgcccgtggcgccgcctcctcctcctcctcccccactgtattgcaagtt

SEQ ID NO: 23787 - DNA, 1338 bp, Zea mays
  Peptide Sequence Number=SeqID_65566
atggccctctccgctgcgcttcgcctcccgctcccgctccctcgccttctcggtccctccgccgtcatcttcggcgccgcctcccgccgccgcgctgccgccgccgccgccaacgcggccgccctccgcctcctctcggcctcgtctcccagtcccgcgtccttctcttcgcggcccacgcgtcccctccgctcgcgccgccgcaaccgcggcgacgatgggagggcggcggcggccggcggggccggcggtggggagggcggcggagctggactggtggtcaaggagcggattctgcccgtcgagctgcacaaggaggccacggaggcctacatgtcgtacgccatgtccgtgctgctcggccgtgcgctccccgacgtccgtgacggtctcaagcccgtccaccgcaggatactctatgccatgcatgagatgggccttgcgtctcgtaggccattcagaaaatgtgccagagttgttggtgagccatttatgctgcttctgctgccccgcgtgatcacgctaggctgctgccaggttttgtatgcgccagagcatcaccgtgcgttcttcgtgcccagactgcctccaccgcgcgcatgcttgggtcgccactccgcgtccttcgtgacggagctctgtgtactggagcgcatgctcgcactgggccaccgccacactagagctccgccgccgggcgaggccactgccattctcatcgactactctctatgcatcttccatattcaacaaagaaataagagcatggcccatgagccatgtgatttttccatgaggtacccgcttgttcaaggacatggaaactttggctctgtagatgcagaccctcctgctgctatgcgatacacggagtgccgcttggattcgttagcagaagccatgttcttgactgatctggagctgaacacagttgactttgtgccaaactttgataactcacagaaggagccatctctactgccatcccgtgtcccatctttgttgttgaatggttcttctgggattgcggttggaatggcaacaaatattcctcctcataatctgggagagcttgttgatgtgctttctgtaattattgaaaaccgtgaagctacaattccataccaaactaacaaagctactcttgtacaaaagatagctgagcttgttgaagataaggtattggaaggtataagtgatattagggatgaaagtgaccgcactggaatgcgtgtagtaattgagctgaaaagaagtgcagatcctgctgttgtcctgaacaacttgtatcgtcatacagctctgcagtctagctttagctgcaacatggtggcgtaa

SEQ ID NO: 23788 - DNA, 1473 bp, Zea mays
  Peptide Sequence Number=SeqID_65567
atgggggtagcggtgagcgacggcaacgcgtgcgatgcgactcacactctcactcgccccgccacgtgcctcgccacacgcgcggcggctcgagacgcctgcttgccatgccggcctacttctctctttttctttcttccgtacgggcactcgtgtcgacgcatgggtcctgaatcagctgacgtcgcccgtgacgccacccgcggtcccgtccaatcccgggtcgctgaggtggccgtccacgagcctgtcgcaccaccacgtgccctttccctcccgaacccacacccacctccgctttcccgcggcatcgcactaccgcccgcccgccgctatatatccttcctctgcccgcggttctcagcttcaatgacagcgcagaacccgcccacaggacaggacacacagagccgagccaccccacccaccatcggcgaccagcagccagccgcgggagcgagctgtttaaagacaccgagtcggagtcggacggaggactggcaggcacaaccgaagccaccgcttctagttctcgggttcatcgccagcaatccagaccacataatgggacagccggtgacgaggaggagggagagggacgcggaggcggagctggacctgccgccggggttccggttccaccccacagacgacgagctggtggagcactacctgtgccgcaaggcggcggggcagcgcctccccgtgcccatcatcgccgaggtggacctgtacaggttcgacccgtgggacctgccggagcgcgcgctcttcggggcccgggagtggtacttcttcacgcccagggaccgcaagtaccccaacggctcccgccccaaccgcgccgccggcgacgggtactggaaggccaccggcgccgacaagcccgtcgcgccgcgcgccgccgccgccgacgcccgcacgctcgggatcaagaaggcgctcgtcttctacgccggcaaggcgccgcgcggggtcaagacagactggatcatgcacgagtacaggctcgctgacgccggccgccgcgccaagaaggggtcgctcaggttggatgactgggtgctgtgccggctgtacaacaagaagaacgagtgggagaagatgcggctggggaagggggcagccgccggcgcagtcaaagaggaggaggccatggacatgagcacctcccactcgcagatcacccactcgtggggcgagacgcgcacgccggagtcggagatcgtggacaacgacctgccgttcccggatccggcgatgatggtgcccaagaaggagcgggtggacgacggcggcagcgccaggaccagcgacctgttcgtggatctcagctacgacgacatccaaggcatgtacagcggcctcgacatgctgccgccggccggcgaggacttgtactcctcgctcttcgcgtcgcccagggtcagggggaaccagcccaccggacccgcggggttgggccccttctga

SEQ ID NO: 23789 - DNA, 519 bp, Zea mays
  Peptide Sequence Number=SeqID_65568
atgacgcttgggcccaaagcctacaaaaccggcccatttccccttccacttccgccggcccacgcgcgcggagtcgctgccatatgggcccactcgtcagcatacctgtttgctcaagccggctactgcgttgtagggtcagcgggtcagcttcttcctcgtgagaaccggagcgtgcgagagactaccggaatcgatcgcaacggcgctggctcaactgcgcgcgaaaacctcgcccggatccctattcctcagccgttttcctcgggcgtgagatccgctgttggctctgctttcaaccaccgtgacagactccaacgaagcttgccatggctgccgggatcggggcttacggttgtatcgcgagccgtggacggggagagattcagtgggaaggagatggtcgccttgtgcttcgattccgcgggccgcaccgagcgggagcggagtactgcctcggcgcaggatctgggggcgccggtgttgactaaggggagaagatgggttcctggtcgttag

SEQ ID NO: 23790 - DNA, 687 bp, Zea mays
  Peptide Sequence Number=SeqID_65569
atggatgctctaggtcataggttcgaagcagcctctccgcatttgcggaagaaagttaagattggcagacccgggtataaagtaaccaaacaatatgatcctgagacgaagcaacactcgtttctctttgagattggttaccctgaaattgaagataattgcaagccaaggcaccgcttcatgtcatcatatgaacagaaagtccaaagttgggataagaggtatcaatacctactttttgctgcagacccctatgaaatcattgcattcaagataccaagtacagagattgacaaatcagcgagcaaattcttctcttactgggatcctgacaagaaggaatacctgctgcaattgtacttcaagccaaggccgccagaaggtagtaaaccaccaccaggtcctcctggaactttgcctaatgggactggggctcctggtgctccaccaaggccaccggggcaagctcccccaccacccccgccacaaattccaccgccccctcctgcacctatgggaatgccccctaggattcctccaccacctattggggctgttcaacctccgccacctccagcacgagtggcaaatggtctgcggccaatgattccaccgccacctaacttcactcccggagcacccccaccgcgccctccaatgcaaggctttcctgggcaacagcagtag

SEQ ID NO: 23791 - DNA, 1904 bp, Zea mays
  Peptide Sequence Number=SeqID_65570
ataagtccctgatccggtccgatgatcccgagtggttcttcttcgcccccaaggaccgcaagtaccccaacggtagcaggtctaacagggccaccgaggcgggatactggaaggctactggcaaggacaggataatcaagtccaagggcgacaagcgcaagcagcataccatcggtatgaagaagaccctcgtcttccaccgcggtcgtgcccccaagggcgagcgcacggggtggattatgcacgagtaccgcaccaccgagcctgagttcgagtccggcgagcagggtggttatgttctttatcgcctcttccgtaagcaagaggagaaaactgagcgctccagcccagaggaagtggatagaagtggctactcacctactccttctcgttcttcacctgacaacctagaggcgaatgaggaagctaatacaccattaaataaggaatctccagaatctgctctgcatgaaagcccgattgagctgccaaaatctgttgaaaccaatggtggttcaatgacaaggtggctggcggacagaaatgataacttgatggttactgcaccagatgtttcccatatacctttccacggacatgctgctggtgtagctaaggttgatccttctgttggtgcttcaggccacttagttaatccccacaatggaaatgatgattataacaaatttgtgtctgatttcactcccattctaccacttgaaaatgcattcttcactgatatacaacaaggagcttttggttttgatggcatcatgaatcctcttgatccccttgatgctttcttgaatcaaacacttgttgatcctgatgaacattcatcaacaacatcaaaagttcagtatgattctgacattccaacagaatttgagaaccattggaatatgaaggttgagcctcaagatgatcaatgctggtgggcaaacataggatttgagccagacgaaccaaatcctctgcttccttgtgacaccactgaccaagacatactttctgttgactctggtgctgattccttcaatgagcttttcaatagtatggaagagactggaattattgttaggcctcaacagttggactccactgtgcaaccaaaccatgtgttcgctagccagggcaatgcagcacggaggctgcggctacaggttgagtctagggagatcataactaaagatgagagtgaagatgaagtatcatgtgttctaactccagactgtttgaacgattctgttgaggagtccactgcagagaaggatgtggcttctgatggggatgaggctgagtcaacagggattgttattagaagccatcaccctgctccaagatcaagctcagagagttcattcactcaacagggaactgctatgcaaaggctgcggctacagtcaggccttaacaaaggccagcgtcctagtactgatgattcatcaagctgcattatagacgaaccaggaagtcagcacaaagcagaaaaagcagagattgaagaggatgcgagtacaaacctcgctggaagtgctgatgatctacctggtaatatccatgatgatgagcaaaagaacatccctgaacatggtgctgaaatgacttctccagaagccaaatctgttctgaggttgcggaagacttctgaggaaggcaacaaggatgtcaagcaggagagttgtctcgagccacacgtgagagcaccaatgcagaagggaggcttccaatcatacatcatctggctggttcttccggtggctctgctcctgcttctctgtgttgggacatatggatggaattttcggttcctgaacccagttactgatggcttgttgatctgttggcgtgttcgaattcgtttggacatgccacagcatggtctgaggggatacaaggactga

SEQ ID NO: 23792 - DNA, 636 bp, Zea mays
  Peptide Sequence Number=SeqID_65571
atggcgtactatctcaaggacgcggtgctggacggcggcatcccgttcaacaaggcgtacgggatgacggcgttcgagtaccacggcacggactcgcgcttcaaccgcgtgttcaacgagggcatgaagaaccactcggtgatcatcaccaagaagctgctggacttctacacgggcttcgagggcgtgtcgacgctggtggacgtgggcggcggcgtgggcgccacgctgcacgccatcacgtcccgccacccgcacatctccggggtcaacttcgacctgccgcacgtcatctccgaggcgccgccggtccccggcgtgcgccacgtgggcggggacatgttcgcgtccgtgcccgccggcgacgccatcctcatgaagtggatcctccacgactggagcgacgcgcaactgcgccacgctgctcaagaactgctacgacgcgctgccggaaaatggcaaggtcatcgtcgtcgaggcgtcttccacgtcgacatgatcatgctcgcgcacaaccccggcggcaaggagcggtacgagcgcgagttccgcgagctcgcaaagggcgccggcttctccgggttcaaggccacctacatctacgccaacgcctgggccatcgagttcatcaagtga

SEQ ID NO: 23793 - DNA, 714 bp, Zea mays
  Peptide Sequence Number=SeqID_65572
atggcccccttcctgcatgttgttggtggtggtggcatacataataatggccgacatgcatgctggtgggcggtggtgggattaaatgagactacaataaagaaactaattttagtcttcaaaccaaacggacctgattcgctatcggcggcgagtctgaaatcatgggaggtgggagcaacgtcgtcttcgcggggtttggtgaagaggcgcgtgagaagaaaaagggagctcagcatacgtcaaaagtccacagggaaaacgatgattccagctccagacctcaagtatggggcaaatgaaacggcttgtaggtgccgcggcgccgtcgacccttggctgcacaattgtgagcagcacacgatacggcggcactgcctagcatatattggtgaagaagagaaacacgcccatgacaatgccgacgatgatggcgggctccggcaacgcgcgcaaggtggccgcaagctcggcgccgacctcgcccacgcggacgaacaccttgcccttcgtccacagcatgtaatcgatgctgacctcgacattcaccatggcagcagcggcgaccgtatatatcggcgaagaagaggaacacgtcagtggcgacgccgacgacaacagtgggctttagcaacacgcgcaggttggccgcgagctaggcagcgaccttgccccacgcgggcacacaacgcatactctgtccacaacacgtaa

SEQ ID NO: 23794 - DNA, 327 bp, Zea mays
  Peptide Sequence Number=SeqID_65573
atgggggacaagaccggcgtcctatccggctcgccccggaagatccagggccctcttacagggggttggccgcgcggggaaggacgggacggcgcgcgcatcagcctctcgctccctcccgcgtggacacttgtaaccccctactgcaagcgcacccgacctgagcgcgggacaaacacgaaggctgtgggtttccccttttacgtttgtctccctccggcttttccccccttcgcgctccgtctcgtcggtccagggaccccccggggtcgaaacgccgacaatattcgccctattcacccccctctaggcgactttcaggcatga

SEQ ID NO: 23795 - DNA, 822 bp, Zea mays
  Peptide Sequence Number=SeqID_65574
atgaccgcgtcaaaaaaggtgtgccacgttattcaatttcgtatccttttcctcttcctctttctctctcttacaacagggaccgggaaaggggataccccgaaagggatccttctccgtgaaggaaacgggccccgagcccccctactgatcagaggttcgaaggctggcccctcggaggggttcaacagccgcctcagagcgctcgggctccgcgcccactactggtcagaggttcgaaggccggcccctcggaagggttcaacggcctcctcaggccactcgggctccgtgcccactactgatcaggggttcgtaggctggccctcgaaagggttcgacagccgcctcagacgcagagcgaggtatgaccctgggtacgttcgatacataaccaaggctcgggctacgctcctgagggctcggactcggcctcgaccccggaagacgacgaactctgcctcgcccgatcccagggctcgacctcggccccaaaagacgacgaactccgcctcgcccgaccctagggctcggactcggcctcagccccggaagacgacgaactccgcctcgcccgatcctagggctcagactcggcctcggccccggaagacgacgaactctgcctcgcccgaccccagggctcggacttggcctcggccccggaagacgacgaactccgcctcgcccgaccccagggctcggactcggcctcaacctcggaagacagactcgacctcgacctcggaagatagactcgacctcgacctcggaggagcctccgcctcgcccaacctagggctcggaccgaccacgccatag

SEQ ID NO: 23796 - DNA, 2049 bp, Zea mays
  Peptide Sequence Number=SeqID_65575
atgccggagccatcaaccaccgaggggcggcgtatccagggagagctcaagaatctcctggaggatgccgcgatccgacgggccgtaagctctgcctcccgaaggcaggggtacccctcggaacatcgcgcctcgacttcccgattcatgtgggaagcctcggtccacaccgggcgcacgcgcaacacagcgcctgcggccccgggtcgcctcggcaacgagcaacatcaccgtaaccgtcgagcccacctcgacgagaaggtgcgccgaggctaccaccccaggcgtgggggacgctacgacaacggggaagatcggagtccctcgcccgaaccacccggtccacacactttcagccaggctatacgacgagcgccgttcccgacccggttccgaaccccgactacaatcgcaaagtactcgggggagacgaggccggaactgtggctcgtggactaccggctggcctgcaacctgggtggaacggacgatgacaacctaatcatccgcaacctccccctgttcctctccgacaccgctcgggcctggctggagcatttacctccggggcagatctccaactgggacgacctggtccaagccttcatcggcaacttccagggcacgtacgtgcaccctgggaactcctgggatctcctaagctgctgccaacagccgggagagtccctccgggactacatccggcgattctcgaagcagcgcaccgagctgcccaacgtccccgactcggatgtcatcggcgcgttcctcgccggcaccacctgccgcgacctggtgagcaagctgggtcgcaagacccccacccgggcgagcgaggtgatggacatcgccaccaagttcgcctctagcccagaggcggttgaggccatcttccggaaggacaagcagccccagggccaccagccggaagatgtccccgaggcgtccactcagcgcggcaccaagaagaaaggcaagaagaagtcgcaagcgaaacacgacgccaccgatgcggaccttgtcgccgctgctgagtacaagaaccctcggaaacctcccagaggcgccaatctcttcgacaagatgctcaaggagccgtgcccctatcatcaggggcctgtcaagcacacccttgaggaatgcgccatgcttcggcgccactttcacaaggtcgggccacctgcggaaggtggcagggcccacgacgacgataagaaggaggatcgcaaggcaggagagttccccgaggtccacgactgcttcatgatctacggtgggcaagtggcgaacgcctcggctcggcaccgcaagcaagagcatcgggtggtctgctcggtaaaggtggcggcaccagtctacctagactggtctgacaagcccatcaccttcgaccagggcgaccaccccgaccgcgtgccgagcccggggaagtacccgctcattgtcgaccccatcgtcggcaacgtcaggctcaccaaggtcctcatggacggaggcagcaacctcaacatcatctacgccgagaccctcgggctcctgcggatcgatctgtcctcggtccgggcgggcgcggtgcctttccacgggatcatccccgggaaacgcgtccagcccctcggacaactcgatctacccgtctgcttcgggactccctccaacttccgaagggaaaccctcacgttcgaggtggtcgggttccgaggaacctaccacgcagtgttggggaggccatgctacgccaagttcatggtcgtccccaactacacctacctcaagctcaagatgccgggccccaacggggtcatcaccgtcggccccacgtaccgacacgcgtacgaatgcgacgtggagtgcgtggagtacgccgaggccctcgccgaatctgaggccctcatcaccgacctggagagcctctccaaggaggcgcaagacgtgaagcgccatgccagcaacttcgagccagcagagacggttaagtctatccctctcaaccccagcaacgacacctccaagcagatccggatcggctccgagctcgatcccaaatag

SEQ ID NO: 23797 - DNA, 303 bp, Zea mays
  Peptide Sequence Number=SeqID_65576
atggcgatcttctcccagaccacgagcgatgatgtcgtggggacctgcgccatcacaaagaggcacgacaccacactgttaagagcctcagcccccttcccctgctcccccgcaaatgttgtggtgccgtcaggtgaccaatgttactctaacagaatacgagttcaatcagaagattgtgccacatttgtaattccgaagaagcctacatattctatgttttggcatacaactctcacgctaagaaagacatcttttatatccatcaacttcaacttgatctacagactatttgtgttgtaa

SEQ ID NO: 23798 - DNA, 99 bp, Zea mays
  Peptide Sequence Number=SeqID_65577
atggcgcacggtggttctggcccgaccgaagtgctccggcgagcaattagtccaccaccagaggatatcctcgcctggaaggaccacgaagacgtgcgg

SEQ ID NO: 23799 - DNA, 324 bp, Zea mays
  Peptide Sequence Number=SeqID_65578
atgaacgaaggccttaagccgaaggtccgaaaaaacactttcccttcgctagaatggcgaaagtcaatgaaaaatgggacaagtgcttgctccatgtctgaggagaagaagatgactgaggagaagaagatgaatgaggaaaagaaattgtatgaggagaagaaagttgtagattcttttattgctggattttatgaatctatggcaaaaacgaatacagagaaaattaccaaggagataatggaggatttgtctgaagattctgatgacagtgatgattatgatgtggaaagtggagatgaagattatgaggaccggccctga

SEQ ID NO: 23800 - DNA, 387 bp, Zea mays
  Peptide Sequence Number=SeqID_65579
atggccgcgaccggggcgtacctgacgctggcagcagccaagggaatgcgggcagctcccggggaagaagaacaggagctcgggcggctgggcactggcgtgtggtgggcgttggccgctgcacacgtgctggctgggtgggggcgtggcctggtcgatgggccgagttggtctggcggcctaggaagggggcgctcgctgggccgagcaggccgaggggggaaggtgctgggtcgcgggggaggttgggccgacgtaggccgacaggggaaggacgagtgccctagtggccagggtgtcacgctccacaagatcgtgacagccataggaggtggtgtatcggttgctaaggcgcagcgtctttggaaggctgtagtcgggccgtga

SEQ ID NO: 23801 - DNA, 288 bp, Zea mays
  Peptide Sequence Number=SeqID_65580
atggatggagatggcgcttgcaaccaacacgaggccactgcgttatgcaccgaggagttggatcgagtcctcttccagcgaggagtccccatcggggtgggaaatacgtctgccgccgtcgttcgtggagacatagcagccaccgggcgtctccactgcggggcatggccggggcgccgccgctacgggccacgcagccgccacataaaggcttacccacacattaaggattgtattggtggacttgatggtacgcatattcgggtatgtcttccaccagatgaccaa

SEQ ID NO: 23802 - DNA, 504 bp, Zea mays
  Peptide Sequence Number=SeqID_65581
gcgccagccaaggaagggatgccaccggcgggccgcattccgggggtcatcgtcctggccctcggcgtcggggcgctgggattccccgacgcgatgcgcctcgtggcggggcggccgcggaacccgctcctcgacatcgccgcctgcgcggtcgccatggtcgtggccacggcctacgctctcggcaccatgctgctggcgcgtttcgtccgcagcggtggcggtgacgcgccgcccgcggacgccttcgcccgcctgaccttcgtcgtctccctcgccgctgcgctgctcgtctccgcgtgcctcctcttcctgcccgcgcccgcgcccggcgccggcggcctgccctgccatactgtcgacgccatcgccggagaaagcgatgtggtcgtctcggccctcgtcgccgtcggcgccgtcgccgcggtcgtccccttcgccaggcgtatgctccgcctccgcaccgcccctgcttcgacttcgagccccacgtcctcgtcctga

SEQ ID NO: 23803 - DNA, 501 bp, Zea mays
  Peptide Sequence Number=SeqID_65582
atgaactccgcctcgcccgaccccagggctcggacacagcctcggcctcggaagacggtctccgcctcgcccgaccctagggctcgggctcaacctcgacgctggacgacgaactccgcctcgcccgaccccagggctcggacacagcctcggcctcggaaaacggtctccgcctcgcccgacccagggctcggactcgacctcgacctcggaagacggactccgcctcgcccgaccccaggggtcggactcagcctcgacctcggaggagcccccgcctcgcccgacctagggctcggaccgaccatgtcacaggggggcatcattaccctacccctagctagctcaggctacggggaacaagaccggcgtcccatctggctcgccccggtctcagttaggtccaaacgaattgtggttgacatatggacatcgcatgtcaacctgtgcatctcttttctctctttttcacatattcgatcatgggattcaaactcgtga

SEQ ID NO: 23804 - DNA, 711 bp, Zea mays
  Peptide Sequence Number=SeqID_65583
atggcaggcaccggccctattccgggggtcatcgtcctggctctcggcgccggggcgctgggattccccgacgcgctgcgccagctgctcgacgccgtcgcggggcggccgcgaagcccactcctcgacatcgccgcctgcgtgctcgccatggccgtggccacggcctacgctctcggcaccatgctgctggcgcgtttcgtccgcaaggcgcccggcggactcggagccgccgcgggcgtgggcggtgacgcgccgcgcgcggacctcttcgccctgctgactctcgtcgtgtccctcggcgctgccctgctcgtctccgcgtgcctcttcctgaccgcgcccggcgccggcggcctgctctaccgtactgtcgacgtcctcgccgggaaaagcggtgtggtatcggcccttgtcgccgtcgccgcccgccgccgccatccccttcgtcaggcgtgtgctctgcgccgccccctgcttcgacccggatcctgggcttcgcggtcgtggggctgtttgtcctcgccgccttcgtcctccttcccacggctcggtggcggcctctacaaacaccgcgtcagcgtgtccgtcggcgtcatggtcatggctctcgcccgccgcttcggcaagctggcgcgggcggcgtcgctggccatcgtcatcgtctccttcgccctcatcggcctcctcacaaccgcgtgtgccaagtga

SEQ ID NO: 23805 - DNA, 1221 bp, Zea mays
  Peptide Sequence Number=SeqID_65584
atggagcttccaccatgggcgtccttcctcggcatcgtgctagccaccgtgatgcttctgaaagccctcaccggccgccgcagccgccgcatgtacaacctcccgcctggccccaagccgtggccgatcatcggcaacctcgacctcgtgggcgcgctcccgcaccgctccatccacgagttgtccaggaagtacggcccgctgatgcagctccggttcgggtcgttccccgtggtggtcggctcgtcggtggacatggccaagttcttcctcaagacccacgacgtggtgttcacggaccggccaaagacggccgccggcaagtacaccacctacaactaccgcgacatcacatggtccccctacggcgcgtactggcggcaggcgcgcaagatgtgcctcaccgagctcttcagcgccaagcggctcgagtcgtacgagtacatccgcgccgacgaggtgcgcgcgctgctgcgcgacctgcacgcggcgtccagctccggccgcgcagtcatgctcaaggactacctgtccacggtgagcctgaacgtgatcacgcgcatggtgctcggcaagaagtacctggataaggaggaggcggccgccgccggcgggtcagtgaccacccccgaggagttcaagtggatgctcgacgagctgttcctgctcaacggcgtgctcaacatcggcgactccatcccgtggctcgactggatggacttgcaggggtacatcaagcggatgaagaagctcagcaagatgttcgatcggttcctggagcacgtcgtcgaggagcacaaccagcggcggcttcgcgaggggaaaggctttgtcgccaaggacatggtcgacgtgcttctgcagattgccgacgaccctacccttgaggtcgagctcgaccgggaaagcgtcaaagcttttactcaggacctcatcgccggtggcaccgagagctcggcggtcacagtggagtgggccatctcggagctcctcaagaagccggaggtcatcgccaaggccacggaggagctggaccgcgtcatcggccgcggccgctgggtgacagagaaggacatgcccagcctcccctacgtcgacgccatcgtcaaggagaccatgcgactgcacccggtggcaccgctgctggtgccccgcctcgcgcgcgaggacacgaccgtggccggctacgacatccccgccggcacgcgcgtgctcgtcagc

SEQ ID NO: 23806 - DNA, 1572 bp, Zea mays
  Peptide Sequence Number=SeqID_65585
atggccggtcgcttcctcctcgtcgttgccgtcgccctcctcctccgccctggggatgcgtccgtgcacgagtaccgcgggctcagcttcgccaacaagggcaacgccttcatcctccacgccggcagcgagggcctctacgcggcctcccacgccaacaccaccgccgaggacgccgccgcagtggccgaagccttaatccgtgcaaagggttggctgcggtacagctacagcggggtggatgctggcagccgggtggatcttggatcctaccgagctgggtactctgccgcccgacacttggatgggtttgacaagattacttttaggcgatcagaggatactaataattctgtaaaggagactagttcagctaaggttcaggtactcatttttgagatagaagatcgtgaaatgattggtggatcagcatatggaggtcagaaagctatttgttgtacttcagatcttgcgaagttaggagcttgcacagaaggttctgtcatctaccgcccatcccaggtaaatcctggttggccaaagttgtttgtagcatcttttgatggaagtgacctgatcgcgacactaccgtcaaggaccattccaattaccaaaactgggatatacaatatgtactttatacactgtgatccatcacttgctagtttggaaatcgaggggaaaaccatatggaaaaatcctactggataccttccgggtcggatggcacctcttaagaacttttttggactgatgtcttttgcatttgtcgtacttgggatctattggttttatcagtatatgaagtcctggagagaggttcttccacttcagaactgtattactcttgtgattacactgggcatgtttgagatggcattgtggtattttgagtatgctgaatttaatgagactggagtacggccaaaaggcatcacattttgggctgtcacgtttgggactgtcaagaggacggctgctgaagttattgttctcattgtctcaatgggatatggtgttgtcacgcctactttgggtggcttgacatcaaaagtggtcatgcttggaggaacattctttctagcaacagaaattcttgaattggtagaaaatcttggtgctgttaatgatctatctggaaaagctcgtctgttcttggtctatccagtggccattttagatgctgcatttgttatttggatatttatttctctagctaagaccattggtaaacttcaggcaagaaggttgatggccaaacttgacatttataggaaatttgcaactgcattgatcatatctgttctggtgtctgttgggtggattggctatgagaagtcattgatatccctgcaatttctttcttgcagatttactccaaatcaacagatattttcttatgatgcaagtgaattctttgatcgaaaggataatatctcattaattaggccagcacccagtgcatccaagaatggatggaatttatcttctacaccagagcccaaagctacaaaggatgtgaataccgtagcagattttgaaggtgatgatgaggaaaacaaaagggagtag

SEQ ID NO: 23807 - DNA, 174 bp, Zea mays
  Peptide Sequence Number=SeqID_65586
atggccggcgagatgagctgggtgggcaagaagatccacctctacaacgtcaccatgggcctctacatgctcgattggtgggagcgagtagacatattggtgctgatcctgctctggttcgtctgcttcaatggctcccgcttcgcttccgacgtcttcgaaaggttttgttga

SEQ ID NO: 23808 - DNA, 1479 bp, Zea mays
  Peptide Sequence Number=SeqID_65587
atgctcctggggttcatcgtctccgagcggggcatcgaggtcaacctggagaaaatcgcgaccatcaccaacatggggcctatcaaggacttgaaaggagtacagagggtcatgggatgccttgcggctctgagccgcttcatctcgcgcctcggcgaaagaagcctacccctgtaccaccttttaaggaagaccgagcgcttcacttggacccccgaggccgaggaagccctcaggaacttaaaggcgctccttacaagcgcgcccatcctggtgccccccgctgccggagaagccctcttgatctacgtagccgcaaccactcaggtggtcagcgccgcgaacgtggtcgagagacgagaagaagggcatgcattgctcatccagaggtcggtctacttcatcagtgaggtactgtccgagaccaaaatccgctacccacaaattcagaagctactgtacgcggtaattctgacgcggcgaaagttgcgacactacttcgagtctcatccggtgactatggtgtcatccttccccctaggggagatcatccagtgccgagaggcctcgggtaggattgcaaagtgggcggtggagatcatgggcgatacaatctcgtttgctcctcggaaggccatcaagtcccaagtcttggcggactttgtggctgaatgggtcgacacccagcttccagcagctccgatccaaccagaactttggaccatgtttttcgacgggtcgctgatgaaaacaggagcgggcgcgggcctgctcttcatctcacccctcgggaagcacctccgttacgtgctgcgcctccatttcccggcgttaaacaatgtggccgagtacgaggctctggttaacgggttgcgcatcgccatcgagctaggggttcggcgcctcgacgctcgtggcgactcgcagctcatcatcgaccaagtcatgaagaactcccattgccgtgacccaaagatggaagcctactgcaatgaggttcggcgcctggaagacaagttctacgggctcgagctcaaccatgtcgctcgacgatacaacgagactgcggacgagctggctaagatagcctcgggacggacaacggttcccccggacgtcttctcccgagacctacatcaaccctccatcaagaccgacgacacgcccgagcccgaggaggcctcggcccagcccgaggcaccctcggcccccgagggtgaggcactgcgcgtcgaggaagagcggaatgggaaggcacccgggggctacacgcacctgctagtcaccatcgacaaattctccaagtggatcgaggtccgacccctaaacagcatcaggtccgagcaggcggtggcgttcttcaccaacatcattcatcgctttggggtcccaaactccatcatcatagacaacggcacccagttcactggcaggaagttcctggacttctgcgaggaccatcacatccgggtggactag

SEQ ID NO: 23809 - DNA, 366 bp, Zea mays
  Peptide Sequence Number=SeqID_65588
atgcccaggctctctccctcaccgtcactgacaccgccgctgccatgccctttgcgcttcggcttggtggttccccagcgctccgcccgggcccgcggtccccatcgtggctacgctttggcggcaggggcgtggaaggcgctgttctgctccgccgagaatgccaggcgatgtggctcggacgattatgcggaggcggaggagggttggaagggaggcgggagccgcgtgccatcggagaggaggataaggggcgggaatgcggccaccgcaaggggacgacaaggccgaggggttgccgccgatgtcgttattggtgaggttgatggtggtgatgccgtggatgctggagtggcgcttgtgtaa

SEQ ID NO: 23810 - DNA, 498 bp, Zea mays
  Peptide Sequence Number=SeqID_65589
atggatggagcaagcgtcggagaaacctccttcagggacacgaaaagcgaggcaggcgtcgacgtcggcgggggcgactccccaccgtcccccgccacccgccggtcgagacggcaccgctctcggggctccggcacctcatccatggacgccaccggcggcgagggcgaggagaagactaaggagaagagcaagaagggcacccgaaagaaccgcaagaagcaggacaagtcggccggcgacgacgcctcgggcacatgccaggacctccccgccgttcccaagaagtccaaccgccggaaaaacaagggaagctccgaggggagcggtagcgccgcggccaaggacaccaccgcggccgcgccggaggaggtgcgtgaagaagtgaaggagaaattcttgtcgcacttcacggtggatcggtgcgagaagattatcaagcaagggaagatcaaggtcgaatccatcatacgttcgctccacgacaacgatgattag

SEQ ID NO: 23811 - DNA, 138 bp, Zea mays
  Peptide Sequence Number=SeqID_65590
atggagcaaagagacaaaccacgcggcaatctcctccacaatgatagattgcaccttgccatgaacatgaagcttgcaccggacaggacgaacaagttcatggagatcatcagcgtggttcaggcgcatcaacgctga

SEQ ID NO: 23812 - DNA, 489 bp, Zea mays
  Peptide Sequence Number=SeqID_65591
atggctccggcgaggagaaaccggtctgttgaccgccccacctcgcacggaacgccgcccaactccttaagcatgatctcacaaagctcgctggcacagccccaaggctccgaaggacagcgcagaagggttgcccaacagtggcacccggatccgtggagatacccaggggcagataaaggcagacggctagggactggttcattggatcgcgacggctccggaatccgtggagtcagtttgggagaatggacgtctgtgcaggagcagtcggcaagatctcaggcggaggaatcggcgttctgttgtggcgtccaaaacagagggaacatgaaatgtcccgctgggaggaggatagaggaagcttctgtggacttgtccccacatggcggtgaaacaccaagcgacacgtcaacacacgagaaagtgaggctagccatcagggcccacatgtcatccacgaagcacgactgggcaaggcgacgctga

SEQ ID NO: 23813 - DNA, 171 bp, Zea mays
  Peptide Sequence Number=SeqID_65592
atggtggctgtgtcactcggctctccctcacagacggcgatatcggtacctggcggtcctggtgagatgagcgtgagcgagggcttcttttccccccatatacccagggtctccagggtgctcaacgcgcagatccgattcaatttcgtggtagatttatcttcacattaa

SEQ ID NO: 23814 - DNA, 321 bp, Zea mays
  Peptide Sequence Number=SeqID_65593
atggggaggagaaaacgctgggggtggccttcggagctccggcgtccgcgcagagggaagcctggctccatgggaggaacacacgcgcctggaagaaggggaggaaaggctctgcacttgggagcttctgcagaaagctgggtgtcgagtggaggaatggagcagagaatggagatggcaccttggctcctgttgtttacaggcgacgacagtgtgcggtttggtggctttggctggctgatgctggttggctggtgccaggcattggccaagagcctagtgtccaacgactggttgaggagggatgtggccatccattag

SEQ ID NO: 23815 - DNA, 321 bp, Zea mays
  Peptide Sequence Number=SeqID_65594
atgtacagggaggtcggcggacagggcgcggacgaggcgagcgaggtgcggacggttcagccggggcactgcgcgggcgtggacgacggcgtacggtccgggcagggcaagggcgcggccaagcggagctccagcggacggtgtgggcgtggtcgacgacgagctcgggagtggggagagcgttcagcccccctcaccgccggtgaccctcgtgccatgatccaagccatcaccacgattcgtgctctttggcgaggagataatcacggctcgccgaagattggcttgtcgccgtccagcatcgtggggatggcgttgtaa

SEQ ID NO: 23816 - DNA, 270 bp, Zea mays
  Peptide Sequence Number=SeqID_65595
atggccaccgcacccgcgggcgccacgaccacgtcgggggaaacgtctggtccagctcgatttcctcgtcggtgcggtaaacacagccgtgattggggcatagcactgttcaaggtcgattggattaatctccggtttggctcgcctgggcgcgtgcacctgtatgccggtagtggccgctgtcgctcgacagctggggccgccgcggtctggacgggtgaacgatggggtcttcagaccgttggatcttacaccgacggcgtagattag

SEQ ID NO: 23817 - DNA, 390 bp, Zea mays
  Peptide Sequence Number=SeqID_65596
atgaacacgggtgttcccgatgatctagcgcggtttagcttaattgaatgggtcaaggagcatcagaagaatctaaggacactgaaacgggagatcagagagcatgaacggacctggaacgagctagccatggcgaggtcactatgcgcagtgtttcggactgatttggggaaaatcccaaattgggtctctctggtgagtaattggaggcacgagtgggtggattggatgcttgaatacctaacgaagctgagggtgtgctcaatttatagggcccttgagcggtggctcgtgaatttgagctcgcgcggtggcggtcggagaggaagaggtgcactggcgcaagcgattggtggcatttaccgtggcaagctcaccgacgatcactag

SEQ ID NO: 23818 - DNA, 408 bp, Zea mays
  Peptide Sequence Number=SeqID_65597
atggggctggaggtgagggaacggcggagagggcgctccaggcaggtcggggctactccggcgagcaatcccggctgcggagatggggaatcaggtgcgccgaggctggcaccaactccggtgaggggtgagggatgcttagggccaaggcacgggcacgaggtggggctgaatcgaccggacactgtgcgggtacggtggatcgtgaggcagagctccagcgagtgcgagtttgctacggcggggcaaaatcaggacaaccagagcacgaggaaaggttcctcacctcgggatggcactcggggaggcttagcgtggcatctggagctccgagtggatggcacggcgggcgcacttctccggcaagctcgagtggtggcggctgagcgcgagagagaccgagagtag

SEQ ID NO: 23819 - DNA, 243 bp, Zea mays
  Peptide Sequence Number=SeqID_65598
atgccgaagctcccttgcgcacagctttggctctgttccatccttcgttctccttgtgtttcgtcatacagcgattttgactccaaagctgaactttcaccgccacccgagccatatgatcccgaggccaatctagccctgaaagcggcactagagacaataaggattgccgaagaaactattgatgaagctgtcaacaaatttctaaacgaagctgcagagaagatcttaaaagaagactag

SEQ ID NO: 23820 - DNA, 342 bp, Zea mays
  Peptide Sequence Number=SeqID_65599
atggctctggatgggctttgtgtgtggttagttgcattatggatcctgtggatgattcagcgtacaaaaacatctggatggccactgctaaggtatcaatttcgccaaagttttgctcatcgtaaggagaaaattggccacacaaccatagacttgggtgttgccttagaaaacctggaaacgcaacaggagggagacctggcatgtgccaaaccaatggaacggttgcaggacgttcggggtcatattgtttgcttccctttggagttcatgtgccaagaggacttgagacctttcttcagtgagagcgagtattatacatctccacaagttttccattag

SEQ ID NO: 23821 - DNA, 342 bp, Zea mays
  Peptide Sequence Number=SeqID_65600
atgtctgagaagaagcgcaaggagatggaagataaaaagcgcaagattggtggacctcagcccgggagcaacaatcgcctctgtttctcggggataaattggctagataagtaccaagcagttatcaactatgataagaggacggtgaaattggtgtcaggagaggaagtggtgactgagctagtctctcccaagccaaagaaaggaggttgtcaccagatggctaatgatagcaaggaggccgatccacttgaggctatccaggttgtgtcagagttctcggacgtgttccctaaagatctaccaggcagtcacctgagcgaaaagttgagtttgccatag

SEQ ID NO: 23822 - DNA, 912 bp, Zea mays
  Peptide Sequence Number=SeqID_65601
atgagcaaaatcaacaaatcttgggcgctggctgctggtcttgcggagggaggagggggagccgtagaggtgagaggtcataggtcggtggagggcggcggcggcgcggcgcagtggcctatggcgcgacgcagtggcctgtgggtggagggaggggggagccgagatttgtaccaatatacttctctactcgtcaaacatcttgttcaaccagaagatatggttgaacaacttggtctaaggctcagccccggtcgtggtcgttctcacatgggcttcgatgccgctgtgtatgggtggggcaggggttcgggggttttcttgacctgtgtcgttagaagtgttggcccatggtcagcaggaacagctcaaatcgaaggaagcatccataatgcctatttttctcttattgaaaaggcagaacattttgtttacatcgagaatcagtttttcatttcaggtctttcaggggatgacacaattaagaatcgtgtattagaagcactatataggcgcatacttagagcagaaaaagagaaaaggcgcttccgggttattattgtcataccacttttacctggttttcagggtggcattgatgatggtggagctgcgtctgtgagggcaattatgcattggcaataccgaactatttgtagaggacctaattcaattcttaaaaatctgtatgatgtggttggctcgaaggcggatgattatatctcattttatgggcttagagcacatggaagatcagatgatgggggtcctctggtcaccaatcagatatatgtgcacagtaaattgatgattattgatgatcgcatggcattgattggctcagccaacataaatgatagaagcttgcttggatctagggattctgagctaatacaaggcagcaagaattga

SEQ ID NO: 23823 - DNA, 939 bp, Zea mays
  Peptide Sequence Number=SeqID_65602
atgaccggcgaggaggagcaggagcacggtggccacaggtacgtcaggatgcctccggagccgcccgagccggaggggttggccgccgcgtcgtcggcgtcgttccgcctgccggagtcggtgcgggtgttcgacgagctgccgcgggccaggatcgtccaggtctcgcgccctgacgccggggacatcacgcccatgctgctctcctacaccatcgaggtccactacaagcagtttaggtggcttctatataagaaggcctcacaagtgctatatctacattttgcattgaagagacgtgcatttcttgaagaattccatgagaaacaagaacaggtcaaagaatggcttcaaaatttggggataggggagcatgtgccagttgtacatgatgatgatgaagccgatgatgtgcatgttccttcacagcatgacgaaaactctgtcaaaaacaggaatgtcccttcaagtgctgttttacctgttattcgacctgcccttggccgtcagcaatcaatttctgatcgtgcaaaggctgccatgcaagaatacttgaaccatttcttgggaaacttggatattgtcaactcaagagaggtctgcaagtttttggaagtttcactgttatcatttctgccagaatatgggcctaagctaaaggaagattatgttacagcaaggcacttgccgaaaattgagatggacagtaaagagagatactgttcatcctgttgttttagtttttgcagtagtagctggcaaaaggtttgggctgtactgaagccaggattcttggctttacttcaagatccatttgatcctaagctcttggacataattattttcgatgtgtcaccttgcactgatagagatggagatgaccaaaccactctagcaaaggagataaaggaacgtaatccattgcattttggatttgag

SEQ ID NO: 23824 - DNA, 402 bp, Zea mays
  Peptide Sequence Number=SeqID_65603
atggggccgccaggctctgaccgccgctctaggtcccagtggtgggagaggcatctggaagctagtgggctatcccagcagcaaaatggacagagtcaaagaagaagcaaattgaaaatcgtaggggtaaattgcaaactccacaatcttggagaaacaaagcagcacgatcagcgggtgccacatgtgcccggccaacggtcactaggtggcatcgggctctccggtgtgtcgtgggaccaaaggctggcaacggttggcttcgccaaacaaggaagggaatcacacactgttcactatgcggtggtgcaccggactatccgatgcgtccacgggcagaagacaatcaaggcctttctaatgaaggagcaacaactcctttggcctttgggggctatataa

SEQ ID NO: 23825 - DNA, 816 bp, Zea mays
  Peptide Sequence Number=SeqID_65604
atgctgagcgcgtgcggcccggcagccgcggagccggcggcggtccggaagcccgagttccggctgctcatcggcgtgctgacccgcgcggacctgtacgagcggcggcacctgctgcgcatggtgtacgggctgcagctcgcgtcgccgggtgggctcgcggcgcacgtggacgtccgcttcgtcttctgccggctgtacaaggacgaccagcgcgtgctggtgccgctcgagatcctcgcccacggcgacgtcatcgtgctcgacggctgcgaggagaacctcaacggcgggaagacgtacacgttcctgtcggcggtggcggcgctctacgccgacgagccgtacgactacgtgatgaaggccgacgacgacatcttcctccgcctgccgcagctggtggggtcgctgggcgggatgccccgggaggacatgtactacggcgccaccatcccctgcgatagcatggacccgttccgggagtacatggccggcatggcctacgcgctgtcgtgggacctcgtgcagtggatcgccacctccgacgtggcgcgcaaccacagcgtgggcacggaggacatgctcaccggcctctggctcaggatcgggggcaaggggaagaaccgcttcaacgccaagcccggccatccacgactacctcaacccggtgcccgtggaccagtgcgagcacgagttcatgcccaccaccatcggcgtgcacaggctcaagagcaacccgagggggggcagaggcgctcaagtaattcaacttcacggcagggctccagccgtccaaagttctacaagatcgactag

SEQ ID NO: 23826 - DNA, 231 bp, Zea mays
  Peptide Sequence Number=SeqID_65605
atggcgcggaagagcggaagcgatttgccgacgacagcgatgcagcagcaggttagagcgacgctattggtgtcgggagcaatggcgggcagggggcaaggcgtcgagcggtgggggagagagacggccaccaaggcatgggattatgggaaggagactgggagagggattggaagttcggggccaatcccagcaagcaatcgccctacgaagagagctctcggaatgaat

SEQ ID NO: 23827 - DNA, 402 bp, Zea mays
  Peptide Sequence Number=SeqID_65606
atgacgcccgagccatcctccccacgcgcggcgcctccacaacaccaacgacgcccgagccccactatcccgccttcaacggcgcccgaaccccatcctccccacgcgcggtgcctccgcaccgccaacggtgccccaagcccccgccaccatgtcccattccctacgccaccatgcctcagaggtataatcctagcctgtgctgatggacttgactatggtgtaaacaggtgcaatttattaggcgggagacatcagttacattgccttgttttgttgaacaagtatttcctcagacatgtacatcacgctttaaagactgtgcactatgtggtgctgatatatatagagggtattgagcctgatgctgcacttgaacctgttgttgactgcttcagatga

SEQ ID NO: 23828 - DNA, 609 bp, Zea mays
  Peptide Sequence Number=SeqID_65607
cggcggcgcccgaccccgtcctatcccctcgtcggcggcgctttccaccaccccggcccgcgcggcggctcccgcccccctgcccacccgcgcggcgtccccgcccctcccggcgcggcggcgatcccgcccgccccccacccggccccgcgcggccccctgcccgcccctcggcgcggtggtgccccggcccccccccgctcggccccccgaccctgcccctccccggcggcgctcggccgcttggccctcggcgcggcggcgcggctcccctccccctccctccccggcggcgatcccgcccgccccctgcccgcccctcggcgcggtggtgccccgccccggctcgccccctcggctcgcccgctcggcccctccccgcggcggcgccccggctcgccctcggctcgcccgctcggccccggccggttcaaccgcccccctggccggttcaaccgccctggccccagctcgcccgctcgtttccccgtcccggcctcgcccgaccgtggttatgagattgatggttttggttatgattatggtgctggagaagatgaagctgtggaaggagacttccaggagttccaagattacgacgagttctag

SEQ ID NO: 23829 - DNA, 459 bp, Zea mays
  Peptide Sequence Number=SeqID_65608
atggcccaggtaagccggtgcaccattattcgattccttgtgcacaccgcctctacatcacctagtgaagctccccgagccatccaatcgaactctaccatcgtgaacaggccaagcctctcaccgccgccgacctcgtccgcccccgctcgtggccagaatgactccgacctccactggccaccatctgactatcgacgtgttcgcctaaacctcctcaaccttaccaaccccctcgacagagctctactcccgccgggcagggatgtagttgaacctacccccacaaaggcccttaaaacaaaagatgaaaattgcaatctcatggacggagagtacatattgatccaagagcaggagacacagcaagaggaagcccgggaaccagctcccaagcccgtcgccgaagaaccttccgccacacccgcatttgaaggcaagccccggttttatgcataa

SEQ ID NO: 23830 - DNA, 462 bp, Zea mays
  Peptide Sequence Number=SeqID_65609
atggaccagaagggctggtccgcggtggtcgggttcgggtggctcttggcgggcggtggagctctctgttttcaagcggttttccggtggccgagcgcaggcaagagtgagggggttacggtaaggatgtctgagggaccaacgacttatctaggcatcgacacggggaaggcgcgtgggtggactgaccgtgcacgtgcgcgcgggttgggcgagctctggcctgccgaccatggtcgaacacgtggtggcattgcgtctgcccctgttctagctgcacgaaacctcttcacctcccctcaagctacctatttcttatggtggtcaagggatttggtctactggatccgaagatattgggtactcaagtggggtttgtctcatagcccaaatctgagacaaatcccaggtgttgtcctgtcaaagctccaaatttcgctgccatctccagatatgtggtag

SEQ ID NO: 23831 - DNA, 363 bp, Zea mays
  Peptide Sequence Number=SeqID_65610
atggaattaacactagacgcgcagggcagcagaagatgtctcgatgtagacaaacgcgtcgagcagtgccgtgcagtcatcggcgtccttcacgtcctcgcgtggtttgtcctagtgctccagatgcagcacctccgagccaacgacattaaaaaccatttagccaaagcttctgcattaggtgggaaattttattctgaggtatggatgaagggcgaccgtgagatagctaatgaagctattaagaaaaatgagaaagaatctcacgacgctcaagaagaagctaaaagagctgaagaagctgctgagcgcgccaggcttataggtactgttggggacttgctctcaaatgctatgagttaa

SEQ ID NO: 23832 - DNA, 273 bp, Zea mays
  Peptide Sequence Number=SeqID_65611
atggcaccaaaaccacttgggttctataccaaaaatgtggtataccacctaaggcaccccctggaaaaagtggacaccgagacttggacgtttgacaggttttggcatcagttttgtcgcggtgtgggcaactgtaatcttcctgacggagagtacatcctcgtgccggagcaaggagctgctcaggaggtagccccagatccagcacccgagcctgcaccagaggacctgcctgccactgctttggaaggcaagccccggttttatgcataa

SEQ ID NO: 23833 - DNA, 678 bp, Zea mays
  Peptide Sequence Number=SeqID_65612
atgccatgggaacaacctcgtccaggctgcaaaggcacggacgtggcagctcaccagtcctacggcctgagctaccgcgagttccagacttccagtggagacagccacccaaacaggcgtattcttgctgtccacatggctatggatcaggacggtacaatggacaatctcctaattttagttacttgtgtcagattattttacgaaatttcaacttctctctgtgggacatctaatggtacaggtcttggagagatgcatttagaaaacggacagagtggagccatggtcccggcttctaattcatctgaccggtctgacagatctgacaaacctatggaccagaaggttttacgacggcttgcccaaaatcgtgaggcagcaagaaaaagccggctgaggaaaaaggcatatgtgcaacagctagagagcagtaagctaaaacttgcaagcctggagcaagaactccagaaagctcgacagcagggaatcttcatttctagttctggagatcaaactcatactatgagtggaaatggagctatgaccttcgatttagaatattctcgatggcaagaggaacaaaataagcagataaatgagctgaggactgcagtaaatgctcatgcaagtgatagtgacctccgtcttatagtcgatgggataatggcacattaa

SEQ ID NO: 23834 - DNA, 309 bp, Zea mays
  Peptide Sequence Number=SeqID_65613
atggggacgaacgtaatttggctaggcacgctaccgcccagacattccagtaggggagggcttgacgttcctggatctggacaaaaagacagacgcggggagatgaggaggcagcaaccaagtctcgagcatcaaccgtcagaatttttctacagtgaagaccaggctgttacacgggagaggacgcttgtatatcaaacggacgtcgacacaatggtcgatgttggtaatagggatcataactaccagggccaccccacattcattgccatccaagttttccacttctcaaccacttacaagagctag

SEQ ID NO: 23835 - DNA, 321 bp, Zea mays
  Peptide Sequence Number=SeqID_65614
atggatcctaagggtaaggagatggtggtcaacgacaaggagaaggagtctctcttcaacaagccaaaagactcccgttctcaacaaggagtttatgcatccggggactcaagctggattatcgacagcggatgcacaaaccatatgacgggggagaagaagatgttcacctcctacgtcaagaacaaggattcccaggatacgatcatctttggagatgggaatcaaggcaaggtcaaaggtttggacaagatagccatcacatccgagcattctatctctaatgtgtttttagttgaatcacctattcaccccctctag

SEQ ID NO: 23836 - DNA, 258 bp, Zea mays
  Peptide Sequence Number=SeqID_65615
atggagcttcttgcaccctatggtgattggttggagaagagggatggagactcagggagcacaacaacagtttacatgagccagaagcagaaaaagatgcatacctatcctggcagctttccaaaagaaaccacggaatctgccattagagattatggggcgactggtgatatgggctgggctcttctcctcacgcacggtttggatgggtggaattgctccgacctttccattcttaggcccgtttggctcaagtag

SEQ ID NO: 23837 - DNA, 504 bp, Zea mays
  Peptide Sequence Number=SeqID_65616
atgttcttcgattccgacgaggctgagtaccacacaactcctattaggtcgccctatgatcgtgtgaacatgggtttcttctcagatgaagtggcgctgagtcttcataaggagcagtttatcccttctccgcgatctagtagagtggacgggttggacctcaactctagtggtgtggaattccagaacattgcatcatttcaagaccttcgggtcgcagtcattttcgatcaattggtattggtcgtggtgttacaggtagaggcttccgagttccacggatggccagtgagggtcctagaggtggtcattgagcacgaagcatcttctctcgtgcatatgaaaaactctactgttcaatgcatccttgccatcgttgtcgagggaaaattaaggacagagtccatcaagaatgcgatgaatctggttaagaaatgtggtgcaccagaaggaagtgttgagcattacatggctacaaaattgttcatgaaagctgaaaactga

SEQ ID NO: 23838 - DNA, 1348 bp, Zea mays
  Peptide Sequence Number=SeqID_65617
atgcctcgtcctcttgcagctctcctctctaccgcttgcatcctctccttcttcatcgctctgtttccaagagctgcatcatcccgagacatcctaccactgggttcctctctcgtagtcgagtcctacgaatccagcaccttacaatcatcagacgggtcgttctcctctggcttctacgaagtctacacccatgccttcacattctcagtatggtactcaaagacggaggcggcggcggccaacaacaagaccatcgtgtggagcgcaaaccctgaccgccctgtccatgccaggaggtcggctctaaccctgcaaaaggacggcaacatggtgctcaccgactacgacggcgcagccgtgtggcgagctgatggcaacaacttcaccggcgtccagcgtgctcggctcctggacaccgggaacctcgtcatcgaggactcaggaggtaacactgtatggcagagtttcgattccccaacggacactttcctgccgacgcagctcatcactgctgcgaccagattagtccccacaacccaatcgcgtagtcctggtaactacatcttccgcttcagcgacctctcagtgctgtcgcttatataccacgtgcctcaagtctcagacatatactggccagaccctgaccagaacctctaccaggatggccggaaccagtataacagtacgaggttaggaatgcttactgatagcggggtgcttgcctcgagcgacttcgctgatggttatgcgacgaggaacccgggtaactggactgaaggctgtatggctattgtcaacacaacctgtgaccgctatgacaagagggatatctgcatcagtgactgcacctgtaaaggctttcagtatcaggaaggcacaggatcatgctatccaaaagcttatcttttcagtggaagaacctacccaacatctgacgtgcgaacgatatatctcaagcttccaacaggggtcagtgtttcaaatgcccttattccacgttccgacgtgttcgattccgtgccccgtcgtctcgactgcgatcggatgaacaaaagcatcagagaaccgtttccagatgtgcacaagaccggcggaggagaatcgaaatggttttacttctatgggttcatagctgcattttttgtcgttgaagtttccttcatttcgtttgcgtggttctttgttttgaagagagaactcaggccatctgaactatgggcgtctgagaaaggttacaaagcaatgactagtaattttagaaggtacagctacagggaacttgtgaaggcgaccagaaaattcaaggttgagctagggaggggagaatcaggcactgtgtacaaag

SEQ ID NO: 23839 - DNA, 264 bp, Zea mays
  Peptide Sequence Number=SeqID_65618
atggaagacggggggcgtgagattgcagaagccacggtccgtgcggtgtcggggttggcagagtggttcgccatccgcggagtgggcgagtccacgagttgcggcctgccgccgacaggggtgggctcctactattctcaaaacaggttcggctatggctcctctggcttcttggcttctctagaagagtcagagccgttttgcaattcatttgataaaacagcttctgacgaggagacggtggcagaggctgtaatttcgtaa

SEQ ID NO: 23840 - DNA, 1650 bp, Zea mays
  Peptide Sequence Number=SeqID_65619
atgcaggggcgcagcagggacgccgccaccattgctgcagcggtggcgtgcgcagctgtgctgctcctcggcgacgcctggagcgtctcggcgcaggcggcggcggaggaggacaagataagcgccctgccggggcagccgccggtgggcttcgcacagtactccggttacatcccggtggacgccgcggggaagcgctccctcttctactacttcgccgaggcggaggcggatccggcggccaagccgctcgtgctctggctcaatggagtgctattctatgaattacttgaaatcggatgctatttcgtgaacgccgtctcaaacaagtgctatttcatggattctcccaggagaaggggggagagctcaggtttcagtgcaagtgcacctgtgaccaaagagattatgctgaatggttcccacatgcatgtgagtgtagggcctgggtgctcatccgtgggagtgggggcgttctcagagaatgggccgttcaggcctagcggcaatgcgctaacgaggaacgagtacagctggaacaaagaggccaatatgctgtatctggagagccctgcaggggttggcttttcatactccactgatcctgccttctatgagggtgttggtgacagcatgacagccagagacaacttgaagttcttgcaaggctggttcgccaggttcccgcagtacaagggcagggacctgtatatcacaggagagagctacgctggccactacgttccacagttagcccagcgcatggttgagttcaacaagaaggagaagctattcaacctgaaaggcattgctcttggcaaccctgtgctggagttctccaccgacttcaactcgcgggcggagttcttctggtcgcacggcctgatatcggactccacctacaacatcttcacgacggtgtgcaactactcgcggtacgtgagcgagtactaccgcggctccctgagcacggcctgcgacagggtgatgagccaggtggcgagggagacgagcaggttcgtcgacaagtacgacgtcaccctggacgtctgcatctcgtcggtgctcatgcagtcccaggtcctcgtccctcagcaagggagcagggagctggacgtgtgcgtggaggacgagacgatgcggtacctgaaccggaaggacgtgcagcaggccatgcacgcgcgcctcgacggcgtgcagaggtggacgctagctctctcttactggctgactgcctgcgctgcgctgcgttcacgattgatggatggatgtatatgtagcagcgttctggagtacaagcagctggacctccagatcccgaccgtgaacaccgtgggcgcgctcgtgaaggcgggcatccccgcgctggtgtacagcggcgaccaggactcggtgatcccgctgacgggcagcaggacgctggtggggcggctggcggccaggctccggctcaacgccacggcgccgtaccgggcctggttccaggggaagcaggtgggcgggtggacgcaggtgttcggcggcggcgccctgtccttcgccacggtgcgcggcgcgtcccacgaggcgcccttctcgcagcccgagcgctcgctcggcctcttcagggcgttcctcgccggacagcagttgccggaatcgttccagtga

SEQ ID NO: 23841 - DNA, 252 bp, Zea mays
  Peptide Sequence Number=SeqID_65620
atgggagcgggagctgatggaaggtccttgtctgtccaactccaagacaatctagctcaactgacagtgttcgcggccggcaacttccaagctgttatgttctctccagcacttgtgtggaagagaacagccgcctccggtcatccgccgtccagttcagatgctgatttggaatgtgcatgcaccagtggggcctttccggctggtgacatattccaggctgaagtccaacccctcaacctccttccctag

SEQ ID NO: 23842 - DNA, 1512 bp, Zea mays
  Peptide Sequence Number=SeqID_65621
atgaagaagcgccgccacgtcgccgcagcggcgctccggccggccacgcacgccgctggccgtgccgaaagccagcaaggcaaggaagcacaagtcccgtacgaccagcgcagcgcagggcggctcgccggagacgacgcgacccgggaaagcaacgccggtcgcgggcggggcggctacatcatggtgttaccaccgctctgggcttcggacgcacggcccctgccgttccttttgtccccgcaggggtggggggcccaaaatccacatccacacgagcggtcgtcgcgtccgcgcgcggtcagccgcctccggtcgcccccagcaaggaaggaccgccaaaaaggagcgagtgcacaggagctagcgaggcgcgcggcggccgagccgggtcggccgggcggatggaatgagccggcggcagcccggatggtcccggctcggaacctgcagccgctcgcccgcgacgcacatgccacgccctgcgccgccgccgcaggcctcggcgtgacgccgacggcgcccatggcacaggagcccatcgacaagcaccacagcgagccgaccaagcctccgccgccgccgcaggagaggcaggcggaccaagacacgcgccgccacgcccacgcctacggggagcagcagcagcggacgctgcggccgctccaacccgccggcgtccaccaccaggaggccgcgggcagcagcgggagcagcagcaacggcggggccggggactggctccggctcggcctctccccggcgtcccccagcgccggcggaacgcagcccggcctagtcttcgcagaccgcgcggcggggccgccgttgctgctgtcgtcgcagccgcagacgcggacggcatcggaggcgctacggccgggcatgggcgtggcaccgggaccattcctgcaccaggccgcgcccggcattccgcaggcgtcgataaccctgcccgtgccgcgcgcgggacctccttggctgccgccgtggagcccctccgcggtggcgccgccgctggtccccttcgggaaccgcgcgttctacacgcccggcgccgcctccgggctcgacgccatcagggtggtcctgccgccgtcggccgtcgccggcgtctggttcgcgctccaggccgcgccgcaccaggggagggagccattcttgcctcagattccgagaagctacctacggatcaaggacgcgagggtgacggtccggctgttgagcaagtatctggcgggcaggcttggattagaggacgaatcagaggtgcgcaacaacgctgaattggcgtcgtcggtggggctagggaaggaggttgaggggttggacttcagcctggaatatgtcaccagccggaaaggccccactgcgttcctgaccctgcagcatgtccgggacggcatctggtgccagggcgacgctgctgccgcctcgccgtcggtggtgccggacatgtcagcagctaaccaccaccacctcatggttttgcagtacggcaggaggtcgtag

SEQ ID NO: 23843 - DNA, 567 bp, Zea mays
  Peptide Sequence Number=SeqID_65622
atggcggaaaatccaccaaaggtgcccgttagggaaggctgctgtcgaagggtgcaccggatagtccggtgcgccagccatgtcacccaaccgttagggttcgaccgttggagctctgacatatggggccaccggacagtccggtggtgcaccggacagatgaccgttggcgctgttagccattgctccgcttggcacaccggacagtccggtgctacaccagacagtccggtgaattatagcggagtggctccccaaattcccgaagctgagcagttcagagtggatctccctggtccaccactggtgagaaataaggatgtgactagtggaaagatcaaggcatcaatatcccttaacactttaagaacattgtccttcccctggccaatgttcttaattttgggtacgtcgtccagggcgtgggctaacgctctaaaccttaaggccctcgaccagttgtatgaaacactatcaaggtgggcatggagcaaagcggtggacggtagtggtaaaaatagtgggtacaaggggcctacacctttcacactagcaatcttgctctag

SEQ ID NO: 23844 - DNA, 267 bp, Zea mays
  Peptide Sequence Number=SeqID_65623
atgagagggctaggagtcgttccgccaccaccctttggtccattgaggaggaagttgctcgtcatgaacaggcctaggccgacacgtgccatcgcctcaaggaaaccgatgtccgtgtcgaaggatgccaaccgtgtccttgacatcgccaacaacgatgctctctccaccctccactctcatgcggttgacatcctcaacattcagacattcgtcacgctcgtcttcgaccttgttatgtcagggccatctatgattttttcctaa

SEQ ID NO: 23845 - DNA, 633 bp, Zea mays
  Peptide Sequence Number=SeqID_65624
atgaccctctacaatggcatccctaggggtagcactagcgggcatctactgctgcctccgaggtgtgcccctcgtccgagtgcgaccccttcgtcctatggcactcctcactggctaccagctccggcggtggtcatcgccgtcgctagggcaatcgtggtcgcgacggtggccagggtggtccaccggtggccccagagcgatggcccggggcggcggctcatggccatccttctacaacccatggatcgactccatctccatgtgtcctgcaccgtttgcaagtactccttcatcgcatctggtcgccccataatcggcttctacattgctccacccccattggcgctaccagcgcaccagctccatctcagcactagccggatctcctgcctccctcgccctcccctccttcgtcgcgtccagccgccccatagtcggcttctacgttgctccaccctcgttggcgctatcggcacaccccgctccacctatacaccattcgagtcttctgcctcccccacccttctcttctacgtcctcgtggggcccttagggtggcgggtgggacacacagtctcttgctgggttcttcagcatgatgacactggcagcacccaccttggtcactga

SEQ ID NO: 23846 - DNA, 666 bp, Zea mays
  Peptide Sequence Number=SeqID_65625
atgaagagcatgggagatagggggtctccctggcgaagtccacgccgatggacaggcataaggttcaccattgacaaggatacgggtggaagatgtggaaagaagcagacaaatgaggttgaaccagcgctgtccaaaacccacatatttcatgatctccagcagaaaaggccaagaaatgaagtcgaaggccttagagatatccaatttgaggagcacatgagcttcttttttcttgtgcaaggctctgaccattcgctgaacaaaaatgaattatcatgtatgtttcttcccttgacgaaagcactttggttggttgaaatcaaagaagatgattctgatgaagacgacgattttgctgaagaattaggtgacaaggatgcagatgattcttttatggaatcatattcagatgctttaaataaagagctaagcagtaccactcttgagaaaagctttgctcatgcaccacgaccggaaactaacaatgagggtccatcagatgatgcagctactggtgcagagatgactccagttgatgtagatctgaaccttgtcgagagtattctgaactcgtactcctcgcaacaaggtcttcccggtccggcttccagtctgctaggactcatgggcataaaggtccctccagatgtcaaaaagatgtga

SEQ ID NO: 23847 - DNA, 1704 bp, Zea mays
  Peptide Sequence Number=SeqID_65626
atgggcgaaacaatctcgttcgcccctcggaaggccatcaagtcccaagtcttggcggacttcgtggctgaatgggtcgacacccagctcccaacagttctgatccagccggaactctggaccatgttcttcgacgggtcgctgatgaagacaggagccggcgcaggcctactcttcatctcgcccctcgggaagcacctaggctacgtgctacgcctccatttcccggcgtccaacaatgtggctgagtacgaggctctggtcaacgggttgcggatcgccatcgagctaggggtccgacgcctcgacgctcgcggtgactcgctgctcgtcatcgaccaagtcatgaagaactcccactgccgcaacccgaagatggaggcctactgcgatgaggtccggtgcctggaagacaagttctacgggctcgagctcaaccacatcgcccggtgctacaacgagactgcggacgagctggctaaaatagcctcggggcgaacaacggttcccccggacgtcttctcccgagacctgcatcaaccctccgtcaagatcgacgacacgtccgagcccgaggcaccctcggctcagcccgaggtaccatcggctcagtccgaggcaccctcggctcggtccgaggcaccctcggcccaacccgaggcaccctcagctcggcccgaggcaccctcggttcagcccgaggcaccctcggcccctgagggtttctactggccgacggcggtggccgacgccactagaattgtccgcacctgcgaagggtgtcagttctacgcgaggcagacccacctgcccgctcaggctctgcagacgatacccatcacctggccttttgctgtgtggggtctggacctcgtcggccccttgcagaaggcacctgagggctacacgcacctgttggtcgccatcgacaaattctccaagtggatcgaggtccgacccctaaacagcatcaggtccgaacatgcggtggcattcttcaccaacatcatccatcattttggggtcccgaactccatcatcactgacaacggcacccagttcaccggcagaaatttcctggacttctgcgaggatcaccacatccgggtggactgtgccgccgtggctcaccccatgacgaatgggcaagtagagcatgccaacggcatgattctacaaggactcaagccgcggatctacaacgacctcaacaagttcggcaagcgatggatgaaggaactcccctcggtggtctggagcctgaggacaacgccgagccgagccacgggcttcacgccgttctttctagtctatggggccgaggccatcttgcccacagacttggaatacggttccccgaggacgagggcctatgttgaccaaagcaaccaagctagtcgagaagactcgctggaccagctggaagaggctcgggacagggccttactacactcggcgcggtatcagcagtccctgcgacgctaccacgcccgaggggtccggtcccgaaacctccaggtgggtgacctggtgcttcggctacgacaggacgcccgagggcggcacaagctcacgcctccctgggaagggtcgttcgtcatcgccaaagttctgaagcccagaacatacaagctggccaacattcaaggcgaggtctacaacaacgcttggaacatccaacaactacgtcgcttctacccttaa

SEQ ID NO: 23848 - DNA, 525 bp, Zea mays
  Peptide Sequence Number=SeqID_65627
atggctcttggtgagggcttctgtcgtatggcgcaccggacagtccggtgcgccagccacgtcacccagtcgttgggtttcgaccgttggagctctaacatgtggggccaccggacagtccggtggtgcaccggacagtcactattcactgtccggtgtgccttctgcgcctgctctgacttctgcgcacgcagtcgcgcgctgttgatcactattcaccttttgcagatgaccgttggcgctgttagccgttactccgcttggcacaccggacagtccggtgctacaccggacagtccggtgaattatagcggagtggctgcccaaattcccgaagctagcgagttggagggaatccaccctggtgcaccggacactatcccgtggtgcaccgaacactgtccggggaggtgtggagcacaggaacggtggtcgatggctgaggtgaaggtcatgcgggctcgtgctgatggaccgggagcagtgaagggcgagtgctgggtcttgactgatgaatcagagtag

SEQ ID NO: 23849 - DNA, 666 bp, Zea mays
  Peptide Sequence Number=SeqID_65628
atgggatccctgcagcccaacaatgctgtcgccgtggcagtggccgccgccgtagtcctggctgcgctcgccaccggcgggtcgtgctggaccgacgaccgcctcaaggcggtgccgccgggccccaacatcacggccgactacgacggcaagtggctcgccgcaaaggcgacctggtacggcagtcccgtcggcgccggccccgacgacgacaacaacggcggcacgtgcgggttcacgggcgtgaacctgccgccctacagcggcatggctgcctgcggcaactcccccatctacaaggacggcaagggctgcggctcctgctacgagatcagggtgcggtgcaagtacgcgcccggcaagaacatcgtgttccacgtggagcacgggtccgatccgtcccacctggcgctgctggccaagttcgtggcgggcgacggcgacatcgtgcagatggacctcaagcagggggcgtcgctcaagtgggagccgatgaaccactccgtgggcgctatctggaggatagagacggccccgcacaagccgctcaagggccccttctccatccgcctcaccagcgagtccggccaggaggtcgtcgccgccgacgtcatcccggaggactggaagcccgataccacctaccagtccaacgtccagttctag

SEQ ID NO: 23850 - DNA, 657 bp, Zea mays
  Peptide Sequence Number=SeqID_65629
atggctccacggccagccgccaaccaccaggccacggccgagcagggcgccaagcacctaggccggccgagcggtgcgccgagcgcccgagcacccaggccaccgcccgccgcaccagagcggccaacggggcgccgagccgagcagagtttcaacagtgttcctgaccgtgtgttcttgatccaggtggctgccagcaagacgaagatctacatggtgcttgagctcgtcaacggcggcgagctgctggacaggattgcgaccagtgagggaaagctcccggagcaggatgcaaggaggctcttccagcagctggttgatggtgtcagctactgccatgaaaagggcgtctgtcacagagacctcaaggtgcagtgccggccggacgttcctcatcccgctccgctcctatcagttaagttttgctgtgtccgtggccctggtcctttcctctactctactcactcactcatcactcccaggcggccaaacagctccccaggtgctaattccttatgccgaatgcctgcaggttctgcagaacagagggcagccaaggcaaatgaaagtccatatgcaagcattacgcagaggtatgaagtctggtccaaccacgtggaaaaaatacctctgatccttacagatttcactgactag

SEQ ID NO: 23851 - DNA, 417 bp, Zea mays
  Peptide Sequence Number=SeqID_65630
atgacttttggaagaaaagtcacggttaagaaagctaaatctggacctatggagcgaggtgaccgggcgccgggcgggcgagcggccacggcgaggccgagcaccgcgaggccgaacacggtcgggtgggcgacgaactgtggctggaacgacaagggaggggagagtggatgggcgagcgtgcagttttatgcaagcgatagtggtgggcggttgccagacgcatcgtgtcgtggctggcctgggcgggagatgtggttcggtggagatgaagatggcaacctcagcctcgggagaaggtctccgcctcacccgaccccaggcctcagcctcggcctcaggagaagtcaccgcctcgcccaacctcggcctcagactgactacgccacaggggatacatcattaccctacccctag

SEQ ID NO: 23852 - DNA, 216 bp, Zea mays
  Peptide Sequence Number=SeqID_65631
atggctcgccgatctgccagcgcggcgcgcgcggccagccatccctggccggctggcgcgactggaatgcggtatcgattagcgattctagcatatcgttgcgttgttaacagtggcaacgagattgatggttttggtattgactccggtaatggtaaagaaggcgtcgaggcggatctccaggagttccaggatgtcgacgagttcgaggattag

SEQ ID NO: 23853 - DNA, 231 bp, Zea mays
  Peptide Sequence Number=SeqID_65632
atgtcttccaagtatggcttatggacaggtaccttcggattacacgatgagaagggcgcgatcgtgacgaaggttgctgatacttcgaagctatgcgcaaaggagctttggctcaatcaagggaagaggaaccgactaaaaagcatatgctacgatgaagaagcatttgagaacaagtccacaacattggcgcccacctccggtgaaccctttttcgaccaccttcgataa

SEQ ID NO: 23854 - DNA, 906 bp, Zea mays
  Peptide Sequence Number=SeqID_65633
atgatcagatctgcgccgaagctgctcgagccgcgctggccaagcgagggcgccgcgaaccatgccggggccactcctgggcgagctgtgggcacgcaggccgcgcctcgcacgaggggagctaggccacgctgcgcgccgggggaggccgcggctgggccgtgcgagggcgcgccgagccggctggctacgccaggccgccgcagccaaaccgcgctgagccggggttgcgcgcccgcaccagccgcgccagccggccagggatggctggccgcgcgtgccgcgctggcagaccggcgagccattgcgctggcgacgcaggctggccaccgcgccgggccaccaggctggatggccgcgctcaccacgctggcaggtcagcgagcagggtggggcagggggccacgaccgcacaggggagccgccacgccggggaggggccgggagcagggcggctgcgtcgggccgagcacgccgcgatggggaagggcgtgtgcgcgcgcgcagggagggccgagccgggcacgcgatggccgcgcaacgagcgagctcgaggaggacgcgaggggaggggcggggccgcgccatgcgggggcagaggaccgtcgcgcagggagggccgccacgccggggccgagccgggggcgggcgcgctgggactgcgccgaggcggacgcggcgagccgtgcacagggcgagggggcgcgtgcgcgccagggccggccgcgccaaacgtcgggcgccggagccgcgccgggccaagctggggcaggcacgccgcgtggggaggggaaggccgagcgaggctcgccgtcggtcggcaagagccgcgccgagcgagacgagggaaagggagaggaggagggcgctgcatgcgtccagccagggagaggggaggtggcgtga

SEQ ID NO: 23855 - DNA, 2736 bp, Zea mays
  Peptide Sequence Number=SeqID_65634
cggtagattggtgctgttcccccctaatcggtcggcggttgggggccgggttccgacgtctgcccgggagctcgaccgggcctccgatccgggctcccaagccgccgcctcccggggcgcccctccggaattcttgctttctcgggctccgaatctcgccgcctgtcgtcgccagcggctggcgcgggggcttggttcccggcgtttcattgcgaattcgggggcgatctggggcccctggtctggatggcgaggatttgagtggattcgagacgaacaagtggaggtggagccctgatctgggtggcgcccccgccgtggtatgtgccatgaggaagctcttcttctccgagtcggcctgcaaagagaccaagcttcactccgcgccccactcatggctgcccctcgagagggggaagctctccaagttctccggccatgccgccgccggctcctccatagagtccttgatgaagatgccagagccggctgtgcttccgcacttcaagcccgcggactatgtcgacgtactggctcagatacacgaggagctggagtcctgcccccctgacgacaagtcctccctgtacctcctccagtatcaggtcttccgtggcctcggcgaggccaagctgtctcggaggagcctccagtctgcgtgggagaaggggagcaccatacacgagaagctcatcttcggggcatggctcaagtacgagaagaaaggggaggaggccatctccgacctgctcagctcgtgcagcaagtgcttgcaggagttcaggctgctggatttcgtgttgcaggtctccactgggtcacatgtgataaactacgatggtgatgatgatgagtttcggggttctgcggtggttcatttccggataagagatgatatggttgcgtgcgatcgtcggaagctcgcggcgctgtcaactccactgtatgcaatgcttaacggtggatttagggaatcatatctagaggtcattgacatgtctagaaatggtatctcccctattggcatgagggcaatcagtaaattcagcctatcaggaagactaccgtatttgtcagctgatgctatcttggagattcttgattttgccaataagttttgctgcaagggcctcaaggatgcctgtgagcgaaagcttgcttctttcgtctcttcaaggcaagatgctatagacttcatggagtgcgctcttgagctgggctgttccatccttgctgcttcatgcttgcaagtgctcttgaatgagcttccagagtgcttgaatgatgaacaagtggttaggatattctcttctgcaaataaggcacagagattgacaatggttggcaatgcatctttctccctatattgtcttcttagtgaagtctccatgagtaccaacccaacatcggatgtcactgtaagtttcttggaaaagctggtagagtcggcatcagattctaggcaaaatcagctggccttacatcagctggcatgcaccaaatttctaaggaaagattaccctgaatctgagcgcctgttcaatgctgcattttctgccggccatctctattcgatagtgggtttagctagattggcctctctgaggggtaataagcattttgctctcaagttgctagactctgtcatgtcatctcggtggcctcttgggtggatgtatcaagagagagctctatatttggatggtgataacaagttagaaaatcttaacaaggctactgagttggaccctactcttacatatccctatatgttccgagctgcatctttgatgaaaaggcaaagtgttgaagctgcattgatggagatcaaccggatacttggattcaagctggtgctggagtgcttagaactaaggttctgttgctaccttgcccttgaggattatagggctgccttatgtgacgtgcaggcaatactcactcttgccccagattatcgtatgattggtggccgggttgctgccaagcagctgagaatgctagtgctagagaatgtagagcagtggacagctgctgactgttggatgcagctttatgatcgctggtcatctgtggatgatatagggtccctctctgttatatatcaaatgttggagtcagataccgccaaaggagttttgtactttaggcaatctttgcttcttctcagcttgctcgtgagcatgctgcgagtgatcatgaaaggcttgtctatgaagggatggatattgtatgatactggccactgcgaggaaggattgcagaaggcagaagcatccattgcaatacaaaggtcatttgaggcattttttctgaaagcttatgctttggctgattcgagtcttgatccttctacctcagcaacagttgtatcacttctagaagatgcattgcggtgtccctcagatagacttcggaagggtcaggctctaaacaacctcggaagtgtttatgtggattgtgggaagctagacctggcagctgaatgctacattaatgcactaaagatcggtcacaccagagcgcatcaaggccttgcaagggttcatttcctacggaacaacagagctggtgcatacgacgaaatgaccaagctgatagagaaggccaggaacaacgcttcggcatatgagaagagatccgagtactgtgaccgggagctgacgaaaacggacctgcagatggtcaccaaactcgaccctctgcgagtttatccttacagataccgtgctgctg

SEQ ID NO: 23856 - DNA, 1764 bp, Zea mays
  Peptide Sequence Number=SeqID_65635
atgctccggctcggcctccgccccaacgacttcacgttcccttccgccttcaaggccgccgcctccgcgccgccgcgcagcgccgccggaacgcagctgcacgccctcgcgctcaggttcggatacctccccgacgacgccttcgtctcgtgcgcggcgctggacatgtacttcaagacgggctgcctcgcgctggcgcgccgcctgttcgacgaaatgcccaacaggaacgtggtcgcctggaacgcggtcatgaccaatgcggtgctcgacggccgcccccttgagacggtcgaggcctactttgggctccggggtgctggtgggatgccgaacgtggtctcggtctgtgcgttcttcaacgcgtgcgctggtatgacgaacctgtcccttggggagcagttctatggttttgtggccaagtgcggctttggcaaggatgtctccgtgtccaattctgtggtggatttttatgggaagtgccgttgcgtggggaaggccagggcggtgtttgatgggatgggagttcggaacaacgtgtcctggtgttctatggttgttgcatatgcgcagaatggggcagaggaggaggctttctttgtctacttgggtgcaaggagagctggggaagagccgactgacttcatggtttccagtgtgctcaccacatgtgcaggcctgctaggacttgaccttgggcgtgctctgcatgcagttgctgtccgttcctgcattgattcaaacatttttgttgcaagtgccttggttgacatgtatgggaagtgtggcggaatcgaagatgctgagcaggtctttttcgagatgccacagcggaatcttgtcacatggaatgcgatgataggaggttatgctcatattggtgatgctcacaatgcactttctgtgtttgataaaatgataatgggtcaagaaacagcacctaactacatcacacttgtcaatgttctcacggcatgcagcagaggaggtttgacaaaggaagggtatgagttgttccagacaatgaagtggaggtttgggattgaaccaagaattgagcattatgcttgtgtggtggacttgctttgccgtgcaggaatggaagagcgagcttataagatcatacaggggatgccaatgagaccttccatttctgtctggggagcactacttggggggtgcaagatgcatgggaagacagaactaggaaggattgctgctgagaagttgtttgaacttgatcctcaggattcaggcaatcatgttttgctctcaaacatgcttgcatctgctggcaggtgggcagaagcaacggatgtgagaaaggagatgaagaatgttgggatcaagaaggacccagggcgcagttggatcacttggaaaaatgttgtccatgttttccaggctaaggatacaacacatgatatgaatagggagatccaggcattgttggccaagctcaaagggcaaatgcaagctgctggatacatgccagacacacaatatgctctctatgatcttgaggaagaagagaaagaatcagaagtgtttcaacacagtgaaaagcttgctctggcttttggattgatatgtataccacctggcatacctataaggatcatgaagaatctgcgaatttgtgtagattgccaccgggcttttaaattcatatctggtattgctggtagggagataattgtgcgggacaacaatatgtttcatcacttcaaaaattatgagtgttcatgcaaggattattggtga

SEQ ID NO: 23857 - DNA, 1110 bp, Zea mays
  Peptide Sequence Number=SeqID_65636
atgagaaaaaaggcagcacaccaagcaagaaagaggaagctgataaaggccataaaaatgcagatgatgataatttctttcataggcttttcaaggataagaatggagaaaataaagggattgttcatgacaggaatgaagatgacaagtgtgaggaaggtgataaagaaaacttcttccgcaaattatttaaggataaacatgaggagaggagaactgacggacctgataaaaaatgatgattatggtaagggaagtagtggtatcgaagaggaagataatccagagtttttgtcattccgtaggttgtttagagtgcacccagaagatcctaagagtgggcacatagaaagcaatcaatctaacaatctttctgaggggagcccaggatcaaaaggcttttttaagaggctattccgtgatagagaccgctcacttgaagattctgagatttttgggtcaaaaatggcaaaagaggcaaggatctggtctcataaacaccctggtactacaggaatcaatgagaagcaaagtgggaaaccaccattaccaattaatgcagtagcagagcttcgaaaaggttcttgctatgcttcgttggaacttattgaggctttatgtgatacatcttatggcctggtagacatatttcctattgaggatcgtaagattgcctccgggagggagaaagctccttaccttatatgtgttgaagttttaaaagcagaagctcctagccactctaaaggatcatcagatgggcacaaattatcaaaaggtgggataccattggctaatggagatgtgcaactaccaaaaccacctccatgggcctatcctttgtggagcagacacgaaacacaaaactatgaaatagatagaatgctgaagtctacttctcaggttattgaccaagcaatggctcaaatctgggagactaaagtaaaatttgtaaatgttagtttctctactgagaaacttggtcgctcaaggagcattgtactttctgaaacgggtcgtaggctgcgacatgatgctacagattcaaatatgattgtgtgcaaagcacgaacattttactataacaatgaaacccacatttgtacataa

SEQ ID NO: 23858 - DNA, 507 bp, Zea mays
  Peptide Sequence Number=SeqID_65637
atggagatacaggcgctacagcccgcacaacgggaggtggagaagctgcggtgggaagtgactcgctcgggggagagggatcgcaagctctccaccctccgggccaaggctgatcgtctcgatagtgaggcaacacgcctccgctcgaggcgtgatgaggcgcaccagaactgggagctcgccgaggtggtgctcaagaatgagcatcgcgtccgtgaggctgccggagtcccgcaacagtttggacctcccagccacgccacctatgacgccgctaccggctccgaggacgagccagaccgagcgcccaagattccggttcatgggagagttaccttcttgcccatcgtgctctactgggtgtacaccgacggctaccagttgatccttcacccgcttgagcagtacaggctccacacactggacgaggaggaggagaaattcgtcagcctctgcaccgttgtcattaaatgtgatctttttgttcttgtagttgcaatactgtga

SEQ ID NO: 23859 - DNA, 408 bp, Zea mays
  Peptide Sequence Number=SeqID_65638
atggacattgatgttgttcagctgaagaagatgcaccaagaaaagcagctggacacacttgtcgacaagggcctggagagcaaatatgaccgcattgagctagaggagatggtgcaagtggcgcttctatgtactcagtccttccctggtcacaggaccaagatgtcagaagtggtcaggatgctggagggcgatgggcttgcaaagcagtgggaggcatcacaacacacaaaagagtcacacaaattcaaggtgcccaatttttccttcagtcgctgccactctgacctgatgggcgattcgtcactgctgttgcaagcagtggagctttctggacccagatgcggcctgaacatgtttgcacattatgtggcacacactttctttttactactactttcaggatga

SEQ ID NO: 23860 - DNA, 237 bp, Zea mays
  Peptide Sequence Number=SeqID_65639
atggccactgagggcaacccctactttgtcctcgatgacactgaggagaagcaaatgtggtcaaagtttcaaacaatggtttggctggctctgaagagtgctaaggcgatagacctaatgtcgatgcgcacggagttaaaggacaaggtcgtggctacgcgcgggagggtggcgtcgctggaggaggcggagtcgctgagggagaaagtggccccgctggaggaggaagtgcgatag

SEQ ID NO: 23861 - DNA, 165 bp, Zea mays
  Peptide Sequence Number=SeqID_65640
atggccgagctgaaggagctgtctgatgcggtggcggagttcagtcgagaccttggtgccgtggatgtcccctcggtcgcctcccactacgagatcaatatcgagcgggtgtgcgagggctacgtcctgcctgacgagcgcgaccttgccgagcccgagatgtag

SEQ ID NO: 23862 - DNA, 801 bp, Zea mays
  Peptide Sequence Number=SeqID_65641
atggctgggggtgggctagccacggtggccaaagctcgggtggcttggcggacggtgggcgcttgctttctgcggcgatctccagtgatctccggcttgggtgagagtgagagcgggcaaggtgatacgactgaggccgtgggggcacttataggcagggcccagctgaagccgctgctggacgcccttcggaggcttcaggagcacggtcttaccgcggttggggttaacgccgccttccaccatatgagggtactgccgctgaccgagcatcgacttcatctggatgagatgacgccagatgcttccatggaaagctctcggatggcttcgaccgccctctccaccgatgagctcctcccgtggggttgcggggctattgaaccacctgacccccagttccagaggacgcggctggctgagaggcacgtcggaaagggtcgctaccctgccttgggcgcctaccacagggcccacggaggagagcggaggggcccaaggagccgaaagccgagggtggacgtggaagtcataccccggtccggcactaagcaccgagcccgtgaaccaacctttactgccaccaaggcggtgaagcgcggtgttgggacgtcggccaaggtcgctgggcaggatgctaatgtcgccgaggtggctgaggcacccctggcgccattggtcgaggccattcccgtcccttccgaggaggaggcgggggtggcaaacgcaacgtcgaccatggcgtcacccaccgtctcagacctcctacacgccatccccgacaccttggatgccacctag

SEQ ID NO: 23863 - DNA, 483 bp, Zea mays
  Peptide Sequence Number=SeqID_65642
atggccaggtccccaatgctcagtgctaggatgcccgccttgacttcatggaatattacagctatgttccctccaacgctggaaaatgagccgctaatgtggaaaactaggagattaccaatgctagaatctatatggattctgtcagatgtttgcctactgatgcttatgtgccaattcaatgagactaaattgatttccatgaaactggccaccgtgaattcccaagtggacttaaacaacctgcctaacctcctccctaaagatgtgaggacacgcatacatgatcgctctcttcacgttactacgtttggtgtcagcgttctaccgtcaataaatccacagtatcatttcctcaatggtgttagcgatgcatcgtctcaggtcaaggcattgataaatggacaattcccagcctatgttcctgttagggctcctttggatgacccaatctctgcagggatcccagcccaatccgcgtga

SEQ ID NO: 23864 - DNA, 360 bp, Zea mays
  Peptide Sequence Number=SeqID_65643
atggacccaaaacgtttcttcaattcaatggaagttgtgagccttgcgtctatattcctctctcaaggtcgtgccacattcgcctccacctccgcctgcacacgcctcctcctccacggccggtcccgcctccccctctccctcgtgcttcttcgacggcttacaggcgccaccggaccaaggcgggccacttcatctacgccaatggggtttccgccctggaggagctttgtcaccgatgatgtgccccatcgcactgccacacatgactgggtgctttgggacgtcgagattgtgctgctcctcaagtcggtgccactcgagcgcaacggctccgttctcgtcgtcgagttcaattaa

SEQ ID NO: 23865 - DNA, 789 bp, Zea mays
  Peptide Sequence Number=SeqID_65644
atggatttggcgtcggtcaacgaggagctggccgagatcgacgggcagatcggcgatatcctccgcgtattgcaaaatgggttccagaagctggagaagatcaaggatgccaaccgccgcagcaggcagcttgaagagcttactgataagatgcgagactgcaagagactcatcaaagacttcgagcgagttagcaaagctgaggctgagcatactgatccagcaacagcaaaaatgttgcatgacagaaagcagtcgatgatcaaagaattaaactcctacgttgctctaaagaaacagcaggcaagtgaaaacaagagaatcgatctttttgatgggccaagtgctgaagatggctttggtgaagaaaatgtcctgttagcatcaaatatgacaaaccagcagttaatggatcaaggcaatcaactaatggatgaaactgatcaagctattgcacgatctaagcagaaggaatccattgctttattatgttgtccaatcaggaaagctaaaggcaattttgggctattccttcttcatcagacagaacaaatgagcagagttgttaatgagttggattccatccatttctccatcaaaaaggcatctcaattggtgaaagaaatcggtcgacaggttgcaactgatcgatgcatcatggccatgctttttctcattgttgctggagtcatagctataataattgttaagattgtgaacccacacaacaaggacattcgcgacatccctggcttggcaccacccgtcagcaggcggctgttgcgatag

SEQ ID NO: 23866 - DNA, 1149 bp, Zea mays
  Peptide Sequence Number=SeqID_65645
atggggtgcgtgtgctcgaggcacttcccggaggacgcgccgggcacgctggcggccgcctacgacgcgcgccgcgggaggtacggccccgggaacttcgactccggcgagctcgccatcccgccgccccactccaacaaggtatcagacacaggtacatttctgggaagagctagcattgctgccgttgaagtgttagacacgctcgggagtagcatgacaagcttgaatcctggcagcggctttctctccggaggaaccaaccggggcaatagagcctgtattttagcatttgaagtcgcgaatacaatagctaaggcttctagtttgtggatgtcatgctctgatgagagtatagaagagctcaagaaagaaattctgcattcagatggagtgcaagtattggtgtcctcaaataccattgagctgttgcatattgctgtcgttgataaaagggaagaacttgccgtcttttcaagagaagtaatacgatttggcaacctctgcaaagatcctatatggcataacttggggcgatatttcgacaagtatgcctctgaaaagttaacgacagataatacaccccaggatcattcaaaggagactatggaagctactgtccagcaattgattaatttggcacaaaacacctctgagctatatcatgaattgcatgctctggacaggtttgagcaggattttaaaaagaaatttcatgaagaggagcctgtgccagcagctagacgagagagtataatgatattgcatagtgaactaaagcgccagaggaagcttgtgaaaaatctgaagaaaaaatccttgtggtcaaggaccttggaagagatcgtggagaaacttgtggacattgtagtatttttacatagacaaatccgagaatcatttaacgaagctggaaccgatttctgcgcttccgagcaaactcagaacaaaaggctaggttcctgtggtctggcactacattatgctaacatcatcaaccaaattgaaaatataatttcccggcccctctctcttcctcctagtgcaagggacaatctgtaccatggtctgccagtaacagtgaagttagctctgcgatcacgactgcagacatataacaccgaagaagagtctgcagtagttctgtaa

SEQ ID NO: 23867 - DNA, 453 bp, Zea mays
  Peptide Sequence Number=SeqID_65646
atggactgtgccgcatgtcaccttcgccacgccgtcttggcaaccggtgttcccatctccatgggctacgccgcatgccaccttcgtcacaccatcctagcaacaggcgtccccatctccatgaacaacatcgcctgtcaattttgtcaccacatgctggatgccggcgtgcccatctccaaggacaacgccaaatttcatcacatcatctccgttgatgacatgctcaaggcagccttggtgacggttgacctcggcacacggaggcgcgatctcgccctgtcggtcggccatcagcagcggcaccggaccactatctccaagtgcgagcatgggcgccacgagggcgcctccgctggttattgttgcgacctattccaggtgttcgtggcccaagaagacccacgaagggactacagcaccagcagtcatagaccctccaagtggggttag

SEQ ID NO: 23868 - DNA, 798 bp, Zea mays
  Peptide Sequence Number=SeqID_65647
atggagatgatcgggctcggctgggctgcggtggattggggcgtgctcggttggggatttcatggtctaaaagcagtctgtaacttttcagtagttgctagagctgaatccgaggaagatgctgctgcagctgaggttgttgaaggggctgatctaggtattgtgggtgatgatacacaggtttccagtgatggacctttaagtcctgctcctggtgtagagacagtagttgtcttcccaaaaaatgctggcaaaattgtactagcaggtgaagaaactgaattactagttggtctgcaaaatgacggtgaatcaattttgaatgttgttgctgttcattcaactctccatcttccttttgaccacaatatgtatggccagaaccttactgttcagaatttcttcaattcatcagttcctgtttctgtgcaagcaaccttcccctacaagttcgttgtgagcaagttcttgcagcctggagcatatgatctggttggttacatagtgtatgagatcgaccagcacccttaccagaatgtattctacaatggcactatcgaggttgttgaggctggaggcttactcagtgttgagtctgtgttcctcatcacccttggatttgcacttcttggtctgtttggattgtgggcatatggccaggttcagcagctctcgaagaaaacaaagaaggcacccaaggtggagctcggaactggaacaactgatgccaacatcgatgagtggctggagggcacttcgtttgtgcagagaagcaaatccaagaagaagcagacctga

SEQ ID NO: 23869 - DNA, 2241 bp, Zea mays
  Peptide Sequence Number=SeqID_65648
atggcttccgccgccgcggaaaccctcgcctcgttcccaatcgcatccccgtcccgctcgctcctacgccccttccccaggcgaccagccggcgctaggacaggcgcaccgtcgatccggatatccgccgtgccgccgcggggcctcgggctcgcgctcgtacaccgccgctgcccgccagcggcgcgcgcgaatgttgagcgcgacggcgacggcgcctccgggaacggcgagccgtcgtcctcgtctggggatggcgaccgcgacgcggctgcggagtcggggggcgatagcaccagcacgagcaccacgagcacggccgcgacaccgccgccgccctcgtcgaagaggaacgaaaataagtggcggcggaggctgactaagggaggcggcgtggggcggtggctatgggagcccatagtccagggacgggagatgggcttcctcctgctccagctgggcttcgccatatttgcgctacgcatgcttcgcccagagatcgcgttgcccggttcagagccccgcccacagacgacgtacgtcagtgtaccatacagcgacttcctggccagcataaacaaggaccaggtgaagaaggttgaggtggacggggtgcatatcatgttccgactccgcccagaggtggagtcccaggtccgtgttgagcagacaccgacacagcgcggagcagattatgtcattgataatgctggagtttcaaggagaattgtgttcacgacgactcgtccagtggacataaagacaccatacgagaagatggtggaaaacatggttgaatttgggtcaccggacaagaggtctggcggcatgctcaattctgccctggtaggtcttatctatgttgtattgattgcggtagttttgcagcgcctgccaataagcttttctcagcaatcacccggtcagttgaggaataggaagaattctaattccggcggagcaaaagtttctgaaagttcggatatagttacatttgctgatgtggctggagtagatgaggcaaaagaagagcttgaagaaattgtggagttcttaaggaacccagaaagatatattcgtctcggtgctcgccctcctcgtggtgtcttattggtgggtcttccagggactggaaagacacttcttgcaaaagccgtagcaggagaagcagaagtcccattcataagttgctctgctagtgaatttgttgagctatatgtaggcatgggagcagctcgagtacgtgacctatttgctaaggccaaaaaggaatcgccatcgattatttttatcgatgagattgatgccgttgcaaaaagccgtgatagtcgatatcgcattgtcagtaatgatgaacgtgagcagacattaaaccaattgctcacggaaatggatggctttgataccaactcggctgtcattgtattgggggcaacaaatcgagctgatgttttggatcctgcccttaggcgccctgggagatttgaccgtgtggttatggttgaagctcctgataggtttggaagagaatcaattctaaaagttcatgtgaaaagaagagagcttccactgagtaaagatgtagatctagccaatattgctgcaatgacaactggttttactggagcagaccttgcaaacttggtaaacgaagctgctctgttggctgggcgattaaataaagaaatagtggaaaaggttgacttcatccgtgcggttgagcgatctatagcagggatagagaaaaagcatgcaaaattgaagggtaatgaaaaagctgttgttgcgcggcatgaagtaggtcatgcactcgtgggaactgctgtagcaaacctccttcctggacagccacgtgtggagaaattgagtatattgccaagatctggaggtgcattaggcttcacgtacacccctcccgtcacagaggatagatatttactctttgttgatgaactacgtggccgtttagtaacactactgggtgggagggcagcagaggaagttgttttagcaggacgggtttcgactggtgcacttgatgacataagacgtgctactgacatggcctacaaagctgtagcagaatacggtcttagtcagcgcatcgggccaatatcacttgctacactgtcaaatggtggtttagatgactctggtggctctccatggggaaaggaccagtttggaaggctcggagcatacttagaaggtgatcagcccaatgatcttgatgccttatga

SEQ ID NO: 23870 - DNA, 1581 bp, Zea mays
  Peptide Sequence Number=SeqID_65649
atggaccatgttacaagcataaaggctcatggaagacttgtgttgattatgagtggtttggtggaggttggaagtttgtgcggcatcaccgacaagggagatgaaatggtgtgcacaaggcaaaggagctacttcctggccaaggagaaggagccgtcatccgtgaagaagcgcgcccgcgccgccgcaggcaagctctccgacctcaatctcgtcgacgagcaggtgttgcgtgcatcccttgcacagatccccccgaagcacaaggaagaggtggagtccctgacgagaagctacaaggaccagtaccgcaactggctgttcgaactaagatgcggttttggtctcctgatgtatgggtttggatctaagaagcagttgctcgaggattttgcctccaccaccttgactaatttcactgtcgttgtaatcaatggctaccttccggccgtcaatttgaaacaggtggaccgggctttcgcccacggaagacaaagttggggaacacaacgccctcaacaggggaagcggcgcccagggtcatcactatcgctaaggctttcgcccaagaacacccccagcacaacgtccggccaggacctggggacaaagaacacctccacagccgccgccgcccagacaaccaccactgaggagccaaatcctccgctcctcaccgtcgcacggttgacgccccgtccacagcagaagtcaaggttgttaggggaggggcggggtggcaaagaagagagcgtcgccccacaacacctgcacgagccccaaaccgccgtcgacgcaaccgccaccaagacaccaactcaccaggcgtccatgtctcctcgccctctatcgccaggatgccgccgaggccctggccagccctgccgcaccggcgaagggtcgccgtccctcacacgccgctgccacctcctggtcatagcaacaatagctgaaatgttctgggatcaaacaaaagctaaacgcaggaaacgtgcaggaacaaggtcccagttgtcacagcagtttccgtcacaatcaacagagggtatcatctcattcctaatgagacagacatctgacgatgtggatgatcacagtctgacaccgaatgcacaaagcgttttcagagtccttgctgagtatcagttggcaaatgagaaggaggaaggtgagcttgttgtgcatatctttgctggaagagttggaatgttgcatactgatactaaacttactttgtttctcagcgaagtgccgatgcgggaacgaagcacttacccaaaagcagaagcggaaagcgggcgaaaggcgagcgggacaaaaaggctctccgtccacgcgccgctccgcgagggggtcactttgtccgccgtcgacgcgcgcaccagcggcgcggcgcggcgcaccccagccccaggcggtcaggcgcgggtcgtgacctcggacacggcacaggtgtcggcgtccgcggcgcggcgcgtgggtgggactacagcaagctgggtcgcgcaaggcatcgagaagctccccgccgccgacgtcgacgctgtcccggccagccccccacgccccacccccacctag

SEQ ID NO: 23871 - DNA, 396 bp, Zea mays
  Peptide Sequence Number=SeqID_65650
atggaggcgttaccggagagaaatcagggagcgggaaaaggaaactggtgtccgtttgatgctaccattacgcaggggcgcgatacgtcaagggaaacggcggttggattgctcgagctcctggcgagtcgctcggtcgggcgcggctgggctcgggtgcgcgcggcgttgtgcagggcgggtctcggctcgcgtgcgggcgtcgcgcagggagcaggcagggcgcgcaggaggcagggcgcagggcgcggctcgcgcggctggctccctgtgcgcgcggcttccgtcgcccaaggagagaggagcgggagaggagagggaaggaagcagaggaaaggagagattaggggagagaagagggaaggaaaggagagattgcggcgggagagagaatag

SEQ ID NO: 23872 - DNA, 537 bp, Zea mays
  Peptide Sequence Number=SeqID_65651
atggccgtccccaactacacctacctgaagctcaagatgtcgggccccaacggggtcatcaccgtcggccccacgtacaaacacgcgttcgaatgcgacgtggagtgcgtggagtacgccgaggccctcgccgagtccgaggccctcatcgccgacctggagagcctctctaaggaggtgccagacgtgaagcgacatgccggcaactttgagccagcggagacgggtaatccctcggacatgcccgacataccgagggatgtcgccgagcactcgctagacatccgagccggagcccgacccgtcaagcagcctctgcgccgattcgacgaggagaagcgcagagccatagtcgaggagatccacaagctaatggcagtggggttcgtcaaagaggcgaaaggcgtcaagctcgatcccgaaaggtgtgtcttcggggtgccctggggcatgtccttggggttcatcgtctccaagcggcgcatcgaagccttcccggggaagatcgcgaccatcgcgcagcaccccgagccctag

SEQ ID NO: 23873 - DNA, 795 bp, Zea mays
  Peptide Sequence Number=SeqID_65652
atgttccggcaggtgcggtggtactacgtggtcgccgcgtacgcgctggcgcccgtgctgggcttctccaactcctacggcgccgggctcacggacatcaacatgggctacagctacggccagctcgcgctcttcgtcctcgcggcgtgggccggccgcgacgacggcgtcgtggccggcctcgtcggctgcggcctggtgaagcagctggtgctcatctccgccgacctcatgcacgacttcaagacggcgcacctcaccctgacgtcgccgcgctccatgctcgccgcgcaggccgtcggcgccgccatgggctgcgtcgtcacgccgctcacgtttctcctcttctacagggcgttcgacgtcggcaaccccgacgggtactggaaagcgccgttcgcgctcatctaccgcaacatggccctcctgggagcccagggcttctcggcgctgcccacgcactgcctgccgctgtccgcggggttcttcgcgctcgccgtgctcgccaacgtgatgaaggacgtcctgccgccgcgctacgcgaggtacgtgcccctgccgacggcgatggccgtgccgttcctcgtcggcgccagcttcgccatcgacatggtggtggggaccgtggtggtcttcgcctggcactggattgacggcaacgagaccacgttgctcgtgccggcggtggcgtcaggcctcatctgcggtgacggcgtatggactttcccttcgtcgttgctttctctggccaagatcaagccacccatctgcctgaaatttacacctggaagctag

SEQ ID NO: 23874 - DNA, 195 bp, Zea mays
  Peptide Sequence Number=SeqID_65653
atggcggtcatgcgaggggtccctgcagtggagcttcctataaactatagcagatggtcaataccaggaagggaggaggaaattgatctacctgccaatccatataaccgaagggtgcttagacaacaacaacaagcagagatgattcccctgaatcctccaccagtcggtgttgatccagttatttcagcctag

SEQ ID NO: 23875 - DNA, 198 bp, Zea mays
  Peptide Sequence Number=SeqID_65654
atggcggtgggtgcgctgcaaaagggggcgtggggcagtggtagtgcgcatggaggcgggcatgcgtgcgaggggcacgggcttcaaggatctgacagcatctcttctggcaaggctggcacacaacttcaatctgaaacatctcctagatgggtcaagagggagctgatgttgatgacttcttctggcagcgactga

SEQ ID NO: 23876 - DNA, 360 bp, Zea mays
  Peptide Sequence Number=SeqID_65655
atggcttcgacctcgatattgccaacgaaagaacgtccaacgtcaccagaagccgcagagctgacatattaccaagagcttttcgtcatactcaccagtgctccaaccgctacgacttggacaacttccccatcagacaggctcaggtatgagtatgggaatggagataagtacaacttcataaggatggatatggggtgtccaaaatcgatggggaattctccattgacacctctaatcacatggttctcaatttgtcgatatgatgaccatacgctctttctcaagtggagaagtgaaggatcaagtccaaagtccaaagcatcccccgctcgctccctgtgtctatgtgccttttag

SEQ ID NO: 23877 - DNA, 696 bp, Zea mays
  Peptide Sequence Number=SeqID_65656
atggacgacggctggatcgatgacggtctcatgttcgagcttttcgccgagcaccaaacatgcgacacaagccgacttcacagtctcctttcccaaatccacacagacattgaccaaggcttacgctgcagattttcctacgttgctccacacatgacgcgtttgacggacggcgaacaggacccgagctcgacggtgtccgcggccgaggaaaaccgagctggggactggacagagcgcggacgggcgggattcgacggctgggagtgggacacgccaccatgggcgagcgcagcggcatgcaggcggagctggacgccatggggatggagagggactcggctgggcgcgcacgcagagcatagggagatggagaggacgcagggacgtgcgagatccgacgagtcagccatggcgatcgagtgcggcatcgaggggcaagcaccagggagctctactaggctgaggccgagcgcaggagctggagcagagcgccatgggaaggacctcggcaggcgcgcacctgagctgctccgtggggacgcgagccgggacagcgggccgagcggaggagcaagggagggatccagggaagaaccaccatgggaagaggaggagatgggcagccggcaggaggccgagcgcagtggcacacgacggccagcacccatggaagctagcgcgagaggcatatga

SEQ ID NO: 23878 - DNA, 444 bp, Zea mays
  Peptide Sequence Number=SeqID_65657
atggccgcgcccttcttttccactcctttccagccctacgtctaccagagccagcaaggatctgtgacggcgtttcagatatccggtggagatgtgcaggtcctgcaggtgatgctgaagtctcaggagaagctgactgcaaaaccaggtgcaatgtgctacatgtctgggaatatgcagatggacaacaattacttgcctgaaaatgatggaggcgtgtggcagtggatttttgggaaacgtgtagatctaacaaactttagtggagaacttctttgccaggcagatgcttttctatgttcggtcaatgatgtctccgtctctagtacagttgagccaaggccacggaatattgagattggtgcagagatgatccttaaacaaaaacttaggggccaggggatggcttttcttgttggtggtggatcagatattggtatatga

SEQ ID NO: 23879 - DNA, 1569 bp, Zea mays
  Peptide Sequence Number=SeqID_65658
atgacatgccactggtcggcgtcatcctccctcaaagtcgtcgatctggatggagcgtgcagggtcgccagacgcggcccgccgcccagttcgatcccgtccggcgcgacgtcactgaggaaaaaacaagggtcgggggccgggccggtcacaccacgacaaggatctactaactggctcaaggcccatctcgatttctgggccaaggcaacgtcagcgtcgctcgagtcggcgtcccgcgtcccccacggatccatttcggcggtgcatccagttccgggcccagatcagatctgcgaagccgttgcgccggcaggccgcttcaaatttcgaacacctcgtcggccagggccaccgtataacaccgatcccaacccgagaaaccccaccagccagccagccaaccagccgacagccgacgagcacgagcccatggacgagacgagggagatggatccgggtgcgggggtgcccaggagggcggccaccgccagcgggacgcccaccgcgtcgcgcggctccagcacggcctcctcgtgctcctccaactccaacccgtccgcccgcgcctccgcgtccacgtccacggggacgccgccgtccgccgtcgtgctaccgtgggcggcgcgcgcggccgcgggggacagctgctactaccctgggtgccgcaaggacgccaactgctcgtgcgagatgtgcctcgcgagcatcgacgccacgcgggacctggtgcgcgcgcccgaggcgcgcaggttcttcgggggcgccagggaccggaggctcttcttccgtgaccgcgccgcgggggcggggtcggggtcgggtgaggggtccgacgccaccgagccgccgtggacgccgccgatgcggtccacggccaagtccaggcgggcgccagggcgggaggcggccgggggccccgaggcgagggccggcgttcggtcgcacgactggctgctgtacgccgccactgttattgggttcctgctcctcatgtgggtcgacacggggctcgtcccggaggccgcggccagggggtttgggcccaagctatcgccggaagccgtggcgcgggtgggggccgatgcgcgcctcgcgcctggcggcctggaacataagctgcacgtcatggagcgcagggtccgccagcttgttggcggtgaggggatcgccaattgcagctcgcgagactccgtctggcgattccaccagaatgatcagcaggtgttccactggcgctgcacggtgtacaaatccgtggcggaggaggtcagcgtctgggggagcccactccgcacctccggtctcctcccaagagcactctcggcgcggcacctcaccctcctctccggcgagatcaccgagtggtccgacggaaaggtgtggccgacggtgcgggcgagcaacgggagctcctgggcccaccggaggcagagcgcggcggcggtgcggctggaaccggagacgtgggtagtcgagtaccagaggagcgcgcttttcgagggcacacggctgctaccggccgccgcggagctgatcgcgtccaggccgacgctggaaccattttaa

SEQ ID NO: 23880 - DNA, 312 bp, Zea mays
  Peptide Sequence Number=SeqID_65659
atggatccgtgggggacgcgggacgccgactcgagcgacgctgacgttgccttggcccagaaatcgagatgggccttgagccagttagtagatccttgtcgtggtgtgaccggcccggcccctgcaccgccggaaacaagcgggcggattctcggttatgaagtgattcatgaggggttaaagagtgaggatcatgttgggagtgatgggaagcggtggtgtgacacgacaggtcgtggaggtgcaggaattcagaaccagcacagtgttggcccaaaagtgcatgcatttaagaagtatgttgacatatga

SEQ ID NO: 23881 - DNA, 771 bp, Zea mays
  Peptide Sequence Number=SeqID_65660
atggagacatatggcactggaaagttggaagcagggcttctggagcaggccattgggctgacaggcacccgacaagtgaggatccatgaacctgaacctgtggtggctgatccgggtggtctctgcaaggctaggaatagcttgtgcaatcttcaaagggaaggttttgttgaatcatcaccagcacggctggaatgtggatttgattttgttgaagtctggaaattggaaggtgacgagggcaggacaacactcaatgcaggagagaattccccaaccaccaatggtgtgactgtgcttggggctcggcaagttcctgaagcgggtgcacttacagggcatcctgatctgatagatccactggttgataatgacttcgagacggttatagaaaaccttccagtgttcattactggagatcagaatgccgcgtctgctaaatttgaggatgagatagatcttgctcttcaagaactgaaaaaatctcaggaagcggaatatagcgtggcggagcagaagctttacgcccagaaagaccacatcctctgtctgtacaggcagcttgacgctgaaagggctgaacttgcagatcccatgcccttgtctgatgcttcaaattatggtgcgatgctcgctaatgttctaagccgcgtggaccaagtcaagcgtgaggaggagaaatttaggtctatgctgaaagttgctggcggatttgcgaaagcaccacaaagcgtcaccagggagatgttcggattacctgctgataagtag

SEQ ID NO: 23882 - DNA, 297 bp, Zea mays
  Peptide Sequence Number=SeqID_65661
atggaggcggaccagcagtggcatggtcatgaagatgacgcagaacagccctgctgggctgaagaggacccaggaacagcgacggcgttgggcgcctgccctggagaactcgctggcgctgtagagcacccaagcgatgtgggaggtgtgctaggcgtaggtggtagaggggcaggtatagaaaaacgtgttattccaattggagcaggcacgatagggttagtgtcaggagtgcaaggagtgatcttctcaatcaatcaaggatcagaccttcctaatgtgtctgatgctgattga

SEQ ID NO: 23883 - DNA, 1695 bp, Zea mays
  Peptide Sequence Number=SeqID_65662
atggaaacggtggcagatacgggaggcgtggaggggacatggacagaagcccagaatgaagacaggcagtactgctgctgtgctgtggctccagcgtcccagcttagcttttcgacaaggccagcatttgcaggcctgaactccactggcttcctcatcctcggatcccccaccctaacgaaccctttgaccatcaccgctctgccactctgttgcatcgccgtccgtcggtgtcacggtgtgtccgtcaagtccgtcaccaaccctctcccgagtcccaaacaaaggccaaatccccgccccactcacactccacaccgtggtctcgcgccatgccgcgtctcccgtagacaacaaaccacgtcgcgtccctcttcgtcggcgtcgcggtggcggtccagtgatcacagctggtgcggagggagcaagaaaccaggaatggacgctcctcccgcgccgccgccgccgccggggtctcccgccatcgagcggaagctgagcccgggggtgctcctcctcatcgcgatcctggccatggtcttcttcatcttcggcctgctcaacctgctggcgcagaacctgctgcgcctgcgccgggcgcgccggcgccggcgggtcggggacgccgcggcgcccgacggcagcagccccacggcgttccagggccagctccagcagctcttccacctgcacgacgcgggcgtcgaccaggccttcatcgacgcgctgcccgtcttcccctaccgcgccgtcgccgtcggccgccgcgccgccaaggacgccgacgagccgttcgactgcgccgtctgcctctgcgagttcgccgacgacgacaagctccgcctgctcccgacgtgcggccacgcgttccacgtgccctgcatcgacgcctggctgctgtcgcactccacgtgcccgctctgccgcgccagcatcctcgccccccaggccgactactactactccagcccgtccccgccgccgtccttgctcgtgccccactcgtacggcctcgccgagacgcccgccgacgaggatccgggagccggagacggcgacgagtcacccaagcacgcggaggaggtcgtggaggtgaagctgggcaagctccggtgcttcgacggcaatgccagcgccagggacctggcggcgggcgacggcacgggtagcggcaacagcagtggcaggggaagcctcgggcagaggaggtgcctgtccatgggatcctacgagtacgtcatggacgaccacgccgcgctccgcgtcaccgtcaaggcaacaacccccaagaggaggcccgcgagcccgaggccgtcgcgccgccgccacgcgctgtcggcgtgcgacctcgggtgccccaggaaggcgggcgcgtgggagacggccgtcacggaggccgccgcgagcctcagcaaggacagcttctccacgtccaagatctggatggcgtcggccgccgggagagaggaggacggccgccggcccggccagagacgagccgcgtcgttccggtggccggcgatcgcctcgagcgcctgcaagtggcaccgcagggacgaggaacctttcgacgtcgaggcgggaagccccggcggcgacaatgccgtctcgtctctgacagaagagatgccaccgtcggtggctagggcggcgatggtctgggtcgccggcggggggcacgggagccattcgtga

SEQ ID NO: 23884 - DNA, 408 bp, Zea mays
  Peptide Sequence Number=SeqID_65663
atgaagtgtatcaaattcaggccgaactcacataacaaatctgtagatgaagaacttctcaatgaactgatgagcgggacatggaacatctgtacaagcaggcaccatagagaccaatcattactccgatcatcagcaagaattggtggatcttcagtcagcgtgtttggtttgaggaatgagttagcaacaacagttttctcctggtgccgtgcccacagagaactattgcctggatacgacactctcttgaaaatttgctgcaagcttggtgaaagcaagatcatcctctgtgaagagggtaccaagcacaagttgcagaaggtgcagctcaactatccaagtgatgatgtgacatttgccctcaaggaatctccagatcttccttggctatctaagtacttgtga

SEQ ID NO: 23885 - DNA, 714 bp, Zea mays
  Peptide Sequence Number=SeqID_65664
atggatgccatgcgtctctggcatggaaatggaaggcaggcgggaaggatgttctcgctgagccagatcgagcacgacctcccgatgccgccgcacctgctgagccgcccccttcccgacgccatcaaggccgagctcgagaggctcttcttggacaaggtaatcacaaaacttgggctgtgcgtgtctgtctatgatatccgatccattgaaggcggttccatccatccaggggagggctgctcgacttataaagtttcatttcgtttgctgatgttcaagccttttaatggggagattcttgttgggaggattactggatatgacgataagggattgcaggtttcacttgaattcttcagtgacatttgcatacctggacacttgatgcagtttggcacatatgacctaaattatgttagctatcttatcagtgtacagtgcagtgtttcaaaggcatccaggggaccagatggtaggtggatgctgaagactgaattaggcgatgagctttatctagatctagatgacgagataaggttcttggtttctagcacaaaatacccgcctataccaattgatcaaaatgaggatgacccaccatttgctccaatgcagattgttggaagtattaaaggggatggccttggtcttcttgtttggtgggcagctgatgaagaggagggggaggaggcggcagaggaagagcaatag

SEQ ID NO: 23886 - DNA, 390 bp, Zea mays
  Peptide Sequence Number=SeqID_65665
atgaaggacctgaaggcagggggcgatgtgaaggacatggaggcatgtcgcagtccggaacgagaccgcgctcggttgagcaccacctggggcccagcgccccagcgtcctcgtgaccacctcggcgcggcatccgccctctgcagccccggtgtctccgcgaccggctccggtgcatccggaacgcagctccacaggtggatctccgtccgcacagcgccacgatcctctctctccttaccacgccaacagctcgtccctctcggtccctctccgtccgcggaggtcctcccgacgtactccgcctactcgggattcggctccatcaccgccgaggtcgtctacgcaaactacgccaactacgcgattgcagcgcgcgagcaggagtag

SEQ ID NO: 23887 - DNA, 2133 bp, Zea mays
  Peptide Sequence Number=SeqID_65666
atggcctccacctccaccttcctgtccaccctcgccagcaggtccgcggcagccgatagcctgcgcagcgccgtgccgtccttcgccaagatcgtcaggttcttgcccgcgcaggcgcagatcagccgcaggcggcgcgcggcggtgctgcccacgccgagggcggcggtgtcgggcaccgagaaggcgccgtcgagcaagcacgagcgcgtggtcagggtgcacagcacccaggagttcgacgacgcgctcaaggccgccaagaaccggctggtggtggtggagttcgcggcgagcgacagcgaggacagcagccagatctacccgaccatggtgcagctcagccgcacctgcggcgacgtggacttcctgctggtcctgcgcgacgacgagtcggaggccaccgaggagctgttccgccgggagggcgtcacgaaggtgccccacttcaacttctacaagggcgccgagaaggtgcacgaggaggaggccatcggccccgagcggctcgcgggcgacgtcctctactacggcgacagccactcggcggtggtgcagctgcactcgcgggaggacgtggaggcgctcatcgacgagcaccgcggcgacaagggcaagctcgtcgtgctggacgtgggcctcaagcactgcgggccctgcgtcaaggtgtaccccaccgtgctgaagctgtcgcggtccatggtcgacaacaccgtcttcgcgcgcatgaacggcgacgagaacgacagctgcatggagttcctcagggccatgaagatcgtggaggtgcccactttcgtcttcatcagggacggccagatcgtcggccgctacgtcggctccggcaagggggagctcgtcggtgagatcctccgatacaacggcgtcagggtgattaagaatggtggaagcacggaggattttcttcctgctagcgcttgcagtgtgcttgaaggaagactggtgaaggaacagaatgctgaaggtcgggtcgctgttagtaaagtgaaggagttggtagaaggcttctctagtggcagtgtctctcgagactttatcagtagcagggttgggcagatgatatttgatgaatctgaagtgttgttcatgagtggtccatatggagattctgttcaatacaagaatggtgaacccacaaaacagtttgcaaagtgcgatggtgtgagaatcctctctaactcaagtatgatagttatacaccgagtctcagtctttattacatcatctgttggcattggaaacaagattccagcagcattactgtacaacgttcgtgatcactatggcaggcagaacaaaggcagtgtgcaacttggaataactggactgacacaatggtggctcaatgcttttagttcaggaaacagtggtatggcagttcagtcacagccaaacattcaaaggaactccatgaacaaattaaggggattatcgtttagaatggtgtacgataaaggcaaggagaatatagtggctgatacattttcacaagggggttcacttatggctacgtatggtgaccttgctattcaaatagatatacctaaatctattgtgactaattcctatgctctggataagttgccaatagtgaccatccacagtccacatggggttgtgtactcagttcagtggggcaaagttaaaaggctccatcagttcgggaagcagtgtttagtttctgagcaagcgaaagaagagcaacaactctttggtgggttctggcatttgttttcagtgctacaggggatctggaagggcctaaagtcagattttcttgaggattttcccatacctgaaggctgtgattttattatgctgcttcagtgtgttgcccaggaccatctcccacggtggaaaaccttgccgccatttgttgaactgtggtaccgccctgataagaatgctagcaatccagaagcatcagaactcttcaaagaagttgcatattcttataacatcttgtcagatccagagaaacaaaggcagtatgataatgctgattttgaggcattagaaaatgaaggagtggatatggaaattgaattgtccaatcttggaactgtgaacaaatgtttgcagcatttttttccaaacttggtgttcctatga

SEQ ID NO: 23888 - DNA, 889 bp, Zea mays
  Peptide Sequence Number=SeqID_65667
atgacacctcttcaggcagcagttgctgttgttcaaaaggatctgaggcctactattgctgttgatactcatcctatgctcgctgagctactccagagatgctggcagaaagatcctgctctaagaccaacatttgcagagattgtggatatattgaactctataaaggagtcgagcgataacttcagaatacggccagaagagcttactgtgttcattccgagaggttttgtcgccgtctgcggagaagagagcgtcgcctccttagtcgcgcatccacaacaccaattagagtacgagatgaggaagtccaacgcgcatggatgctcgtcgcggcttcgtctgggcggaatcgagctccggtccaccggaattcttcgccggtgtgggagctccgccgcaccgcagccgcgcaccgtgggcagcgtccctgtacccgacgagcaagccactgtggaatctgaggttctgctggtagagaatgctgagcaggagctcgttgaaggcaagtttcgccgtctgcggagaagagagcgccgcctccttagtcgcgcatccacaacaccaattagagtacgagatgtaatctcgggtgctcgccatggcttgagggacctgtgcgaatcccgcgggggtgtgcaatgggtagacattcatggaattgctcgctatggttcaagcaacgtcgccgagtcgcttcgcttcgtggtcatgctccaccacctgtgtcaagccctcgatggtcgacccaggaggaagtccaacgcgcatggatgctcgtcgcggcttcgtctgagcggaatcgagctccggtccaccggaattcttcgccggtgtgggagctccgccgcaccgcagtcgcgcaccgtgggcagcgtccctgtacccg

SEQ ID NO: 23889 - DNA, 141 bp, Zea mays
  Peptide Sequence Number=SeqID_65668
atggagagcgacgtcgtggacctcttcgctcaccagcacgacgtccccttcatcaccatctgttccctctccgacctcgccggcggcggttcctcgatcagcaacgaggccaccacgttcctcgacatcgcgtgcacgtag

SEQ ID NO: 23890 - DNA, 768 bp, Zea mays
  Peptide Sequence Number=SeqID_65669
atgtacttcaatgggtcgctgatgaaaacaggagcaggtgcgggcctgctcttcgtctcacccctcgggaaacatgtgcgctacgtgctgcgtctccattttccggcatcaaacaacgtggccgagtacgaggctttggttaacgggctgcgcatcatcgtcgagctaggggttcggcgcctcgacgcttgtggcgactcgcagcttgtcattgaccaagtcatgaagaactctcattgccgcgaccggaagatggaggcctattgcgacgaatttcgacgcctggaagacaagttctatgggctggagctcaaccacatcgctcgacggtacaacgagactgcggatgagctggcaaaaatagccttggggcggacaatggttcccactgacgtcttcttcagagacatacatcaaccctccgttaagatcgacgacacgcccgagcccgaggaggcctcggcccagcccgagaaggcacccaggggcttctcgcacctgctggtcgccaccgacaaattctccaagtggatcgaggtccgacccctaaccagcatcaggtccgagcaggcggtggcattcttcacaaacatcatccatcgctttggggtcccgaactccatcatcaccgataatggcacggagttcactgggaagaagttcctggacttctgcgaggaccaccacatcagtgtggactgggccgttgtagctcaccccatgacgaatgggcaggtggagcgtgccaacggtatgattctacagtga

SEQ ID NO: 23891 - DNA, 246 bp, Zea mays
  Peptide Sequence Number=SeqID_65670
atggcgcctttggcagggcctggcttcctgttagtatcactctgtcaagtggcactgcagtcaaagtggcgcaggcggcactgtccttctgtcagaccgctttatgctgatgggggttaccagctgagaattaggagtcttgaggctttttaccaattaaatgtggagggacacgatgacaatggaaaccgtgcaactatagaaactggatctgaccgacgacaggttgattacaaagaaatataa

SEQ ID NO: 23892 - DNA, 1992 bp, Zea mays
  Peptide Sequence Number=SeqID_65671
atgctcctgcatgctaaggattcagttaggaagatgcattcagttgctaagaactactttgtgtctgatcttactcatcctccaagatccttgaacagagcttccagacatgttgttccattcaagacccgtttctttactcattgctcacttgagagccgttcagttgaccaagagattgtgattgctatgggaagcaatgtaggcgatagagtcagtacattcaacagggcattgcagctgatgaaaagctcagacgtgaacatcactaggcatgcctgtctctatgagaccgcccctgcttatttgactgatcagccgcggtttcttaactctgccattcggggcacaactaggctcaggccacatgagcttcttaaactgctaaaggaaattgagaaggatattggccgcactggcggaataaggtacggcccaagacctatcgatctagacatacttctttatggtaactcccagatccatagtgagactctaattgtgccacatgagcgcatccatgagaggtcatttgttttagcacctcttgttgaccttctaggtgcatctagtgacaacggtatcgaaacaagttggcactctctctcaaagtgtagtggaggtttctttgagttatggaataaccttgggggtgaatctataattggaacagaaagcattaaaagggtattacctgttggggatcgtttgttggattggtgtgagaggactcttgtcatgggggtccttaatttgacaccagacagctttagtgatggaggtaagtttctagaagtgggagctgccatttctcaggctaagtcattaatctcagaaggtgcagatatcattgatattggtgctcaatctaccaggccctttgcaaaaagattatctccaaatgaggagcttgagaggttggttcctgttctggatgagattacaaaaatccctgagatggagggcaagttactctcagtggatacattctatgcagaagttgccagtgaagctgtgaaaagaggagctcacatgatcaacgatgtatccagtggacagcttgatccaagaattcttaaagtggcagctgaactgggagttccatatgttgcaatgcacatgaggggagatccgtcaactatgcaaagcgaacaaaatgtacactatgataatgtctgcaaggaagttgctttggagctatacacacaggtgagagaagcagagttatctgggattccattgtggaggctggttcttgatcctggcattggcttctccaagaaatctggacataaccttgaagtaattatgggattggaatccattaggagggagatgggtaaaatgagtataggtgcttcacatgtgccaatattactgggaccttcaaggaaaagctttttgggtgaaatatgcaatcgtgccaatccagttgagagagatgttgctactgttgcagccgtgacagctgggattttgaatggtgctaacattgtaagaatccataatgctggatatggtgtagacgctgcaaagactccacgtccaccggctcccatcgcacgctctccccaccgcgcgcagcttcacctcaacacctcccccactgcgcggacgctgatggaaggtcacgcgaccgcctctgcgatacgcagaatccgcgccgcgcgtccaccccaatattctcgcctcgcctcgctctccgtcgcgccattccagggaccctccatcaccgcccctcccatcattacgttacgcccgcgctccgtcgatggaaaacgccattttagggacccgccctgcccctgcgatcctcgcccttccaaggacgcccctgcgtccgtcttgcccaatccctctcctggctcgtggggtctcgtgcccgccgcgcacccctactcccctccgccccagacagccttcaggaccgcccatgctcggtggaagtcttgcatggtccaagttcacctttccctttcaatccacctttga

SEQ ID NO: 23893 - DNA, 195 bp, Zea mays
  Peptide Sequence Number=SeqID_65672
atggtgctcacgcgcccgtcctccgctctcttcttctcctgctcctcatccgcctgcctcggtcaactcaacccgctcctctccgttgccttgcctgctgcgcctggagtgggccccgcgccacgccaccagcactcccgcagaatctgcgtaggttgcgaccggctctacgcagatcctctgatgcagtactaa

SEQ ID NO: 23894 - DNA, 171 bp, Zea mays
  Peptide Sequence Number=SeqID_65673
atgacttcgaacatattgtattctaccttttcagattttcttgtttttaatgcaactcctgttagtttgctgataacaactgctcagaaaaacctaaaccctatcgggaatggagacgctctcggcgaagcaggagggcaaggtggacgtgaagctgaagccgacttctaa

SEQ ID NO: 23895 - DNA, 645 bp, Zea mays
  Peptide Sequence Number=SeqID_65674
atggaacttgattgtcatattggttgtgctatctctctatgctacctacagccattggcatcaaagcattcctctattgatgagttcaacctcaggtctgcccaagacttcgaaatggagcttcatgaagctgagcttgctgtgagaccggaggatccaaaaatgataagtagaccaagatatgcggtaatgaacaccgcaaaaggcccaattactatagaaatatacaaagatgcttctgctgacgttgtggatagatttatcaacttgtgcaagagtaatcatttcaaaggaatgccatttcggcatatcataaaaaattttgtaattcaaggaggtgattttgattttgatggagcttcccaagaatggataacgaaagctaaagctagtggaaaaaatgatctcagtccaaaacatgaggcatttatgattgggactgcaaagaatcctaataccaaaggatttgatttgtttatcacgacggctccaattcctgacttgaatgacaagcttgttgtatttgggcgagttatcaagggagaggacatcgttcaggagattgaagaagtcgacactgatgagcattaccagccaaaggccgccataggcatcatcgatatcgtgctaaaacaggagccttga

SEQ ID NO: 23896 - DNA, 399 bp, Zea mays
  Peptide Sequence Number=SeqID_65675
atggctcgttcactgtcgacccatttagcccgatatgaggcaccgcccccggggaacccaactgctggcgagaagatcttcaagaccaagtgcgcgcagtgccacaccgtcgacaagggcgccggccacaagcaaggtcctaatttgaatggtctgtttgggaggcagtctggtacaacacctggctactcttactcttcggctaacaagaacatggctgtgatttgggaggagaacactttgtatgactacttgcttaatcccaagaaggttcggctggaattcactctcccaaactgtgataatttatttcaccgtgtgtcactcagcatatgttgcatccacgcatccgctttgtatgttgaatgtgtggctctgccatgtatatttgcaatatga

SEQ ID NO: 23897 - DNA, 1425 bp, Zea mays
  Peptide Sequence Number=SeqID_65676
atggcgttgccggcgggcacggtggtggtggcctacaacgccgccatctcccggtgcgcccgcgcggggctgtacgcgcgcgcgctggcgctgttccgcgagatgcgcgggcggggcctgcgcgccgacgagtacaccctcccgccgctcctcaactccgcggcgcagctgcggggtccgcccgaggcggtggccgcgctgcacgcgctcctcctccgcgcgggcctcgcgccccacctccacgtcgccaacgcgctcgtcgacgcctacgccaggctgccccacgcgggcgccgccgcggcgcgggccgtgttcgacgaaatgccgcgccgggacgtcgtcacctggacctcgctcctcacggggctcgcgcgcgctggcgcccacggcgcggccgtccgcgcgtaccacggcatggtcgcctcgggggtccagcccgacgagttcgccgtcccggcggccctcagctcgtgcgcggcctccaccgcgctcgacctgggccggtcggtgcacgccgccgcggtccgcctcgggctccggccgttccgctccgtcgagaactcgctcgtgtccatgtacgccaagaccggcgcgctgcgcgacgcgcgggcggtgttcgacgcgatgccggcgcggtgcacgatcacgtggacggccctcatcgtcgggtacgcgcagaacggccgtggcagacagtcgctcgaggtctacgccgatatgggtccggtccgggtgcaggccggactacgtgaccttcatcggctggacgaggccatggacctgctgaaccggagctccacggagctggacgccacggtgtggaagtcgctgctgggcgcgtgtcgggtgcaccagaacgcggagctcgccgagcgcgcggccgagatggtgtggaggctggacccggcggacgccgtgccgtacgtcatgctgtccaacctctactcccgggcgaggagatggggcgacgtcgcgaggatccgcgcgctgatgaaggcgagaggggtcaccaaggagcccgggtgcagctgggtgggcgtgaacggcatcacgcacctgttccacgtcgaggaccgcgatcacccgcgggcggcagagatctaccgcaaagtggaggagatgaccgaaaggatccgggtcgagggttacgtgccggacacggactgggcgctgcaggacgaggtgccggagtggaggcagagggggctggcgtaccatagtgagaggcttgccgtggccttcgggctgctcgctgtgccagcggccgcacccatccgcgtgttcaagaacctccgggtatgtggcgactgccacactgcgatcaagatggtcgccaaggtgtacggcagagagattattttgagggatgcgaactgcttccaccacatgaaagacggagagtgttcttgtggtgattactggtag

SEQ ID NO: 23898 - DNA, 110 bp, Zea mays
  Peptide Sequence Number=SeqID_65677
atgacgcgggtacttgcactcggcacaaggggaggagttggagtccatcaacggcaagggccgccagttgcggccaaaggcggatggggaggtgatgtaggaccgagcag

SEQ ID NO: 23899 - DNA, 563 bp, Zea mays
  Peptide Sequence Number=SeqID_65678
atcccatcgacggtggtgtccaatttcgcaaggtcgtgctggcggccggagatgaggaaggactctggcgccacggtttcgtgtcccactgccgtggcgggctcaccggcatcggtgagatagcagcggggaaacacgatgacacgacagaggcgcttatggtgaactctgtggccaagttgctctttgttcgccgtgaatgcgatgtttgggccatcctgcaacgccatcaggccaagcatcatgttaacgaacagttggcgctgaagagtgccgaggtggcagacctattgtcgctatgcaccgagctaaaagatgatgttgcgactgagcgagggaaggtgcccccgctggaggaggaggtgcgacgtttgagggcaagggtggccccgctgcaggaggaggtttggctattgaatggaaaccttccggcggtggccggagagcaagacgagtctcggcgtcaggtcaccgaggcctccctccgcgtcgactcccttacgagggaattggaggtcgagcggtctgagggccaagccctaagggcctggatgggggggtaa

SEQ ID NO: 23900 - DNA, 531 bp, Zea mays
  Peptide Sequence Number=SeqID_65679
atggctcgcagaaggtctgagatagtggacgacgccacggtaggtgcggcgtctctcgccccccgtatcctccatggaggagacggggatggcctcagtcaatggtgccgggcccacgacaactgcctcggccacagtagcatcaggcctggccgtcactccaatggtgagctaggctgcctcaacgccctcccaagtggtctcctgtgcggtgtggggacaagacatggccccgaccgatgttccaacaccacgcttcaccaccttggtagcagtaaaggacaattcgtgggcttggcgcttagtgttgaagcaagacaagatgtcaggaaaaaagcctcatgcataggaaaactatattcatggttcgacagcttacctggttcggggcacgacgaccgccctcggtttccggctcctcaagcaccgtcgctacaccacgggcattggaaacagggcagtagcccactactaaaaaatcaccctaatgccacgacagatattgcaacaagaatatttttgttgcattag

SEQ ID NO: 23901 - DNA, 306 bp, Zea mays
  Peptide Sequence Number=SeqID_65680
atggcgcagagtagcaagtctggagggatcttttgcaagcggcagcgcggcggcggcgcggccctgtcgcagtggcgcggcggaggcgcggcccgggcgcggtggcgcggcgaaggccgctcgcggtggcccgggcgcggtggcgtggcggcggcgcggccgctcgaggttttcatgattaagttcgacggtgtgcacaagtccgacgaacttaagttaagaacgtggcattgcaaccactgctcaggagaagatgaagtcgtggaaggagacttccaggagttccaagactatgacgagttctag

SEQ ID NO: 23902 - DNA, 210 bp, Zea mays
  Peptide Sequence Number=SeqID_65681
atggctggcagagcaacaagcgacgttgtcggcgcgcgagaggaccgggtccaggacggccaccgtcgaaggagcacgcaccgaggcacgggccgccagagccctaggtccaggacggcgtggaaacgagcttatcaacatgagcggagccagccagacataattaccaggatgatgggttcttccacttcgtttcagttgtctaggtga

SEQ ID NO: 23903 - DNA, 1545 bp, Zea mays
  Peptide Sequence Number=SeqID_65682
atggcataccatctcatctcttcaccgacgttccttctcgcacaattgctcgccgtcgccgtccctctccttctgctcctgctttaccacggctcatcaattcgccgccgtcgtcgcagcagcagatcggccaagcagggaggacagctcctgccgccttcgcccccggcgctgcccatcatcggccaccttcacctcgtcagcgacctcccgcacgtctccctccgtgacctcgccgccaagcatggtggcgacgacggcctgatgctgctccgtctcggcgctgttcccaccctcgtcgtgtcatcgccgcgggcggcggaggcgatcacgcgcacgcacgaccacgtgttcgcgtcgcggcccacgtccactctcagcgacgagatcctgtacgggtcctccgacatcgccttctccccttacggcgagcactggcggcaggccagaaagctggtcaccgcgcacctcttcaccgtcaagagagtgcactcgtaccgctgcgcccgcaaggaggaggtgcgcctggtggtagccaaggtgcgggaggcggcggtggcgggcacggccacggacatgagccttgccatgaacacgttcgccaacgatatcatcagccgcgccgtgtccggcaagttcttccgggcggaaggccggaacaagctctttcgggagctggtggaggccaactctgatctgttcggagggttcaacctggaagactacttcccgggactggcgagggcgttaggtttccttagcagaaggttgttgtttctgcgcaacaggcggcgggtccaggagacgcacaggagatgggacgagctgctcgaaaccatactgagcgaccacgagggaagaaggggctctgtctctgtggacggtggtggtgacttcaccgacgtgttgctctcggttcagacagagtacggcatgaccagagatcatctcaaggccatcttggtggacatgttcggtgcgggcactgacacgtcatccttggtcctagagctcgccatggccgagctgatgcgcaacccacagcagatggccaagctacaagctcaagttcggaggcacacaccggaggggcaggaaacggtggaggaagagaacctatccgacatgcccttcctgagagccgtggtgaaggagacgctgaggctgcacccacctgcccccgctcctcgtccctcacctgtccctggcggactgcgtcgtcgatggctaccacgtcccctccggcacccgggtcatcatcaacgcgtgggctcttggcagagacccgggctcgtgggagaagccagaggagttcctgccggagagctgcccatgggcatggaggagaaggacattgacatgacggaggtgtttggactcacggtgcatcccaaggagaagctcatgcttgttcccaaagttgctcgtgtactgcaactgctcgtcaataattccatcgtccaagttgctgatcgaagggactcgagatcgatcatgcatgtatatggtttatttggagtagaaaactgcatgcagcgggtgtag

SEQ ID NO: 23904 - DNA, 132 bp, Zea mays
  Peptide Sequence Number=SeqID_65683
atgggggacgacgctgcgtcggcgctcggccgcgcgctggaggaggtgaacactcttgtgacgctctgcatgctaatggtgaggtggaaaagggcagagctcaggcaccgtgctcatgacaagcaggactga

SEQ ID NO: 23905 - DNA, 1095 bp, Zea mays
  Peptide Sequence Number=SeqID_65684
atggcagcagcagcagcagggtgggccgacctcccactcgacatgctggacgaggtcatcgcgcgcctcccgatccccggcgaccgtgcccgcttggccgccgtgtgccgcgcatggcgctccgccgcgcgcgaggtcgtgagccacctcccgtggatcgtgctcccatacggcaccgcctgcaccgccggccacggcgcggcctgttccgccttccggatccccgggttccccgacgacaccacctgcctcggcgccgcctacgactgctggctcgccctcgaccgcacggacgacgtggtccggcgcacgcccttccgggacacagggcgcttcgtcaggggcgagtgggaggaggtcgtgtactccaggcccgacgtgaatcacaagcacgtctacgcgctgcacaaccccttcagcaacgtcaccgtgcccctcccgggacctggacgccgtcattggccatgtcgccgagaccttccggaagaagtactagttgactacactagcaacgaggaggatgattattattacacggatgaggaggaggacccggaggatataaacgaagaagaggcagccgatgatgagccagcggaccaacaagcattggaggacagcttcaacggcgacgagatggtctcggacaacgaggtgcttggagccaaggacaaggacttgctacttacgggtcgatacctggtgcagtcgctgagcggggagctactgctcgtgaggcaccataggcgggcatgcccgcattgcctaggccgcacttgcaatctcgaggtcttcaaggcagattttagcgcgggcaagtgggtggccgccggattggccaaggacgaggcgatttttctcagtcgatcgcacagcaagtgcgctcgcgcacgcagaggcatcaggcaaggctttgtttactatacaacacgtatcaacgacgtgttcgacaccacatccagcactgttcgtgccattacagttgggtgggacacggctatgcgtagcggagaaatcgggatgattttccctccggagcctgtggttgacagagatatgctgggaaagggatggtacacatctgctgaactttaa

SEQ ID NO: 23906 - DNA, 1005 bp, Zea mays
  Peptide Sequence Number=SeqID_65685
atggagcagcaaccccaagcctcctccagcgcgacgaccacgtcgccgtcgtcgtcgtcgcagcgccgggagctgcagggcccgcgcccggcgccgctcaggctccacaaggactcccacaagatcaagaagccgggaccgccgcagccgcagcatgtgggacccgtccagcaggtgcgccagccggtcatcgtctacacggtgtcgcccaaggtcgtgcacgcgaaacccagcgagttcatgtctgtcgtgcagcgcctcacgggcgcgcgcggccacggcgccaccgcaacgtcgtcgtcgtcgtcctccctgccggcgccgccgccaccagacctgaggacagcggagccacatcatcaggttcagatgacgacgtcctcttcggccccgttcccgttcccgttcttgggcgggcaacacgtgcatgcgtcgtcgtccgggcagctactcgcgccggtggcgccgcacttcccgttccagcagcagcagcagcaagcaccccgcggcgggacagcatcgcagtcgcagcacgatgacctgatgatccaccaactctcacccgcggcacgcttcgccgccattgagcaggcggcggcgtctgcgcggagttcatcaggcgtcactgccacggctaatgtcgttggaggaggcctgctggcgccgttcccgagcatcctgtcgccagggtcactcccgccgagattcttctcacctccggctccgggcggtaactcgtactggccgggcatcagtctcttgggcgggctcatcagcccggcatttcttggcctcggtagcgaaaccatcgtcggtggtggtagcacgagcgtcgccagtgcaacccatcaaagtgtgatgtcgtcgtcgccgtttcaacaagaagaagaagcgtcgccgtcgacggtgacggtggctccatctccatctgccgagaatgcatgcaggagatcgagtccactgcccagtgggccgggcgactggactggttcaccatttccttag

SEQ ID NO: 23907 - DNA, 339 bp, Zea mays
  Peptide Sequence Number=SeqID_65686
atgcctttcatgcaggttctgatggcggatttcttcatggctgaccagctaaccagccagatcccactgctaagacacctcaagttcacggggtgctacttcatggctgaaactttcagaactcacgcgtatggaagttgtaccagcagctcccaatacaagaacctggcatatgtgctctctttcctgccatactactggcgagcaatgcagtgtctgagaaggtacttggaagaaggccacgacatgaaccagcttgctaacaccggcaagtacgtatcagcgatggtgtttaaaccagaaagcgtcccgtggcacggaaaaccatgggagctctga

SEQ ID NO: 23908 - DNA, 306 bp, Zea mays
  Peptide Sequence Number=SeqID_65687
atggagctctccctcccccaggccgagcctcctcccccaagtttctccctcgctcctcacattcgcgccctgctcttgggactgcctcgccggaacctcgccagtgtcaacgccaccgcaccagagcctgcgcagcaccccgtcaagaacccctgcccgcgcgcgcagcagcaccaccgctcgccgtcgtgcctcgtcggagttcgtccacaccgttcgccatccatggaacctcaccggaattcgtgcccgccatccaaacgcatcgccagagttacaccgtttgttgtcgacgcgatcgcgtag

SEQ ID NO: 23909 - DNA, 1275 bp, Zea mays
  Peptide Sequence Number=SeqID_65688
atgtccggcaccactccgacccctacacctacaccgccgcctctcccgccgccgccggccgctcgccccgtgcggtacgacttcctcaactcgaagccgccggccaactacgtcgcggggctcggccgtggcgcaaccggcttcaccacccgctcggatatcgggccggcccgggccgcgcccgacctacccgaccgctcggccgccgccgccggccctgccgtcggccgcggccgcgggaagcctcccggcgaggatgacggcgacgacgacggcggcgacgaggagaagggatacgacgagaaccagaagttcgacgagttcgagggcaacgacgccggtctcttctccaacgccgattacgacgacgacgaccgcgaggcggatgctgtgtgggagagcatcgaccagaggatggactcgcgccgcaaggatcgccgcgaggcgcgcctcaagcaggagattgagaagtaccgcgcgtcaaaccctaaaatcaccgagcagtttgctgatctcaagaggaagctggctgatctgtccgcgcaggaatgggagagcataccggaaattggggactactcgctgcgcaacaagaagaagcggtttgagagcttcgtgcccgtgccggacaccctgcttgagaaggctcggcaggagcaggagcatgtcacagctcttgaccctaagagccgtgcggctggtggcacagagacgccatgggcacagactcctgttactgatctgacggctgttggcgagggtcgtggcactgtgctctcgctcaagttagataggctgtcagattcagtttctgggctcactgtagttgatccgaaagggtatttgacagacctgaaaagcatgaagattactagtgatgctgagatttctgacatcaagaaggcgcgtctattgctcaagctggagacctatgaccaagcaaggaaagtacttaacaaggccagggagaagctccccaaggagcctgccatttggattacagctgcaaagctagaggaggctaatgggaacacacaatcagttaacaaggaagcttatgctgctatccccaattcagaagagatctggctggctgcattcaagctcgagtttgagaacaatgagccggagagagcaagaatgctcttggccaaggccagggaaagaggagggacagagagggtttggatgaaatctgccattgttgagagggaattggggaatgttggtgaggaaaggagattgttggaggaagatggaagaccggcttggtaa

SEQ ID NO: 23910 - DNA, 1197 bp, Zea mays
  Peptide Sequence Number=SeqID_65689
atggggcctctgcctctccgccgccgcgtgggcgtcctcctgttcctggccctcgtgctcctgggcggcggcggcggcgcggacgccggcacgacgagctcgtacaggcggaagctggaggcgacggtggagatgccgctggacgccgacgtgttccgcgtcccgccggggtacaatgcgccgcagcagcacgccaccaagtactactacgccatggggtttggccacacggtcaggaccttctggttcaccacgccgcccaagccgggccctgatgtgcccttcaagttcggcctcatcggcgaccttgggcagacgttcgactccaacatcacgctgtcgcactacgagtccaacggcggcgacgccgtgctgtacgtgggcgacctctcgtacgccgacaaccacccgctccacgacaacaaccggtgggacacgtgggcgcggttcgtggagcgcagcgtggcgtaccagccgtgggtctggacggcgggcaaccacgagctggacttcgcgccggagctgggcgagaccacgccgttcaagcccttcgcgcaccggtacccgacgccgtaccgcgccgccgggagcacggagcccttctggtactcggtcaaggtcgcctccgcgcacgtggtcgtgctggcctcctactccgcctacggcaagtacacgccgcagtgggcgtggctgcaggcggagctggcgcgcgtggaccggaagaccacgccgtggctcgtcgtgctcacgcactcgccctggtacaacagcaacaactaccactacatggagggggagacgatgcgggtgcagttcgagcgctggctcgtcgacgccaaggtcgacctcgtgctcgccggccacgtccactcgtacgagcgcagccaccgcgtgtccaacgtcgcctacgacatcgtcaacggcaagtccacgcccgtccggagcgccgacgcgccggtctacgtcaccatcggcgacggcggcaacatcgagggcatcgccgacaacttcacgcgcccgcagccgggctactccgccttccgggaggccagcttcggccacgccacgctagacatcaagaaccggacgcacgcctactactcgtggcaccgcaaccatgacggcgccaaggtcgtcgctgacggcgtctggttcaccaacaggtactggatgcccaccgacgacgacacaaactga

SEQ ID NO: 23911 - DNA, 285 bp, Zea mays
  Peptide Sequence Number=SeqID_65690
atggccgtaatgggttcaacatcggaaaagatgtacctctgccagactaataccagaaaggccaacacacaatgggagtggagaggtggcgagagtagcatgtaccctccgtggcaagaggctggacggtggtgtatctgtgctctcggttggcgtgaatccagtctggtcttaagaaacccggtggtgaggaaacaacagacttttgctgtttttgctctaaggtggtgcccaaagaagaacctcaacagtgaagccgcgggaggatgttggcctcccacttga

SEQ ID NO: 23912 - DNA, 102 bp, Zea mays
  Peptide Sequence Number=SeqID_65691
atggcgtggtggcggccggagatgaagaaggtcactggtggctcagtcgcggcgttcatcggtgcagcggttctgagatgctctacaagtttgctatattga

SEQ ID NO: 23913 - DNA, 396 bp, Zea mays
  Peptide Sequence Number=SeqID_65692
atggcaagtgcatggcgaggtggcttcggcacggtgacgctttcagcacaatgggggacatcgacgaatgtgacgacgaacgatgattgtgcacagctgcccaagagcaggagcttcaacgagggcgacgaaggggaactgggcgtggccgccgccgccgctgtcgccgaggagccgccgccgtcgcccgacaccgtccaagcctctcccggggatctacagccccgtcccgacgccccagcccgcgcccagccccgtctcgaccggcaactccaccgccgcccaagcgacaccggagccgccccgacgccgcccgcggccgccggagcctctgcccccgtccccgacgccaccggcgcccgccctgaccccaccggcgtccgcttcaccggctaa

SEQ ID NO: 23914 - DNA, 305 bp, Zea mays
  Peptide Sequence Number=SeqID_65693
atgggaatcaaggcaaggtcaaaggcttgggcaagatagccatcaccaacgagcaccccatttcaaacgtgggaagcactcatcacagcaagaatgtgatgactacatcaagaccactggagcttcttcacatggacctcttcggacccgtctcctaccttagcatcgggggaagtaagtacggtcttgacaaatcagaaacccaagggaccctaaagcgctttctaaggagggctcaaaacgaatttgagctcaaggtgaaaaagataaggagcgacaacaggtccgagttcaagaacttataa

SEQ ID NO: 23915 - DNA, 1065 bp, Zea mays
  Peptide Sequence Number=SeqID_65694
atgggtgaggaagctgtccacttcagcgtcgtcgacgccaaggactgcaaacagagtgcctttgaagtcggcgataagacgtatgttatttgtagatcagatgatgatttgaaaacatctgctgttaaaattcacgacaagctcactcagacttggctctcacccacaatacttggggaacagccacttctaaccaagtcacagtctgtgattcctgtcagtgatgagaagatattagttatcgagaagggtgttcccttgaatgagtccatctggttccttgagatagacaccccctttgttaagcaacaacggaaaatcaaggaaacagaagttgtttcttggagcaagggagtaatcggcgttggccaaaaaccagttgtgattagtggtccttctggtgttggtaaagggacattgattgcaaagttgatgaaagactatccatcgaagtttggtttttctgttagccacactacaagatctccaagggaaaaggaaatagatggtgttcactaccacttcacagaacgaatcaagatagagaaagatataagcgagggcaaatttcttgaattcgctcatgttcatggaaatgtgtatggcacaagtatcgaagcagtcgaatctgtaactgatgagggaaagaggtgtattctcgacattgatgtccaaggagctcgatccgtgagggcttcttctcttgaagcaatattcatctttgtatgccctccatcgttcgaggaactagagaagcgccttcgggcacggggtactgaaacagaggagcaaatccagaaacgactcagaaatgctcaggctgaacttgatcagtccaatgaaccaggtctctttcatcatcttttggtcaacgatgaccttgagacatgctatgagaatttgaagaagttgctttctctggatgatgaccaagaagattcagatgatttttgctggcacttgatttgtcgtctctctcaggcggtgcgcctggacgaacaaggggccttaagattggctcagttaactccttttgacaagggcttatattggcgttttagatga

SEQ ID NO: 23916 - DNA, 907 bp, Zea mays
  Peptide Sequence Number=SeqID_65695
ggctcggactcgggctaagtcccgggaagacggcaaactccgctccgcccgaccccagggctcggactcgggctaagacccggaagacggcgaactccgctccgcccgaccccagggctcggactcgggctaagacccggaagacggcgaactccgctccgcccgaccccagggctcggactcgggctaagacccggaagacggcgaactccgctccgcccgaccccagggctcggactcgggctaagacccggaagacgacgaaactccgcctcgcccgaccccagggctcggactccgccctggcctcggccgaacgacttccgcctcgcccgacccctcggctcgggctcggccacggcaacagaaggcagactcaacctcggcttcggaggaacccccacgtcgccctgcttggggcacagaccgccacgtcaacaggaggcgccatcatcgtcctaccccgaatcgactcggggcgacgtcggcaaggactcgacagctccaacagctgtccctccaccaggctccgtcgcacctccgacagccacgacatcacgccagcaaggtgccaagacctctccggctgccacattggcatggccttcttagaggaggttggccgcgcgggaccgaggatgggacaggcgctctcttggggccgctcgcttccctcacccgcgtggacgcttgtaacccccctactgcaagcgcacccgacctgggcgcgggatgaacacgaaggccgcgggacttccacctctctcacgctcgactccgaccacctcgcctctcccccctttgcgctcgcccacgcgctcgacccatctgggctggggcacgcagcacactcactcgtcggctttgggacccccctgtctcgaaacgccgacagttggcgcgccag

SEQ ID NO: 23917 - DNA, 381 bp, Zea mays
  Peptide Sequence Number=SeqID_65696
atgacgactaccatttctcccagctacgaggggcatgcatactcctgctttcctggacataagagggacacccaaacctccactgtcgtccctctcacaataagagacggagacaaaacaactgcaatcacaccgacaccatctgcggtcaacctagaccttctcgcaaccactccaacctcgaagcgcgtggacttcgaggaagaagatgacatggatcctggcctagacttttcgtggctccacaaacccgattccatgcgacacttcctgtccacgagcggctactacctctctaacggctccaacgactatagctcagatgacaagggttacgacccaactcgagaatgcttccacgccaagcacgaggagcactga

SEQ ID NO: 23918 - DNA, 1548 bp, Zea mays
  Peptide Sequence Number=SeqID_65697
atgtacatgttttacaagtgtccttacggccaaggcgacaagctctctagccacgctagacgtgctcggatcactacccgcgacgtgtcagctcgtgcagcaagaaaaatctgtgttggagaaggtgctggagcagcccacggcgtgggggggcggcctgggagatggcgctcctcgcggggcccctgtgggcggcggccctcctcggcctgctgctcggctgggcctggcgcccgcgctgggcagccggccctcgtcgtcgcccaccgcgggacgacggcggcagcgcccaccaccgccgccgccgccgcgcagccgcccttcgccacgctcgacttctggaaggcccagctccccgcccgcctccgcgccccgctcggcaccgccgtgcagcagagggagggtgacaaggacgccgtgcaacggaaccgcggaacggtggcgcttggcaggtcgtcggagacggagacggcgacggcgagagaggagccggtggcggtggcggtggggatggccgacctggtgaacctctggaggctggtggagggcgcggacggtggcccggcctggaccaagatgatggagaagtcgctgcccaccatgacgtaccgggcgtggaggagggacgcccagaccgggcctccgcagtaccagagcagcagcatcttcgagaacgccagtccagaggaggtgagggacttcttcggggacgacgagttccggatgtccaacaggtgggacgacatgctcatctaccacaagaccctggaggagtgccggaccactgggacgatgaaagtgcattgggtccggaagttccccttcttctgcagcgacagggagtacataatcgcccggcggatatggaagctggggggcgcctattattgcgtcacaaagggcataccatgctcatccattccacggcgtagcagacctcggagagtcgatctgtattactcaagctggtgcatccgcgcagtggagtccaggagagggaacggaggaggaaggggggcgacggcctgtgaggttctgctgttccaccacgaggacatgggcatcccgtacgagatcgccaagctgggcattaggcaagggatgtgggggtgcgtgaagaggatcgagccggggctccgggcctaccagcaggcgcgggccgcgggggcgccgccgtcgcggagcgccctgatggcccggatcaacaccaaggtcagcgccgacggtttcgctcgccggtcgatggagtcgttgtccagctccagcggcggcgacgggccggagaccgcggacgacgcgcaggagacagagaacaagaagcccgcgacgaggagccacgcggcggcgaggctcctcgtgctcggcggcgcggtcgctctggcctgctgcacccttgaccaggggctcctgaccaaggctctcatcttcggcgtcgcgcggagtacagcgcaacccaatggcgacaggatgctcggcgccgacaactacgagcttccaggcgttctgcgggcccgacgtgttctgatatctgatactacaaaactgtag

SEQ ID NO: 23919 - DNA, 375 bp, Zea mays
  Peptide Sequence Number=SeqID_65698
atgatgtcttctagaaattcatcatgtctttctcaggacgaatacatggtactattcccccactctgaccactgtttcaatcacccagagtgtgactacaagcaatgtctaatcttggcctcggccttggaagaaatcttcgcctcgcctaagctcgcccttggccaactgccaaacatggaagcatgtgcattaaatgccacctactctcccacgaaccctgctgaagacccatgccgagcactgcttcaaccactccgactcgacacttggaaatgtcttaggctcagacatacgcccatgctcccgaatctagcctcgactctctatctagtcaaaggaatgggctacatggattgggcggccttgtcctga

SEQ ID NO: 23920 - DNA, 2794 bp, Zea mays
  Peptide Sequence Number=SeqID_65699
atggcgtcgcagcatgcgccgccgaggcgggagctcgacctcgacgctttcctcccgtcctctccgacatcctccggggcctcggacgccgacccggccgacgatgaccaccgccgcgccgtcgacgacctgctccgcctcctctcctcctcagactcggactccgattccgaggagtctagccgcatcccaagcaccagcatccagacgctatcccgagtccaagccccggcgcctgtcgctgagccctcgccgtcgccttccccatccgcgtccccgtccccgaggagatccgcatcggccttgccgtcggagaccctctcctccctcgtcgcgagaaccttctcgagcaacggcgcttcctcgtcgtcgaagcccctcccctcgctcttccggggcgtccgccccagccccaaacccggcgccgcgcttgccgctgctgccgcagcgtcccgcgcggtcctcaccccacacgccgctgccatcaagtcgcgccgatcagtatcggcgcccgtggagaaagttctggaggaagaggggagtggctccgaaggctccaaggagttccttcccactgggagcttggaagcagaggtagaagagaagggtgattcggaagcggttgctgatgcgaccaagcaaactgcaggtgggaatgtgggtgcggaactgggagaggataaacaggcagaagtgggaggtgaagagaatgctgaggctataaagctggtggaggcaagtcctctggatgctctagctgcggaggattccagtgggcatgagcaaggtaatgatgccaatttggcggaaactgaccaagttgggaatcagattgaggctgtctatgaggaaaatgaggatgaccaaactggaggtgataatcatgttcaatcaggtcagggtatggatcttattgcgattgctttagaggaaagttctgatgatgaacatgaatttgaaagatctgacagtatcttgcaagaacaagtggaatctgggagcttaattgataaagtgattgaagatagggtagagcagctggaggccagcaggaaggctgagaacacagagaagaagctgaaggtgtcaatgaaaccgttggagtgggcagaggagcttgagaagaggcaggcctcgtctggtcaacattgggaggaaggagcagctgcgcagcccatgcaactagagggaatcggaaagggcccaccagctatcggttacatgcaaattgagatggacaatccagtaacccgtgtcatgtcctcaccgtcatttaggtcagaccatggctctccccaggtgctggctgttcataggagctatatagcaatgggcacatctaaaggtgctgtcatcgtcattccaagcaaatactccattcatcaagctgatgatacagatgcaaagatgctgttcttttggaaccaaggcgagaagactcaatcaccagtgactgccatgtgctttaaccagcaaggggaccttctgctagtaggatatggtgatggtcatatgacaatttgggatgtacagaaatctgcagcagcaaaagttatatatggcgagcatacagcaccagtagtgcatgcttgttttatccgccaatctaaagccatcactggggattcaaaagggcgtctttttgatgggaatactggaattgtgctctcagcctgtcctcttgtaatggatgaatcttttggttttagtaattcatctgcccagggaaatcagacaacttcctccagtggtggtcttggcagcatgatgggtggtgttgttggaggcgtggttggagtagattctggatggaagtttttcaacgaaggctcttctccaatggaggatggtgttgtagtcatgtttattatgcatcaacatgctcttgtggttagactccgtaccaatattgaccatgttgaccatattgagaccttctctagaccagatggagcacgtgagggctccatcgcgtatgctgcgtggaaatatacatcatatttgaatgaatcgtcatcaatgaaagaacgagtgtcatggctagcacttgcatgggaccgtcaagtgcaagttgcaaagtttgttaaatcaaagatatttaaacacaaagagtggaagcttgatagttcagctgttggtgttgcctggttagacgaccagatgttagttgtccttaatttgagagggcaactctgtttattctctaaagatggcagtgagcttcgcagaactacctttgttcctgatggccttctttttgatgacaccatattgcaccatgcacatttttttaacaggtttggtaacccagagaggcattttaacagttcagtagcggtaagaggtgctacagtgtatattcttgggccatcttttctcacggtttcccgacttcttccatggaaagagcgaattgaagcactaaagagggctggcgattggatgggtgcactagacatggcaatgaggctttatgatggtcagacacagggtgttgttgatctcccaagaacggttgattctattagagatgccataatgccttacttagtagagttgctgctatcatatataagttatgtttttgaatatatttcaattgcgctgccaaatcatactggaaaagggggagaatcaggtgttctaatagaggcagatcgatccctgcttacacaaagagatgagcagtacgctcgtgtaggaggggttgcagttgagtattgtgtccacattggacggaatgatatccttttcgatacagtcttctctaagtttgctgctgcagaaagtggag

SEQ ID NO: 23921 - DNA, 261 bp, Zea mays
  Peptide Sequence Number=SeqID_65700
atggcctcccatgctagcgatagtgggtacaagtgtggtcaccacatggctagagaagtcttcgtggtagatttgtcttcggagttggtggagaaagatatccagatcgagcagatgggcacctgcacccatgagcttgaggagcaagtggagttccgggacaacaccatcgaagtcctagagaaccagctccacgacttgcaggtcaagttggatgagaccaatgcccatctggagatgcatcaccaagagatgcaatag

SEQ ID NO: 23922 - DNA, 711 bp, Zea mays
  Peptide Sequence Number=SeqID_65701
gcgacgatcgcccgcggcggcgctcggcctcgcccgccccggcctcccctccccgagggaggcgttcggccccccagctacgggacctccccggcggcgctcggccccgcccgggcctcccacagcggcgcggccctcgctcgggcctcctcggcgcgggcggcgcggccccccgctcggcatccaagacgcggaggcgcagccccccgctcggcccctaggcgcggcccccacccgacctccctcggcgcggccgcgctcaaccccatacccggcggcgctaggccccgcccggcctccccggcggcgctcggcaccccgctcggccctccccggcgcggcggcgcccgtccccggcctcccctcgagaaaccccgccccggcccccgaaggcgctcggcctcaccccttgcaccgtccccggcccctgcgagcggccccgcccctcggctcggccggccgtggtggcccggcgccctcccgcggcgcggcgagcccccgcccccggctcggccgcccctggccgattcaaccgccctggccccagctcgcccgcccgttcccccgtctcggcctcgcccgaccgtgtccccgctcgcccgcgctcgcggtggtgatgagaatgatggttttgattatgattatggtgctggcgaagatgaagctgtggaaggagacttccaggagttccaagactacgacgagttctag

SEQ ID NO: 23923 - DNA, 498 bp, Zea mays
  Peptide Sequence Number=SeqID_65702
atggggagtatcactctttgggcagaaaggggatcatggctcgtgggtaaattgtgcaacctctacagagtgttagaaactggtatatcagtcgtgctcacgattaaagcagccttgagatcctctttgattagagtaactctagatacttttatgatgatgcttaatgatgactatccatatgctactttggtatttcctcttggagggagtgccacttgggaagcctacgcgtgtgaacattccaattgcaaactagcatcgacactcgctgccacaagggaagtagttgagctacgaaatggcgccacccagcaaggtgcccccgatacctcgaaggccagttctggcacctttaagtctgccgaggacatgaagaacgtgcctctcgacactgcaaatgcctccagatgcgttcgaatcagggcgtggctctctgacaagcaagaaagtgcactcatctgtttcctcagggacaaccacaacatctttgcctag

SEQ ID NO: 23924 - DNA, 486 bp, Zea mays
  Peptide Sequence Number=SeqID_65703
atgagacttgaagattctactcttaggaaaattcattgtctgtgcttcagacattatatctttgaacttgcttatcgaagtgctttgatcaactgccatattgaacattggaaactacatctatttgagcttgaagaggagctgaagactaatcctctgaccaagtatgtgttgtatcagcttcataatgaatctcataagcaagatgagaggagcaagaattggcgagtccaagctgtcgcagttggtcctgacaggttcgagagccggaaggctctgtcagaaaagtggaggggcatgagagacgatggactttcagcagaaaccaacatttcctggctgtgtgtttgtccatatgagtggcttcattgggagcaacaagatcaacgagggagcattggaaatcacaagagctactctgaaatgttgattcaaccaccatctatcagttacccatgttgccatagtctcagtagaagcacatga

SEQ ID NO: 23925 - DNA, 2340 bp, Zea mays
  Peptide Sequence Number=SeqID_65704
atggtggaggacgtggacgtcgagtgtagtggaaaagaattggaggacgcgacggaggggatggtggaggtaggggaggcaatggtggaggtggagaaggcgatagtggtggaggtgagggagagtatttggatatgcagaaagtcttggctctttgaagatgagcccccaatggctgaaggttgcagaaagattttcaagcaggagcttttgctagtactctatagggttgggatttttcaattctttctattcacaatatacaagctaatgcatttttttgtgaacagcatacgcatcttctccttagctgccattctttgtgtatttggtgtccttccgctgaattattttggacaagatatgcatcatgtccggattccttcagcatcattagagacatttacaataggaaatgtggaagaaagatcaagatgttataaccacaggctctgggtccattgcgtcgtactgtacatcatctctgctgtagcttgcattcttctatacttggagtacaagcacattgccaggctgaggttatatcacatttctagagcaacaagcaatcctagccattttactatccttgtccgaggaattccaaaatcaagtacagagtcattcagcaggacagttgaaagtttctttaccaagtaccatgcatcaagttacctatctcatcaagtcgtttacaaagttgggaaagttcagaagatagtgttgttgcctagtgattacgagcaagagagtgaaaagtctgatgtgaatgaatcaagctcgagcttacctgatgaggaatgtggtgctgcttttgtgtttttcaaaactcggtatgcagcgctagttgtagccaaaattctgcagacatcgaaccctatgagatgggtcactactttggctcctgagcctgatgacatatattggtctaatctttggttaccctacaagcaactctggattcggcacatagtcacacttatgtgttctatcgttttcatggttgtattccttataccagtgacatttatacaaggtttaactcagctggagcaactgcagcaaaggctcccttttctgagaggaatattgaaaaagaaatacatgacccagctgataactggatatctccccagtgtcatcttgcaaatatttttatatactgttcccccgaccatgatgtttttttctactttggaggggcctatctctcacagtgaaagaaagaaaagtgcctgctgtaaagtattatacttcaccatttggaatgtcttctttgtcaatgtcttatcgggttcagcaattagccaactgaatgctttatcaagcccaaaggacattcctatgcagcttgctaaagcagtacctgtgcaggctacattctttactacctatgttcttacttcaggatgggctagtctatcatcagaacttatgcaactctttggtcttacatggaactttttaagaagatatcttctgagaattaaggaggatagtgattttctttactcatttccctatcacactgaaatgccaaaagttctgctgtttggactgctgggtttcacatgctctgtactagcacctctaatcttgccctttttactgctgtacttttttcttggctacgtcgtctaccgcaaccagttcctcaatgtttactgcacaaaatacgacacaggcggtcaatattggccaattgcgcacaatactacaatattctctctaatcctcactcagatcatctgtcttggtgtgtttggccttaaagaatcccctgtagctgctggcttcactgtcccgcttatcatctttactcttctattcaatcagtattgcagaaagcgtcatctcccattgttcaagactttccctgcacagaatttgattgacatggacaaggaagatcagcaatcagacacaacggaggaccttcatgaacgacttcattctgcctactttcagttccctgataccgacgaggtacctttggaaagagttcgcgttagtgtcggcagagacgaagacgggagcggcagttcaggtgaatcaagccgcaaggaaagcgccgaagacgaacacaagagtggcctctcccacccgacgctggatgggctcccggttagtcggttacgcaacgcggtcgacagaccacacacacagatcattgatagcgcgtacagggagaggaagctgaagcttccccctcgactcgaagtcgaagcgaaggtatctgaagaaatctgggtcgatgtggacgatgtctccgaggccggcggagctggttaccttttgacctgcaaaaccgatgcttggagagggggcctagtcgcctag

SEQ ID NO: 23926 - DNA, 774 bp, Zea mays
  Peptide Sequence Number=SeqID_65705
gcagccacagcacctgaccaccacaacccatcgagcttcccatccggaccggaccccatcaggagcagaggcagagtcgagagtctctcagcgaagccaccgtccgacgccatgtgctaccaggtgaggtgcggcacctgcggcaagaccacgtgggccgggtgcggccgccacgtcgcgtcggtgcacgcgcagatctcggagggccagcactgcgcctgccgcgactggcccggcgtcgaccccgccaccgccccggccggcgtcaagaaggccgccagcgccgctgacgacgctgggaaggactccggcaccgccgcctccactcccgcgcagggcggcgctgcgcagacgggccatttgtcttcgaaggtcaacgcacttacacgagtgtcgataaggtttacggcggccccctctccaagcatcggttttgcaggtcaaaaggtaaccagctccgccggcctcggagacatcgtccacatcgacccagatttcttcagataccttcgcttcgacttcgagtcgagggggaagcttcagctagaggggcgaagccagcgggagccatcagccatgtgctaccaggtgaagtgcgggtcgtgcggcaagtccacgtgggcgggctgcggccgccacgtcgcctccgtgcaccgccagattccccagggccagcactgcgcctgccgcgattggccgggcgttgccccggccggcgacaaggcggccgccgcggaggggccttcgtccacgtctgtctgcaccatcctgtga

SEQ ID NO: 23927 - DNA, 249 bp, Zea mays
  Peptide Sequence Number=SeqID_65706
atggctaactgggcctatgacatgggtaagcaagccgacccatctatgggcgtgtgcggtccatttaagcgatggcagttagggttccactgccctcaccagccgccgctggccagccgcagggcgtcctcgacgagccgccacgccgggctgtgtgctcccgcgccgggcgagccgccgcgccgggctagcgagctcccgcgccgggcgagcagccgcgccgggctggcgtgctcccgcgccgggtga

SEQ ID NO: 23928 - DNA, 567 bp, Zea mays
  Peptide Sequence Number=SeqID_65707
atgggaaaaagaaatgagaaaagaaaaaggaaaagggttttcctgcttgctgagccggggggatttttggcccacctgggcatgagcgcgcgcgcgggcgcggcaggcggcccagctggcccaacagcgagggagacggcgggggacggcgccgtggcatgggcccacatgccagcgaggggagggggtttaacggcgcggagcagcaatggaggggggaggtcgaccagagctcgaccaccggtgagatcctgtggcggttctccgtcgtgggtccagttctgtggcggggaagcggtggcgaggcacgggtggggggtaggggatcacgggggtggcgtcaatttgactggcgagggcctaaggtggccggtccgcagtgcggtggagggtgctcgcggcggtgaggtcgccggcgaggcagccgagtgcaataggaggtggggagaggtgccttgcgatcgtgattgtgtggcggagctcaagcaccaagttaattcgaccgaaagccactcgagaggggagaacaaggctcaccagagtgacggggaaatgcggtggcgctag

SEQ ID NO: 23929 - DNA, 246 bp, Zea mays
  Peptide Sequence Number=SeqID_65708
atgtcaaatacagaagtttggggtgccccccaggcgggggattgtggcatcccatatgggtatgtggtcgtcgctgctcctgggcgctaccgtaccatctgcttgacctgcccggactatctagcggtgtaccggaccgtccacatctacgtgtcggaccatccgcggtgcgcagaacagggggtcgcgcttggccacttgcctgcgcctgtccatagtgttggaggtcgtgatggtgatctttaa

SEQ ID NO: 23930 - DNA, 168 bp, Zea mays
  Peptide Sequence Number=SeqID_65709
atggcggcggctcagtcctccaccgattcgttggctccgcacctccgccgccgtccgcgccgcctcgtattcgaccgccgctacggctggatgttctgtgcgctgacgatggcgcggtcgctggtgagcgctgcggcgtgctcggtaatcgcctcgctgacaagttag

SEQ ID NO: 23931 - DNA, 513 bp, Zea mays
  Peptide Sequence Number=SeqID_65710
atggatccgaggcaagcccctaaggttcgcaggtcctcgctcaaggctgcaattggtgacgaagccaaagttcttaggcacgagccaaagtggacatcaataaaaagtcccattatggtctcaaatttggatgctgaaaatggtactgacggtggcaccattaacaattctagacctcttggaaggaaggctgagaaggaaaatttgcgggccagaaagagggaagacaatgattatgatccattcattgaagaaatgaaaaaaattagagaatcaagagtgcagacagacaacaatcggaaggcacgtgatgacatgttcttggagctggagaagcataagcttgaacttgaaaaagagatggagaagcaaaagctagaccttgaaagagatcagcatgacaaaaaggtgatggaaactgacacaagtgggatggatgatgaggccaaacagtatttcaagttactgaaacaggagattttagctcgacgttttgggagtccacaaccatag

SEQ ID NO: 23932 - DNA, 249 bp, Zea mays
  Peptide Sequence Number=SeqID_65711
atgggccttctctacctcatcaaagaggatcgcattgtacggtttcctcacttgtttggtcagctacccaccctcttcacggctggcataacttcagtcataggtggtgctctgatgaggtgggcaaccgagtgctgctccacgaatgaggcagtgggttgttgtagcctgccaagacttgccctcgacctcaacactgcatctgcgacggcgttcacaacctctgtctggctgaccaccctctggtga

SEQ ID NO: 23933 - DNA, 3587 bp, Zea mays
  Peptide Sequence Number=SeqID_65712
atggacgatcaggataggccagcccaccagcagccagccagcaacaggggccagagcccagctgccaatgggcagcggcggcccaaggggactaggttcagcggcggcccaagccgatggcgtgggggtgcggcccaggcgacgcaggctcccagcagcggcgactctttggcacggatgctggatgctgccaatgcccaatgccatgctggttggcgactctttggcgcagcggcagccaggtcgaagcggcacccacccgcaatgagcaaagcaggcggcggccccggctcggccccgggcccgacggccgcggccgcggcggccgcggtgcagaagcagaagtcgctgctgcagaaggcggacgccgacgtctccagcctcgtcgacaatttctcctccctcatcaacatcgcccgagtcaacgatccgccagtgcgcaactcgcaggaggccttccagatggagatgcgcgccgcccgcatggtacattcagcagactctctgttgaaattagtgtcggaacttaagaggacagccatcttttctgggcttgcttcattgaatgagaatgtggataggaggatcgaagtgctgggtcagcaagctgagggaactgagagaatgctggagaggattgggcaggaggcagcagcaagcctcaaggagctagaggcacactactactcatctgttgtgcgaggaggccaagcaagcggcagcggtccagcggagaaggctgacatccgtctacaacgtccctcctactcctacacctcgtcggtgaagcccgctgccgtgccgtcccccgtcctccacttcgcgtcccgtgcacattgggcttcctcgcgacgcgttctccacttctcctccgcgctacactcacacttaagtcgaagtccgacagagccccacctgtcatctgctacccctccgcgaacagaccgggtcgccaccgacacgcccacgctcgactctgttgctttgcttccctgccctggaccttcgtcctcgcggcgcgtgccgagcagcagcagcctcgccatagtggagaagaagccgccgccgttccccggcggcggcggcggcggcgtgctcttccacctcctcgactggcaccgccgcctcgcccgcaagcgcaggctcttctccccgcgccgcctgctcccctcgtccctccgctcctcctcctccccacgcaggcccccgtgcccgccacctcccgcttccccgccgccgccgccgccaccgccgcgcccgtccgatgccgccgccccgggcctcgtcgcgcgcctcatgggcctggagtcctggcccgcgccgccgaggccgcagaagcagaggaaggtggaggcgtcgcgcgcggacggcgccgactcggcggtcgtgctggtgctgcctaagacccgcagccgtcgccctcccgcgcccgcgcccgcgccggcggcgaggagccaccacggggccgacctgccggcgcggagcccgaggcggacccggctcgtgcacgcggccgcggcgaagctgctggacccgggcgcgcgcgccggctcacgggcaagcgccaggctggccctcgcctacgcttgctcttccccgcagcaccgcagggatggccacgccagcgccttgcttcaaggctcgagaatggccgacgacttcctatctcgctccgacagcttgctcttggaggagcgttccgcacgggtacatgtacaggtacagcctcctggtcttcctgcggagacagacaccgctgctgtcccgcgtaggcacggccatttttccggtaacagcaacgccgatgcagcgaccagtaccagtacgatagtgttgccaagaatggattttggggatgggaacaggagcaaacggggctctgatatggatgccaagcacaatgagagtggagtaagagatgaggtagtgcgcacttgtgccagggttagatcgagcggtgctgccgttcaaactggagacgagaggtcgttgcgcaaacgagcaacacctactcggccggaggtttctggttctgggattacagagcctgggggcttggctggatcgacgcgcctggttggacgcgctcgtgaatcggtatctgctactaggaaggtcgcacacggtggttctggtccgataagagagctcgcgggacggatcgttgggcaagggagaatgacacgcagagatttgaacagccaaaatggattatcatccacaagtaggattttaagcaatggatctgcacataaaaggggaccagggaggaaggtggggcatgatgcagcaatcagtagcagagatgacagaaatgcagttgcagttgcttctagatcatctacaaagcccgtggccagagcttcgtctccgcgaagcaatctatcaaagggcggatccccaagtaggctagcacatgagacaactcgcacacgagtgccggctcctgaaaaaggatgtgtcgaagcttcaccttgtgttatgtctacttctgagaaagatgaatttagcaggctgttgaaagcaaaaatcaatgagcttggcatgtcggacaggatcgagtgtacaccaaatgattcaccttcaggaaaattgactgtgcctgtgctgcaagagctcatttctgcccttgcaactgacatgagcacttcaatctcccaatgtagcaactactctggtgcatcagcacccttacgctgcaatggaaatgttgactgcatcaatccagcgcattgtatattctccaatgagcaatcacctgattttcagaaatgctatcagggtgaacaagatgttgattcttctgctacatcgctaaacaatgagcccaatcagccaagtccaacatcagtccttgaagcatctttctcaaatgatacttctttaggaagtccagttgaaaagaatgaaggaaaagacttcattgtgtcaattgagaacaagatggaagatctctttaatttggagtctgacatcgtcgatttagcaatgtcaattgacacaaggaaaactgatgctgaagaagcacaccatggcaatgacaagttatcatgtttacagaattttcttgcacatgatttcaatatcttggaatctaggctctgcagcattagagaagctatttcaaatgctgaactgcttctgggcattagcctcttgcatagcacaacatcaggtcttccactccatcctttcattgttgaaacgctagaaaatactatggatatgtttagtggaggagagtactcagattttactgaagataagaagtatcaacataccaacttcctgtttgactgcattatagagtcactggattcaaaattctgcaatcttggcaaatgtggatacaaggcttggctgaagttgcctcacagtttgagcaaagatctgttgaagcgccagctattggaaaacatcagcaactggagggagtcaagtgggactgctcttagacaagtttctgacaaagaagtggaccaagtgactgacaggtgggatgcaaaccttgaagcatttgatataagcattgcaatcgagaacgacattcttgaggcgcttgtcggtgagttcgcagttgacctatg

SEQ ID NO: 23934 - DNA, 726 bp, Zea mays
  Peptide Sequence Number=SeqID_65713
atgtggcactcggcaaagaagcctcgtggccgagtgccagcagttgtgtcggggaccataattaggggtaccctcaagacgcctaattctcagctggtaacccccatcagcgtaaagctgcaaaggcctgatggtctgacagaagggcagcgtcgcctgcgccactccgactatagtgccactcaacagagtgaatctgacaggcagtcaggccttgccaaaagcgccacggcgaactccgttccgcccgaccccagggctcggactcgggctaagacccggaagacggcgaactccgctccgcccgaccccagggctcggactcgggctaagacccggaagacggcgaactccgctccgcccgaccccagggctcggactcgggctaagacccggaagacggcgaactccgctccgcccgaccccagggctcggactcgggctaacacccggaagacggcgaactccgctccgcccgaccccagggctcggactcgggctaacacccagaagacggcgaactccgctccgcccaaccccagggctcggactcgggctaacacccggaagacgacgaaactccgcctcgcccgaccccagggctcggactccgccctggcctcggccgaacgacttccgcctcgcccgaccccatggctcgggctcagccctcggcaacagaagacagactcggcttcggaggagcccccacgtcaccctgcctag

SEQ ID NO: 23935 - DNA, 480 bp, Zea mays
  Peptide Sequence Number=SeqID_65714
atgaagctgctgttgtccaacccctacggcttcaacagctccgacgacgacggcgacaccgacgtcttcagcagcgacggcgaggacgaccaccgcgccgccggccacggcagcaagaggccgggcgagtcggcggtggagaccttcttctcctcgtcgcgaagcttctcgtcggactcctccgagttctacaccaataagaagcagcacaagaagaagacggcgacgaagacaaaggcgaagggaatggcgaggaggcttaattcagtggacggacggcacctgcttggcacccccactatcagaggcgcagatgcgatctgctgtccggttacacttgcgattgcggaagcaaatggacgcaatgtgttgaatcacttcgaactgcatagctggtttggaatgaaaatgatgatacagatgacgtacatgagtatgccacaaagctcggatttgaaaaggtctctggacagactatag

SEQ ID NO: 23936 - DNA, 648 bp, Zea mays
  Peptide Sequence Number=SeqID_65715
atgaggtccccatatttgaagatggacagcgtggtgcagccgctctggacacgggccttgaacaggacccaagcgggggtccggtgtcgacacgtgtccaaaccaagtctggtgcggacctgtccacatacacctctgctccgcgcccaagcggagacccgatgctgccacgtggcctactgcgcgtgtcttctgatactatcgaagaccataattaggggtaccctcaaggctcctaaatctcagctggaggacagcgccgcctacgccgctccgactgctgagccactcgacagagtgaggctgacagcagccaagtccggtctcaggcgtcataggaaactccgcttcacccgaccccagggctcggacttgggctcagccccggaagacggcgaactccgctccgcccgaccccagggctcggacttgggctcagccccgaaagacggcgaactccgctccgcccgaccccagggctcggactcgggctcagccccggaagacggtgaactccgctccgcccgaccccagggctcggactcgggctcagccccggaagacggcgaactccgctccgcccgaccccagggctcggacttgggctcagccccagaagacggcgaactccgcctcgcccgaccctag

SEQ ID NO: 23937 - DNA, 465 bp, Zea mays
  Peptide Sequence Number=SeqID_65716
atggaaaccataccgattaagataccccccaaatggttgttccctccctgcctggattcgcctgtggaggctctttctcctgtgacttctgcagctgtgcgcaggaagaaatgtgcagccttggtcgacattgaagtgagaagaagtgctaggctcagagaaaaggccaaaggctttaagccttgttttggcagtaaaaacaattgctcgtgctgtgccgagtctcctgcaccaccatcgctctcccacaggaccatcaaggaattgggcgttgatttctgcaaggtggacccacaaaaactaagtctcaactccttaagcgcctccaggtcctccagtgttgccattcagaggccgcgttcctcgtcttgctccacaaatgagccgagttctccgtctgcagatcgaagggacacttctgatatggatgatgacgcggagtctcatccctcgacggggctgtaa

SEQ ID NO: 23938 - DNA, 243 bp, Zea mays
  Peptide Sequence Number=SeqID_65717
atgcccttcgccggacctatctcgccgccggtaagccgcgccacccttttctttctcgcgagtactgtttacattgggggaaggactgcggactgtaaccttgctgacggagagtacgtcctcgtgccggagcaaggagctgctcaggaggtagccccggatccagcaccagagtctgcaccagaggacctgcttgccactgctttggaaggcaagcccccggttttatgcatgacctgttaa

SEQ ID NO: 23939 - DNA, 2883 bp, Zea mays
  Peptide Sequence Number=SeqID_65718
atgacccaggtggcccgagacccaaatccgcccctggcgttggcgaggtcgagcgagtccgcgaggcgggcggccgtggtggcgttgacgaggggggagtcggagtcggagtcggagtcggagtccaccgccgtgcctgttctctctgcctttctaaaagtgcggcgactggttgggctgccgccgactgccggggccttcgccgacctcttcgccggcgaagaggtcccatcagaaccctcgctgatggcgactttcgcgaaacctgagaacgcgctgaagagagccgaagaattaatccatgttggtcaaaagcagtcagccctgcaggctttacatgatctcattacctcgaaaaggtacaggtcatggcagaagcctctcgaaaagatcatgatgaagtatgtagaactctgtgttgacctgaggaaaggcagatttgcaaaagatggtcttattcagtataggattgtctgccagcaagtaaacgtgtcatccttggaggatgtcataaagcacttcatgcagctttcaaatgagaaagctgaacaagctaagagtcaggtcgaagcactggaagatgctctggatgtcgaagatcttgaagcagacaagcgtcccgaggacctcatgctcagttttgtcagtggggagaaaggaaaggaccgatcagataaagaggttgtaactccatggtttaagttcctctgggagacatacaggactgttctagagatactaaggaacaattcaaagcttgaagcgttatatgctgaagccttccgatcggtggaagatatccatggtttgatgaccatggtgaagaaaatgccaaaaccatctatcttggtggtctattatgcaaagttgactgagatcttctggatatcggacagccacttatatcatgcgtatgcgtggctcaagcttttcaacttgcagaagagctacaataaaaacttgtctcagaaggatctacagttaatagcatcttctgttttacttgctgcactatccgtgtcaccttatgacaaaaaatatggtgcatttgagacagagaatgagaaagagcgcaacatgcgtctgtccaaccttccttcaagaccatatcttctatcagagttggcctccaaaggagtcctttcatgtgcttcccaagaagtgcgagatttgtacaaccttttggaacatgagtttctacctctggatcttgcatcaaaagtgcagccacttcttttgaagatttcaaagattggagggaagctttcatcagcttcttctgttcctgaggtcaagttatctcagtacatttcagcattggagaagctgacaacattgagagtgctacaacaggcctcttgtatttttaaatccataaagattgatatgctctcaagaatgattccattctttgacttctctgtcgtggagaagatttctgttgatgctgccaaacaaaattttgttgctataaaagttgaccatttatcgggagttgttcagtttggtactgtggacatagaatctgatggcttaagtgatcaccttagtgttcttgctgattcattaaataaagcaaggattcatatctgtccaccagtgaaaaagccatctaaactcggtgaaagtctcattagtttggctgcaatagtggagaatgaacataagaggctgcttgcaaggaagtccatcattgaaaaacgtaaagaagagcttgagcgtcaaatattggagaaggaaaaagaagaagaaaaaaagagaatgagcagtcaaaagaaaactgtggatgaggaaagggtgaggcttctcaatgaacagaggcagagggagcaggaccggattcgtagagagatagaggaaaaaaataaagcagaagcaaaaaagatgctagaagatttgaataaggcagggaaaaaacatgtcgttgttgaaggggagcttactaaggaggccatcatggaattggcacggaatgaacagttaaaggagcgccacgaaatggagaaaaaactgcagaagtttgcaaaaacaatggattatctggaaagggcaaaaaggcaggaagaggcaccactgattgagcaagcttttcaaaaacgtcttgaggaagagaagatccttcacgagcaagagcagcttcgggagattgaactcagcaagcaacaccatgccagcgacttgcaagagaaaaatagactttcacggatgttggagcacaaggttaatgctttacaggagagaatcatccaagaacgtgcagctgagtttggccgtctgaagaaagagagagatgaacggatgaatcggttgatatcttcaagaaagcatgaaagggagacagtaaggaagttgatgttttatctgaacctggaggaacagcggattgaaatgcttcgtgaggaagaggaagctagaaaaccggaagagaggaggaagagagaggaggctgaaaggaaagctaaacttgatgccatcgctgaaaagcagcgattgagagagatagagctggaggagaaggcaaaggcaacaagggagaagctcttaaagggatccgaggctgtgcgcgctccagattctgcacctgttgcacagccacctcgagagtcagcagcagcgcctgcagctgctgcggcggcggctgctcctgctcctgctcctagtaaatatattcccaagtttaaacgcggtggtgatagcagcagcatcccttctggcagccgcgatgaagatcgctggggttcacgtggtccgctcaggcaagatggtcctcctgcacgactggatgcaccctcatcacggcaagatactgatcgctggcgtggatcaagatttccctctaactcaacgtcctcttcatcaacctggagccgttcacggaactga

SEQ ID NO: 23940 - DNA, 726 bp, Zea mays
  Peptide Sequence Number=SeqID_65719
atggcgaagtgggcgtcggccgcgagggctacgacgatgacgatagaccgacttgacgctctcaacaggatccctaatctccctgggtttgaccgagatagagagttttttgcaactgctggtgtaaataaaaagataaaagtgtttgagtataatatgattgtaaatgaacaccgtgatattcactatcctgtggtttgggatgttactaggagtcaagtttttgttgagatgagggagcatgagcgacgtgtgtggtcggtggacttctcaattatggacccaacaaaattggtcagtgggagtgatgatggatctgtgaagctgcgggatatgaatcaggcaattttattcttgcacctactgtatgtcagctttttaactaacgataacatggttatcgaacttgctgggagtattggcactattaaaacaagggcaaatgtgtgttttgtgcaatttcaacctgatactgctcgctccattgccatcggctctgcagaccacaaaatttactgctatgatctacgtcacatacgagctccttattgtacactagttgggcacacaaagactggtacggttggttacttcacttgctttgctcaccttgtctcgtccagcaaggaactgggccatgctgatgttcaaaagagttgtcagaagttcatgacatctggtatttattatatcttcttttgtagtgggctggtgtggtctgcttag

SEQ ID NO: 23941 - DNA, 534 bp, Zea mays
  Peptide Sequence Number=SeqID_65720
atgggcgtgccgcccgccagcggaatagacaggcatgccgcctgccaggagaatggacaggtcgcattaaatgctaaggcggcacactgcttgccagtggaatggactgggcgccgcttgacagtagagtgggcaggcctcattaaatgccgaggtggcacatcatttgataggcagcgcgccttatccgcaataaatgcaggggtcgcgtatcccggtggccttacgtcaggcaccgcccgctggcttacatcacgcgcagtcggccacgtggcagcaacgggcctccgcctaggcggggagcggaagcgcatgcggacaggtccgcaccagactgggcctggacacgtgtcggcaccagaccccttgccctggtcttgtccaaggcccgtgtatgttccgtcctgggaccttgggaccccactgtggggtgacctgttctccatacggaggggtccagatcctattcctggggtccagcctggacacgtgggggtccgggaccaaccctgggggtccgaactgtatacctaa

SEQ ID NO: 23942 - DNA, 156 bp, Zea mays
  Peptide Sequence Number=SeqID_65721
atggcgccgccaggcatacgcgtgccgccgcggtcgtcggtgtcggtgttggggagggtcacgattgcgtaccgttttggagtgtgcttaattaaatctggaccgttgaattgggatcgtgcggatctgattgtaggataccccttcgcgatgtaa

SEQ ID NO: 23943 - DNA, 276 bp, Zea mays
  Peptide Sequence Number=SeqID_65722
atggcatgcaccacacccccttccccgcctcaatcgaatgctattaataggatggacagaggcgaggcctccaacccatgctcactctcctcttattcgccgctgttctgttcaactcgtaagcttaggcgcccttcccctgtgccacagctggaggcaccccctacaccaccacagggcatcccgactgctggaggagatccagatgaagacgccgatggtgatagcttaggccacagtaccgagctttccgaggaacaggagccagaaggatga

SEQ ID NO: 23944 - DNA, 354 bp, Zea mays
  Peptide Sequence Number=SeqID_65723
atggacaacatttggcagcaatacggagttaccaaccaagcttatggtaatgtcacctacaccccaggaattgacttgactctctccctgggaaatgacttgactcagttccaagatcatgctgttgtgcatggcccaggtccaattattcagaatgtcagagattctgacagaagaaatgagggatgcaattgccacatgacattcaacataaccatcaaggtgacaattcacagcccaaagattcttggccagattactggtggtgctggtgaagaaccaaatggaaaacaagcactcaccagatttcaaaagatttttgcactcaacacaatgtctgagtataatgtctga

SEQ ID NO: 23945 - DNA, 690 bp, Zea mays
  Peptide Sequence Number=SeqID_65724
atggcgcttcctgttgacgtggctggcctgcgccctaggttgggcgacgtggaggctcctccgaagccgaggtcgagtctgtcttccatggccgaggccgagcccgagcccctgggtcgggcgaggcggagcccgagtccgagccctgggtcgggcggagcggagttcgccgtcttccggggcttagcccgagtccgagccctgggtcgggcggagcggagcttcctatggccggtcagtggagcggcgaagtgtcgacggtcacttcggctctaccggggggcgtgcgtcaggataaagctttatgctgatgggggttaccagctgagaattaggagtcttgagggcgccagcgctccctctactcgcgcgctcgcctgctcaacgcgcgctctgctcatcgcgctcagctgcttgctctgctcgccgctccgcgcgctcaacttggccgcgtggttgcctgctcgtcgctcgccactcacctgctcggccgccacttaccagcaggcttggactgttttgattgtgatgcaaggaggcagtgtacaggacaagggaaaagagccatgtactggtgaatcatcatctgttgcagcctgtgaatgggtggttactacaaatggaactcgcaaacaactacaaggttctcttgatgacccatggagtcatggtgagaagtggaagaaatag

SEQ ID NO: 23946 - DNA, 846 bp, Zea mays
  Peptide Sequence Number=SeqID_65725
atggctatcctaatggcgttcagagcacatactctggaaatcattgggctcacgaccatattcggcaacgtcgacacagaaggcgcaacatgtaatgcactattgctgggaggaaagccccgtattgctgattttgttcatgggtcagatggcattgggaatctgtttcttcctgcaccctctgctaagaaggttgaggaaagtgctgctgatttcatggttaataaggtctctgagtttccaggagaggtctctgtgcttgctttgggacccctgacaaatgtagcattggccatcaaacgagacccttcctttgcaagcaaggtgaataaaatagttgtactgggtggagctttcttcgtggctggaaatgtcaaccctgctgctgaagcaaatattcttggagacccagaagcagctgacatagtttttacttcaggagcagatgtcattgtggttggcattaacataacaacacaagtctgtttgacagatgagggtctcttggagctaagaaactcaaaagggaagcatgcaccgttcttatctgagacgtgcaagttctacagagattggcatgtcaagtctgatggcttccatggaattttccttcatgatcctgtgagcttcactgccgtgcttcatcccgagtacttcacattcaagaagggtgtggtgagagtggagacccagggcatttgcactggccacactttgatggatcagggattgaaaaagtggaattcagagaacccttggtcagggtataaaccgatttcagttgcatggacggttgatgtgccaaaggttattggctttgtaaagaagctgctcatggcaccatga

SEQ ID NO: 23947 - DNA, 255 bp, Zea mays
  Peptide Sequence Number=SeqID_65726
atggatcggaggcaggagaacgacgaagggggtgctccgagcgggtcggggtatctcccgcaaggaatcccggccgcggggaggggaaatcgggcgcactacaactcaggctatctccgacaagggaaggggaacgctatggaccgcaaccggggctcgggacacggccaatttggccggacactgcgcgggtgcggcgagctagcgtggctgagctccggcgagagagaattgaccatgacggagcaagattaa

SEQ ID NO: 23948 - DNA, 273 bp, Zea mays
  Peptide Sequence Number=SeqID_65727
atggcgacaatctctgttttcctgagcacgcagccgcacctgttcaccaaggcagaggatccgcttgacactgatgccttcaacgacctgtgccagtatgcaggctatcacgcagattctgataagaagaagagagaccactttcgcagaggtctcaacaccaagttgcagaagaagaggaaagcaccaatgtcaggaccctcagctccaccccagacagaagatggattatcaggccacctcagcagcagcaagcacccaaccgttttctag

SEQ ID NO: 23949 - DNA, 714 bp, Zea mays
  Peptide Sequence Number=SeqID_65728
agggaggagacaaagcgggaggccatggaatgccagcatgaggcccagcttgttgaggataggactaccttgtctggcttccagcaaactaacagcagatttgaatcgagtgatgatgattatgcgaattcagatgacacaacaactgaacaaccatatatacgtccagctgttttccatcctaggtttcctgctaacaagctatctgtgatccctccacttcgcataaagcgtgaacgagaactaaaaaggaggactcagcagaatggctgggcatttaaacgggatcatgaggagccagtattcttattcacaagacctcttgatccggagaagttgatcgcagcaggtatcaagccaccaccagatcctcctattgagaatggtgccacatcgccaccatttcggtgtcgaggtaggattggacgaggcggccgcatcatctttgatcggtggaatcctcttctccagacaccaattgaccaggagacctcttattatgtgccgtacggtcacaagcccccctcacctgaagcccccgagcaattggcccttggagagcccatttgtgactacctgagttgtgagttcagtggatctgatggaaaggcaagaaggctccttgataagcagcagcctcagtggaagattgagagtgtattgtggggtaaggaagctcaagctattgggattgcggccgtgcaatatgtctag

SEQ ID NO: 23950 - DNA, 666 bp, Zea mays
  Peptide Sequence Number=SeqID_65729
atggtgaactcaccggccggctcactgctcgtcgcgggcgcccatgcgatgctatgcgcatcgtctgctgaagacggcgcgacgttcgccacggctgcgcagcggaagcatggtcggacccaccgtgaagccgccgcggccatccatggttggctgtctgcgcatgggggctctcgcaagctacaggtggtgccgagggcacggccggcaacgacgtcgactggcacccgatgtggaagacgtacctgtgctgttgcttttgttggcgtcgtggactgcagccaggaggtacggaggttgccctgctcgtgcgacggctacataggcggttgtacctgcacagcgaatgcatggggttatgctccgtctcggtgtagcaggcggctatggccctgcgcggtcatagcgtacgatggctggagatcaacggctaggcttaggcaatgctttctggccgctggatcagtatcagacggccaggatcgctctttggcatccaggtcgggcaggcggatctggtgcattgatccgtggatgaacgacgctggggaggagatggtgccatcaccgttgatccttgaatcaagggctgggattagatcccgaggaacgtttcggaatggatggcggggaccgttggatcctagatggagagcagggatttaa

SEQ ID NO: 23951 - DNA, 852 bp, Zea mays
  Peptide Sequence Number=SeqID_65730
atggaaatcaagtccatatcagagcagtgcaagggattgagaaaagcagggagggaaggatataattttggcagacaggaagttccaaatattttgaatcatcatttcagatactcaaccagcatttttcaaaagattggtttctcgtctgtttcaccacaacaaagtgatgatgaggttaatgagctgaaagaccacgaaagggccttagatggatcaagtgaagattgtccatctggaagtattgaaggccttgatctgtcgagagatgatttggtgaagctagttcgtgagaaggatgaattgttgaagtccaaagatggtgaaatcaaagatatgaaggataaggttttgcgcagctatgcagaaatggaaaatatcattgctcggacaaaacgtgaatctgagaactccaaaaaatatgcagtacagaacttctctaagagcctgctagatgttgctgacaatttggctagggcatcatctgttgtcaaggaaagcttctcgaaaattgatacctcaaaagattctgctggagctgtcccactactgaaaaccctgctggagggtgtggacatgactgagaagcaacttgcagaggtcttcaagaagtttggagtcgaaaaatttgacccgctgaatgaggaatttgatcctaacaggcattgtgcagtttttcaaattcctgatccttcaaaaccaccggggaccgttgcttctgttgtaaaggtgggctacatgttacacgatcgcgtcctccgccctgccgaagtcggcgtcactgccacggagggaggtgcgcatgcaactgaagaggcagagaagccggaggagaaaacagcgagggactaa

SEQ ID NO: 23952 - DNA, 672 bp, Zea mays
  Peptide Sequence Number=SeqID_65731
atggcaaaaacctattcttcgacgtttgcagagaccactcttttcaaggaatgcagcagttttggtcggcttttttcacgtccttatcttttcggcacgaagaaactggtccttatctccacgaggacgcacgctggacaaggaaagggcgtagctggtgcacgcaaggccaagcggccgacaccggataaaaggggggggtcagtgccaataatcacggtgccgaccccctgccaccatgatagcagtgcagatgttggattaaatttttggttggatgagactcctaaaaaggcagcttatgtttggcttgcaaagtgccgacttagcgaaagagcttctaggaggctgcagttctgtgcgcagcaggaattggtggtcgtgttttgcctattttggcattgtactttggtccattttggactgttttcttctcttagtttaatgatgcgcagctctcctgcgcgttcacgaaaaaaaccgcctccaccagtgaatgatacaaatccatacaatgtcttcagaccaagagaaaaggcccatcgtcttcatacaagaaggatgcaaagaagggaaaacagtatccaatcattcgaaaaactccgcctgagggagcacataaggaaagcattaatcctttttttaaatgcagaaaatgtgctcactaattag

SEQ ID NO: 23953 - DNA, 654 bp, Zea mays
  Peptide Sequence Number=SeqID_65732
atggatgcccaggaatcaagctcatgctgcttaggtgtatgggaggataacgagatgtgtagtgctcttcaagtgtgcaagtgcgtctatgaactcctcctccccactgcgtccccacactgctccgcgtcatacctcgcgacttccgcgcccccgcgcgcccggccctcccactcggccctcgcggacctagggtttctcccgggccggagctgctcgttcgttcactgcctttgggcgagccggccgcggccgctcgacatccataagaagctccccatcctcaagtctgtgcgggagttcgaggatgaggagccaggggtcgcgccgctttcttctgcgagggctggggtgctgctgcggcactcaggaactgagctccccgcgtctggggcgaacaagacgacagagggcgagggaagtcaagcacccagtaagaaaaatgcccaagaaatacctacaccgcagtttgatgctgtggacacatatgaaagggactatactcgcacctttgcacaaccgacatcttatatacgtggaagaggagccagagctgagatcggtgaatttgtcgagtatgacctggacaatgaagatgaggagtggcttgaagaattcaataacgagcggaagaatataaaccctgaaaagtaa

SEQ ID NO: 23954 - DNA, 1761 bp, Zea mays
  Peptide Sequence Number=SeqID_65733
aataccaccaaccagcccagaccttcacctccaaacagtagttctgggaggtccacacttccaccagctgcctcatggggacaacgtgatgtgaacgccaggacaacagctactggggtgacatcatcacaatctcatacaaaaccaaaatcagaatcacagagtaatccattttcaagttcttcagtaatttccagtacaaaaacaccctcttcatggaatgatgatacaagtacagcagcaaaaatgtctgaaggacagcaagtgtcagaaaaagagtccaaaaccttgcagctgtataagcctggtatttcaatggcaacacaagctacatcatcacttgagttatcactgaacatagacttctcgacaataccttcagcttggaatgacgatgagattgtagtatcagatgggatgtcaaaaggaagcgatgaaaatcaagttgcaaatgaaaatggcgagctaacccatccagcatctaagccactagtcttatctaagaaagacataacaatgaaatctaccagtaccagcaaaagtcctccaaatattgtatcaagtctagcaatatctaaatcagatgtaaatactagtgatggtgaccactcacttaccaatattagccttacttcaaatgctgtagtctgccaatctaatcatgttgctggggcgaaaatattggaggatattagatccagggacactgacatggagaagctatctgttcatatatcttcagtaaaattaggtggcaatgatgagattcagattatggcaggaaatcagcgaccagatgtaatgccatgcacatctgttgatgcgcccatgaatcagaatttcgacagagaccaatctcatctcaatcttaatgagcctttgttaccttcagaaaataaggatactgttctttcttgtcaatatagttctgataagcgtcttgattggagttcagagatgcaaaatggtagtgtgactccttcaaataatatagtagattctacgatgctcactgaaagtaacactgcagcaacgattgacactacaatttcacatatgcagactgagttctcttcaattaataatatgtatgccttgttaaatggaggtcaagatggactcgggactgtaaatacacacggtaatgtttctgaacagcatcctggaatgggaaatcatcaatgtagagcaatgggttcagtaagaactgaagcaatgggttcagtaagaacagatagtataggaagttttgagaagaccataagcataaataaggatgagagcagaataatttctgatatgttatcatcagagtttaatccatgggatgattcatattcgactgctaacaattttgttaggatgcttagggaatctgaaaataatgatgtccacttcgctgtgccttcatggaaatcaggaaccgggaacaaagagtctagattttcatttgctagacaggataaccaagggaacttattggattcatctctcagaaactgtggtactggtaccgagcagaatttcagtttgctaccccagaattctcgaggaaatatctaccagaatggccttgcattccaatctttggagaacgatttttcgaacagcaactctcttggtgtattagatatgttaactactggatttatgccaaaaagcctcggggccagctcagaaattctctccccatgcaaccacctatcagtccagaacaggccacagccatctcattcggagagcccagcagagctcctgtag

SEQ ID NO: 23955 - DNA, 549 bp, Zea mays
  Peptide Sequence Number=SeqID_65734
atggctgagaaggaggaaacagagggccgctgccctgcctgccgcacacgctatgacaaggataggatcgtcaagatggccgccacttgtgacaggtatctcaaacttaccttttacattgatgatggaagcaggacagtggcagataaaaatgcggagaagaagcaaaaggcccaaagggttaagccaaaggcagcaccaacagcaacaacaacatcaaccgtagaatctaagaagcatcttgctactgtcagggttatccagagaaatctggtgtacataattgggctacctgcgcatttatgcaatgagagcgtacttgagcgcagggagtactttggtcaatatgggaaagttttgaaggtttcagtttcccgtccgactgggcctccctctcagcaggcatcagcaaacagcagtattagtgtgtatgtctctctgaactatacggtgtacatgcatgatctgttcatacttcatatgaatttagatttctactttcagtactggtcaattagcctgatggaatatcaaataactatctactga

SEQ ID NO: 23956 - DNA, 426 bp, Zea mays
  Peptide Sequence Number=SeqID_65735
atgccctcgcctataacgccaaaggttactgaggttgtaattgctgaaccgaaggtggctaccgatgctgaggcttcttttgatgtgaccaaagccagctcttcaaagaatgatttaataacatatgctattagagaaaaggaagaagataaagttaaatcttccaaggttgaaggtttgctagagaaaagggggttgcaggcacctgaagaagcgccactcacaacccacgaatacattattcaccatgcttcgggtgggaaattgaaagagaaatggccccatttctttaatgttttggtgattaagtgtctaacacataaaacagagcagagaagaaaagaagcgaattgcaagacttcgctgtgtgcagccgaagtcccgctcggcctggcacaccggactgtccggtggtacaccggatag

SEQ ID NO: 23957 - DNA, 657 bp, Zea mays
  Peptide Sequence Number=SeqID_65736
atggccaggacgaggatgcggatgttctgcacggcgacagcttggaaaccgttgtggatgtcgtgtgagcatggcggcggcctcctggaagagcatggtcgtgtgaacagagaggcgaacgtcaacagacgcctcgttgtgggtgtcgccatgggaagaatgcccgttggggggagcagggtcggcggcgcgttccctggccacgcgctcgagggccgcccggacgcggtcgacagcggcatcctgctccttggcgacggcgacggcgacggcctcggcttcggcctgttcggcccgcgccagggcggcgagacgggcgagttggagggcatcctcttgattctcgcgctcggtgtcgtcgaggagaggagcattggagcctaccatggacgagggactggaggtcgcctggaaagaaggggtagcgggctagcggcgcctagtggctgcgcgccggagggggaaacgaggtggcggcgcctgaggggttgcgcgccggagtggggttggcggcgcctgggcggcagttcgccggggcaacggaaggggaaaggagttggggcggcgccgagggctgcacgccggagagaggcaaggtggcgcctagggcagcgcgccggtggggaaattggccaggaaatgggcctagtctcctga

SEQ ID NO: 23958 - DNA, 204 bp, Zea mays
  Peptide Sequence Number=SeqID_65737
atgtcgacaagtgaggaggtaaatctggaacttctcttgttagggcaccagagggtggtcaacattggcgcgcacccacggatgcccttctacgtggagttcctgtggatggacaaggttgtgtggctgctgcaccttctaaccttcgcgctcgagccgctgcccagccacttcgaggccgatcgcgacacgaagttccactag

SEQ ID NO: 23959 - DNA, 999 bp, Zea mays
  Peptide Sequence Number=SeqID_65738
atgagccaggactacaggcccatttcattccgccgccaacttcaaggccgttgcgtttgcgttcatcaaccgcgtctggcgactcttgcgttcacggttcacccgaaccacacccgttcctttcctttctcctccctccctactcacacccctgaaccctttcacttcgtggcgccgactgcgcaaccggcaccaaccttcgccaggttttcgtgggctctttcaccgatacaaccatcctccaggtttccatctggggatacgttcattggtgaaccaccgtgctggctggatgatctccttgaagattctgggaaagctcccaagctccctcctctcagaagggcctgcagcgattctgatgccatcttagatgcgctgtcgacattccagagcccaatttatccaatcgaggaatgtgatctaaactcaggtggtgaagctgaggacttgttgggtggagtcgaaggtgatgaaagtggttctgtggtcgaggctagctgtttctatggtccgaattcgccaagacagaagagtaggcttacaacttcagagagttccatggtaaatgctgtgcttgagaatgtccccggcaaccccttgcagtacctgaccatcgatgcctgcagtgatgtgaatggtaatgtggccaatgtaactgctgatgcctgtgatgcttttggccatcctgatcaagacaagtcatttaaaagggcagatgtgaactttggctcttgccgacagaaaaggaacatgagactctacatctttgcagaaattaaattaactaatcgtgcttctaatttgtgtaacactgataattttgacttatgccacgaccagtaccaatgccagaaacttgttgcatcgattggaggtgccgaagccgtcatggaaagtttctggaagaccaaaagtccaaacttgccagggcctaaggaggcccatggaggggctgcgtcagcagcagtcatgggccctccaagagggattagataa

SEQ ID NO: 23960 - DNA, 153 bp, Zea mays
  Peptide Sequence Number=SeqID_65739
atggagctggtgattgttgagccgtcgctgcccctagtggcgtcgcccatggggacggagacgccagccttctacagaaggttgctgatgaatgcagttcttggtgcaaggcaggtgcctctgacatccaggcctgctcctaaggtcgaatga

SEQ ID NO: 23961 - DNA, 336 bp, Zea mays
  Peptide Sequence Number=SeqID_65740
atggccgctgcggaggccgagaagggggaactccggtggcagttggtggcggaaaggagggacgcgagcaaggccattgccgacgcgcaggctgctcaagccgatgctaagcgtgcgcgggcggaggccagtctcgcccaccaacgcgccaaggagctagaggcgtggctcggcatcctactcaaccacgtggacaaagccaaggcctctacgcgcgcggaggttgaatggacgcatgcgcagctcgtggatgcgtaccttgagctgggagtgatgccgacaatcgtgatgggcctcatgtccatcgacttcctcgtcacctgcaatggtccatga

SEQ ID NO: 23962 - DNA, 291 bp, Zea mays
  Peptide Sequence Number=SeqID_65741
atgacgagcccggagcggagcagcatactgcgcggggctgagcagggcgagggcgccgatacgctagggttgagggcggaggcgacatggtggcgccgtcaagagaaggggataagaggagatgcggttaatattatccgtcaagataatcccaatataaccgaagttcgagtactccctccagatggggtcccgtctccactccaagatggtgccatacgtgtttgtatctacaacgacatcgtcaatggtcaggctgttgtggttaacccagcaccatatattggctag

SEQ ID NO: 23963 - DNA, 594 bp, Zea mays
  Peptide Sequence Number=SeqID_65742
atgctccctccggatctgctgctctcggtgatttggcgcagcggctttgcgcctccacacttggtcgccggcctcctcacctccacaagcccacgtcgtcgccgtctcctcttcgccatcgccccgctcgcctcctgtgccaacgacccgaccaacctcggctcctccctctgcccctccatcccaactcctgacatcaaagtgcacagcttcgctggccccaacgtggctctgccaatgcctcaagctcaaacagcgattctgttatggctgaagcagaacttgcctcaaatgctgctgctggtgacacggcgcgcgcaacgccggcaagtcctcgctcacaaataccatggttgggacaaaagtggctgcagtttcccgcaagacaaatactacgactcacgaaattttgggggtgctaacaaaagggaacacacagattggctcatgttagggcaccatggatttccttatagggacgtcacagttcgtgtggagagtgcctcgagctcaattaacctatatgatttactaatagtcatgttggatgtcaataggcatcttaatttgattgcttcaactctttctggttga

SEQ ID NO: 23964 - DNA, 231 bp, Zea mays
  Peptide Sequence Number=SeqID_65743
gtcgtcaagcttggtataaccacccaaacatggcctgatctggttggctacgctgttgtagatgcggttaatattatccgtcaagataatcccaatataaccgaagttcgagtactccctccagatggggtcccgtctccactccaagatggtgccatacgtgtttgtatctacaacgacatcgtcaatggtcaggctgttgtggttaacccagcaccatatattggctag

SEQ ID NO: 23965 - DNA, 294 bp, Zea mays
  Peptide Sequence Number=SeqID_65744
atgatggcgaggctgctgctacgctggggccacgctagggccgagccggggttgccacaagcaagccacgcaggctgtcacgcaggctgcaccgggcgagtcgtgccggggccgtcgcgccagctgccgcacaagctgtcgcgagggtgcgctgcgggcaggctctaccgtggcctcgctggcgccgtggggcagaagcctaaaccacgggagagtaagatgtgggagaggaagacgaggacgaaccatataggagaaaataggaaaggtgcagctcgacgggcggttggatga

SEQ ID NO: 23966 - DNA, 333 bp, Zea mays
  Peptide Sequence Number=SeqID_65745
atggcacggcgcgcgtggaaggcagcacgcgggtggcagtgcgcaggggcggcggcgctcagcctggcggcgtgggggcggcgcgctaggctggcgggcgcggggacggcgcgcgtggccggagggcgtaggggcggcagcgcgtgggccgacagagtgggggcgacgcgagggccggcggcgggggcggcgcagtgtgctgcgcgcgatttggactgcattgcactcaaaactttgaaaaccgtgcatgcaaaaatgatatttatgttaggtaacacaagttacgaccgattttacgagcaaaccggaaccttcgagcaccatgctcactaa

SEQ ID NO: 23967 - DNA, 501 bp, Zea mays
  Peptide Sequence Number=SeqID_65746
atggggacccctctagcagattctttgcctagtgctgtcaggcagacactcggcaatggtaactcctttgccgagtgtcacctgggacacttggcaaaaacgccatctccgtcacccggcgccatgacggctgcttttttttgccgagtgcccgagaaaaagggcctggtgctggtcgcgctggatgagctcgcggggctcagctccatggccgtgccgagggcagaccgcagactgcacagagggggccggcctcagccacgcaaggggcggccatggccatggcccatggggctactcggccgagccatgggagccgcaggggctgcgcacgctggaggggcgaggcggggacgcagcatggcaacgctgcggggtcgagtccgcatggagctggtgcagggcgtgcagctcgccggaggcgcacgcgggctggccatagggacagcggggctcgacgacgctggtctgggcaggcacttttcacaaaagcggtggtaa

SEQ ID NO: 23968 - DNA, 321 bp, Zea mays
  Peptide Sequence Number=SeqID_65747
atggccggtcttctcggcgtgcgtgtgcgtgcaagaaagcgatggttcttggggaaggtggagctgacagggctggcccacggcgaagagacacgggcgtgtgcacgggagaaacgggcaacaacgctaatggacgaggcgtgcggggcagagagagaatggggcgtgcgtgcgcgggaagccggtggcgacgaatcagccctaccgggcagagggagtcagtacgcgtgggctcgttctggcgccgacaggcatggtccgcctgttaggaagggagcgggcgcgtgctggtgggggctgggctgctttgggctgaattga

SEQ ID NO: 23969 - DNA, 351 bp, Zea mays
  Peptide Sequence Number=SeqID_65748
atgtcgcctccgccctcaaccctagccgtatcgcgccctcgccctgcctccagccccgcgcacggctttgcgcctccacacttggtcgccggcctcctcacctccacaagcccacgtcgtcgccgtctcctcttcgccatcgccccgctcgcctcctgtgccaacgacccgaccaacctcggctcctccctctgcccctccatcccaactcctgccatcaaagtgcacagcttcgctggccccaacgtggctctgtcaatgcctcaagctcaaacagcgattttgttatggctgaagcagaacttgcctcaaatgctgctgctggtgacacgacacttaggttttttgtag

SEQ ID NO: 23970 - DNA, 369 bp, Zea mays
  Peptide Sequence Number=SeqID_65749
atgatcccggccgcgaacccagcgccatacgcccaggccccacgcgcgactccagccggccgatcccgcacgcccggccgccctgctagcacccggaacgccgcccaacccgactgcaacgccgcgccctgcctcccgcgccctgcccctgccacgtcgctgaccccggtagagcagcgatgcccaggcgccacccgcaccgacccggccgaccgtgccaagccaggccgccgagcagctcgtgcgcccaacgctgaccgcgctagggcagtgcgacccagcacccgcgcaggaccgcccctagccccgacgcccgacgcgcagcacccgacgccgagcaggagcacgcgccaggacccgagccgctag

SEQ ID NO: 23971 - DNA, 177 bp, Zea mays
  Peptide Sequence Number=SeqID_65750
atgctgaggcaagggggaagagtcctgctgctcctgcccctggcgtcggcgctcctgctcctcgtgcagcatctcctcctaagcactgagtacagtggggacaacctggggtggggtggtttgaaaagcaagggtgattacacatcaatgtactcagcaaatgtctcgtttggctaa

SEQ ID NO: 23972 - DNA, 1326 bp, Zea mays
  Peptide Sequence Number=SeqID_65751
atggccgtgtggactgcaaaaaagccttccatgggcccgtggtccccagcaacaaatacaacacttggcattttgcattccaggggcactattgaaaattatttcagccaaatcagtaaagccaggcgacgaactagacatctgtcagtctatgctaccagcggggctcctctcgagacccaaataatagaccataaaactccgtctgcggaccccaaatccaaatcgaaagaccaccgccctacgttcgccatgctaccatacaagcgggggctcgtctccggaactgaaggtatgcttaccgtcgtggaggttcccctcgcactggggatctctccgccaggcgtcgacgagctggatgactccggcgcggcggcgaagtgcgacggacgagggctctgtagcggcgggggtcctacgccgcttgcgaccggttccggaggccttgacggcgctagggatggcaaatctgcccgcgggtacgggtatccgcgggtttcgtacctgatgggcacggatacgggttttttatttctatttgtaatgtcaactccgggagacagtggcagtggtgctggacctactagtggtggtggtcgacgcgattctagagctccaactccatcatctacgccacgagatcctactcctacaccatctgatggaatagcgcctactcctactgatggtcaaggtactggaaccaccaacactgatgctgttgaaatagatgaggatgttagggttggtagtaaaaggaagcttaaatctgatgtatggcaagactttgaaagagtctgtgtaggtggtacttggaaagctaaatgcaattggtgtcacaaaacactatcagctgtatgtagaaatggtacaagtcacttgcgtagccacgtaaacagctgtgaatctcgacaaacaagaaaaggtctaaaacagtccactttgaaattatctaaaacacaagatggaaatgttctattggagaagtatgtgtttgatcaagctgttgctagaaaagaactcgcattgatgatatgtgttcatgagtacccactttctattgttgagcatgttggttttagaaggttttgtgctgcattgcaacctttatttaaggttatgtcaagaaatacaattagaaaggatattttggacatgtaccaagtgcaaaaggtatccatggtgcatcagttccagcaactgggatctcgtattgctgtcaccacggatatgtggacagcaaaccatcagaaaaaaggctacatggctgtgactgttcactatatcgatgagagttggaatctaaaaaactatcttttaaggtaa

SEQ ID NO: 23973 - DNA, 576 bp, Zea mays
  Peptide Sequence Number=SeqID_65752
atggctgctctctccctgatgactattgtgagtgttataattggacggattttccagtctgtgccagcacagttccaaacaacgctacccataggagagtattctgcagttgctctgctggcattctttggtttcaagtcaataaaagatgcattagcacttcctgataatgccaacgggaaccttcaagggaattcagaaagtggagaactggctgaggccgaggagcttgtcaaggaaaaggtctctaaaaatctcaccagccctcttgaagtcctttggaagtccttcagtcttgttttctttgctgagtggggagatcgctctatgcttgctacaattgctttgggtgctgctcagtctcctttgggcgttgctagtggagccattgctggacacttgattgcaacagcctttgctattcttggaggagcattcctggccaactacttgtccgagaagctgtcgaactcaggatatgaggagagctactcaggccacctagccaacttagctagcgaccctttcgtgggtcaatgcattataagttgtaggcttacaaaaataccaaattag

SEQ ID NO: 23974 - DNA, 186 bp, Zea mays
  Peptide Sequence Number=SeqID_65753
atggagaacatttggatacctctgctaccggagaccccaacaaattttgtagctatgctggcaaaatcaggtttcacggcggcatttacactgatttttgtatctgagattggagataagacgtttttcattgctgcactactcgcgatgcagtatcaaaagagcactgatagtgcatctctgtga

SEQ ID NO: 23975 - DNA, 153 bp, Zea mays
  Peptide Sequence Number=SeqID_65754
atggaggttctcaccagggaagagaccctcaccggagctgagaggaaattcgtcgattgccggagattcgggggtccaattgacgaacgtagtggaaaaagagaaggaaagcaaagaactgagagagtaacacctgaatttggtggatattag

SEQ ID NO: 23976 - DNA, 174 bp, Zea mays
  Peptide Sequence Number=SeqID_65755
atgcagatgattggggatggagtggtcgagaggttgggggaggaggcgggtggcgcgacaaagcagcagaagccgctagacacatatggtgttgtagtgatagcggtggttggcatgcttcttagtcctccttccctaggtcacccatcccttcacattcttcatacgccatag

SEQ ID NO: 23977 - DNA, 2766 bp, Zea mays
  Peptide Sequence Number=SeqID_65756
atggcggcacgttctcccggtcccggtggagaaccagggacaaactcgctggagctgctcatgcacttggccggatggaataaccacccgccatgggcacagagctatgcgggcatgtccccgcggggccagccgctagtcctctctccctccgccacgtcccccgggtgggcaccgtcgtcgttcgcccccggggctctggcgggaacaagtggcggcagcagcagcagttttggcggccgtggcgctgtcgccgtccaaagcggcgccgtggcccgtaggtacgatctcggtcccggcagttggagcgcgggccgcggcaaaccaccaaacgtgagtcagctacagattactgcggccgcaaccgccgccaccggatcatgctcaaccagcaagacgaagtcgtcgccacttggaggcggcaacacagaacaagaacgcctgacccccgtgcttgcaatgccgactacccaggggaaggttgccgcggcgaggattggccgcgtcaggaagcgcgcgcccaagaatggcatcatcgacagcagtgcggcgccgtccaggaacctgaggcacagggccgccaacaagcagcgaacggccaaagacgcagccgccggcgttgacgagagccccgccgccaacgccaggcgcgtcgacaaccagcctgctggcggcccggcaaaatccgccgcaagcgcggacgcgcgaaacaacgatattcagatcgtcccttctccgccgccggcacgcaatggcaggaagaggaagcagaacgcttccgctgcgtcatcgagatgcagcagcctggccaccaggaggagcggcacggacgcggtggcgccagcgacgaagaagcacaccatcctgacgtggctcatcgacggcggcttcgtgtccgacggagagacggtgttgtatgttccaggaggggacggcggcgcgggcgcggagaaggtggtgtcgggcgcggtgacccgggccggcgtccactgcagctgctgcgacggcgtggtgccgctgccggtgttcgaggcccacgccggggcgcggcggcgcgacccgggccccgggcagcggcagccgtgggagaagctcctgctcgtgtccggcaactccctcctgcggtgcatgcaggaggcgtgggagatggagaaagtgaggaccttccatgcgcaggccaaggtgagggccgcgctggagcaggaggaggacaagtgctcgcaggccaagaggaggctcctcgccaagcatctgaagaagggggtggtcgtcgagaggatcatgtctcctaggatggagaagataaaggcaggcgagaaggactccagcgacgacgcctgcggcgtctgcgccgacggcggggagctcctctgctgcgactcctgcacctccaccttccacccggagtgcctcgccatcaaggtaccagagggctcgtggtcgtgccactactgccggtgcgtgctgtgcatgtcaaacgatgacctgcagggcctgtccacatgccagcagtgtgctcgcaagtaccacgagagctgccgtccattgccggggaacgggtgcgacatcggcacgtactgtggcgagacctgcaagaagctcttttctcagttagcacaagtgacaggcgtgacgaaccctaccggggatggtttttggtgggcgctcttgaggattcagaaagatgaaccggccagctccgaggaaatgcctgccgttctcgagcgcaacgtgaagcttgcggtggcgctgggcgtgttcaacgagtgcttcaacccggtgaaggatcggcgcaccaagatcgatatgctccaccaagctgtgtatagccttgggtctcaatttaagcggctaagctacgaagggttctacaccatggttctggagaaggatggagagatcgtttcagcagccctgctgaggatccatggcacacaagtcgcggagatgcctttcgcaggcacgctgccagcttaccggaaacaaggaatgatgcgtcgcctggtcagtgctgtggagcaggtgctggcgtcagtgcaagtggagaagctggtgatacctgccatagattctctggtggacacatggaagaggtccttcttcttcaggcccgtggatccccagctgagggaggagctcaagaggctgagcctggtggtgatcaccggcaccaccctgctccacaaacccatcgttccgctgccgccgccacgtccaccgtcgccccaacaaggtatgttcattcattcattcagcacagggaacatcatgtcagttaattgtgagcagcagcctctgaccctgcgcccaaaacaaaacagcggggagtccagaggcatggtggcgcaagtacgcggacccgtcggcgcgcctgaccgacgacgagcgggcgttcctggagatggacgtcgacacggcgccgcccttccgctacaccgacctggtcacaggcaacgtgtctctgcacaggttctgtcaagccgggagctcgtcgtcggcctgcgccgctgccgtgtccacagggagagcgagcggcagcgctgcaccgcctccgggtccgggagcatttgcggtgcagccgggcggctggcgttcttgccgcaaggctgcgagcgcgatggctccccagcccagctacgcgcgcggcggcgggcgcagcggtatactccatggcatgaagtgaccgatccaccccctgccctcggcgctgggcagggcttgctgcagctctgtggactgtggtgtaattcagctctgagcctctga

SEQ ID NO: 23978 - DNA, 616 bp, Zea mays
  Peptide Sequence Number=SeqID_65757
atggacgggccgcgttggacggaagaggtggacgacctggtcgacgccggcgacgtcgacggcgccatcgccctccttgagtccgtcgtctccgatttgtcaacctccgctgctccccctgccactgaccttcgcctcgccacggcgctcggcgaccctcgcgggcctgcacgcctcccggggagacaccctccgagccgacgagctccgcgcccgcgccatcgcccttcggtcccgcgccacggtccctgggactgggaccctaggcttgcttgtgctattgaacttgtggacacagctcacaggaaattgagatcgtgcattcctcctctgatacttgcagattgggaggctattgcagatagtggtgcccttgatgacacactagtgcgctctcttgagcaaggagctagagtatcttcttgcagctcccccgaaaaaagtagcaccccatcttcagggcccaaaaggagggggaggggctcatttctttacaataagagtgttttgtacagtgaccagtgtggttcggaaagagagttggataacaaacagtctaaacctcaggttggatcaaaggatcatgtgaatgagccagagaataatgctgttacag

SEQ ID NO: 23979 - DNA, 294 bp, Zea mays
  Peptide Sequence Number=SeqID_65758
atggtgctactcgcctggctcgtcctcagcctccatcgccccgtctctggttactcgagctcaaggagacacacggacggaccccagcgcgctcgcgcgcattcacgccggcaacatcaccatcgtccctatcgtcccagcaagcgtggccaggttgagctcgttgacggccgcgcactccacttcaacgccgtcaccctcgctagatatggccaaacgggccactcggcccagtccggcccggtctcagtgaagttcggtccgttttgggcccggcctgtcagatacggttag

SEQ ID NO: 23980 - DNA, 207 bp, Zea mays
  Peptide Sequence Number=SeqID_65759
atgccgacccacacacagcctaacaatatagatgaagcttatggctcatccgtgattggttcgctcagatttgttttctcaaccaggatttgctccaatgaggtgtcaggaggacgtttgttcatcgtgggtctggtgaaggaaggcatcaacatggaggaggaatacttggagatcggcatatcagttattttacattacgattag

SEQ ID NO: 23981 - DNA, 324 bp, Zea mays
  Peptide Sequence Number=SeqID_65760
atgaggcaaggagaaatccaacttgactccctctggcctccaccccatgatggcaatggtatcctctcctactgtgttaaggcagatacccgtgccattacctctaaccgtgtattgaggaatagaccattcgggcccatgggtccagacccgtttaacaggaccactggcctcgggacccgctccccgctcgaggacacgttcgatgttgcctcatgtcctaggggtcaaaatgctcagggctactaccatgagtctggaccccagcctgtggtgctcggacctccccgtctaacattagaacccctagtaggtggggcctaa

SEQ ID NO: 23982 - DNA, 588 bp, Zea mays
  Peptide Sequence Number=SeqID_65761
atgacacaggtgggaccgtggaaccctagagagcgggaggtgtgcgggttgatcaaaactggcggggaagggagaggcgggcgtgggcgtgcacttgccaaggatgttgtggaccattatgaggaggtggtctgggtttcccccaacccactgcagccgccagccgccacccacactagccgcctccaacccacaccagcctccgccgccccgggaggctcagccttccctcccgggggcggcctcccacccgccgaccaccgagccccccccactccactgcctgctggctgctgcttccttctagatctaggggatcaagcagccttcctcgcgccgccagcaatggcggcacccccgtccgcgccgttcttcctgctgctcagtgtggcagcagcgtcgctcgccggcgccgccgacccctactgctacttcacctggaccgtcacctacctcgtgcacatgacaaccctctccctggcgttccccctcctccacctggtcgcgtcgccgcccctggcgtgcaccctcctccacttggtcgcgccgctgcccctggtgccccccctccacgctcgtgcgctctag

SEQ ID NO: 23983 - DNA, 294 bp, Zea mays
  Peptide Sequence Number=SeqID_65762
atggagggcggatactcaccgaaagtcacggcgcagaaattcccggtgacggcgcggtgcggaattggggcggcgtgcgatcgacgacgaggaatttcgtgcccgcagggacgctccaacctccgccaatgccacggttacttccgtcatgccctgacgaagcttttctaccgacgcaattggcccgagtgcctgtggtctttgcgttccatggcggcggcgggtttcacccgtgcggtgcgtggcgacgcagtggtggtggcgatgcagttggggaaaaacacagaggggtag

SEQ ID NO: 23984 - DNA, 1047 bp, Zea mays
  Peptide Sequence Number=SeqID_65763
atggcccggccgcgcctcctcctcaccttcctgctcgccgcggcggccgtgctgaccacggtgcccggcgtcgcgctcgccaagtcgaagctcgccaagaagagcgacgacgtcgtgaacgggcccctcctgaccgagaagatccaggcgaagaagacgctgatcgtggggccggacgaggagttcaagaccgtgcagtccgccatcgacgcggtgcccgccggaaacgccgagggcaaagttgtgataccggagaacaagcccttcatcttcgtgaggggcaacggcaaaggccggacctccatctcccacgagtccgcctcttccgacaacgccgagtccgccgcgttcaccgtgaactcggacaacgtcatcgtcttcggcgtcagcttcaggaacagcgcccgcgtcggcctggtgaacgacccggagatccgttccgtggcggcgatggtggccggcgacaaggtggccttctaccactgcgcgttctacagcccccaccacaccctgttcgacagcgccggccgccactactacgagagctgctacatccagggcaacatcgacttcatcttcggcagcggccagtccatcttccagtgccccgagatcttcgtgaggcctgaccggcggacggagatccgcggctccatcaccgcgcaggtgcggcaggaggaggacagcagcggcttcgtcttcctcaagggcaaggtgtacggcgtcggggaggtgtacctgggccgcgtcaccgcgcccgactcgcgcgtcatcttcgcagacacctacctctccaagaccatccacccggccggctggacaaccataggctacagcggcagcaccgagtattattcattgcattgcattgcattgcattgcatcagatgcaaggtgacgctcgccgagttcaactgcactgggccgggcgctgacgtgacgaaccgcgtgccatggtcgcggaggttctctcccgacgacgcggccaagtacctcaccatcgacttcatcaacggcaaggactggctgccggcgtactactactga

SEQ ID NO: 23985 - DNA, 924 bp, Zea mays
  Peptide Sequence Number=SeqID_65764
atggcaggccgcgtcctcttccgcgccgctgccttcggcctcgccgccgccggtgcgggttccctgcatgccatgtcgaattggatgcctccctcggagatctctcccttcagccggatagtgaagctgaagcccacgctcttggaatccgcgaacgtccttctggccgccctgctccgcgcgcacccgctctccagtgcgaacctgcgtgacgtccgcgcccgcgctgagctcgacctcgcgcgtgctgacatggagattggccatggcggcgacccagccgccgccgtggacctccgcctcctcctggcgctcctcgccacgcgcgacggtcgcgcgtacgacgcgttgcggctctacgcggaagcggcccgcgacgcgcctttcgacccccggccctgcgcccttgcggctaacctctccctcatgtgcgggcgagatgacgtatctgcggcggggatttccgcttacacccgcctcgtctccaccttgcaccagggatgggagtccgacgagaccagggagctcatccacgagctcgcggtcgcggcgacgctgggcggcgtgtacaagctccgcttcgctgatagtaggaacttcgtcatgcgcgtggccagcagagctgtggacaaggggctggtcgctgcgcagcaggacaaggcgctatctgcgaccgagaggcttcagttccgattgctacgcgtgttcctggacaccaaggtgcggcacgtcgtgaaggagaacctggccgtggccgacattgatgaggttgacatagctacaaaaactggcaatcttgtttttctgaagggcctcatagatcgagttactttggagaccatggtcgtcaatggcggtgctgggccgaaccccaaggcgccggcggtggtgggcaggagcgcgagcaaggatgggaagctgtag

SEQ ID NO: 23986 - DNA, 360 bp, Zea mays
  Peptide Sequence Number=SeqID_65765
atgaagttcgtggatcgtcctccggctaatcctaaacgcataactatcgagtcaagccaagaattctttagtgttgagatactgcctttggcgtcaactggagaccctcccaacacaaagcatgacgttcatcgtcctgcacccgtcgagagaccatctgttattcatgaaaccactgaccaaactggaactggtgatgacgacgatgattttatgacacctacgaagaagtgtaatgctactgaaatttctaacaaaatcttacagaagacaagcacaaagaggatgaaagtaatggaaacttcacgacagaaactcaatgtgagatgcaaccccccaggatgttattataaccattaa

SEQ ID NO: 23987 - DNA, 285 bp, Zea mays
  Peptide Sequence Number=SeqID_65766
atgggggacggttctaaagaatgggaacccgttccacggggcagtccagagcctgtgtggccgcttagcctggtcccgtacccaaaagcctgcacactccaccgctccatgacagatccaggtctcggcgaggctgcctcccgagaattgttgacaaccctttcagacacgctggtatccaatcttgacacatcaagcctgcaccctaggcaggggccaagtaccagggggagtcaacaacgtaacatctcatacagcaggaatgagcgatacacagataagtga

SEQ ID NO: 23988 - DNA, 858 bp, Zea mays
  Peptide Sequence Number=SeqID_65767
atggcgagcgccggcgccggcccgtcggggccggtgcggtccatatcccaaacggggcggtcgcggacgatggggcgtatgcccacgcgcgccttcaccatacgtccggacggatcctccggtgaggacggcgtcgatatcgtggaggaggagctcgtgccctcgtcgctcgcgcccattgtacccatcctccgcgccgccaacgagatcgaggaggagaacccgcgcgtcgcctacctatgtcgctttactgctttcgagaaggctcatcatatggaccaaaactcaagtggacgaggtgttcggcaattcaaaacatacctcttgcataggcttgaaaaggatgaacatgagacaaagcgcagtcttgctacaactgatgcaagggagatacagaagttctatgcgcagtactgcagaaaatatctagaacaagatcatgataagaggaaaccggaagagatggctagatactatcagattgcgtccgtcctatatgatgttatgaaaactgttacacctggcaaaaatgagtatgatgattatgctaaagatattgaaaacgaaaaagcatccttttcacagtacaatattctaccccttaatatttctgctcgagaacaaccaataatgaaaattcctgagatcaaagcagcagtgaagctccttgagcagataaatggccttccaatgccaaggattgaattaccacaaagctctgacagaaaaacagtgtccgacaaaatggacagacctgtggttaaggatttgcttgattggcttcggcaaacatttggatttcagagggccctcggcaaacaaggaaagcagaggagaaaaacaccacttaccatctga

SEQ ID NO: 23989 - DNA, 324 bp, Zea mays
  Peptide Sequence Number=SeqID_65768
atgaaggtgggcgacgatgacagtatcgtacaccactgggggattggtcgcctgcaacgatatcgcgggaaggaggatcagccgatgcagcaccttgaaggtgttgtcaaatccgtgggtcagacgggagcctcaccgagtgctcctaggacaccaagactcaggcccgctgcacccaggctcactgcagcaagggcgcctaggctagcagcggtgacaccaagaccgacgagtctaggccaagaccttcgatgcccgcacaaccaggtggtagctgaagaagaggcggttggaggctactgggtggcagctgaagaggtctag

SEQ ID NO: 23990 - DNA, 633 bp, Zea mays
  Peptide Sequence Number=SeqID_65769
atgtggctgcgcccgcggcagaaaagaaggggtatcgacggatccagtcgagaaagccatgacaacgacgaatccagccatgaagacgacgatccagccaaagggaggacggatctagccgggaaggtcgcgacagaggggcctgcgccgggcctgacagggcggttggacgccgacaacgggagaagcttgaaggagccacacagggcgctgctgggcgggagggccgtccacagggaggggagcccgcctagggaaggtcagaggcgaggaggccgtagcggggaggggcacctccggcggcaatggcgcgccgttgagctagggtgcggcagcggcgtccgcgcacttgcgcacccgagtggcagtggtgttcatgcccgcgcgcccgccgctgcgatgcagcggctcgtgcctgcacgcctgctcgcggcggcggaggggagggagggggagcgcacgaccggtgcagggaggttcggcggcaccggcaaccgggatgggggtgccgcccccgagggcgatggaggagcctctcggggacgacaggggcggtcggaactttgctgccgctggcggcagtcgtgggttgtgaggtggcggctggtagggtggaaggaaaccctaatctga

SEQ ID NO: 23991 - DNA, 213 bp, Zea mays
  Peptide Sequence Number=SeqID_65770
atgaaggcagtctctgctgataacaacaaaagtcacctttgtcgatcaaactccaccagcccatgcaaaggtagcccccatcgtcctgaacagaccaacaagatcgaggtccaccacccctcgccacaaagagccatccatcaaccatttcatgaaggcactgtccacacaaacagcatggagacccccttccacactctgttcaacccctag

SEQ ID NO: 23992 - DNA, 207 bp, Zea mays
  Peptide Sequence Number=SeqID_65771
atggctgatgtcatggacgatgtaacaatgatgcaagatccgataagtggaataaaaaaggaggaaaaactcacgtgggctgtatttcttaagtggccgaatagggaatatcttaattctccaagatacgattttggagtgctacacaggcgcggcctttgggggtccggccgtccggggtcaccggtagttggccaggactggtga

SEQ ID NO: 23993 - DNA, 267 bp, Zea mays
  Peptide Sequence Number=SeqID_65772
atggatctaaaatcaacgctcgagattaaaggacccagtgatctgatctcagcttacatatccgagatcaacgactacgatttttttatcatgatggggtatttgagattcaaccgtgagcgctcatcaccaggtcgacgaccagggtcgtttctaccccgcatgatcctgttcacgccggaatggggctgcgacatcctgcccgcggtgtcaggcccaccgacgagcggtggctgctgcggggctatggatgagatgagtctttga

SEQ ID NO: 23994 - DNA, 384 bp, Zea mays
  Peptide Sequence Number=SeqID_65773
atgtgcgtagactacactggtctaaacaaagcatgtccgaaagttccctaccctctgcctcgcatcgatcaaatcgtggattccactgctgggtgcgaaaccctatctttcctcgatgcctactcagggtatcaccaaatcaggatgaaagagtccgaccagctcgcgacttctttcatcacaccctttggcatgtactgctacattaccatgccattcggtttgaggaatgcgggtgcgacataccaaaggttcatgaaccacgtgttcggagaacacaatggccgaacggtcgaggcatacgtcgatgacatcgtagtcaagacgaggaaagcctccgacctcgtctccgaccattcaagtgtctcaagccgaaaggcgtaa

SEQ ID NO: 23995 - DNA, 258 bp, Zea mays
  Peptide Sequence Number=SeqID_65774
atggcgcaccggacactgtccggtgcaccaggcctgtacagactcaaaccagccactctcgggaattcagcaagcgtgctccgctataattcatcggactgtccggtgtgccagcggagcaacgattccctacgcgccaacggtcaactactaagacgaacagtggtgaacagtgccgcgcagaagtcagaggtcaccgaattgtccggtgcagcaaaaagacaaagggctccaacggtcaacagctccaaaccctaa

SEQ ID NO: 23996 - DNA, 282 bp, Zea mays
  Peptide Sequence Number=SeqID_65775
atggcggtggtccttgatgtccggagcactagggttttgccgctaggagtggccagctccgccagccgggtcttccgccatggctggttcgttgccagtcaacgcgacaaaggcggcacagtggtgaagatctacaggagcgcccacgaggacccacacatcagagaccccagtgaggcgacgcggaggaactggctgacccgtggtcccgcgcggcagagggcatcgagcgcgcgcgtggagaaggcgggtggtgagctgggctgtgcgctgtgggagtag

SEQ ID NO: 23997 - DNA, 297 bp, Zea mays
  Peptide Sequence Number=SeqID_65776
atggcggtggtccttgatgtccggagcactagggttttgccgccaggagtggccagctccgccagccgggtcttccgccatggctggttcgttgccagtcaacgcgacaaaggcggcacggtggtgaagatctacaggagcgcccacgaggacccacacagcagagaccccagtgaggcgacgcgaaggaactggctgacccgtggtcccgcgcggcagagggcatcgagcgcgcgcgtggagaaggtgggtggtgagctgggctgtgcgctcggagtagaagtgggccgaaagtga

SEQ ID NO: 23998 - DNA, 2145 bp, Zea mays
  Peptide Sequence Number=SeqID_65777
atggcaagcagcagcaggagtgaagaaatcgaagtggttgatgctgaagcaaatttagagcagcagcaagatgacaagcaacaagatggagctgtcgagccagagaacttgacagaaggagcaagtgcacaacaacacggaaacaaacgaacaagatctgtggcaaattcatctacagatcaatcgcaaccaaactctcgcaagtccaaggtatggaaagacttcacgattatttcacgagaaggtgaatctgaagtggctgagtgcaagcactgtaagaaaaaatttgctgctaacactcagaatggaacatcttctatgctgaggcatgttaaaacaaaacatcccactactagagctgaaatgggcaattatttcttaaaaactgaaaaggatgatgatgggtcagttgcacttaaaaattataaggtggatttgcctgctgttagaactggaataactatgtttctgcttggaggtgcacatccatttacagtagtggaagaacacgacttcaaaaatatgcttagtttagcttgtcctcagtacaagcatgttggccgtcacactataaaaagggatgtcatggatatgtttcaaaaagaaagaaaagaagtcattgatgccctcactaatagtcctggcagagttagtttcacttctgataattggaaatctgattgccaaaaattcaattacatttgcatcactggccattacatagatgataagtggaaattgcataagagaatcatatggttcaagaaattgaatccgccacttgatggagtgtcaattgctgatgaagtgcatatgtgttttcgtgaatggaaggtggacagtaaaattatgtgcatgactctagataatgcttcatacaatgataggatgattgctaccttgagttctcgtttgatgtcaaaaggtgttcttccattatggggtacatttttccaagttcgttgttgtgcacatatcttaaatttggtagtccaggctggtttgaaattgattgacatgtctattgacaagttgagggatggcattcagtatattaaagcttcatataatagaatgcatgccttttatgagaatgcagtaaagatttttcaactagagcccaaaagaagactgtgtgttgatatgccaatccgttggaattctacttacaagatgattgaaactgcattgtacttccatccagttttagagcacctatctgagagagacagcacctttaagtcaaaattttttccatcacgttcagaatgggcaaagcttgatgccatgaaaaagtttctcaagatattttatgatgctacctgcatattctctgggacaaagtatccaacttctaacttgtactttagatctgtttttatggtgcattcacgtcttattgaagctgcaaatgaatctgaaaattttatgacccctatggtgatagaaatgaaaaaaaagtttgataaatattggacagattacagtaccattctttcatgtgctgctgttcttgaccctcgctacaagttagaattcatatcatattgttacaataagctttatggtgatgatggtcagcatcgcgttgatctgcttaagcaaacactgcaaagtctttttgatggatatcgtggtagtgttgttttatcttctgctgatcaaggtatttcaaagaaaacaagtgcgagtggagaatctgacatgttccttgattatgatatattcttgcgttctcgccggactattgaagagaaatcacaattggaaaattatttggctgagccaacaagagacataaatgagaaattagatgtgctagactattggaacaaagcatcagctcgctatccggaggttgcctcaatggctcgtgatattctagccatcccagtgtcttctgttgcctcagaatctgcatttagcacaagtcgcaaagtcataacccacactcgaagttcacttagttccaagactattgaagctttgatgtgtctacaagattggtaccgtgagaggatggatgaaggtaaatgcaatcacacacaagcgcacaaggagcagacactaccacaattggagatgaagagaggtctgattctgaatgaaatgaagctaaacagaaggtcagaactcatgaagtga

SEQ ID NO: 23999 - DNA, 156 bp, Zea mays
  Peptide Sequence Number=SeqID_65778
atgggtcggtgcggaggaggaagcggagcaggagcaggagggggagctttgggcggctgtgctctcctcaccgccgccttggttatctcaacgctcgtgatccagggcgctggagggcatacgggtaagggcaagagacaaggctctacgttttag

SEQ ID NO: 24000 - DNA, 1101 bp, Zea mays
  Peptide Sequence Number=SeqID_65779
atggagaaaggtctgctggagaatcctgttcctagtggtcattcccagcgctctctctgcaacaagaaaaaaagaagacgttccaaaggtggcagaggaactctgagcagtggcaaggttgtttcacattctctatcagcacctgaagtcattcatgaagtttccccaccgcgtttaacatctcgagttttggccttctcgaatgatatagcaaggaaagaattaaacttgagaagggccttgcttgtcaccgttactggtactaggccagaggtccttggatcagaggtattagaagaagtggcacattgtttcagcattaagttagaagacatgacaatccaatctgcaaagcctgaggattttcttctattctttcctaatgaagaaactgcaatgagggttcttaatggtggtaaagtgctccgaggaccttggttcaacttggttttcaaaagatggtccagattttctcatgcctcttcctcaatcatgtcgaacttggtggaagttgagattatcggaatcccggtgcatgcttggtgccgctcaacagctgaattcatattgggagattcttgtattattgaggaggttcatctggacactctattgcagaaaactcttccatcctttgtagcgagggcttggtgcttccaaccgaaacagctgcaccgtgatatgattctgcatattctagagccaggcccacaaagctatgaacggagatgcttagcctataatataagtgtaagggtacttgcaatctgccatgatggtcttagaggttccttgctgctcactccatcggaggatggcgatcagtttgatggttcagacgacatggatgatcagaggaatgatgagcctcggcgtttgggcagtcccttgccccaccaacggtctgttcacctttgccttgggcctcccccgccgtctggacatggaaggacttcacatacatctaggggacatgaacaaccactctttgacacaccggagttacaacagatggcctcggataatgggatgatactccttaatgagttgcctatagagaagccaaacagtctccttgatgaggcccctattgatagctag

SEQ ID NO: 24001 - DNA, 126 bp, Zea mays
  Peptide Sequence Number=SeqID_65780
atggagacagccatcagaaaagctgaggaaggtgtcatgtgggagatggcgggggacaggattttttccctcatggtgcctattccaggtacatcatattggttgggatatgacatgcttgtgtga

SEQ ID NO: 24002 - DNA, 1080 bp, Zea mays
  Peptide Sequence Number=SeqID_65781
atggctctcgtccccaacctttcctctcccgtcggtgcctcacctccccaccagcccacgtcagcacctactccggggccgacaatcacccacatcacagccacctccctctcgccccccccccctccggcgtcggtgttaacccccaaccgccctagccaagccaaatccccgacttcgcgcgtggaaagatggattgatggttcgctggatcctgaatgtttggattctccccctcgacgtgcagtatctcactgttcgtatcgtgatgcggtgattgctacgcctgatgtgcaaccggctgaagcggtccctaaggtggcagacgctccctccgtgcggacaagtcacgcccaaagggagagtgcgggcggattgtcggttaggttgtgtggggcgtctcaggacgttcaaacatcaggagagaaggatggcgcctggaaggtagtggaatccaagcgcacgaagcagcaacgcctgaagatgaagcaacaaagactgaggcctgcagttcatctccctgtagggcagagactagctccagaggtggcgcctgtcaggagtgccagtaatggggatccttctcgacctgaagctccggctcggtctgaaggaggatcaaatggccagcacttgacgacagcatgtcgtggtgatccttctcgacctgaggaaattgcctcggtctggacaaggatcaaacttccgaagaatgacatgatcaatgttggtggtggaagcattcattctcgacccgaggctcgtgactcagtctggagaaggatcagttcgacatctgtgtctacggaccaggacacggcacctgtggtcaaggcaagagataaggtgtggagacgcatctccccacaccaagacgtcggtgtgattccaggatcgaggacaacagttgaggttccctccaatgttcaggagctgaattgtgttcagactaaaaggcatcagggccgaaggcggcgttctagaactatgccttctagtggtcctttgctgtcgacggcttccacgaagataatcgcccaagtcggtcagacagaacgaccaacaagtcgtccgacttga

SEQ ID NO: 24003 - DNA, 786 bp, Zea mays
  Peptide Sequence Number=SeqID_65782
atggttgccatcgacaaattctccaactggatcgaggtccagcccctcaacaacattagttgcgagcaggcggaactgcccaatgcaaggtcatgtttgaaatattttgagaatggtggggacactatcctgggttatagagcggttcaggttaattggaaagatctggactattgcaatgtttgtgatatggatgaggagtatgaagacaacttattcttgcaatgtgacaagtgtcgtatgatggttcatgctagatgttatggtgaacttaaacaattggatggaggactttggctttgcaacttgtgtcgaccaggtgcacctcgtgtgtctccaaaatgctgtctatgtccagtcacaggtggtgcaatgaaacctacaacagatggccgttgggctcatctcgcatgtgctatatggatccctgaaacatgcttaaaggatgtaaagagaatggaacctattgatggactgagcagaatcaacaaggaccgttggaaacttgtatgcagcatttgcggagtttcatatggagtttgtatacagtgttctcatcctacctgtcgtgttgcgtatcaccctctttgtgcacgtgctgctgacctttgcattgagcttgaaaatgatgacaaaatccatcacatgtatcttgatgaagacgaggatccttgtattcgtttactctcgtactgcaaaaagcatagacagccttctgctgctgaacgtccatctttagaaagtgatcctcctgaacccattcaggttagggatcagataaggtaa

SEQ ID NO: 24004 - DNA, 867 bp, Zea mays
  Peptide Sequence Number=SeqID_65783
atgtttttcgacgggtcgctgatgaaaacaggagcgagcgcgggcctgctcttcatctcacccctcgggaagcacctccactacatgctgcgccttcatttcctggcatccaacaatgtggccgagtacgaggctctggttaacgggttgcgcatcgccatcaagctaggggtccggtgcctcgacgctcggggtgattcacagcttgtcatcgaccaagtcatgaagaactcccattgccgtgacccaaagatggaagcctactgcgatgaggttcggcacctggaggacaagttctacaggctcgagctcaaccacatcgcccgacgatacaacgagactgcggacgagctggctaagatagcctcgggacggacaacggttcctccggacatcttctctcgagacctacatcaaccctcagtcaagaccgacgacacgcccgagcccgacaagaaggcacccgggggctacacgcacctgctggtcgctatcgacaaattctccaagtggattgaggtccgacccctaaacaacatcaggtccgaacaggcggtggcgttcttcaccaacatcatccatcgcttcggggtcccgaactccatcatcaccgacaacggcacccagttcacttgcagaaagttcctagacttctgcgaggaccaccacatctgggtggactgggccgccgtagctcaccccatgacgaatgggcaggtagatccctgcgacgctaccacgcccgaggggttcggtctcgagacctctaggtgggcgacttggtgcttcggctacgacaagacacctgagggcgccacaagctcacgcctccctgggaagggccgttcatcatcgccaagattttga

SEQ ID NO: 24005 - DNA, 441 bp, Zea mays
  Peptide Sequence Number=SeqID_65784
atgggggagcaaggcaggccaagcagcaacaggatcagagacatcgtgaggctgcgacagcttctcaagaagtggaagcagattgcgctctcaccgaaagccggcaagagcggcggcggcggcggcagccacggtgtcccgaaggggttcttcacggtgtgcgtcggcaaggagatggagaggttcgtgatccccacggagtacctgggccactgggcgttcgaggagctcctgaaggaggcggaggaggagttcgggttccagcacgagggggctctcaggatcccctgcgacgtgaaggcgttcgagggcatcctgaggctgaagtcgaacattgttctcgcgcactatttcctcagtgaagtgaacactgcttctgaattttcagcatgtgtgcacataactgatgcatcctcgtcgctcaactcttcgcaacgatga

SEQ ID NO: 24006 - DNA, 294 bp, Zea mays
  Peptide Sequence Number=SeqID_65785
atggcgacggcgcgttcgacatcccgttttatccctcttctcgctcttggtgctcggttacggcagcgcgatgccagagcacaagcatcgacgcccaagctctccatgcttctgctgcgcgggtacttttatagaggcgtggggaagaaaattgcgccgaggagctcggtgcggaatttgggcgagcaggattccgttgctagccgtgagtcggagtcgcagctaggaggtaggatacgcccgcggcccggagttcccccagctttccaggaaccgctgagaccggaacactag

SEQ ID NO: 24007 - DNA, 335 bp, Zea mays
  Peptide Sequence Number=SeqID_65786
cccgcccacggctcgccggcgcggcggctcgcgcggccatggcgcggctcggcgcgcgcggcggtcctgccccggccttccctgcctgcgacgctcgcccccggccgctgcgcggcctcgcccgcccgcacagccccggtcccggcgtggcctcggcgtgcgcgcggagccccggcgcggcccgtgcacgcacggagcccccggcgagctcgccgcacccgcggctcacggccgtggcggctcggtcccgcccgcattggcgtgtcccgcccctgcgcagcgcggccccggcccggcgcggcttcggctcgcgcggccgtggtgcccctgcgtag

SEQ ID NO: 24008 - DNA, 213 bp, Zea mays
  Peptide Sequence Number=SeqID_65787
atggagcgaccacccgggaaaacagtgctaccacaagggtacaatgctcagcttcaaccatcctttttgtgcataaatggctggatcttcgaaaacacccctccaactacccagtggtgcaaaaatatcttcgctcaagagatgattcttaacagctatatgatgcgcgaaatgatagctgacaatgatagacaatggatacaaccattgtaa

SEQ ID NO: 24009 - DNA, 1281 bp, Zea mays
  Peptide Sequence Number=SeqID_65788
atggaaccaaaaccaactcgcggcgcacagcaaaagttagcgagaacagagagtgcctgcagcgctgccggtagactcctgatgagtgagcttgcaaggcaggcttccaacgccgaagaaatcatggtggtcgaggccgccaccgagggtccacgagaagccgcagccaagaaacaggtccaggacgaccagggaataatggaggcggacgagatcgcaagcctgaagctcacggtgtcggccctcgaagacagggctaccgccatcgaggcgcagttccacgagtactgcgacgtgaaggagcaggagtcggcgtaccagaagatgcagatcatgtgcctgggcatgaagctggagctgctggagtcccacaaccagcggctggaagccgcggcagcggagatccgcgcggccgctggagagttcgcggccatgagaggcaggctcgacaggctgcaaggcaagctgaagaaggtgtcgaagagaagcgagcgaggttcggacgctgtcgtcggcgagaaaatcgcggcccttgacgcgaagcaagcccagatggcgagacggtgcgaggagttcgagcgggccatgggtgagatgaagcagctcacgttgcagcttgtggagcagaagggagcgaacaatgagaacgtggaggtggcggtggagaggagcctgcggaacctgtcgagcggcagggacctggtggacgggctggaggcgctgcgggaccggtgggcggccggcatggaggagatgatctacctgggctggatcacggcctggctgcagcacgacctgatgctggtcgacgacgacgacggctacggcggcgcggtgctcggtcctggcagcaccacctacggtggcggccacggcgacgacgacgaagatgttcgagacggcgtggcgccggaggaggaggaagaggagggtgagaagaagaaaaagaagaaggagaagaagaagggggacacgatggtggcgtcggtgccgccgagcaaccaggtggagctatgcaaggccgagtccgtgtcgtcgtcgtccgggtccgggtcggccccgcgccgcagcgtggagatggagccgccgtcggcaccgtgcatggggttcgcggcggcggcggccggcgggcgcgggagggactgcggcggcgggtggagcatcgggcggccgaggctgctccggaagctgcgcgggtgggccgccggaggagggacgaaggccggcggcagcaagaccacgcggtgcaggatcgcgggcccatgctgtcagaaagaataa

SEQ ID NO: 24010 - DNA, 213 bp, Zea mays
  Peptide Sequence Number=SeqID_65789
atgggcgtggggtgctggctcggactggcgctgtacaccatgagctctgtcctcgtcttcgccacgtggatggtggtcggtgcggtgccatgccaggacctggcgtccgtggccaccggcgcgccgccgaagcaggcgcagtgggcggcgctcatatcctcaattatgccatacaatacacctttggccatgttcttcggctttcctggttga

SEQ ID NO: 24011 - DNA, 1221 bp, Zea mays
  Peptide Sequence Number=SeqID_65790
atggaggaccgcagctccaagcaggcaggcgcgggcttggtggcccacctccacgacgacctccttgtggagatcctctcccgcgtccccgccaagtccgtctgccggttcaagtgcgtgtccaaggcctggctcgacctcattgccggtcccgaccaccgtaagaagctccgccaacccatgcagggactcatctacatgaatccagagaaggaccgccacagcttcagcttcctggacctgccactgacagtaggatccgtgcctctggacgttgccgaccctgcaggcttcatctcctacctgacggaacagcctgggatccatcgcctcgtcttactggattcctgcaatggcctgatcctattccagcaccttatggagctgccgcactacaacagtttgggctatgtcgtgtgcaacccaaccacgaagcaatggcgagccgtgcccgagcccgactgcagctcccatgtaccaatgaactacacatatttggcttttgatccgactgtatcctcccacttccacttggtccggttcaaaaagaatcgcgagtacatggagcccatgtcgacgcatgcttactcgtctaaaactgggatatggacctatagccaaactgtgaaagaagaagaagaatggcagaatcaggtctacttatctataagtaatcgatgcgcctttgttaatggcttcctgcatttgctagtttggggctcgaacaaaatgcagatactcattgtagatgtacaaggacgtccaagaaggatgatcagactgccagacgcggctgctggtaattgtgagggatgctactgtgtttactttggccaatcccaggggcatatgcactgcattactaaacaactattcgacttcaacgaagagaaatacgagctgtccatctgggctcttcaggattacgatgcacaagagtgggtgctgaaggacactgtgagctcgctccagctctttggaggaaattgtcccacaagtgtcgcattggagttgtacagcgaggtggccagcatgcatctcgatcgcaatgtggtcttcttcttttcacactgtgaacggagattcatagcatatgacatggacagtaaggaagtgagtgttttcagcagttccaaagctatacacaggtggaagcaatgtcattatcaggagcttgctccagtatgccaggaattttctgttagaattcggctcctttag

SEQ ID NO: 24012 - DNA, 1155 bp, Zea mays
  Peptide Sequence Number=SeqID_65791
atggcggaggacaaggtgcggcggatcttcgtcggcgggttgtcctggaagaccacggagcgcacgctcgagcgcaccttcggtcagtacggcaatgtcatcgaggcacaggattacacgcttaaaattattatttgtgttcgatatggggaaaggagacgattcaacggctttttaactgttgtagcttggtcttgcaattttaatctgacagcaactgctgattcagagaggctgcagtcacttccatttctatatgttaggatcttaacaaagttgcaggaaaagaaattcactaatcaattgagctcactggttgtagtgaaaagggaaacaggccgctcgaggggatttggatttgtcacattctcagaacctcgggctgtggatgctgccattcgtggaatgcataatgcggaactggatggccgtaatatttctgtgaacaaagctcatcctaggattgctgacgatgactatggctatggtggtggtggtggtggtggttactcgtctggtgctagaggtggatatcgtagtggcggtgatgtagttccagcagtgagtgatgaatgtttcaaatgcggccattctggacatgatgtagttccagcagtgagtgatgaatgtttcaaatgcggccgttctggacattgggctcgtgaatgcccttattcagatggcagtggtagaactggaagatattctcccgcttcaaggtatggtggtggcgctgggggacgtggtgaccgcgttggaggatcagatcgttttgctcgctatgatgatgaccgatatgatggtggccggtctgtagacagcagggatacttattatggtgctgggcgagatcgttatgctagggatcgccatctgccagcaacagaccaccattctggtgacaggtacagtggtgcagatcgttacacgtccagtggctttgccatagaaaggagctatgagagagatggaggcaggtccactggaacttactaccgtgatgacccgaggggcactggtggctatggcagaggtggttcacgtggcggcggcggcgggcctgctcgctttggtgggagttaccgagataggcctgctccgtatgaccgtcctagcaggggcggggcagctcgtgcttatgatgatcgttactga

SEQ ID NO: 24013 - DNA, 438 bp, Zea mays
  Peptide Sequence Number=SeqID_65792
atggagaacgtagaaacggaggcagtggccggcgggttcctcccccatgtccccgaaggtcccttgattgaaattctctcgcgtctctccatcaaggatgtcctcccatccacatgctcgttcaaagaacaactttccagacggcctgcaaacgacgacgacggcgacggcgacttgctcatagttgctatggacggggacgaaggaagcatacgcaggatcattccctggccactgggcgtctattccagagccgtcttcgattcttcgttggccagtcccatgggcgcctgcactgcatcaggacggagtttacgtgtgcgtacagagacgacgacaggcccattgacgttcttcaggactacgatgcagctggagctgaagggtggcgcagaagaagacacagcagcattcgagaagaccaccagcagcttataa

SEQ ID NO: 24014 - DNA, 162 bp, Zea mays
  Peptide Sequence Number=SeqID_65793
atggaggcagaggttgttgagagcgggcgtagcgggggattcaccgcggtccttgttgttgtcgttgtccttgctcttcgcgcccccaaccctggcctagcgctgtcctcgaccccgcgcgctcgcctccggccagttcctcatggccgcaaccgcccctag

SEQ ID NO: 24015 - DNA, 366 bp, Zea mays
  Peptide Sequence Number=SeqID_65794
atgggcgcggggtgtgggctcggactggcgttgtacaccatgagctccatcctcgtcttcgccacgtggacggtggtcggcgcggtgccatgccaggacctggcgtccgtggccaccagcccccgtcgcgccgccgaagcaggcgcagtgggcgacgctcatgtccacgctccaggagcggatcgtgcaagggaagggggagccaggcgcgcgggcaaccatggatggaagccggtgcggtcgggggaccggggcgtggctgccatggattggtcgtggcagccatggatggaagctttgtgggcgagattcgcggcggatttggcagaccgacgattcgcggccatggatgtgatttgtgggtaa

SEQ ID NO: 24016 - DNA, 1125 bp, Zea mays
  Peptide Sequence Number=SeqID_65795
atggaggaccgcagctccaagcaggcaggcgcgggcttggtggcccacctccacgacgacctccttgtggagatcctctcccgcgtccccgccaagtccatctgccggttcaagtgcgtgtcccaaggcctgggctcgacctcattgccggtcccgaccacccaccttatggagctgccgcactacaacagtttgggctatgtcgtgtgcaacccgaccacgaagcaatggcgagccgtgcccgagcccaactgcagctccaatgtaccaatgaactacacatatttggcttttgatccgactgtatcctcccacttccacctggtccggttcaaaaagaatcgcgagtacatggagcccatgtcggtgcatgcttactcgtctaaaactgggatatggacctatagccaaactgtgaaagaagaagaagaatggcagaatcaggtctacttatctataagtaatcgatgcgcctttgttaatggcttcctgcatttgctagtttggggctcgaacaaaatgcagatactcattgtagatgtacaaggacgtccaagaaggatgatcagactgccagacgcggctgctggtaattgtgagggatgctactgtgtttactttggccaatcccaggggcatctgcactgcattactaaacaattattcgacttcaacgaagagaaatacgagctgtccatctgggctcttcaggattacgatgcacaagagtgggtgctgaaggacactgtgagctccctccagctctttggaggaaattgccccacaagtgtcgcattggagttgtacagcgaggtggccagcatgcatctggatcgcaatgtggtcttcttcttttcacactgtgaacttagattcatagcatatgacatggacagcaaggaagtgagtgttttcagcagttccaaagctatacacaggtggaagttttttatgtcaagcaatagttgtcagctgcttgctgaaacctttgaattggctccaaatctttggttgtatgttcttcctcgaaaaatacctgagcatattcgtgttgtgcagcaatgtcattatcaggagcttgctccagtatgccaggaattttctgttagaattcggctcctttag

SEQ ID NO: 24017 - DNA, 360 bp, Zea mays
  Peptide Sequence Number=SeqID_65796
atggctgaggacgtcgacaggcagtcacacagggtcagggcctcagctgcgaagtgcgcgcgtaataataataataatccagtagaaccgtaccgatcgatcatgaggcagctcatcgcggcagctgccatcctcctcctcgtcctcggctccggcgccgtggcagcagcgcggtcgtcgtcggtcccggtggcgagtgatgaaggaggaggaggctcaagctcggcggtggcgcaatctgagacgaagaaggcggcggcggcaacggcaacggcaacggccgacagctccgctcagccgtccggctgcaccaacggcagcggacccggcggctactgccaccctccctcggagcactga

SEQ ID NO: 24018 - DNA, 840 bp, Zea mays
  Peptide Sequence Number=SeqID_65797
atggggaaagaagttgttgatatgtctactgatgaagaatcagattgcgtagttatgtgtccacctaacagaaatgctgatcatgaggaagctgtgagtggcagccatgatgaagattcttcaggaaggcaagagaacccttatgctgtgaactcacatatgaacacccgtggccaggaagatgtgtctgtaaacccagacctgctcaagctgattcatcagcaggagtcttctgtcagcaattcaccatcaaaacctgcaggagctagacagcaagggtctagccatactgtccctgagtcatgcactattgcacctgaaagaagaactgtaacttcagcgagagctggaaaaactaagaagacaacggttgctgttgcacctacatttgtctgtgataatcgtgctgagaagagaggagagttttacacaaaattagaagaaaagcgcaaggctttggaagaggagaaactccaagcagaggccagaaagcaggaagaggaagaagaagctctaagacaactgaggaagaacttggtcgtccgagcgaaacccgtgccgagcttctaccaagaacccccaccaaaggttgaacttaagaaggtgcctccaactcgtgccaagtcaccaaagctgacgcggaggaagagctgcagcgacacgcctcacacaccagagggaggaaacggcggcggcggcgcagtgtgctgccggctgcaccgccacagcatcgggaactccaaagacatcggcagcaaggcacaatgctctccaaagactggaccagctgctaagtccagggcgcccccaaatccagggaagacccgagggcttccatga

SEQ ID NO: 24019 - DNA, 183 bp, Zea mays
  Peptide Sequence Number=SeqID_65798
atgtgtggcaaagctagtaggatgaacaaaggcaatcatgttggatctagcgatagggcagaacacctagttggcttcgagcaacccatcacgaccacatccatacccgtgggaaatatctcgacagtttataagaagttcaacaaatttgatatcattgtcaagaaattgaccttgcaatag

SEQ ID NO: 24020 - DNA, 129 bp, Zea mays
  Peptide Sequence Number=SeqID_65799
atggaaggaaatggaattgttggtgcgatatacctccaatttgaaggaaatgaaaagtacaagcgtgacgcaaaagtgaacaccaaaatcagcgtgaacagtacgggggtactgttcacctatttatag

SEQ ID NO: 24021 - DNA, 735 bp, Zea mays
  Peptide Sequence Number=SeqID_65800
atgaccgcgtccaaaaaggctggcccctcggaggggttcaacagccgcctcagagcgctcgggctccgcgcccactactggtcaggggttcaaaggttggcccctcggaagggttcaacgaccgcctcaggccactcgggctccacgcccactactgatcagggcgggaacgatcttgtaacggaatcccatcagagggaggcatcgagccctcggaccccgtcaaaaggggaccgggtccagcagatcacccgcagagtgaggctgacagcagccaagtctagcctcaggcgccataggaaactccgcttcgcccgaccccagggctcggactcgggctcagccccggaagacgacgaactctgcttcgcccgaccccaaggctcggactcgggctcggccccggaagacgacgaactccgcttcgcccgaccccagggctcggacttgggctcggccccggaagacgatgaactccgcctcgcccgacccagggctcggactcgggctcagcccccggaagacgacgaacttcgcttcgcccgactccagggctcggactcgggctcagccccagaagacgacgaactccgcttcgcccgaccccagggctcagactcgggctcggccccagaagacgacgaactccgcctcgcccgacccagggctcggactcgggctcagccccggaagacgacgaactccgcctcgcctgaccccagggctcggacttag

SEQ ID NO: 24022 - DNA, 1095 bp, Zea mays
  Peptide Sequence Number=SeqID_65801
ccaccaccgccttcacccatcgcctccgccattgacacctgcctcacccaccgcctcggaagaagaagacgtggatctaaggaagaagacgcggatccaagggttgactgctgaggaagaagacgctactcctcgtcttcgatctggtgagcttccacctcttttgcttctgttcgtcaccggcgcgcagaccgccctcctcctctcttggtctgagcatccagttcatcccacccgcgcctcctttggcttcctatccaccatggggacgctacttctcgacgggcggcacgggcgtgctgctacttctgcttcctctcccacgcttgctgagctgatggctacatcagagccagtacaagagagtttggtggtgcactactcacaacctagtaggccccgggtcctccttgctgcttcaggaagtgtagccgctataaaatttgaaagcctttgccgtagcttctctgagtgggcggatgtccgagctgtggccaccacgtcatccttgcacttcgttgatagatcatctctaccaagtggcatcgttctttacactgatgacgatgaatggtctacctggaagaagataggagatgaagtcttacacatcgagctgcggaaatgggcagacgttatggtgattgctccattgtcagcaaataccctggctaagatcgccggtgggttatgcgacaacctcttgacctgcatcgtgagagcgtgggactacagcaaaccgctctttgttgccccagccatgaacacgttaatgtggaacaacccattcacggagcggcatcttcacacaatcaaccaactgggcatagccttgatccccccagttaccaaaaggctggcctgtggcgattacgggaacggcgcaatggccgaaacctcgcagatccatacttccgtgaggctcgcgtgcaagacgcaaccgcacgatgcgagcagttcactcgcgggtcctggccgaagacgtgtggacaagcgaggtcaggctagcgcgaccagccaccgcaccggcaccgccgacgggccgtttcgggtcacgatgaaaattatgcaccgccagccagactccgtggtgcg

SEQ ID NO: 24023 - DNA, 267 bp, Zea mays
  Peptide Sequence Number=SeqID_65802
atggcgcccaccggcgcgaccagctgttgcgtgtgctcggcggccagcggcctgcgcggcccacgacagctcagcgcagccagcacgtcgtgctcacggttaagagcgaccttgggagctcctttgattacagatacaatggttacgattgatgatgatggctctgttaatgatggtttggactatggtttctggtatttcctctatgaggagatgaaggtcatgaaggacacaccttcaacactttgcaagaacaataattcataa

SEQ ID NO: 24024 - DNA, 477 bp, Zea mays
  Peptide Sequence Number=SeqID_65803
atgggcaagagtaacaaacgcaagcgcgagccgactcctccgtctgaggatttcggcgactcggaatactcggaggaggagttctcctccgagtccgaggggtctccggctcccgtctctcccccggcgtcgtctgatgattcagacgactcccaggggattgccgcggaagtctggacgtacatccgggcagtcgagcactctgggctcgagggctcggatgattcggagtactcctcggatgaggaggactcggacagcggcgaggacgaggatgacgacgacgacgacagcgacgacgacgacggtggcgacggcgacggtgacggcagcggcagcggcgggggcagcggcggcggcgacgggagcaagggcagcactagaggcggcagcagcaagggcagcaccaggggcggcatcagcaagggcagcaccaggggcggcggcggtggcagcagcagcaaggccagtggctaa

SEQ ID NO: 24025 - DNA, 807 bp, Zea mays
  Peptide Sequence Number=SeqID_65804
atggcgccgaggtggaacaattgccctttgcttcgcttgggctctcgctctggcctagacgaccgcgccaaaggaagaaaggccatcgggagtagagtcctcgaggccgaaggcctcttggctcgaagcccccattcagatgctactaaattcgtgtgggattgcctcaatcaagatgacgatgagctaatgggattgcttggaaatcaaaccccgttgagagactgccgtgatttctttgctgaccttggtgatttcacatgcaaggagaccttggacctggaggaatctcgggaatcaaagcggcggcgcacattagagtacccttcagagtctagtcagtcagaagttgggactcatgatgctgcttcaccttttgtcacatctgaggcagcagaaatttcattgctctgcactgataaaccacagagcttaaattgggatatgcaccacacttcaaataatttaggaacaagtgagactggaccaatgacagaaagtttcataatgcaggaaactagaaagctttgtacactcaaagtgtccaaaggatcaagctcaacactagttaaggtgaaggaaaacttaactacctcagtagcatatccttttactcttatcaaaccatcttgggaggaaggcgatgttaccttgcaggatataaatcagcgaattcgtgctcctcctaagaaggcccccgagatccttggaacttcagcattctctggcaagccagtgattggcaagacaagaatcagaacagaaggggggaaaggaagcatcacaatactaagaacaaagggctga

SEQ ID NO: 24026 - DNA, 291 bp, Zea mays
  Peptide Sequence Number=SeqID_65805
atgtgggcccgcgcggtcggggtcgtctcgtaccctgtgtccaggatgcaacaaaccccgagttgggctctgaaaagcctctgcgagatctttggggccgacccagccgccttagcatcgccccaaggctataaaagcaggaccccgcgaccctcttgcccatcccatcggcaccccgagatcggtgttgaggcatccatccctgtgagcaccgccatggacccagccacatccgcgatcgacaaactccagacctcgaccatgctaggcctcgatgggtgccaatggtga

SEQ ID NO: 24027 - DNA, 489 bp, Zea mays
  Peptide Sequence Number=SeqID_65806
atggtggagagacgtccgagtccgagcgtgtggggtggggcactggcaagccgggctcgtgagttagtgacgaggcgggtacgtgcggtgtgcttgcctagagtaccggagcaggccgagcaggattttgggctttacaccgacccttcgagccctgctcgctcgatggatcggatgttggcccgctcggcagccgacaaccccatggagccatccgagtcatcagacaatgtcgtgggggtgccagtggcggagagttgttgcccacggaagagaaatcctcctcaaagaacttcgagtctccaaagagtcggaggagtcggaggacgcttgcgctttcccttcgctgagccgcgcttgcctttgcatcctttgccgccggccatggtgctttctagcgagtcgaagaagaagaagaagaagaagaagaagaacgcagaagagcaagagcgagtgaagaaaacaggcacaggaaaggagactatttaa

SEQ ID NO: 24028 - DNA, 177 bp, Zea mays
  Peptide Sequence Number=SeqID_65807
atggcgcacagtggtggcgacgggatggcttgggcagtcggtggcgacgggacggctcagtcacagggcgcggggacgcaaggcgccaattcggctgacctaccccacttaaaagaatctcgccctcgagattcagaatgggttagagaaaaggtaagggtattccttcctcaatga

SEQ ID NO: 24029 - DNA, 330 bp, Zea mays
  Peptide Sequence Number=SeqID_65808
atgggatggctcgggcaggaggtggcgacgggacggctcaggcatagggcacggggatgcaaggcaccaatttggctggtgagggcggcggttccctacttcttcttcctgggcgccatcagaccatgcgggcaagcagggttgagcgcattcacaaagatgagcagggatttcacgacggaaaaagcaaagttagggttcactgccacgaaactgccagcgaggatgtatgggcgcacactaagtcgggtgcatcgagatggacgaagtaactcggaccagaccctcaacaaagcaaagtcatttgggctcgtcagacataggcgctaa

SEQ ID NO: 24030 - DNA, 540 bp, Zea mays
  Peptide Sequence Number=SeqID_65809
atgccctgtcgcgctgttagcgggggcatggctcgcgatttcactgtagctccatttggcgttcccgaggaggatttcttcttgggtggagctatgcggtgcaagagttccctctacatccgccacacagaagatggtcccgaagcaaaaaacagcttctggattgaaggtgatcttgctcttgaaaatgatggccatgaagttaacgttgatcgacgagacaccccctacctagcgcgccagctgtcggtgtttcgtgtccggctgcacactcggggtaaggaggaaaagagagtgacacgggatgacgggaggcaaggaaggagggatccaggaacatgtgcagacttggcagctacggaactgggtgctgtcactgttagcggtcaaagcctcaaaggaaacttcctacggcttactatcgcccctaggaagttagctattcgtttggctggtcaacagatgaaacttaacttcatagaggaggccgtaggaagctacgatgttttaacttccgacattttttataaaataccgtag

SEQ ID NO: 24031 - DNA, 429 bp, Zea mays
  Peptide Sequence Number=SeqID_65810
atggtgtacgaggcagctgcggccgttgcggcgagggaccaaagccagctacgcagccgagaaggcaggcgcggtggaagaagccgacgacgacagccgccggaggagaaagagaaggtcgtgatgaggtgcagcgttttcaggatccttgggagggtcctcttgctctccaaagcatcagcgtcggagaagaagcactatgggggatgggtatcccgggatccactcaggggtgaaaacttcgctcggggccacatggcagtcgtctctctatggcatcccgtcgggggccgggcaaatggaaacagtggaaggaggccggtccaggagcgcaaaaggcccaacgtccgagctagtcgcggattaaacgtgatcgtgctgaagccgttcgcttttcccacgcccgacatcctcaaacaccggagatag

SEQ ID NO: 24032 - DNA, 126 bp, Zea mays
  Peptide Sequence Number=SeqID_65811
atgtcgttgacgctgatggcctttgaggctttgactacgctctcctcgatgggggcagcagaaattgctgctgcttttcggttggaaaatgctcctactggctcctcacctgcttggccaacataa

SEQ ID NO: 24033 - DNA, 857 bp, Zea mays
  Peptide Sequence Number=SeqID_65812
ctctcatctgggagaaaaaacagctggcgctgttgattaacaacgaagccagccagcttcagcagagtccggctcggctgtcggctgcgagtcctgctcctgcaggaatggacaggcctgcgcaggcgcccacgcagctgccgccggggttccggttccaccctaccgacgaggagctggtcgtgctgtacctccgccggaaggccctggctcgcccgctgccggccgccgtcatccccgtcgtccacgacgtcgccaggctcgatccgtgggacgtcactggggcgagcgaaggggagggctacttcttcagcctgcggcgagcgccggcgaccggccgcaggaggagggctgggagcgggtactggaaggccacggggaaggagaagccggtgttcctgcagtgcggcggcgagcagaggcagctgctcgtgggcgtcaagacggcgctcgccttccaccgccgtgagccgccgccgccgtcgtcgcggacaggctgggtcatgcatgagtaccggctcgccgtgccccgcggcgtggccgaccagaggaagaagaatgcgagacatggctgcgttgctgagccaggggagtgggtcgtgtgccgggtcttcctgaagaacaggccgaaccgggacgccggcagcaaaactctgcgacacggcgcctccgctcggcggcggcggcggcagcagcagccggaagacgtgagaggacagcagccgttgccattctcggcgccacagccgtcgtcctccagctgtgttaccgacgtcaccgactgcttgtctgacgaagacgaagacgaagccagcagcggcagcacagcccgagctgcccctcaaagagaggcctaa

SEQ ID NO: 24034 - DNA, 293 bp, Zea mays
  Peptide Sequence Number=SeqID_65813
atgactatcgcaaccggccaacaggaaatttcagccgggcatccccaattcatcttccccacgccgcgtccgcgtccggaccggacaccggcggcacctcctcctgcctccacttcaccagttcatcgggcgccggaagtgggagccatccgccgccgccacatatctgtcctcttcggcgctgactggggctcagccgctcgaagctccatcccgcctcccgtcttcgccgccgctcgagcgacgatcggaggcgccgccatcgcacaatccaccgtcgctgcctgctcctg

SEQ ID NO: 24035 - DNA, 1623 bp, Zea mays
  Peptide Sequence Number=SeqID_65814
atggattccacagctcttcaatatgaaaaccaaaaattggtgcaacaactggaggtacagaagtccgaaatgcatgcattggagcgcaagttcaaggagcttagtgatgatcaatgttcttatgacaagactctgatttctttgaataaactgtggaatcagctgattgatgatttggttctgcttggagtacgggctggtggggatttggataatttgcaagcacttgaccatgaagagttatcagaagaatctttggagtcgtgtccttccgaggagatatttctcttaaggctcttgaagacaaacaacatcagagataatagtgacactagcttgttgaaatttgttgaagaagctcttgcttttcggtcttcagcaactgttactttgatgaagtccctgcaagagactatttcttcgcagcaagctagaagtgagtctttgtctttagctttgaatggacaaaagtcaaatgaagatgttattgttgcccttcgaaatcataatgattgcttgaaagaggtggcagagaatgcgagtcaagccatctctattatcaacgagaagcacaaaaggtatcttgatgagattgaggcttttaaaagcaaccattcaagggagctacaggaaatcaagcgtatttcagttcaactatcactaaaagaaggtggcccattcccaactgaagaagatgaattaccaggagaggctaaaacatcaagagaagagggcataccagaggaaggtgagctagaggaaagcattgcagagcttgaggaaagtcaaaggaagttggttgtgctccagttgcagaggcatggttctgtaatggatgcatctggggcaaatgctgtgaatggtggtatttctactcataaatcttcagataaaagtatgagctggcaagacctcaaagatgctgttgacgcagctaagatcctgtttggaactcctatcttctcagttttcatcttagtgaccctcgcaggaaaccgtctattagaactccatcagactcaagaggataatctgatactatccaaggagctgggagatcttgaggggcaattgaaagatgagaagtatgtcttggtatccaaaccgtacatgattcttaatgataaactacaacatttgaatgctgagatagagcgttatagagggttggttgaagttttacagaatgacaaggaccagctcatgcaaagggagaaagaaatttctgcaaaagcagaatcgctcgacagtgttaaacaaaccattatcacatatgagaaaaaaattgaagaactggaaactcaaattcagatactcttttctgaaaagaatgatctcgaaaccaaggttgaggagactttgcaagattcaggtaagaaagacttcaagaatgagattcatgttatggctgcagcactctccaatgaactgggtatgatggagaatcagttgagtcgatcaaaggatgcagcttctgaagcacttgcattgcgtgagcaagctgaatcattaagatcattggtagctaaaaagattgaggaacacaagaagatttcggataaatacaactcacaagtaattgagatcaagtccctcaaggcattggtggtgctaaactgctaa

SEQ ID NO: 24036 - DNA, 502 bp, Zea mays
  Peptide Sequence Number=SeqID_65815
agcactggcgagttgcgactaccacatgcaacaaaggcagaggcgcatagctggcgtggagggaggtggaagcgcaactgcagggggaggaagaagcacaggcaggcgagcaaaggaagaagcgcaggggaggaagaagcgcaaacgcaaggggaggaagaattacaggcgggcgggcagaggaagacgcacgggggaggaagaagcgcaggccggagctcggagatgcaggtcggcgggtggatctcagagatgcaggccggaccaccggatggaggcggaggagcagctggatggaggcagcggcgcggccaacgccgaattccaagcgcccgccttgccaacctccaacgccatggcgacgccttccctgctgtggcgacgccatacgagcagaggatacggcggtcacgacgccgtgatctggatagtgccgcgacgccaagcaggagcctcggctcttcagggcctgcttggccacctcttatctgttggagtctag

SEQ ID NO: 24037 - DNA, 1449 bp, Zea mays
  Peptide Sequence Number=SeqID_65816
atgttcttcgatgggtcgttgatgaagacaggagcaggcgcaggcctgctcttcatctcgcccctcggaaagcacctacgctacgtgctacgcctccatttcccggcgtccaacaatgtggctgagtacgaggctctggtcaacgggttgcgcatcgccattgagctaggggtccgacgcctcgacgctcgtggtgactcgcaactcgtcatcgaccaagtcatgaagaactcccactgccacgacccgaagatggaagcctactgcgacgaggttcggcgcctggaagacaagttctacgggctcaagctcaaccacatcgcccgacgctacaacgagactgcggacgagctggctaaaatagcctcggggcgaacaacggttcccctggacgtcttctcccgagacctgcatcaaccctccgtcaagaccgacgacacgcccgagcccgagaaggcctcggtcgagcctgaggcaccctcggctcagtccgaggcaccctcggctcggcccgaggcaccctcggttcggcccgaggtaccctcggcccccgagggtttctactggccgacggcggtggccgacgccactagaattgtccgcacctacgaagggtgtcagttctacgcaaggcagacccacctacccgctcaggccctgcagacgatacccatcacctggccttttgctgtgtggggtctggacctcgtcggccccttgcagaaggcacccgggggctacacgcacctgttggtcgccatcgacaaattctccaagtggatcgaggtccgacccctaaacagcatcaggtccgaacaggcggtggcgttcttcaccaacatcatccatcgctttggggtcccgaactccatcgtcaccgacaacggcacccagttcaccggtagaaagttcctggacttctgcgaggatcaccacatccaggtggactgggcagctgtggctcaccccatgacgaatgggcaggtagagcgtgccaacaacatgattctacaaggactcaagcctcggatctacaacaacctcgacaagttcggcaagcgatggatgaaggaactcccctcggtggtctggagtctgaggacaacgccgagccgagccacgggcttcacgccgttctttctagtgtatggggtcgaggccatcttgcccacagacttagaatacggttccccgaggacgagggcctacgccgaccaaagcaatcaagctaatcgagaagactcactggaccagctggaagagtctcgggacatggctttactacactcggcgcggtaccagcagtccctgcgacgctaccacgcccgaggggttcggtcccgagacctccaggtgggcgacctggtgcttcggctgcgacaagacgcccgagggcggcataagctcacgccccctaggaagggtcgttcgtcatcgccaaagttctga

SEQ ID NO: 24038 - DNA, 252 bp, Zea mays
  Peptide Sequence Number=SeqID_65817
atggaaagggatgagggagagaggagcagggaggacgctcggccatgggagacagagaaggagcacgcgctggaagatgaggagctgcggccgggcgctgggaggagtagagggaagggcggccggcgccatgggaaagggcagaaggaggggcgcgcgtgggagcaccagggcgcgcggatgccagagcgcgcgactgggggagaagatgaagacggcgaccagatttttccttgctatgtgagcggatga

SEQ ID NO: 24039 - DNA, 342 bp, Zea mays
  Peptide Sequence Number=SeqID_65818
atggccgtcgacctccagctcgccctgccgccctctctgcagatggcgtgctccatctccctatcatgttgccctacttttcctgcagcaagcatgccactcttgcttccccatggcgccaaagtcaccagccctctcccatggacgtcgctccctttcctgcagcaggccagtgcccctctgctcctttttcgccatggctgcacacctatctgtagcagctcctcgctgccgaacatcctcctgtatccctacaccatccgcacccatatggtgtttgacaaaatgcccaagtggagtgtcgtgtcatggacaaccctattagcgtcgtcggatgtttga

SEQ ID NO: 24040 - DNA, 135 bp, Zea mays
  Peptide Sequence Number=SeqID_65819
atgggtgagggagctatacggatcgtggtcattggatcctggatgaagagtgcagatgagatcccagaaaatggagaaccacccgagaaaacagtgctaccacaagggtggcatgggacgcccttggctgactaa

SEQ ID NO: 24041 - DNA, 492 bp, Zea mays
  Peptide Sequence Number=SeqID_65820
atggcggtggcaggcgggcaggagcaacggtcacatcgccagtcaagcctacgtcccatccgggggcaacgagagaaccctctctcacggcgtgaagacaacgcgcctgtgttccgttcctcgaacggctcgcgcacgcgcaacggccgccccgccaaccactcgccccgtcgcattaactccgcggcgggacaggcgcagggaccgggaaagggggataccccgaaaaggatccttccccgtgaaggaaccaggctccgagcctccctactgatcagaggttcgaaggctggcccctcggaagggttcgacagccgcctcagatcgcgtgggccctacaaccactactggtcagaggttcgaaggtcggcccctcggaagggttcaacggccgcctcaggctactcgggctccacgcccactactgatcaggggttcgaaggctggcccccgaatggttcacagccgcctcagacacagagcgagggatga

SEQ ID NO: 24042 - DNA, 526 bp, Zea mays
  Peptide Sequence Number=SeqID_65821
acaaaaagctaataccgttggggctcattatcctcatgagcataggattagccaatgctgttagggtggttagatactctaatgccgatggtactggcacaggacagggagaaggtggtggatatgtgaatggcggaggatcaggatctgggtctggcaccggatcaggtgatagtggtccttatgtcaaggagggtattctggttatggagaatcttctagtgctggtggtaccggtgggggtggagctggaggacaagctggaggcgcatggaattccaatgctcaaggatccggtagtggaactggttctggctctagctatgctaacaggtattggtatggatcaaaatgaagcaggtgcaagtgctaatggcaatggtggtggcacaggaaatagtcaaaacggtggaggtggtggtggctcaggtgctggatctggaccgttgggtctcggggtgaacggcggggatcaggcggccggcttcgacccgttcctccagccaccaaaggcggcatcgcccgg

SEQ ID NO: 24043 - DNA, 1071 bp, Zea mays
  Peptide Sequence Number=SeqID_65822
ggctcggactcgggctaaggccctggaagacggcgaactccgctccgcccgacccagggctcggactcgggctaaggccccggaagacggcgaactccgctccgcccgacccagggctcggactcgggctaaggccccggaagacggcgaactccgctccgcccgacccagggctcggactcgggctaaggccctggaagaaggcgaacaccgctccgcccgacccagggctcggactcgggctaaggccccggaagacggcgaactccgctccgcccgacccagggctcggactcgggctaggccccagaagacgacgaactccgcttcgcccgaccccatggggtcggactcgggttattacccggaagaaggcgaactccgctccgcccgaccccagggctcgaactcgggctaagacccgggggtcggaactccgccctgggcctcggtcggaacgactttccgcctcgcccgaaccccttgggctcgggatcggccacggcaacagaagggtggactcaacctcagcttcggaggaaccccgcacgtcgccctgcttagaggcacagaccgccacgtcaacaggaggcgccatcatcatcccaccccgaaccgagtcgggacgacgtcccctgggactcgaccgctccaacagctgtccctccatcaggctccgccgcacctccgacggccacgacatcacgccagcaggatgcccagatctctccggctgccacattggcatggccttcttagagaaggttggccgcgcggggacgaggatggggcaggcgctctcttggggccgctcgcttctctcacccgcgtggacgcttgtaaccccctactgcaagcgcacccgacctgggcgcgggtcgaacacgaaggccgcgggattcccacctctctcacgactcgtctccggccacctcgcttttccccccttcgcgctcgcccacgcgctcgacccatctgggctggggcacgcggcacactcactcgtcggcttagggaccccccggtctcgaaacgccgacaagtatttctattttgaggcctacacatcag

SEQ ID NO: 24044 - DNA, 306 bp, Zea mays
  Peptide Sequence Number=SeqID_65823
atgactctgggaggttggggagggtctggagaactcggtggtgagggccaaaccgcggtgaaagcatcggaggtcggaaatccacggctcaacggcaacgctagcagctccaacgagcatttgcgtagggcagagcgcgagggaggaaaccggaggggcaggggaggttccttacctcatggcgagactcgggatcccctcgaaggcggcaacaacatggcgatgacttggaacgacaacggagactcccgagctgctcgaggaacatcggttgagcgtgggcatgtgggaaacggtgacacctaa

SEQ ID NO: 24045 - DNA, 606 bp, Zea mays
  Peptide Sequence Number=SeqID_65824
atggccgctctccactgctcggcgtacttgcatctacaggagcccacccagcccctctctctagtgagctcaacctggcactgggctctggctgtcagctatgtcaccagggttgtcctcctccgctgccactcgttggaccttgaccctgctgcgcagccgaaagctccccgcgccctctcctccctagcgctcgtccttggctcccatgaacgagcttgtcctagtgttatccctctccaactctatgacaccaacgccctcaagtcctatgacgacgcccccatcccctcccatctccttccccatgccaagtcccatggttgctgtcctccagccccatgctgtaacgcgccccacagggaagaggctgagcgcagaccaggcagaaaagttgaggaaaggggaaaccaccgcgtgttcccggtgcgccaagctcaggcgaagctcaccgtggccaaagcgctggcaaaagtccagcggcgacggcagaactgcaaagcgatagcgagggaaggcggcactacggcaggtgagtgcgagggcaggggaagcgcgaatgtgaggcaggggcgagctgagggagtgtgcggggtctttacctag

SEQ ID NO: 24046 - DNA, 225 bp, Zea mays
  Peptide Sequence Number=SeqID_65825
atgaacagacaccaagtctgttgcggcgacgttgaagatgaccctggacagtggggtccatttgtctgtgaagcacaggacgtgtgttctgggtgggaagcggctgacgatgtgggtcatgatgccatcttggtcttctccatccgggtttgggacaagaggctaagatacatctgttatgtaggtcaagttgttgggtatggccgagttgatctaggtcactag

SEQ ID NO: 24047 - DNA, 273 bp, Zea mays
  Peptide Sequence Number=SeqID_65826
atgcagagtttgctcatctttacccacaagtcatgttacccattggctaagggatcggggaggaacctccccagcatggtgcccagcgacgaagaaattgacgccgaaatgtgcggcgacatcatgaagccggagaacgggatccggcgcaacccgtatctcaggacaaagcctcggaagtgggggaagctcctgatgaatgagtacatcgagaaagacgcaactcccgccaccgagatcgccgacaggctcaggagcgagagcgagaactag

SEQ ID NO: 24048 - DNA, 231 bp, Zea mays
  Peptide Sequence Number=SeqID_65827
atggccggcgagcacgcgcgcgcagcaacgaatggacaccagggcgcgcgcacagggaacttcggctgggcgcgaacagggaggaattccaaggggaaatcgccatgggagcaggggaaacaggggcagcgacgacaggacgccatggccgatgaaggctctgcgcggccaacagagggacctcgcgagcagccatggaagctggggcgatccagggacacggtccgatga

SEQ ID NO: 24049 - DNA, 714 bp, Zea mays
  Peptide Sequence Number=SeqID_65828
atgacgggggagaagaagatgttcacctcctacgtcaagaacaaagattcccaagactcaatcatattcggtgacgggaatcaaggcaaggttaaaggactaggaaaaatagctatttcttccgagcattctatctctaatgtgtttttagttgaatcgctcggaagaagtgatggttcattagcttttaagggtgtattagacaacaaactttatttagttgattttgcaaaagaggaggccggtctagatgcatgcttaattgctaagactagcatgggctggttatggcatcgtcgtctagcacatgtggggatgaagaaccttcacaaacttctaaagggagaacatgtgataggtctaacaaatgtgcatttcgaaaaagatagaccttgtgcagcttgtcaagcaggtaaacaagtgggaagtatgcatcacagcaagaatgtgatgaccacatcaagacccctggagctgctgcatatggacctcttcggacccgtcgcctacctcagcattaggggaagtaagtatggtttagtaattgttgatgatttttcctgcttcacttggcgcttcctaaggagagctcaaaatgagtttgagctcaaggtgaagaagataaggagcgacaacgggtcagagttcaagaatcttcaagtagaagagtaccttgaggaggaaggaatcaagcacgagttctccgctccctag

SEQ ID NO: 24050 - DNA, 564 bp, Zea mays
  Peptide Sequence Number=SeqID_65829
atgtcgaggaggaagaccagggagcccaaggaggagaacgtcacccttggacccactgtccgtgaaggagagtatgtctttggtgttgctcacatctttgcatccttcaatgacaccttcattcatatcactgatttgtctgggagggaaactctggttcggatcaccggtggcatgaaggtgaaggctgaccgtgacgagtcgtcaccttacgctgctatgcttgctgctcaagatgtcgcacagcgctgcaaggagcttggcattactgcactgcacattaagcttcgtgccaccggaggcaacaagaccaagacccctggacctggtgcccagtctgccctcagggcgcttgctcgttccgggatgaaaatcggacgcattggtaaggagatcctggatctttcaagggctggcttgcctgtgctagttagccctgctttgtttcataatgctttggttctgtatactgatgcagcgtttgtgctatgtgcagaggacgttaccccggtccccacggacagcactcgcagaaagggcggtaggaggggaaggaggctgtag

SEQ ID NO: 24051 - DNA, 396 bp, Zea mays
  Peptide Sequence Number=SeqID_65830
atggagcgcgaaggggggaaacaaggagacatgcgtaaaggggaaacccgcgaccttcgtgtttgtcccgcgcccagtctgagccctaggtcgggcgaggcggaggctcctccgaggtcgaggtcgagtctgtcttccgaggtcgaggtcaagtccgagccccagagttcatcgtcttccggggccgaggccgggtccgagccctggggtcgggcgaggcggagcttcctatggcgcccgaggccggacttggctgctgttcgcctcactctatcgagcggcacagcagtcagagcgacgcaggcggcgctgtcctcttgtcaggtcggtcagtggagcgacgaagtgactgcggtcacttcggctctgtcgactgaggggcgcgtgtcaagataa

SEQ ID NO: 24052 - DNA, 702 bp, Zea mays
  Peptide Sequence Number=SeqID_65831
atgtggggtcttcgcaatttcgatcatctgggcctcaaagcctttgatgaccttcgccttggctcatcggagcaaagggagagcttgagccttcgcatgggcatcgtcctcgggcctggctcgcggggccttcgatctgtgtcgaggaggaagaccagggagcccaaggaggagaacgtcacccttggacccactgtccgtgaaggagagtatgtctttggtgtcgctcacatctttgcatccttcaatgacaccttcattcatatcactgatttgtctgggagggaaactctggttcggatcaccggtggcatgaaggtgaaggctgaccgtgacgagtcgtcaccttacgctgctatgcttgctgctcaagacgtcgcacagcgctgcaaggagcttggcattactgcactgcacattaagcttcgtgccaccggaggcaacaagaccaagacccccggacctggtgcccagtctgccctcagggcgcttgctcgttctgggatgaaaatcggacgcattggtaaggagatcctggatctttcaagggctggctggcctgtgctggttagccctgctttgtttcataatgctttggttctctatactgatgccgcgtttgtgctatgtgcagaggacgttaccccggtccccacggacagcactcgcagaaagggcggtaggaggggaaggaggctgtag

SEQ ID NO: 24053 - DNA, 948 bp, Zea mays
  Peptide Sequence Number=SeqID_65832
atgtccgccgcggccgatgaccgcgcgcgccgcgccgccgcgttccgccccgccccgctccctccgcctgcgcagaagcagcagctctccggcgtggccgccgccgtgctcgacgccgggggacgcctgggccgcgccgtgggcgacgtcttccgccgcctccgcatcgacgacaccttctactccggcggcggcggcggcggcggcggcgcgccgaatcggagctggcgcgacgccgggaacaatggcgggaggccggcggccgccggagccccggctgcggccagcagggaggaggccacaggcggcggcgcctcctccgggcggttcgcgcgggcgcaggggagcatgaacctgtcggcgacgtacgacagcaggacgcacgacgtggagagctcggtggtggccagaggcgacctgtggcgcgcggaggcgtcgcacagcagcagcagcagcgccggcgccggcggcaatggagccaataacaacctgttcctcgtgcagctcggtcctgtcctcttcgtccgcgacacgacgctactcttcccggtgcacctctccaagcggcacctcatctggtacggattcgagcgcaagtcgttcatggacatgcaattcccaaacgggcaactgaggtacgtcgccggcgacggcttcacggcgcgtgctttcctgcccctccgtggcggggtcttgcaagcccacggaaagttcccgggggagaagaggctcagcttctctttcaaggttaggctaggcatatatgcagccgacgatcgatgcttcattgcagcaggaaatgtcttcacttcgccgcacagcacacttacgtcttcagttgcttgcagaacaggaatggcggcagcgtcgtcccgatggttcagtggccggataagtcactctcggtgggggtcgtccaggcgttgtcttggaggagatccggcctga

SEQ ID NO: 24054 - DNA, 312 bp, Zea mays
  Peptide Sequence Number=SeqID_65833
atggcgaaggccttgggttttgccgacaagctatcgtcgcccgttgggtcgaagaccccttcgcttgtcctcggcgaggaccccttctcatgtggactgagccgagggccccttcgcctgagggcctgtgtatgtcatggcaacggcaagacagtggggaatcagaactcgatgccgctgttcatctggaccgagaaccatggccggccaaaaccgtggagtagtggagcgtctactctgaacgctaaccctgaccttgccgctccgccgttcagcttcgaccttccgatctgcgacgacacccaaagatga

SEQ ID NO: 24055 - DNA, 123 bp, Zea mays
  Peptide Sequence Number=SeqID_65834
atgaatgtgtcgcggttcatggacaagcagatccagagccgtgtcgcctccgtctctgcagatgcagtccccaatacgagattttggaaacaaaattttagcaatctcttgaagatgctctaa

SEQ ID NO: 24056 - DNA, 1035 bp, Zea mays
  Peptide Sequence Number=SeqID_65835
atgcaggcaggaggcagcagaggaagaaggtcgcgggatgtgcagcacagggaggccgcgcgactgggagacgaggagaggaaatctcccgctgacttttcccgtgtccgtgtcgtgttgcctgcgtccgccgttggccagccgcgacccgtcggcatctcctctcgggtctcctcacccgcgcgggagcgggtggttgctgcggcggttgacgacttgacgtttagtagtagagagggacccggccggcagttaaagccgacgcgagagaaccgaggcgagaggggatatggggaaccaggtcgggggccggcggcggacgagcgctacacgcgcccgcaggggctgtacccgcacccggacatcgacctcaggaagctccgccgcctcatcctcgaggccaagctcgcgccctgccaccctggcgccgacgacgcgcgcgctgacctcgacgagtgccccatctgcttcctgttctaccccagccttaaccgctccaagtgctgcgccaaggggatttgcacggagtgcttcctccagatgaagtcccccacctcgtgcaggccgacgcagtgtccatattgcaagacgctgaattacgcagtggagtaccgcggcgtgaagaccatggaggagaagggcatagagcagcttgaggagcagagggtcatcgaggcgcagatcaggatgcggcggcaggagctacaggacgatgcagagcggatgaagaacaagcaggctgcgcctttgagtgacgtagtagcatctgcacaagttgattcttgcagtactgacggtgcatcaacagtagctgcaagcagtccgcgaggcaacgatgctctctcgtccgaagtgcagcgttcggagttgatattgaggaattctgaagtcttccaacagaggaggggaaataattttgatgtggatcttgaagaagtaatgcttatggaggcaatttggctctctgtacaacgtggtggggacgctgagaacccgaacgtcaccggcggcgacaggctcgcggacgaagtgtag

SEQ ID NO: 24057 - DNA, 1029 bp, Zea mays
  Peptide Sequence Number=SeqID_65836
atgtcgcgggaggataatgtttacatggccaagctggctgagcaagcagaacggtacgaggaaatggttgagtacatggagaaggtggctaagaccgtagatgtggaagagctcaccgttgaggagcgaaacctcttatctgttgcctacaagaacgtaattggggcccgccatgcctcatggcgcattatctcctccattgagcataaggaggagtcccgtaagaatgaggaacatgttattcagatcacggagtaccgtggcaagattgaggctgaattgagcaacatttgtgatggtatcctgaagttgatcgactctcaccttgtgccttcctccactgctacagagtcgaaggtgttttacctcaagatgaagggagattatcacaggtaccttgctgagtttaagactggtgctgagaggaaggaagctgcagagagtacaatgatagcttataaggcagctcaggatattgcgttggtggaactggcatctactcatcccataagacttggacttgcacttaacttctcagttttctattacgagattctgaactctccagacaaagcttgcaaccttgccaggcaggtgtttgatgaggctatttctcagttggatacgcttggcgaggattcatacaaagatagcaccttaatcatgcagctcctgagggacaacttaaccctatggtccgctgacagcacaacggaggacggcatcgaggagggcaatgaggcctcgaagggtgatgctggtgaggtccactgtgttggaaaccatgttctaatagaaggcgtctcccgctccatgcattccaagattctgtcctccccctccctcacccatgttgctacggttggcagtgataagccatccaatatacaaatgaagactagatctgctgttaggaaggttcctgtcagcagagtaatttcaaaaatcaaatcaaaaggcaaagcagttgttccaatttctgatgatgacagcgattttccaactccactacaggtgaagggaaaatag

SEQ ID NO: 24058 - DNA, 288 bp, Zea mays
  Peptide Sequence Number=SeqID_65837
atgggccacatggcgacaccggacctcttcctgaacggtgagcgagggccaagagtgcacgttggcttgaagctttgggaccctcttggcgggggcctagaaggtatacgaggaggttcaggaacctcttgtgggggtccggacgatacacgtggcggtctgggaccacctaaggggtccgaacggcatatttgcctgggagacgatggcctagaactcccacgaacttatcatggcatcattcatgctcctcatcttgcagtacctatccttgacctaggggtgtga

SEQ ID NO: 24059 - DNA, 312 bp, Zea mays
  Peptide Sequence Number=SeqID_65838
atggcgggcggatcgttggagctcggctccgttcttccctcgccctacatgaagcctcagccgccgcacccacgatccttttgtcagatccactgcctgcgcctagccgagagcgacgggaggggttcagggaagctgaccgtgtcctcgaggcgggccctgcgtcttcacggcgtgagaaatttctcggtggacggcaaggaaagcgccgcgtcgcacgtcgtcgcggagttcttcaccttcatcgacgttttcggtgagaacctcccctctggtttcgctttggtctctgcgccgcgtaggttaaattaa

SEQ ID NO: 24060 - DNA, 369 bp, Zea mays
  Peptide Sequence Number=SeqID_65839
atggccgcgcgcaggggcgccgagggggctgcgcacaggggcgccgaggtggccgcaccgggggccgagagagccacgccgggggccaagggggccgcgtcgccggaggccgagggagccgcgccggggggggcgaggggagccgtgccaccgggggctgagggagctgcgctcgagggccaggacgaccacgccaccggggctgggagccgcgcgcaggggagagtcgcgccgacaggggcgcgcacgcaggggagaggagggagggacgcgcacagggaagaggggaatggggtggaaggggaagagagagagagaggaagaggggaggggggaaagctcatttcggggatccaaatccggcgataa

SEQ ID NO: 24061 - DNA, 780 bp, Zea mays
  Peptide Sequence Number=SeqID_65840
atggagctgtttcccaacgggggcttcgtgcggctgcgcagccgtgcgcgggacaagtacgtccacgccgacgcggacgcgagcggggtctccctgcgcccgctcggcgccgcgccctctgtgaacgcggtgtggaaaccggagcattggcccggcgaagaggacatcttcctcctccagggcgccgcctacggccggtacctcgcggtctcggaccaggatgcgccgcccggccaccgcggcgtccgcgccgtccagcgcgactacaactcgccgcacgtggatgctcccttcatgtggacggcctttagggtggatgccgaccagaactacgtccgcttgcacaaccaccagcgctggctccgcgccaacggcaggcaccgctactggaacaacgtcgtcaccgtcgataccaggaacggcagcctgaccacgatgatgcagtggagggttgaggccatcccagtgagcccgcagccgctaccccttctgcctccacctcaacaacctacgatggacgatgatgggtttattcatgacaagcctgaattcaacttcaacgactactccgtgtccaacctgaggaccgagctggcgctccgtcagggtgacgagaacatcacgttgtgcctgcgggccggcatatatgcgctcgcaatcccgcttatcacagacctgcctcataacacagatcccctggacatcatagtggtcaccaccggatcaccaggttttgagatgttagaatacccacagtttgatgagccaccagaaccgtaa

SEQ ID NO: 24062 - DNA, 384 bp, Zea mays
  Peptide Sequence Number=SeqID_65841
atgtcgtctggtggtgtgaaagatttttaccggcagaaaaagaaaggaggcgtggcgaagacagcttcatcctcaaagaataagacacggcattacactggtggggcttctgttggtgcctcagatgcagctcagacatcagctctagtttctcatggctcctgggatctcaaagatgactttggtgatgaagaagagcagctgcgacagtttgacgtggacatgaaccaccagctcatctccgggacctcctactgcacgcggcatcgacaaagaatcgcggtggcggtagcccctctgtcgagtgcctttgggaggcctcttgttgatgtatgttggcactcgtttgtttctccaaggcacgtgttcggtaacagtatatag

SEQ ID NO: 24063 - DNA, 669 bp, Zea mays
  Peptide Sequence Number=SeqID_65842
atggtgaagactgaagagcattattccttaccttcagcaaggaaaatttatggctaccagagtaattacctatggaagatctttcatcacgtcagcaaagtgtcatttccccataatttacatttacataatcaagttcttcaaaacaacgagcaacccactcatctaccaggccaacaacatcgatggacacctaacaccaacaacatcgatggacacctaacagtgttcgacaatgtttcagttcaaaataacaaagctcgggcgacggatctggatgctaggtcctccggacgacaaggtggcgagggggatgcaggatgcggcgacagctttattgagcagcggccacgcgaggacagaagagagaaggcggcggtggtgggcgagggcgagggggatgcaggatgcggcgacaactttattgagcagcggcctcgcgaggacaagagagagaaggcggcggtggtgggcgacagcctcgcgaggatgggagagcgaagctccggacgacgaggtgggcgagggcgagacgatgtaggacgcagcggtagcgttggtgggcggtggcctcacgaggacgggagagagaagacgctggtggtgggcagcagcctcgcgaggacgaaagagcgaagcgagcgttgggcttgtgcaccatcgcgttga

SEQ ID NO: 24064 - DNA, 654 bp, Zea mays
  Peptide Sequence Number=SeqID_65843
atgggaagctccgcctcgcccgacccagggttcggcccccgtctcagcctcggctccggaagacgacgaactccgcctcgcccgaccccagggctcggactcagcctcggctccggaagacgacgaactccgcctcgcccgacctcagggctcggactcagcctcggctccgaaagacgacgaactccgcctcgcccgaccccagggctcgaactcagcctcggctccggaagacgacgaactccgcctcgctcgaccccagggctcggactcaacctcgacctcggacgacgaactctgcctcgcctgaccccagggctcagactcagcctcggcctcggaagacggactcaacctcgacctcggcctcagaggagcctccgcctcgcccgacctagggctcggaccgaccacgtcacaggggggaccatcattaccctacccctagctagctcaggctacggggaacaaagatcagcgtcccatctggctcgccccggtaaacaaataatgatggcgccccgtgtgctccgtgatgacggtggctctcagccccttacggaagcaaggagacgtcagcaaggattcgacatccccgatagctgtccttccacagggctccagctctcctccgacgaccacgacatcacatga

SEQ ID NO: 24065 - DNA, 1383 bp, Zea mays
  Peptide Sequence Number=SeqID_65844
atgaaagagtccgaccagctcgcgacttctttcatcacaccttttggcatgtactgctacgttactatgtcatttggtttgaggaatgcgggtgctacgtaccaaaggtgcatgaaccacgtgttcgacgaacacattggtcgaacggtcgagtcttacgtcgatgacatcgtagtcaagacgaggaaagcctctaacctcctctctgaccttgaaacgacatttcggtgtctcaaggcgaaaggcgtaaaattcaatcccgagaagtgtgtcttcggagtcctccgaggcatgctcttggggttcatcgtctccgagcggggcatcgaggccaacccggagaaaattgcggccatcaccaacatggggcccatcaaggacttgaaaggcgtacagagggtcatgggatgccttgtggctctgagccgtttcatctcacgcctcggcgaaagaggcctacctctgtaccgcctcttaagaaagaccgagtgcttcacttggacccctgaggccgaggaagccctcgggaacctgaaggcgctccttatgaacgtgcccatcttggtgccccccgctgccggagaagccctcttgatctatgtcgctgctaccactcaggtggtcagcgccgcgatcgtggttgagagacgagaagaagggcatgcattgcccatccagaggccggtctacttcatcagtgaggtactgtccgagaccaagatccgctacccacaaattcagaagctactgtacgcggtgattctgacgcggcggaagttgcgacactactttgagtctcatccggtgactgtggtgccatccttccccctaggggagatcatccagtgccgaggggcctcgggggcaggcgtgggcctgctcttcatctcgcccctcgagaagcacctcctctatgtgttgcgcctccatttcccggtgtccaacaacgtggctgagtacgaggctctggtcaacgggttgcgcatcgccatcgagctaggggtccaacgcctcgacgctcgcgatgactcacagcttgtcatcgaccaagttatgaagaactcccactgccgtgacccgaagatggaagcctactgcgatgaggttcggcgcctggaggacaagttctacgggctcgagctcaaccacatcgtccgacgatacaacgagactgcggacgagctggctaagatagcctcggggcggacaacggttcccccagatgtcttctcccgagacctacatcaaccctcagtcaagaccgacgacacgaccgatcccgagaaggtctcggctcagcccaaggcgccctcggcccccgagggtgaggcactgcgcgttgaggaagagcggaatggggtcacgcctaatcgaaactggtag

SEQ ID NO: 24066 - DNA, 642 bp, Zea mays
  Peptide Sequence Number=SeqID_65845
atgagagtgttggttgaagttgaaggtcatgtgcaccagaacagtttgcaaactttgaatggcaaccagtcatctggatctttgcctgatgagattggttacctgatgaactttaacagattacaaataaaagataacaacatatcaggcccatacttaaactcttttgccaacttaataagaattaaacatctccttgttgataacaataatttatttgggcctcttccaccagaattagtagatacacgtagtcttcttgctatcttgactcaatgcttttttaatgagttatcttcagttcaatgtgatttattcattgtttttacacttgagcaggttctaggtgacaaggaccgaacacccaaaaagcacgccagcctcctcctccagctcctgttcgagatggtggtggcttcatgtttggaggaatcagtgccattgcacacagggaacatgactgttgacactatattgggtcctcggaccattcagcatgagactgttgtctcagaagctgctgctgccaccccggctgctccagcgatcaatgttgatgcttgcagcatccattctaaggctttccaatattgtaacgttgacatgttggacgagtgtcgtggtggtggtgtgtctgcctaa

SEQ ID NO: 24067 - DNA, 486 bp, Zea mays
  Peptide Sequence Number=SeqID_65846
atggggcttgacccgacgaacagcgacgcggagagcaaagcgaggttgcggccgggtggactcggacacaagcacacgcagcgactacatcaagtccattatgcgcgcgtcacgatcaagctgaaaaagaattcggcgcgggagctcgacgcgcacagatttttgttttgttgctccacgcatgacgcgtggacagacggcaagcagggacgcgcggcaaaatcccgggcacaacatagggaaccggccacgacgagcatagagacacggctgcgcgtggcatgtgcgcagagagctcaaccgcgcgcggcgagagcgaaccgatggagcaacatcggccatccatggagcagcaccgggtgtcgaactaaggagcgcacagcgaaatccgagctggagctgtgcagcggccaacagagaaaagcaggggcgagcaggacgtgcaggggcgagctcggcgaagcgcgcctgcgcgtgagcgaatag

SEQ ID NO: 24068 - DNA, 132 bp, Zea mays
  Peptide Sequence Number=SeqID_65847
atggcgatgatggattcaacgtcggaaaagatgtacctctgccaggatccattattagtaagcatttttgcaaacagagtcttgattcttgataagccataccttgattcccaaaagccagcatatccttga

SEQ ID NO: 24069 - DNA, 144 bp, Zea mays
  Peptide Sequence Number=SeqID_65848
atggcggagcttaccgaggcaacatactcggtgagttcccaacggtggcggtggaacgggcgcgcggtcacagcaaacggcggcggaacttcctgcggcgcggcctcggcgtatgtcgtgggcacggagtccgacgacgcgtag

SEQ ID NO: 24070 - DNA, 435 bp, Zea mays
  Peptide Sequence Number=SeqID_65849
atggcggtcgtccaagttgcagagatgagggagagaggagtagggagggcgtcgtggttgggacagacgccatgggggagctcgccatggaagaaacccctgcatgcagatcagaggggggcaagctggagctgggcgacgccctggagaggggcagggagccgggaacaggaagcagggggacagatccgaccacggccaggagagtacgccagcgaggcttggtggaggagcaccgggcacggctcaaggaagaagaggcggggcgagcagggagataggagaagggtggccggtgctgctagggaaaaatttcagagagaaaagaatacgtgggtgagggaaagagataagggagatgacaacttcaagagatttccacgaccgtggaggataaaggaacaagctagacggtggatgaagctaacttcctag

SEQ ID NO: 24071 - DNA, 408 bp, Zea mays
  Peptide Sequence Number=SeqID_65850
atgaacaagatgtgtgccaacaaggacaaattacctacgatgatcatgagagagcgcacatgctacttcatgctctggatcaaagggtttgggagaggcgcaagggaaatcgagagtacacctccagcaagtacaaatccaagggggatccatggggcgcttggtgatgatgcgatgggcaatgacgaccaagacatcggtgacaactcttcttctaatgacggaggcctggagaacatatggttcatggattctggttgttcgtgtcacatgaccggaagcaaaaaaatggttctcagcctctaccctatgatttgtaaggaatacatcacattcggggataagtcgagagagaaagtcgacgttctcacatcaggttatattcccagaacatatgtaaggaactag

SEQ ID NO: 24072 - DNA, 558 bp, Zea mays
  Peptide Sequence Number=SeqID_65851
atggccggtgtgcggccaactggtgattccggcccaaacctaactaagttggtgatgctacgcgaccctgtgcatgcggcggaaacaactgaggacttaccagcgttagttatggcgcccaaaaggttgcccacggcgatgggcaacattgcagccgtgatgaacaacgatgagcaattagggcgcaatcgaggccccacggaatcaatcgcaccccttaacacaaaccctagggcacatcaaacaccccagcaaagcttggaggcccaggtggcggccgaactccgacatccccatggcggcaagctttctctccctctcggtggcgctgctgcgaggcgaaacgagttgtggctcaaggtagaaggcgatagggatgtggcacgggttttatacccaggagacgaggggaatatccctccagcctcccgaaaagcgcgcgcagatatctcggttttctgttgcggcattaccgcaaacacgagtggtgcgcgatggtgctccagcctaatgcgagggaaggggcaaacctgtcgacgcggccccacacgacagtaa

SEQ ID NO: 24073 - DNA, 558 bp, Zea mays
  Peptide Sequence Number=SeqID_65852
atggccggtgtgcggccaactggtgattccggcccaaacctaactaagttggtgatgctacgcgaccctgtgcatgcggcggaaacaactgaggacttaccagcgttagttatggcgcccaaaaggttgcccacggcgatgggcaacattgcagccgtgatgaacaacgatgagcaattaaggcgcaatcgaggccccacggaatcaatcgcaccccttaacacaaaccctagggcacagcgaacaccccagcaaagcttggaggcccaggtggcgaccgaactccgacatccccatggcggcaagctttctctccctctcggtggcgctgctgcgaggcgaaacgagttgtggctcaaggtagaaggcgatagggatgtggcacgggttttatacccaggagacgaggggaatatccctccagcctcccgaaaagcgcgcgcagatatctcggttttctgttgcggcattaccgcaaacacgagtggtgcgcgatggtgctccagcctaatgcgagggaaggggcaaacctgtcgacgcggccccacacgacagtaa

SEQ ID NO: 24074 - DNA, 429 bp, Zea mays
  Peptide Sequence Number=SeqID_65853
atgcattatcatgaccagggcttaggaattctagacggtcactactttctagctaatgctgattatgttgctagatctagtatattacatccttatcaaggtgtaggatgtctgacaacaggcgtcaaggtgggaggcgtgttcaataggagcagcgtgcctagcaggaggaggaacccagcgacaacagctacctcccccgccacccccgaggacagtagagcagatgttcttgatgcaaacttaggtagtgtaggctattgggcggactctgacagccatgcaataatcttaacaacaacctcagccacaaccacaaatgcagatgccacaaatgccaagggacaaacgtgtcgagttcatgagaagtcaccccaatatttgcccactctgccgaccccatggacgccgaggacttgctgcacatag

SEQ ID NO: 24075 - DNA, 264 bp, Zea mays
  Peptide Sequence Number=SeqID_65854
atgggggcgtcgtcgggccagagaaggtgggggagccagataaaaaaggtggagccgacgcgaagttacttgcctgcccctggtgttttgcattatttgcaacatctctggctcccgaatcaagcacccaaaccctatcgcgccacactcgacttgaccgtcgcaatatctttccctgtgatagcctgtctccactcctacaagtgtcgacatatgctggtccaagggaaatttggcaaggaacaatcatctaggttgttgtaa

SEQ ID NO: 24076 - DNA, 1124 bp, Zea mays
  Peptide Sequence Number=SeqID_65855
gtatagaatccttttcaaaacttggtgattctatttactttgaggagaaaggagatccacctgcactcaatatcattcagtacataccaagcacttacaactggaaagcagctgggcttactgttactcagcaaatcaaaaccctcagctcttctgaccagtatcttcaaatttcattctccatttctgcaaacacaagcggtcagactgccaatataaattttagaattccgtcatggacatttgctgatggtgcaggagcaactttaaatggcaaagatttggggtctatatctccaggatctttcctatcaatcaccaaacagtggaactccgatgatcacttagcgctacactttccaatcaggttaaggacggaagcaattaaagactggaatatgcatccctttcaagcagtcctgtttgggccattttgttcttgctggcctatccactggttgactgggatgcaaagctggcacggcagtgctatttcagattgcatcgccgctgtccctccagcacacaactcacagctggtaaccttcacacaagtatccaacggaaaggcatttgtcctctcaagtgcaaatggcaccctgacgatgcaagagcgacctgaagtcgacggcaccgacgccgccatccatgcgacattcagggctcaccctcaggaggactcaacagagctgcatgacatctacagcacaaccttgacgggaacttccattctgctcgaaccattcgacttgccaggaaccgtgatcaccaacaacctcactctatctgcgcagaagagctccgattccctcttcaacatcgtgcccgggctcgatggaaaccctaactcggtctccctcgagctcgggaccaaaccaggatgcttcttggtgacgggcacgaactactccgcagggacgaggattgaagtcaactgcaagagttcccttgagagcattggcgggatactcgagcaggcggcgagcttttcgcaaactgacccattgaggcagtatcacccgatcagctttgtcgcgaagggggtggccaggaacttcctccttgagccattgtacagtttgagggacgaattctacacggtttacttcaacgtcagggtctga

SEQ ID NO: 24077 - DNA, 288 bp, Zea mays
  Peptide Sequence Number=SeqID_65856
atgagttccttggaggcgctgttggatcaccagaggaaggacgtcgtcaacaagaagggcgagccagaactctgccaggacgagaaacttgtcgatggtgtccttgacgccgccattatatccatgctgagccgagggagtccatccatcgaccatcgtcttgcctcccccattaccatcccaccgacagtgtcgctgatcggcggagcagcaagcatcgtcaacatggctcacgacgtcaaggttgcagacaatgaagctcaggtgatcttcctcctcctcctctag

SEQ ID NO: 24078 - DNA, 924 bp, Zea mays
  Peptide Sequence Number=SeqID_65857
atgaaagggggcttggccacggcggcgagcccggtggaaagggggtgccggggagggaggatggccaacgaaaaggtggagaccatcggcggcggcttcgagacccgagattggcggaggggccgccatggagaaggggcagcgggtgctgctgcgcggtggagcagtccggtggcggggaggagctctagcggcgcggtcaggagccgcagcagagggttgcggtggtacggggaggcgcaaactagcgacggtgcggccagccaggaggagcagctgcagggcgggttggaggcgcgtgcgcagaagatggtggcacggatccgagcggcggggaggcgtgcgcagtctggcggcggcattccaagtgacagcggtgcggatccgaagcggtacggcagtggcggcacggatccaggcagcagtggccaggcaacatgtaggatggaggataggaatgtcatggcggcctgtggtccctgtacacaaggggaagtgactagggctcattctgtgcaggagcagatgtggaatgtgcaatggaagacgctgtcagctagaaaagttagtgcagctagaggggctgcctcggtccctgaagaagttttccacagagccaaaggagtgcagctatgcaacatacaggcataccagtgcactcctgcattttttgctgattcatacccactcaaccagttctcctcagaagtcatcgctagccggctgccagttccaccatctgcaagggttatttccgagagacacatcatttcagttgtgcctgtaacccgtgtcacaatggcgcgtcgcaagcagtcatttagcttctatgtcgttggctacagcagggatgtgttcataagagactatccttcgaagttttgctggggcctctgctgctgcttcgagtggctggggaaatag

SEQ ID NO: 24079 - DNA, 141 bp, Zea mays
  Peptide Sequence Number=SeqID_65858
atgtcagcgaccgatcaccaggcgagcgcgcggtcagaggggctgcaagcgggacccgcaggtaagcgcgtgcgcgagcgtgagaaaggtgctgcgtgggccgcgcgggtggagttcggtattgggccgacgcgtgagtga

SEQ ID NO: 24080 - DNA, 837 bp, Zea mays
  Peptide Sequence Number=SeqID_65859
atggcgtcgaacaacctcctcgtcgacttgaagcgctgcttctcggcgccgtcgctccgttcctacctcgccgagttcatctccaccttcctcttcgtgttcaccgccgtcggctcagccatctccgcccggatgctggcgacgccggacgttaccagcagcgcctggcccctggtggccaccgccgtcgcgcaggcgttcgggctcttcgccgcggtgctcatcgccgccgacgtctccggcggccacgtcaaccctgccgtcacgttcgcgtacgccatcggcggccgcatcggcgtcccgagagccatcttctactgggcgtcgcaactgctcggcgccaccttcgcatgcctctccctcaacctcttatccgccggcgaggcatgtgcatgtcttcgtaaccgctctcgcttcctacctgcaaactacactgtcgaggtgccgacgacgaggatcgcggtggcgatgaccgggttcggtggcgcggtgctggagggcgtgctcacgttcctgctggtgtacacggtgcacgtggtcggggagcgcgagcctcgctcgcgcggcggcgacggcaagcgggagttcgcggccacggcgctgggcgcgctggctgttgggctcacgcagggcgcgttcgtgcttgccgcgggcgcgctgacgggcgcgtccatgaacccggcacgctcgttcgggccggccgtcgtcagcggccacttcaagaaccaggccgtgtactgggccggcccgatggtcggcgcggccgtcgccgcgctggtgtaccagatcatggcgtgcccgagcgtgacagggaacgtggaggcggtggtcgtttga

SEQ ID NO: 24081 - DNA, 1515 bp, Zea mays
  Peptide Sequence Number=SeqID_65860
atggcgggttggtgcgaggaggcggtggcgttgctgcagcgccccgcggcggcggagatggccgtcgacgtgctgctctgcgcggtgccgatctgggccgctgtcatgatcggcctcgtcgtcggctggtcctggcgcccgcgctggacggggctgctcttcctcggcctccgcacccgcctccgcatcatctggctgccgcccggcctcggggcccggcggctctggttcgcctgcactgcgctctccgcctgctccgtcgcgcccaggctcctctcctccgcattccgccgctgcagaggtaagcaacaggacaaggcctcccctgaggatactgctgctgtggctcgggacggcggaggttgcgccgatggcaggacaaattttgagggtgaacatgatactgtcactgagaaggacctagaacttctccttcaacttttagataataaggaaagcggggatacagcttggcagaatttgatggagcgtacaacctccaacatgacctacaaggcctggcggcgtgagcctgaggagggacctataatgtactgcagccgcactatttttgaggatgctacacctgaactggttagagatttcttctgggatggtgattttcgtctaaagtgggatcccatgcttgcatactccaaatctttggatgagttccctcagaatggagcaacaattgtccactggataaaaaagttcccattcttttgcagtgaccgtgaatacatctttggaggacgcatatgggaatctgggaagacttactattgtgttacaaagatgcctcgcaggagctactcacctgcaccagagctgcctgggaaaaggccgcgcgtcgtggccgctgccggggcagggacacggacccgggccttgcccatgccggggtgggggcaccggcaagtggttgatttcgtggactttccgaactccatagcagatgaaagcagggagaaggctactgtgaaatttggactgggtgttccatatccatcattgcccaagaaagaaaaaccaaggcgtgtggagttgtacttctcaagttggcgtattagagctgttcaatcgcctaaacatgtgggtcagcaatctgcgtgcgaagtaactttggttcactatgaggacatgggcataccaaaagatgtagccagggttgctgttcgccacggcatgtggggtgctgtgaagaaacttcagtctgggttcagagcgtaccagcaaatgagagacacagaaaataccctgtcacacagcgccattatggctcgaatgaccaccagggtatccatcacggcttcgaatggtggcttagaccatgacctctccatcgccgataaaatcagtggcgagaatgacagctcccatgcagttcagcatggttttgactggaagtgggtggtttttggtggtgcggtggctgcggtttgtgtgctcaacaccggactggtaggcaaggtcctgttgcttggagcagcgagacggcaggcaaagaagtga

SEQ ID NO: 24082 - DNA, 765 bp, Zea mays
  Peptide Sequence Number=SeqID_65861
atggcgccccgcacgctctgtgacgacggcggctctcagcccccttacggaagcaagaggacggccctcttacagaaggttggccgcgcggggaaggacgggacaggcgctcgcgtgaggccgctcgctccctcccgcgtggacgcttggttcctggctgaccgccatcgcagcaaaatcaaccagggacctccctacactgaccactcccctactgcccttgcccctttcggattgtgccatcaacgatccagcacgatttggactgacccggccgacctccgcccaactccggccgccgggagcccctccgcccacggcgcggcgacgaagaagaactccggcgagaaattcctggcggcaccgcacttcttcgaccgccgcgagatcacgaacagctctaccacgcgcccgcgatgcaccacagcccgatcacacgaccaaattggcaagggagcagggttttccccgggcggcggcggcgcggacaggtctgttcccccgctctctctcaacggcggtggttcctggggttctggccaagtgcgcaaagcgactagaatagggccaccacataggctttatgcgcagggaaagcacggaggaagctgcaacggaatcccgccatcctcgcggcgccgagcgcttcgcgcggaccgttgcgacgaaggagaacgcgccctgacgacgtggggccaccatgtcagcgaccgatcaccaggcgagcgcgcggtcagaggggctgcaagcgggacccgcaggtaa

SEQ ID NO: 24083 - DNA, 1254 bp, Zea mays
  Peptide Sequence Number=SeqID_65862
atgtcctcgctgccgctgccggaatcacctatggccgccgagaacgaagcctgcgactggggtgagatgccgtctgacgcgctcgtgtccgtgtttgggaagttggacgtgatcgagatcctgaccggggccgggctggtctgccgcgcctggcaccgtctcgcggcctcggaccccatgctgtggcgccgcgtcgacatgaggcacatgagctatggctacgagggggagcggctgcagaccgaaaaggtcgaggacatggcgcgcgccgcaatcgacccctccgcgggcaccatggagccgttctttgccgataccattgtcaacgacgacctcctgcgctgcctttctcagaggtcggggaagcgactgcagaccgagaaggtcgaggccatggcgcgcgccgcaatcgaccgctccgcgggcaccatggaggcgttctttgccgatatcttcgtcaacgacgacctcctgcgctacctttctcagaggtcggggaagttttttcaactccgtttacatttctttctgttgaaggatggatggagacacgggctccagctaactcgtggttcgcactctagattttctctagctgttaggcttgtcgatgctccaaatgactgtaagtcagttgcaacttgcgagcagatcctttggccacggccaagggccccctcattgaagtgcctccatctctccgcctgcaatttcaccgatcaatgttttgcagaggcgattaattgcttccctcagctggaggagctagatgttacattatgcttattgtatggcagcgcgtgtgaggctgttgggagagcctgcccacagcttaaacgcttcaggctgaatgaactctggtctatttctcgaaaggaggatattggcatggaagcattagggatcgctagcaccatgccaagactccaagaacttgagttgattggtaacaatctgacaaatgatgggctcatgtcaatccttgaccgttgccctcgcctcgaatcccttgacattcgcgagtgcttcaacatacaaatggacgatgcgcttaaactgaagtgttccaggatacgagatctaaggcttcctcatgaccccatcttcttcgacgacaccaggtattggccttattacatcaacagtggcgtatttgactcagacattgattccgaggtcggcacatatgatgatccgctggatgatatgggtgagtcgatgtcaatcatgttcaatgatgacttttatgtctga

SEQ ID NO: 24084 - DNA, 972 bp, Zea mays
  Peptide Sequence Number=SeqID_65863
gccagcggcgcagcgaagccgatgctaccgacgtcgggagtgcagttcatggaccccgccggccgcgtccctccgcctccggctccggcgatggcagcaggagcggcgttcagcggtgaacgggggggcgactcagaaggtggaagcggaagcggcggcgaagcgggcccgaacgatgggacggggacgcctgagcgcggcgagaacgccgataaccgggcgccggcgccggcggaggcgcctctgcggagggcaagggtgtccgtgcgcgcacggtccgaggccccaatgatcagcgatggatgccagtggaggaagtatgggcagaagatggccaagggtaacccatgccccagagcttactatcgctgcacaatggccacaggatgcccagtcagaaaacaggtgcaacggtgcgcggaggacaaggcggtgctgatcaccacgtacgagggcacccacagccaccagctgccgccgcaggccgccgcgatggccaagaccacctcagccgcggccgccatgctcctctccggcccggccgtcagccgcgacgcgggcgcgctcttcgccggccaccacgtcgcggcgccgctcttcgcccagtaccacccctacgcgtcggccgccacgctctccgcctccgcgccgttcccgacgatcaccctcgacctcacgcactcgccgccgccgccggccgcgggcctgctccagcaccgtctgcccacgccgcccgtcccggccatgccgttcccgatgccgtacggcttccctggtgctggtgggcacaggctggcggcggcgccggtgccagccccacacccaccggccggcgcgacgctgctgggtttggacggaaaggaaccggtcggcactggacaccatgacggccgcgatcgccagcgaccccaactttaccacggcgctggcggccgcgctctcgacgatcatggccggagccggaggcgctga

SEQ ID NO: 24085 - DNA, 282 bp, Zea mays
  Peptide Sequence Number=SeqID_65864
atgccaagggagtcggtgtttagtaccagcaatgcaccatggggtgtaccacatgatgcctttcccttgaacctcaagttgattaagataatcgggttgaggatcaagcaacttgttcctctgagtgatcttggtgaggtgggcagcaacacccgagctgacgaagtggtcggcgaggtgtgtggtaatccaacccttgagctgacgaggcggtggcgtagcctcccagagtcgacaaagcagagagttggcgaggcgagcgatgacccagcccccgagtaa

SEQ ID NO: 24086 - DNA, 798 bp, Zea mays
  Peptide Sequence Number=SeqID_65865
atggcccagattagatctaggtatcaagggaatcgatacgcttcggccaccctcggatcgaggatcaacgaccacgatctaaaattcccccaatcaaccctactctgcccgattttatccaacggcccagaacagcccgagcccacagctaccctggttttaatctcacccgtggatccatcaatcaacggccaaaggaatgcctcatatcgaacggtcagagcgcttcttccccgaccgaggccgagtagcgaaatgcccaggccgttggcggaggtgcgctcgccggtgacaggcttctccctccctggtgggtctacgcggggtaaaaaggatgcagagggattgaagggaccttaccagtgccgattccatcttgagttccttccgcggagggtgcaatcaagcggcaccaccggccacgaagcgcggcgaacacacggcaacagtggactacggcgagagattcccagtgcagcacatgccaatcgagtccggcgaggccacgagcaccatcctggtggcaagttgaagctcccagacccgatgccgggaccccaaagctggtatacatacgtgtcccccgtggcggctgtttcctcccagctcatggagatactgcgatggaaacaggggggtgcggacccagttttatacaccgagatgtgctacggtcggggaaatcggttaaaacggcagcgcaatatcagagccaaggcggaatcggaaatcctcaaaccaaatcgcatgcgcacgcggcttccgcggatcttgttaccagcagtgagtctgatttga

SEQ ID NO: 24087 - DNA, 291 bp, Zea mays
  Peptide Sequence Number=SeqID_65866
atgggtcggctggtggctgaagaacagaaacggaagaaggacgatgtgaagaggcgggcccacaagaatatggcggcctgctacgcgttggagaggcaccgcagaacgcggacaagggaggggctcccgctcgagtcctctcccagtagtgaggaggaggaggatgatgatgacgatgatgatgaggggatggaggtctgtgccggcttcggtcccgaggctaggcttggtcctgcgccgtcccctacaagcccttccggcggcacaacccttcctgtggaggggccatag

SEQ ID NO: 24088 - DNA, 1410 bp, Zea mays
  Peptide Sequence Number=SeqID_65867
atggcccggctcccgagccggagaagcagcgagtcggcgaaacaggcggtgacctatctcccgagccggcgaagtgtgaaggcgtacaatgttggtgggccagaccgactgtttcgtaggaagggttttgagacctacgtcttctacctccagtcgtcgcgtctgcgtatcagcggactgtccgcgccgaccatccgcacgcaccagtgcgcaacttcggtcgcgcccgaccccggcctacgccccttcacctcccagagcctgaaaccaccatctcttcccttttctcttccccccattcactcccccctagctcttcctctctccctgcctgcaccctgctcaccggactaccgctcgtcgagcctcgccgtcgtccatggaactcatcggaccgtccgcaaccgcgccggagcctcgtcggaccatccgctcggatcgtccgtcgccactgttcgtgcccttccctgctatgtccaagctcgccgagcccctgcccacctcgcaggaccgtccgagccccgcccggaccgtccgctgcctgccaagccagccgtgccgagcccctgtctcgtccgcgcctcgcccgagttcgccggacagtccgcgcccacgccgggctatccgccgtcgcgaacaccgctcgagccgctgcatcgaacttctggccactcctcgccgttcatcgcaagaagccctctcgaggcactagctgagccatccctcgtcgtgcgctgtagtcgggcgaagcggcctcctgtaggattcatggcattatcgttggccgaggccgagctcgtgcgaggcggagagcttgcccgagggctgagcttgggtcgggtgaggtggagagcttgctcgagggctgagcttgggtcgggtgaggcggagtgcccgatgtctcgtccgctctgcttgtcgcatatgggcgcccccatcggagggtgccaggtggcgtgcgcacactatttggcacaggccgcgtcagcagctcattcttcacaacgcgtgtgcgtgtctcctacccgagccactgaccggtgggtccacctcgtcagccgtcttcctcctcaaatcggactcactgctgcatcgggtctgggagcttcaactcgccaccaggatggtgctcgtggcctcgccggacttgattggcatgtgctgcactgggaatctctcgtcgtagtccactgttgtcgtgtgttcgccgcgctccgtggccggtggtgccgcttgattgcaccctccgcggaaggaactcaagatggaatcgacactgacccaccagggagggagaagcctgtcaccggcgagcgcacctccgccaacggcctgggcatttcgctactcggcctcggtcggggaagaagcgctctggccgtccaatctgatgtgggcgggggaggttag

SEQ ID NO: 24089 - DNA, 2292 bp, Zea mays
  Peptide Sequence Number=SeqID_65868
atgcaaggggccgtgttggtggccatcgcggctgccatcggcaacctcttgcaggggttggacaacgcggccatcgccgccgcggtgctctacatcaagcgcgagttccacctggagacagatccagcactcgagggcgtcgtggttgccacctccctcttcggggcaacgatcgtcaccatcttctccggccccgtctccgacgtcatcggtcgccgcccgatgctcatcgtgtcctcgctgctctacttcgccggcgggctcctcatgctatggtccccgagtgtgccggtgctcctcgtggcgcgccttgtggacggcttcggcgtcgggctcgccgtcacgctcgtccccgtctacatctccgagacggcgccccctgaaatccggggtttcctcaacacactgccgcagttaacgggatccttgggcatgttcctttcctattgcatgatcttctacatgacgctgggcgatagccccagttggcggttcatgctcggcgtcctctccgtgccctccctcgcctacctcgcgctcaccgtgctctacctccccgagtcgccgcgctggctcgtcagcaagggccggatgaaggaggccagggccattctccagatgttgcgcggcagggaggacgtgtctggcgagatggcgctcctcgtcgagggcctcggcagcagcgacgacaccgtcatcgaggagtacgtgttgggcccggcggcagccggggacgagtcggagcacgagaccagggaccaggtcacgctgtatgggcccgagcaggggctgtcgtgggtggcgcagcaggtgcagggcgcgcgcagcagcgtgctcggcagcgccgtcgggctcgcgtcgcgccaggggagcatgtacgagcagatgaaggaccccgtggtgacgctgctggggagcgtccacgacaagatgcccgactctggcgccagtgccagggccagcacgctcttccccaacctcggcagcatgctcagcgtgacggagcggcacggtggcgactgggacgaggagaacgtgccgcccaacgacgacctcgacgacgatgaggacgaggaggagtacctctccgacgatgaggacgctggcgccggagcagcagcacgaggagggggaggaggaggaggcgcgctgcacgcgccgctgctgtcgaggcagagcacggacgttgacgtcaccagcggcacgagcaagaaggacggcagccacccgcctgagagcagccccatgcagaggtacagcagcattaccagcggggaggccgcgagcaccatgggcatcggcggtggctggcagctggcgtggaagtggacagagatggtcggggccgacggcgtgagacgcggtggcgtcaagaggatgtacctacatgaggaaggcggcggcgatggggactcatcggacccggcagggggttacgtgcacgcggcggcgctggtgagcccgtccatcctctacaccaaggacgtgctcatcgggcagagcccgaccccggcgttcgacagcccgccgccggagacggtggccaacaaggcaggcggggggccctgttggagagagctcctggagccgggtgtcaggcgcgcgctcttctgtggcgtcatgattcagatcctgcagcagttgtctggcatcaatggtgtgatgtactacacgccccagatccttgaccaggccggtgtgagcgtcctgctctctagcctgggccttagcgccgactccgcgtccatcctcctcagcggcgtcaccatgctgatgatgctcccttgcatcgtcgtggccatgcgcctcatggacgtggccggccggcgctcgctgctgctgcggaccatcccggtgctgatcgtgtcgctggcggtgctggtgctggcgaacgtggtgcccatggcggccaaggtgcacgcgctgctttcaacggcctgcgtggtcgtgtacttctgctgcttcgtcatggggttcgggcccatccccaacatcctatgcgcggagatcttccccacgcgtgtcagggggatctgcatcgccgtgtgctccctcaccttctggatctgcgacatcatcgtcaccaactctctccctgtgatgctcagaaccatcggcctcgcgggtgtatttggctcctacgccttcgtctgctgcttgtcgctcgtcttcgtgtacctcagggtgcccgagaccaaggggttcccgctcgaggtcataatcgagttcttcaacgtgggtgccaaagctcagaagccggagcagcatgaagaggaggagaaccacgactaa

SEQ ID NO: 24090 - DNA, 381 bp, Zea mays
  Peptide Sequence Number=SeqID_65869
atgggcaagaacaagaagggtggaggttcgtcgcaccactccggcaataagcggaagcgcgagccaagtccccccttggaggactttggtgactccgagtactcggaggaggagttttccgccgagtccgagggggcgccggtctacgcatctcccccgtcagaggtctccttggacgaggagaactcctccgaggaggagagcggtggtgacggcgacgacgagggcgacggtggcgacggtggtgacagtggcgatgacggcgacgacgacggcaagggcgatggaggcagcaacggcaagggcggcggcaagggcgatggcaacggcaagggcagcggcggcagtagcaaggccagtggcaaagcaccactggtttaa

SEQ ID NO: 24091 - DNA, 501 bp, Zea mays
  Peptide Sequence Number=SeqID_65870
atggcgatcgacatcacggagcgccacgccgtcatccagggcatcccgatggtgcaagtcagcgactcctacttctggttcgcacgccccaccttcgtgctcttcctcatccacttcaccctcttccagtcagtctcatgtctctgtctctgtctctgtctctcccagaatggcttccagatcatctacttcctctggattctgtatgagtacggcatggactcgtgcttcaacgactccgaagagttcgtctttgcacgactctgccttggcgtggttgtccaggtgctgtgcagctacgtgacgctcccgctgtacgcgctcgtctcccaaatgggctccaccatgaagcagtccatcttcgacgagcagacctccaaggcgctcaagaactggcgcgccggcgccaagaagaaggctcccaccggcggctccaagcacggcggtggtggctcccccaccgccggcggcagccccaccaaggccgacggcgacgcgtag

SEQ ID NO: 24092 - DNA, 894 bp, Zea mays
  Peptide Sequence Number=SeqID_65871
atggggggcggtggcggtggcggcaactcgcgggagcttgaccagacgccgacatgggcggtggcgtcggtgtgcggcgtgatcgtgctcatctccatcctgctggagaaggggctccaccacgtgggcgagttcttctcccaccgcaagaagaaggccatggtggaggccctggagaaggtgaaggcggagctcatggtgctgggcttcatctcgctcctcctcgtgttcggccagaactacatcatcaaggtctgcatcagcaaccacgccgccaacaccatgctcccctgcaagctcgaggccgccgccgtcgagggcaaggacggccacggcaaggaggccgccgccgtggtcgctggcaagaagaaggtcgccgtcgccgtccctggaaagaagaagaagaaggccgccgccgccgccgaccatcttggcggtgtggtggactggccgccgccctactacgcgcacaacgccaggatgctggcggaggcgagcatggcgaccaagtgccccgaggggaaagtgccgctcatctccatcaacgccctgcaccagctgcacatcttcatcttcttcctcgccgtcttccacgtctcctacagcgcaatcaccatggcgctcggcagggccaagagcaacttcttccggcagttcttcaggtccgtgaggcaggcagactactgcgcgctgcgccacagctttgtcaacgtccatctggcccctggcagcaagtttgatttccagaagtacatcaagcggtctctggaggatgacttcaaggtgatcgtggggatcagtcctcctctgtgggcttctgctctcatcttcctcttcctcaacgtcaatggatggcacaccatgctctgggatctccctcatgcccggtggtga

SEQ ID NO: 24093 - DNA, 1974 bp, Zea mays
  Peptide Sequence Number=SeqID_65872
atggagccagatggtttgaaaaaattcgacagcttttcaaggtggatgagcaatgagcttccagagggtgttgatttggatatcaagtccagctctgatgctttctggagtactactgaaaccgtgaatgttgctgatggatctagtatacctattaatgagccattggatgtatttgtagtcagcccctcactttcccaagaccagctcttcagtattattgatgtatctccaagctgggcatacaatggcacaaaaaccaaggtcttaattactggtacattcttggcaaaaaaagaagatgtggaaaattgcagctggtcttgtatgtttggagactctgaagtctctgctgaagttttagtggatggctccctgcgttgctatacaccagtacaccattctggacgagtcccattttatgtgacatgttcaaatagagtagcttgtagtgaagtgcgagaatttgagttccgtgattctgagacccattatatggatatctcagataagcatactacaggcataaatgaaatgcatttacgtatccgccttgataagttactttccctggaaccagaagactatgaaaagtatgtcttgagtaatggaaataagtctgagctgatcaacactatcagttcattaatgcttgacaataatttgtctaatctggcattaccatctgatgagaaggaattgtgcactgtacaggatcagaatcttgagaaacaggtgaaagaaaagctatattactggcttatccataagatacatgatgatggaaaaggtccaaatgtcctaggcaaggaaggacaaggtgccattcatttagtagccgcacttggttatgattgggctatcaaaccaatagttgcggcaggagtaaatataaacttcagggatattcgtggatggactgcgcttcactgggctgcatgttgtggaagggagcggacagttggtgccctgatagcaagcggagctgcatctggtgctttaacagatccaacgcagcagtatccatctggaagaactcctgctgatttagcatcagaaaatggtcacaaaggcattgctggttttcttgcagagtctgctttgacaagtcacctctcagctcttacattaaaagagtcgccaagtggcaatgtggaagaaatatgtggattaacagcagctgaaggttttgcagcatcaagttcttcccagcttgcttgtgttaattctcaggaagagtccttaaaagattcacttggtgcagttcgtaaatcaactcaagcagcagccagaatatttcaagcttttagggtggaatcattccacagaaagaaggttattgaatatggagatgatgattgtggattgtctgatgaacgcacactttcacttgtttcccttagaaacccgaaatctggacacggtgattcacattctgctgctgttcgtattcaaaacaagttcagaggatggaaaggaagaaaagagtttatgcttatccggcagaaaattgtgaagatacaggcccatgtacgtggacatcaggtaaggaaaaactatcggaaggtagtctggtctgttggcatcgtggagaaagtcatactgaggtggaggagaaagggaaggggtctgcgaggtttccaacctgagaaacaacttgaaggtccatcatggcagatccaacctgcaaaggctgaggctgaggatgaatatgacttcttgaaggatggcaggaaacaggctacaggcaggttggatagagcactggctcgtgtgcgttccatgaatcagtatcctgaagcaagagaccagtaccgcaggctgcaagcctgtgttaacagcctacgagagtcccaggcgatgcaggacaggatgctggctgattcagctggcaccgatgggggtgatttcatgactgaattggaggagctatgccgggatgatggcgatgccccgatgtcgactatttcttga

SEQ ID NO: 24094 - DNA, 1077 bp, Zea mays
  Peptide Sequence Number=SeqID_65873
atggccgagattcgcaagtacgccatgtccaaccagcccccagatattcctcagatactactggaagctcagagtaggtggctgcggcccactgaaatctgccaaatattgtcaaactacaagaagttttccattgcgccagagccaccaaacagacctcaaagtggttcgctgtttctgtttgaccggaaaatattgagatacttccggaaggatggacacaactggagaaagaaaaaggacggaaagacagttaaagaagcacatgagaagctcaaagttggcagtgttgatgtacttcattgctattatgcccatggtgaagagaatgagaacttccaaagacgaacatattggctgcttgaagagggtttcatgaatattgttcttgttcactaccttgaaatcaagggtgccaaacaaagtttcaatcatgctaaagaagctgaagagactgcaggattatctaatgccgatagtcctgcatgctcaaactctttcgctagtcagagccaggtagcctcccgatctatggatgctgaaagcccaattagtggacagatttcggaatatgaagatgctgaaacagataattctcgagcaagctccagataccaccctttcactgagatgcagcagcctgtggatgctgcaggttatcttggtgaaatgcaacctacgggagctaattttaccagtcattttgccactcgcaatgacatagctagtgtgttcaatgatactggctctgagttaggaggtggtcccaaaacttcaattgattcagtactgttgggtgaaccatttccagaatatccaggcggcttcatggagtcgacactctattcttctgttgcaacattgggtaacagtctggaagatggtttgcagacatttatgtctgaggctctctacaccaacaatctcactcaaaaggaagttgatgcacttggtgcagcaggcataacatcctcgaagttgcccagtccacctgcagaggtgagttccttagctctgcaatatcatcgcagtgcactattgaaagctataagcacctccagtctggaggccacatag

SEQ ID NO: 24095 - DNA, 201 bp, Zea mays
  Peptide Sequence Number=SeqID_65874
atgtcgcgcgcgttcgacgactactatatcaaggactgtggtgtcatctcggcgccggaggtgacacagaggaggaccgacaacaatgaccagttcgtcatcctcgctaccgtcgtggtgtgggacgtgctctccaacgatgagaccatgcaaatcgtggcatatattgaagtttgcatgatactgattgttgcaatgtag

SEQ ID NO: 24096 - DNA, 549 bp, Zea mays
  Peptide Sequence Number=SeqID_65875
atggcgcggcgtgcagttcctccagtggctccagcacagcggcggcgctggcacaggagagaaagagccaacggggagagggagcggccgctgggaggagggagtcacgcggctgtgaggagggaccgagactatgtgctcaacatgcaagtctcaatcactttccagcaatataattgtctaattgtcttctgcgaaggggcctggtcatatcatgagaaatgtttccaacctccctcacatgtcagccaagtggtatcttctaactacaggctggattggctttctaagtgcagagacttgttgctggtgactttgccccttttatctggtacacgctacattccatcaatattgcagtccgtatcctatccacgattgttcttcatggatcaggctttaagcaaggtttaccctctttttatacctaggaaaaatgtttgcacaggtggtgaagaaaccccattgacagaaagtggttcgagttactttggagctgactctggattctgtcaagaaacagtcttttggttccaagagaagcaatag

SEQ ID NO: 24097 - DNA, 474 bp, Zea mays
  Peptide Sequence Number=SeqID_65876
atggcgggtttatttatcaaaagtcgagggcttctaatgcaaaatctcccagccgaaagggtacgggtcattctaagccgcacgatcagatatcgagggcagggattagatctattgttttatacaccggtaattgaccagggcctttggatcgtgatccaacgatcagatccacacaccgaggcatccacgacccaagctatcacgatcgcacacacggagatcaacggcccaggttcacccccgaatcggtacgctgatggctctaatctacgacgtcgaccgaggatccgacggcacccaagcgccacccccaatcctgccgccgaggcacggcggagcagaagcccgcgacggcactcctcgccggcgaacgtcccttcggagccccggagtccgactgagcaagcggcgaggggcaaaacgttcctgggaaccagacgaaacaaatgggggagaaaatacctcagttag

SEQ ID NO: 24098 - DNA, 345 bp, Zea mays
  Peptide Sequence Number=SeqID_65877
atgcagtcagaagtactggctcctgctgtgcaaggtaccttaaacattcttcaggcttgctcagctaataatattcagaaggttgttgtggtttcgtctaccgccgctgttcatttcgacccaaattggcctccacatagacctaaagacgaggattgctggtcggacataaacttttgcaaaaagaacgaggactggtatatggttgccaaggttattgctgaaaagacagccctagaatacggagagagaaatggattaaatgttgttacagtttgccctactatggctttaggaccgctcttgcggcctatgctcaatgtgatagaacaagtatatccctag

SEQ ID NO: 24099 - DNA, 639 bp, Zea mays
  Peptide Sequence Number=SeqID_65878
atggcaggtttatttatcaaaagtcgagggcttctaatgcaaaatctcccagccgaaagggtacgggtcattctaagccgcacgatcagatatcgagggcagggattagatctattgttttatacaccggtaattgaccagggcctttggatcgtgatccaacgatcagatccacacaccgaggcatccacgacccaagctatcacgatcgcacacacggagatcaacggcccaggttcacccccgaatcgtggcggtgcagattccgcccgcggtggcatggatcacccccccccttctctctcaatcgtgcctcacttgatgacctgggcagcgcccgatgggttgagtcgagggggaaagcacctacgagctgtggattttacgggggagggcaagtccgagttggtcagggcgaccgcggttggcgcgagtttaccggcgaggagatcgcgttccgttgcaggagaacgagggaggatccgacgagatgaccccaccaagcgcggatcacggggttccgttggaggtggtcgtgcactgcccaccgccaggaaacgatgttccgatcggcgtggggaagaagaatgggtccgacaagtggagaccacccgacagcggcccaaggtgacaagctag

SEQ ID NO: 24100 - DNA, 186 bp, Zea mays
  Peptide Sequence Number=SeqID_65879
atggggaaggcggcagggacgcccggccacagcctggagaagccatgcctttttcagagcgctcaacgctgtgtccaagaccgtttccttggttcccagccagatccatcagcttctgacatgttaacgatccacgctgaaaaaaagttaccaggccaagtcctctgtgcaaacgtgattcggtga

SEQ ID NO: 24101 - DNA, 807 bp, Zea mays
  Peptide Sequence Number=SeqID_65880
atgcagtccgaggtgctgtctcctgctgtcaagggcactctgaacgtcctccaggcctgctcggcaaacaacgttcagaaagttgtcgtggtttcgtccacggctgccgtttactttaacccgagctggccccaaggtagaaccaaagacgagagttgctggtcagacagagatttatgcattaagaacgagaactggtactgtgctgccaagacgattgctgaagaaactgcagtggagtatggagagaagaacgggctgattgttgtcacggtctgcccttgtatcgttttaggcccactcctgcagccgctgatcaatgccagcagcgaactcctcgtctacattataaaaggtggcttttatatattcctgctagtttcaaatatccactggttggataattactcgcatggaggtcctagggtgctgaaaaacctcccctggaacatagtcgacgtccgtgacgtagctgatgctttgctcctagtatacgagaaagtggaatcatccgggagatacatctgtgcgcctaatcggatcagcacaaacaacatggtgaacttgtttaagaagtcctaccctaactacaattatgtgaactgcgacaacaaggactatgaatctgaaatctcaccagttacatcggagaaacttaagagtctaggctggaacccaaggacaatggagaaaactttgttggacaacattgagtatttcgagaaggcagggtttttgcgtgatggagaggatgttctgcacacgcttttacagattgaaccggataacaacaagccttcattataa

SEQ ID NO: 24102 - DNA, 238 bp, Zea mays
  Peptide Sequence Number=SeqID_65881
atgaatgcctcatggctgcagaggctggtgacgtcgactctgcgaggtgctcctctgccgagttatccaaacaatgcccatttgaaggagctggagaaggccccagagaatctgtatctgttcaaggctgacgagccagaccacgacacgctaacagctgcagttgagggatgcgaggggatcttccatctcgccactccggcggtgcctgaagataagattgttgatcctgaggcaa

SEQ ID NO: 24103 - DNA, 465 bp, Zea mays
  Peptide Sequence Number=SeqID_65882
atgtacggggagatcaaagttgatgtgggaagagacgaactgcaagcaacctcagaagcctttgactctgcgccaaccagactgactgatgaaaggctcaaggcccctggtctcaactgccctatgcttgaggttgttgagctgacctttacgttttgttcgagtgtgtatcccactgaaataaggtttcacacagaaaggtatggtatagtcgcactcattcagacctgcctagtccgtgctttcatgctggacggagtgtacatcttttatgactcggggttggagggtatttcgtcagcgccattcctggagaggctcaagcttttggatcgcaagaggataacaggtgctggggtgagtttcgttgccccgcgcttgagtagtctcactatctccggggaaggtgttcaggggcctgccactgacatcatgtttgggaacacggtataccgtaatatttga

SEQ ID NO: 24104 - DNA, 621 bp, Zea mays
  Peptide Sequence Number=SeqID_65883
atggccgggatgctccccggcgtggagttcgcgcggcgccggcggcgggcgtcgtccttgtgcctgtacgcaccttcttccaaggagtggagcagcgcgtgcatggagacgacggcgacggcgactgcgcgcgcgtggacgacgctggggctgggcagcggcgcccgggaggcgaaggagaggctggatcagaagctccgtgcccagagacaacctgtggtgctcaagaggcatgagatgagcacgagccccacgatcaccaaagcgcacgacgacgcaacgtgcaggtgcagcggtggcctccaccgccaccactcgtcagcgtgcagcagcgacacgggcgtgctgctgcggcgggaagtggtgtcgtcgccgaaaccgaacaagaagggaggaggaggaggagggggccggttcggctggtgccggctactggcaggcgggcggcgcgggccgccggcggcagcggaggcggggtgcgcggtgtgcctggaggagctccgcgcgggggacgtggtggcgcgcctgccctgcgcgcaccgcttccactggtcctgcgccgtgccctgggtccaggccgcgtcgcggtgccccgtctgccgcgcccacgcccgcgtctag

SEQ ID NO: 24105 - DNA, 366 bp, Zea mays
  Peptide Sequence Number=SeqID_65884
atggcgcgcgaggaggagggcccggcggcggcgaagctcccgccgtcgtgcgcggacgaggaggatccggccccgaagcacccgccgaggctgaggcgcgcccggcgccgcgacggcgcgtccgcgcggctgctccctgcgcccatctcgctcgccggctcccgctttcgagcttttccccccacttcttcgccgagtgggagagggtgcgcagcggatgagagaaatgacgaggaaatcgctcggaagtgccgggtgaaactcactactctacgaggcaatcctctttttttggcccacgcaactgactgttgcattgatcttttcccttcttcccagttcagagaactggaacaattcggttag

SEQ ID NO: 24106 - DNA, 735 bp, Zea mays
  Peptide Sequence Number=SeqID_65885
atgtggcaggatcatggtcaatggaaaggtgacgatcttttagcagctgcaagaatagtaggaagttatctggcagaagcaccatatgcctgcaaggagaagactgggaatctattggaatttatcttttctatagaaggtcaagatgaatcaaggttgcttctactttattttgtgctcagcagttccttctattctatttgcttcatgcttccaatgctatcccaaataacaatggaggttgatggatgtagaactttggcatcatttggtggccataaggcagttatagattgccttgttaaaatgactgagcagggtggaatgacgattgataacggtagcatgtttttggcatgtgataccatcataaatttcatgtctaatatgaagagtgtccatattccagtggattattgtttcattcgcctcctaaaagcacttgttacatgggctggaaccacagatgcctcatcagttaccatgacagcatcctgcttatgtgtaatgctgttggacatgacgtcagaaaagtttctattgagctgctctcattttgacgccaatatccttgggagtttgtctgagatcatcatcagaagtttgcagcaggatatccctgatgatgatagtgagcaattcaagcagaagcagatcattgtatcaggttataagcgatgggctgatcgatttccacgtcttaaagatgttgtggagcagcatgtatccgtgtga

SEQ ID NO: 24107 - DNA, 429 bp, Zea mays
  Peptide Sequence Number=SeqID_65886
atggacatggaggttggccggcggcgaggctcttcaggtgctgccgtgctggcgagttgggcagttggcgactggcgagtcagcgagtggcgatggtcttcgggcgcgcgcacgggtgtgccgcgtgcggacctgcccggccgccccgtccgcgagtggcgatggtcttcgaagcgggagcagtggacgctggcagtctggcacgccgccgcctgccggtggccgcttgaccgagcgggagcagtggatcagtgccgagcgagagcagtggagcagtggatcagtgattcagtgccggagcgggacgggagcagtggatcagtggacgactggacatggtcagtggtcacgtggagtggaggcttggagcgccgtcgcgccgagcggcgagcacggagcgcccgaggcggcgtggcagccaccgtctag

SEQ ID NO: 24108 - DNA, 897 bp, Zea mays
  Peptide Sequence Number=SeqID_65887
gccattggactgtcaggtaccaagaaaccaatgaggcttgaccttacaaatcagaattcaagggctgaaaagacgaaagttggaccatttggatccaaactatttgactctgctgtctcagtttcttctggttcaatgtcagatgaatggacattggagtttgttgatttcagtggggagatgagacgagatgtgtggctcgccttcatcagtgaaattatttcagtttatagattcattcgtgaatatggtccaggtggtgatgatccagcaatacataatgtgtatggtgcgtacaaagggaagaaaagagctgttagtagtgcagcgaacagtattgcaaggctccagtctctgcagttcatacggagattatatgaagatccagctaagctagtgcagttctcttacctgtccaacgcaccatttggtgatgttgttcttcagaccctagcagtgaacttttggggtgggcctctgactacaaaagccagatctgcaaatcatagatcaactcagtggcatagatcttcagaggacccatctagcggtcgcacacatgtttacgacatagatggcagcgtgtacttgcgcaagtggatgacgtcccccagctggacatctagccactcagccaatttttggagaaattcttctgtcaagtatggtataatattgagtaaatctttagttgtagctgataaaaaccttgtagaaaaggcaatggttgactgtaaagagaagagcaaagtagttgaaaggacacaagcgacaatagttgctgctacaatcgaaggtattccaagtaacattgacctcttcaaggtaagctacttttctatgagttatttcttccttagtcaccctgagaagtcgaatattgatccactctattaa

SEQ ID NO: 24109 - DNA, 342 bp, Zea mays
  Peptide Sequence Number=SeqID_65888
atggagcagacaagcatgagagcaagccccaggtgttgtagtggatggagtggtgtggtgaggcttcccacaagagctggagttctaaggtgttgtggtggtgttaaaggggacctgtgcctccttcgtgaactcgaggctgagatcattgttgacaaaggctacgtcgaggtggagggcgtgggcctcacgactgccgatggagtgctcctcaatggcaacctaggcctaacgagcaatggtgaggacgaggtcacgccagagggcgtaagtggaagtcgggtcgaggaggacgagaaccaacaaccatatgttttggacaccagccgccttaacatgtag

SEQ ID NO: 24110 - DNA, 528 bp, Zea mays
  Peptide Sequence Number=SeqID_65889
atggggaggttgcttacctcgagcgcgaactcaggagcgcctggaggacgggggagggtggtgaagcctcgggtcgacggcggcggactccggttgcgcaagaagtgctccgatgagcgcggaccggtgaaaccagagggggaaaggacaaaccaaggggtgtcccgagttgctaaaggcgaggcgaaactcatcggggcaacagacgcgacgcgggctcaacgacggtcgcggaacggcaccggtcttcgggcacggggtctgaaggggcgagggcgtgcggaggtggccgcagaacgcgcggacgtgggcacgtccccggcgagggacgtgggcgggagcagcgagagggagagaggaagagaagaggtgcgcgggttggcaccgacaggcgggacccgcctgttagggatcaagggcgcgggcacgggcatggggttgggcctgggtttctttgtcgtctacggcgagatggtcctcacgatcggggacctgatgatgcgcctgacctcctcgcaccgcctatag

SEQ ID NO: 24111 - DNA, 285 bp, Zea mays
  Peptide Sequence Number=SeqID_65890
atggggattaggttctttggaaccgaacctcgcccccctctaggcgactttcagtcacaagctaccttctccagctctccagatccacttcaggcagatgattggctgaaggcagtggagaaaatgctcaacatagctcagtgcaccgacagggaaaagatcaagaagaaggagttcctatcccttaagcagggaggcatgtcggtacccccgctcgtggcagttctggacaacagtctccacagatccaagctactcctcaagcaagtaccccagcaggactag

SEQ ID NO: 24112 - DNA, 318 bp, Zea mays
  Peptide Sequence Number=SeqID_65891
atggccggttggggggtatttataggccccaactcaattctagccgttggagaaaagctgctgctttgtagcacactggacagtccagtggaagcaccagacagtccggtgccctgtttgatgcgtctagccgttgcatctgacacgcaggtgaccgttggcgctgcaagcttttacaccggacagtccggtggcttctctccaccaatgccaccaggaactagccgttgggctacagttccctggtgcaccgatccggcgtgtggcactggacggtctggtgtgccaccagacagtctggtgtcctcgaccagatag

SEQ ID NO: 24113 - DNA, 1329 bp, Zea mays
  Peptide Sequence Number=SeqID_65892
atggatgtatgtccgggagagccaacttcatctaatgacatacccgatgcagtaactgttcctacttcaaatggaaatgaaatgcatggtgctggaggccagtctaactcaagactgcagggcagcagctctactagtaatcttgagaggttcagtgctagagatgatttgcaagtgtcttccctgagcaggactgacccaatcccattaacagcagggccttcaggatccgatttacaccgtgctatgccactaaatatgctcctcactggcggattagatgttcaaatgttcctaagaaatgtaggaagtggacagcaggatcattctctcttcggcgactcacgtaactgggaggtaccatttttgcagggtttcttgatggccccaaaccatgcaggtttgcaccctgcacttgtgaacaatagtgtccttgaagacatgtctattgctggtactgcagggactaataacttgaaatcaccacacatgcgcaactttggatgtccaggtgcttcatcttcgattccccttaccactggcagttctaggggaccaaatcgacgctatgcttcacgctctgtacctggggttgggaatttgctcctaggtcctcaaattgacgaagctgaagctcatgctgtttcactaggtgctggttctgaaatcactgcgtccatgcttgctcctggtactgaattgccttgtacagtgaagctcagaatatggcggcacggtaccaatgaaccatgtgttcctttagaacctgaggcatgctgtctgacgatttctcatgccgttctctgcagatttggggatattcttgcttccagagcaatacgggcagcacattgcttaacatccattcagttctcacctacatccgaacacatacttttggcatatggtcgtcgtcatagctcgctccttaggagcatagttgtggaaggcgaaaatggggttcccgtatatactattttggaggtatatagagtttcagatatggagcttgtgagagtgcttcctagcgctgaagatgaagttaatgttgcatgctttcatccttcaccaggaggtggccttgtttatggcactaaggaagggaagctcaggatccttcagcacaatggcgcagacatgacaaacatgggggtgggttgcttcattgaggaaaatatggttgagctgctcactgattctgctccaccattccatagttttaacttctcccaactaaggagcaaagccagacaggttgacctgtcccagcagctgaaaccaaaagctcctagcaaagacacaacccaccaaaatgtggtggtcatctaa

SEQ ID NO: 24114 - DNA, 363 bp, Zea mays
  Peptide Sequence Number=SeqID_65893
atgagtgatcaagggcacaacttgccagagactcaaaattctaggtaccaacttgctcttcagatgactcgtaccctcgctgctagtcgtagcaatacaaacaaacatgatcccaaatctaacggtcacgcactattctccttcctcagtccgagctgggcgacgccttgccccaaccgcggcggcgccctggccgagccccggaccaccgacaccccgatgaccactggtgcacgtgacccaattgctgcggcggctcacgccctggaggttgcaaaacaatcagattccaaggtcacttacccccgatggcagtgcgacgcttactgcccacggatagaggcgctccacaatgacgtgtaa

SEQ ID NO: 24115 - DNA, 324 bp, Zea mays
  Peptide Sequence Number=SeqID_65894
atgccctgttcggagttgatcaccgaggaaaagcctggatcttcagagaagaagaatgaaggcaagactccatcaaaggagaccggcaacaagcacaaggaaggcaaggatgaatccaccagctcaatcaattcacacaagaagggcaacaagaagaaaaagaagatgaagaaggtggtctactacgagaccgactcttccatgccttcaacctctagcgtcgaatcaacatcttcaaagcaccaagagccgcaggcaccacaagtggacgatgaggattatgactctgatgaggccgcacaagtgaggcacttcaactcctaa

SEQ ID NO: 24116 - DNA, 504 bp, Zea mays
  Peptide Sequence Number=SeqID_65895
atgacgagcggttaccggcattcacgcaccacgtcgtcctcagagcggaggagtgatggaggggctgcgaggctttcggaccgctcgacccccagtcctggaagacgtagttgccagggaggtgtgatggtggcggccgaggagaagaagaagaaggacgaggagaagaagcgggcccgcaagaagatgctggtccatgattcactggaaaagcactatagaccgcaggcgagggaggggcttacgctcgaagcctctcccagcaccgaggaggaggaggaggaggacgaggaggaggaggagatggagttccgtatgggcttcagtctcgaggttgggtctgggtccgcgccggcctcggtgggcccctctagcggcacggtcccatccacacaagggccaacagcatccctgtccgggacgcgggtgtcagctgatcctgccccacccctgccttggtggaaaaggcaggggtcgtggaggaggaagtcgccccctccctga

SEQ ID NO: 24117 - DNA, 294 bp, Zea mays
  Peptide Sequence Number=SeqID_65896
atggccctgactcctgctgtcactagctggattgttgattctggtgcctcttaccacaccactctagatgcgggatctcgctacctagagccttctcgcctgcgtttaccccttaacatcatgctttcgctacaccttcgccgcagttgcacacactggctactttcactatatctagcacttgacattgtcgactcagtcatcctagccctcatgtgttgtccaagttgtgtagtagttcaatcatttcttatattagggccactgagcatttatgccatgcctgtcagttag

SEQ ID NO: 24118 - DNA, 288 bp, Zea mays
  Peptide Sequence Number=SeqID_65897
atggcgtggagttgtagagtggcaacgacgtcggagcgaggaggggcccccttagaacatgacaaagtgagtgatgcaagtccgaaggtgatggtagcgctcgttgaggccacagagaagattgaggacgagtgtgcgatgggagacactccctggggtcaaacagaggggggccaccatgcctttcatctggcgataatactcggtgacaaagaggtctccctaaaacgaaatgtcccaaaaggcatcgtcaagttggatatcgtgagcctcacggtttgccaataa

SEQ ID NO: 24119 - DNA, 357 bp, Zea mays
  Peptide Sequence Number=SeqID_65898
atgtggaatgagtccccaaaatatgatcctgattcaattgagttaagggcagaatcacagtccctgcatagctggtctgccaagtattgccctcttttgccacctcctaggtcaactattgcagctgctttcagtccagatggaaaaacacttgcgtccacacatggtgaccataccgtgaaaataattgactgccaaacagggaaatgtttgaaggttttgactggacatcgacgcactccttgggtgattagtatcatgtgcttcaagctcttgcaaagaaaggaatctagttatactgtgtacagacccagtgctgatggctcccatatgagtgggggtctgaggaaggaataa

SEQ ID NO: 24120 - DNA, 231 bp, Zea mays
  Peptide Sequence Number=SeqID_65899
atgttagagaggagggaggggagtggcgccggcgaaggacgcggcctggcgcagccggcgggcgcgagggaaggcgccaacagaggtggtagcggcgccggcgggagacgcggcctgcagacgacgagggagagcggcgccagtggatggcgcgacctccagcgggtggcgcggatccagagatacaagggatctgagtatcctaagccgtttttgtatacagtaggataa

SEQ ID NO: 24121 - DNA, 579 bp, Zea mays
  Peptide Sequence Number=SeqID_65900
atggcggatgctgggggaggccaggcacgagcaaacaagggggtagtggctaggggagggtttgcctccactctttggttgctccacacacccctaagaccaccttctgaattcaaggctcctgaaccaaggaagaaatttgaagagcaattcgctcaagcaagatgtaaaaataagactccgaaatttgaagagcagtttgctcaaggaagttgtaaaaataagactccttttcgcttcttcagcattccaatgcgtacctctggatctgaaaacagaaaacataagaaacatatcacatttgtagaagtgaatatgacgtgcctaaatgcatccctggtgattgaaactggaccaggtaaggagaaaaaggataatatttccagaaacgaagttaaaacagcagcagcagcaaagcaactattagcaactcggaagcagaggcacactagagatgaaacccatcaagcggcagatgaacccaagagcagcaaggccattagtcaactcccaagcagaggcaggtcagagatgaatccaaacaagaggcaggctatagagagagtacaagtacagtaa

SEQ ID NO: 24122 - DNA, 819 bp, Zea mays
  Peptide Sequence Number=SeqID_65901
atggtttacgatggcgccgtgaaggaccaggaccaggagaccgtggcggcgagcactgcatcggcggcatcggtggtggcggtgtcggaggcgtctcccgcgccggtggtggtggtggtcagtgcgaggccctcggcgaggccgccgcacgacaagcgcctcggcgtgcgccaccccttgaagcaccgctggtttcgtgctggtgggaagatgatgatggagcccggaggggtgctgcctgctcacgcgcatgaggaggaggaggagggagccagcgaggtggaagaggaggagttagtggaggcggaggcctcgtccgcggagacggtgacgtggggcgctgaagtggaggtgtcgtccgcgccggcggcaggggtgcaggagatgaacgcggaggtggagggtggcgaaatggaggtgtcgcctgagcctgcggtcgctgtggggggcaccgagttggagccccagcaggacgacgaggacgaggtctcgtccgtcgtgttggcgcgaggggagaggaagcaggaggcggctcctgcttctgcggtgctagctgtggaggcgcccatggaaatgggtcaggatgaggagagggcggagaaggagaagaggggcaaggagagggaaaggcagaaggagcgggagagggtggatgaggtcggctacatgagcggaggatggaagagtgttgatggaacactgaattgtggatattcaagttttagaggaagaagggcaagcatggaagatttctatgatataaaagcatctaaaattgatgataaacaaataaatctcttcggaatttttgatggttag

SEQ ID NO: 24123 - DNA, 2958 bp, Zea mays
  Peptide Sequence Number=SeqID_65902
atggagcaccagagctctgaccacgatgagataacacacgcggactatccgccatacaaggttggacggtccacgacctgggactccgatgactacggctccaactgtgccctgcaccacaccatcggtcttccagacttttcccatgagctctggtgcttccagatggtcacctgctacccggccttcatccacaacctggacgacgcgcatgagcggattggcacgtccatcgcgacgacgttgagggttcatgggatgagagttgctgacacacccatgcgtgctgggttgggccgccacgcacgtctcgcctccaccgcggcggtgctcaaggcatgcgatcctgacgaagccgtcgtagaggccgggcttcagtctgcctttcctgagcctccctccgagcaggacaccgtcatcatgctcaacatggctaccgccaccaggccagagatcgctgtgctcgctctccgctggttcctaggaaacgttgaggtctggaagaaggtcatcatctacaaagtcaagctcaagctgctgcgcaagaaacgacactggcgcgagaccgaggcgctatgggccaagatgctacggcacggcatgcagcccggcaacaccatcttctcgaccatcatcagttgtgtgcgcctacggcctcctgagcaaggttgtcgagtggttcgacaagatgccggagtttgggtgctcaccggactggctcacatactctgcgtgaacaaggtccactcaaccagtggcaacttcaacggtgcactcaacgtattcgaggaaatgaaggcaactggtgtgaagccaaacctggtcatgtgcaacacaatgttggatgtcatgggccatgtgttgcaaccttgggtggtgaagaccatccacagggagatggttaacaagcaagtgcagcccagtaggacggcttactattgtctcctgcatgcatacactagggcactcactggcgaggatgccatggctgtgtaccagctgatgaaggatgaggcaatgggcgtgatgctctacaacatgcttctatccatgtacgccgacattggctatgtggacaaggctgaggagatcttcagagacctcagcgtgcccatggatgatcattccaagcctgataagtggaggtactcatcgatggtgatgcagtattcatcaactgccaacgtcctaggtgtagaggtcatactgaatgaaatggtggaggctggattaaagccaaatatctttgtctggacctcactcagccgatgctatggcaaggcggggcgcactgacgatgtggtcaggtcatttggcatgctccaggacctcgcaagaagaacctgtcttcgacgagggtcctatcttcgacgaggaacctgtcttcgagggagagtcgtttccctccaccatggcaagctcatggtcgacgctgttgagcgccaagacgtggaggccaccagtcagatcgggtgcatcctgctcgaggacgccgccgcgcggatcgtcgacgagtaccagccgcccctgcagctttcgcccgacccggcctccagcagtccagctacaaaggccacctaccacctcaacgagcaggcagacttccgcaaggacaccgtcgagctcgtccagatccgcttcgaggagatgccgagcgcgtcggttcgcggcaaggacgcgctgctccacgagctccacacctgtgtctgtgacgatgacgtgggcgccgttgacatctacggcatggcaagggtcggcaaaaccgcgttcctcaaggccgccaccgagggcggcaatgcgttcaagtccggcctaatcgccaagaccaacagaggcatattgtacgtctacgaggtcaacctgctggacaaccacctcgtcgacgtgctgctggattccgctgcgccgggatggaacatggtggataggaagggatatgaacttattgaagccttggcgcagcagaagagtggtgaaaaatgtggcccgctagtacttaagaaaaaattagtgcaatcgtgggatccaggaaatcttttctaccaaggctgcatcagggttatatcccaccctgctcgcttcaacctcatcaactctgatcagctcctgatggtgttgtcatcttcagcatggtctggtaccgagacagctaccacatggcgtttacaaggtcaaattcagcatcaagatattttggtgctcattaattcaggatcttcacatacttccatcaatgataagtactttccattgttgactggtgttcaacccttggagcgctgtctgaatgtaaaagtggccaagagtccgatcatctcttgttctcatcagttaccacaaactagatggcccatgtctggttaccagttcgtcgtcgacctgatatttctatccttgccattggtggatctcaacctgggtaggaactggttacaagtgcatagcacgatgaaagtgggctggtacaacaagtggatgattatctcctatcagggaacgtcggtctgtttgcaaggtttggtgtcttcatttccttctggggccttgatcaagttacaactacttccagaccacctgatatatgaatctgctggggaacacgggatgtccactttggagcccaaaggccagtctattctgtcacaattggttgtggtctttgcagaacccgttcaacttcatacaattgaagcaaaatgggagctgttcaatggaaagcataatctaggtggtgatcagtgttgcgtactgcatctgtctattcatggtttgggagacttacagatgcaacatgctagtctgtcttttgtcaagaagaaagggtggcaggttctgaagcagagcaacactttgccagataagccatcaccagctactgctcctacgaccaaacagtcatctaccaatttacccgcaaccagttcaacaccaaggctggctacactatctgcggcttga

SEQ ID NO: 24124 - DNA, 756 bp, Zea mays
  Peptide Sequence Number=SeqID_65903
atggccaagattagttctagtcaagcggatgtgcgtgtgcggacgagagcgtgggctgaccagcaggccagggatgtcagtgacccagatcagaattgggcggttaggatgggtgactgggacttcaccttcaccggtaagccaggggcggcgttccccacggacacagtggcgccgtcgccggcggcgaggcaggctggggctcctaaggcgctaggggacgaggtagggtcacttacccagacacggtgcttggggcagcttggcacggcgcggggaggctccggttggccgggcgtcgaagaatcacggtggcggcaagctccgacctgtgcaggggagaggctgagcacggaccgcgcagaggagttgaggaaaggggaaagcacaggggaatcccagtgtcccaatctcaggcgaagctcactatggccaaagcgatggcagaagtgcagcggcgacggcagaacggcgaagcgacagcgggggaaggcagcgctgcggttgggtgagtgcgagggcggggggagcgtgaatgtgaggcagggcgagctgagggagtgtgtggggtatttacctagtgctcgggtgacgtgggcgggtcgtggggacgtgggcgcgggtctgacggcgcgggtgcacgccatgggcgcggcggttgcggacgaaggggcgggtctgacgagcagggcccgcgagccagcgagagcgggtgtgcgcgagcacgcaatggtgatgacagggcagtcccactag

SEQ ID NO: 24125 - DNA, 174 bp, Zea mays
  Peptide Sequence Number=SeqID_65904
atgaagcaattgagaacaagtccccaacaggggcgctgtgagatagctcacactctatttaggtctttcaagaatgagattggattcctcaccaggcctcttgctcctttcccagttgatgaggaagaagttggagatgatgaagttgctcctgaggctgatgcagctgagtag

SEQ ID NO: 24126 - DNA, 1731 bp, Zea mays
  Peptide Sequence Number=SeqID_65905
atggaaacgacgtcatgcttcctggcctccaaagcatcgtccgccagcaggagcaccgcggtgctgccgcccaccgcccccggcttcgcaaagcctaagccttatctgcagctccttggtagcagccgccgccgtgcctgctgcggcagcatcagcgcgcggggggcgccggaggacggcgccgcgccaccacccatcggtcccgactggcgctcgttccgtgcgcagctctacttcaaagagcagctgccagcggtacagaccggcggcgacaggtgggcgcaccctctagcggagcccgagaaggggtgtctcttgatcgccacggagaagctggacggctcgcacatcttcgagcgcacggtgatcctgctgctgtcgtcgccgtcgtcgctgggccccgtcggcgtgatcctgaaccgcccctcgctcatgtcgatcaaagaggcgtcagggtccatcttcgcggacgacgccgacatcgcgcgcgccttcgcgggccggccactcttcttcggcgggccgctggaggagtgcttcttcgtcatagggccccgagcggcggccggaggcggaggcgacgacgcggtggcgcggacggggctgttcgaggaggtgatgcccggcctccactacggcacgcgggagacggtcgggtgcgcggcggagctggccaagcgcggcgtggtgggcgtccgggacttccgcttcttcgacggcttctgcgggtgggagcgcgagcagctgcgcgacgaggtgcgcgcggggctctggcatgtcgcggcctgcagcgccgccgtgctggagctcgccaccgtcgtcaagggcgggctctgggaggaggtgcaggggctcgtcggggagaggaggctctgcgcccgcctccctacggcgagctccaccacggcgagctccaccgacgttggtcggctccatacgatcgcggaggtgcttgccatcctcgactcccagggcttcggccgcctctccgacgccgcggacgattcaggctcagagtacgaggccgacacgagcgatcccaatgccggtgagaggaacggaggcggcgggaatgcagcggaggacgcgctgacggggtcggagctgggagccccggcggtggcggctgctgctgcctctgctgctcaggccgggggcttgtcgtggaggggccatgccgcgagccccaaatgcgagaggcggcggccgcagcaccaacagcacatgggcaggcaactaaggcagaggcacggccacggccataggaggggttacttttactgccgcgctgcggattcgtcgcccaagtaccacccagggcagtcttgccggaagatcaagaggaaggagctgagatctcagacagaagaagaggagggcaacacagaagaagtggagggcaacgacaatgcagtggagaacacggaggatggacaggagagatcagattgtactgtttgcactgatctaccggctgatgttgatggcgaggtgaaccaagatgggcatggctcttctagtaatggaagagtggagggtcgtgatgatcttgccatggtatatcagaaggatggggagatggagagggtactcgagaagcaggctgagctaattggacagttcaaggctcaagaaaatgctcagagggagtgggaggagaaattcagcctgaggcgtgattcagttatggataatgttaacttattaaacaacaaagctaaatcaggctga

SEQ ID NO: 24127 - DNA, 1494 bp, Zea mays
  Peptide Sequence Number=SeqID_65906
atgacgtctaccgtgacgacgcccagccggccgctcgccgccgggagccgtccgcggcggtccggacccgccgtgctctcgctcagcaagggcggcggcggtcagcggcggcagcggcggctggcgccgtccacgagctgcgccgtgctcgcgtcgcccgacaagcagagcacggccaacaagctcccgctgtcgtcgaggaagcaggaggaggaggtggagaaggccacggactacaacgaggtcgcggcagcgctggagaccatctacaagctcagccccgccgtggaggtcgaggagaagaagcgccagggcggcaatgaagacgacggcggtggcgaggccaagaagaaaaggaagcgcagagtggcgggtaggagcacggtggtcgtgaggagccggcgtcggcgtggcgggaggaggatggacctcgggaagcgggtggagatgaagggcgcggccgccgctagcagagagcagcagcaggggggagaggagcaaggagagcgcgagttcgaggagatgctgctgcgggagcactcggtgtcgacggacatgggcagcctggactggaagcgcatgaagatcccgccggtgctcacctcatcgcagagcgcgcggctcttcaagaccatgcagcccatgaaggcgatcttcgaagcgcaggagagcttgcgagaggagctgcagagggaccccaccgacgcggaggtcgccgaggccaccggcatgaccgtccaccagctccgccgccgcctcgatgtcggccgggccgccaggaacaagctcattaagcacaacctccggctggtgccgtacgccctcaacaagtactaccctgacatgggcggcgacgagaggttcgacgagctgtgccaggcgggcgccaacgggctgatcaccgccatcgatcggttcgagccgaagcgcggcttccgcatctccacgtacgcgctcttctggatccggcactccatcgtgcgcgccatgacgctgtccagcttcacccgcttcccgttcgccatggagtcggagcggcaggagatcggcagggcgcgggaggagctggcgttcgagctcggccggccgcccacggacgaggaggtgcgggcgagggtgggcctctccccgcagaggtaccgcgacgtgctgcggatggccaggcccacatactcgctgcacgcccggaaccgcgtcacgcaggaggagctcatcggcgaggtcaccgacgccgaagccgtcggggtcgacgccggcggcaagcacgacgcgctgctccgcctcgccatcgatgacctcctggactctctgaaacccaaggagagcctggtgatcaggcagcggttcggcctggacggcagggggaggcgcacgctaagcgaggtcgccggcaacctcagcatctcgcgggagatggtgcgcaagtacgagctcaaggcgctcatgaagctcaagcaccccacaagggtggaatacctgcgcaggtacatgtga

SEQ ID NO: 24128 - DNA, 1730 bp, Zea mays
  Peptide Sequence Number=SeqID_65907
tcgacaacggtcggggccggggcatcgccaacgaaggtcacagtgacatcgaggttgacggctgtcagcaagggcgcgacactggcgacgggcccaaggaagcagcgcaagtcttcgtcgttgaacgttgtgcacaggcacacccgcatgaacgtcgccgccacgttcagcaacgaagacttgcggccttctcctcgtacaagagcgagtcgctcgacttcttccaggctgactcggcgccgcgtcggagctacagctacccgatcgtgtcgttcgcgtcggcatccgggtgcggtgccggcgtgagcctgctggcggcgatgctgcgcgcggtggccgtagaaggaggcaagcattgtaggctctcaagggctggcgtggcgacagacggatcatatcagagccaaggagcatgggaaggggtgcctcaccttccgttgaatcgcgatgaagcaaccctatcggtggctcgatgccggtggaggcaaaaatggagtggtcccgtcgccgccacttccatcctctctggcgagcaactttcaacccaaccaacatgcgatttgggctcgggcaccgactttcttgtaggctgggagtggcgatcggagggtgaacaggcacaagaaaagtggatccttgcgtgcagtgcgagcggggggcattggcgattgcgatgccgagggtggggatgggcgcacgagtgtgagaagtggatcagggggcgcaggcagtgggcatcggcggttgcgattgttatgaccggcagccactataggagccggctgctcgtcccgtcctcctctcgtggtcttccagaagccatggccgccgccgccgtccactgttccagggcatacgttcctttgagctctggcgcttactcaaggaaaaaaccaacttgccacaagtattgtgcatcggtggagcttacttggaaaccatgccgactagttggatatcgggattttcgactgaaagagctagcttgccaacaattggcccatggagtggatgaacaatatcctgtgaaaagtagcactgtggagcaagctcaggaccgccagccctgtctgccacaaggtgatgcttacttcgctggcctgtcgaagaaagaaatcgagagaaggcggaagattggcgctgccaacaaggggaaggttccctggacaaaaggcaggaaatggagtgaagagcacaagaaggtcatcaggcaacggactgctgaagctctgagagatcccaaggtgatgtcatatcaggaagaaaatgttagggcaccacaaacaagcaaagacaagataagtgcggcgctgaggacggtctgggagaggcggatcgtttctgtccgatccagacagaaggttctgcagatctggtccaacagtatagctgaagcagcaaagaacggtggtcacggccaagatatgcttggctgggacagctacgagaggatcaagtcagagatggtatctacgttcctgtggatcaaggagaggggacgtatggtgaagaagcttgaaagggccgtggcaaaaatagctgccaagaggcttcaagtggtacggagaagggaagaacaggccacaaggatgaagaagctgaaacctgactgtcagacgttgctgcaaaacgcggaccgtcaaccagcaagagtggtagtatctgcaaggccaaagcttaaggagaggctagctaaggagcaccataggaaggatgggcatgtaccctag

SEQ ID NO: 24129 - DNA, 1026 bp, Zea mays
  Peptide Sequence Number=SeqID_65908
atcgaagcacgaaaggaagaattggagaccaatttatcaacaaatcttatcaggcgtcagaaagagctagaagcgataatttcatctgcagattctagaaccttgcctttggaagctgaggcaaaggagcaagaactgaaaagttccaagagaaaccttgatgaactaacttcattattaaaggctaatgtcgatgccataaataatttcaccagaaagatggatgatctgaaaagaaaaagggatgatctgaaggctcgtgaagctattttagagcagactgtacaagatggtgccaaagacttagaacagttgatgaacagcaggaacacttatctagccaagcaagaagagtgcacgaagaagatccgagatttgggcttgttgcctgctgatgcttttgaagcgtacaagaggaaaaacaagaaacagctacataagatactctatgactgtaatgagcagttgaagcagtttagtcatgtgaaccaaaaggctcttgaccaatatgtgaacttcacagaacaacgcgaacaactgcagagaaggcgagctgaacttgatgccggtgatgtgaaaatcatggaactcatatcggttttagaccaaaggaaggatgaatccattgagcgcacatttaaaggggttgcaaggcacttccgtgaagtgttttctgagctggtgcaaggtggtcatggatatttggttatgatgaagaaaaaggatggggatgcagttgatgatgatgaggaggaggatggacctcgtgatccaggccctgatgggagaatagaaaagtatatcgtcctgctgctttccttaagtttcattccagatatgatccgccgtctagctgacatggctgacactcagttcattgcgaccacattccggccagagattgctaaagtggctgataagatatatgccgtgagacacaagaatagggtgagcaacatcgacgtggtgtccaaggaggaggccctggacttcatcgagcgtgatcagacgtacaatgctagctga

SEQ ID NO: 24130 - DNA, 552 bp, Zea mays
  Peptide Sequence Number=SeqID_65909
atgcaggcaagcattgcagttgcagaggcgctcgatgccgggaagctcacgcctcagcccgtcgccgacgcggccgacttcgcagttgccggtctcgccgtggccattggcacgcttgccgtcacagcgtcgttcatgcttgtctccttcgacgcgcgcgcggggcagggccaactgcgtcgtatcctcgacctcggtccatcactatgtggaccacgcttgttgctcgtcttctttgtggggctcctggccgccgccgagatgctccgcctcccattcttccacggcgccatgctgccgccgcgccaccacgtcatgccatgcctcgcgtacccgctcgtcgcccatggcatcgccgagccagggttgctcgcatcgtctgcacttgtcgtgccgctcgcctgcttgccattcctcaccgtgcatgttctcgtgctcgccacgccggccaccgtcgccgcctacccaggccagctcgcccatgccgctgatggaattgggcactgcgcgtacccgacgtacgccgccacgctgctcctcgccctcatcgcg

SEQ ID NO: 24131 - DNA, 342 bp, Zea mays
  Peptide Sequence Number=SeqID_65910
atggaagccaaccccaaccactgcctctgccgcctcgcctcagctctctcccacggtccccggcttccgactcctcccccgcccctcctcttcccccgcctcgcactctccagctccgtgccctccacgggcccgccaccgtcgctggatgccgtaaggaagggggagggagaggaagcggcggaagccagggcctccgaagctgatgccgaagcggggaaggaggaggagcatgaggacgacggcggtgcgcacgtgaacaaggccacctgcgaggtcggcagcgtctccaatgctcaacaactaccggccatggtcctcagcgacatcaagaacaagtaa

SEQ ID NO: 24132 - DNA, 792 bp, Zea mays
  Peptide Sequence Number=SeqID_65911
atggaggccgccgccaagaaggaggtccgcgccgaggtgcgcgacgtgtgggccggcaacttggacgcggagctcgcaaacctctcggcggtgctgccgcactacccctgcgtatgcgtggacacggagttccccggcgcggtgcacggctcggacacgccgcggcacctccgcggcccgcgcgagagctacgcgctggtcaagaggaacgtggacgacctcaagctgctccaggtcgggatcgcgctgtcgggccccgccggccgcttccccgtcgcgtggcagttcaacctccgcggcttcgaccccgcgcgccacccgtacgcgccggcctccattgccatgctccgcgcgcaggggatggacttcgccgcgctgaacaagttcggcgtcgacccctacgacttcgcagtcgggttccaccgcagcggcctcgcctgcggccagctcacctggaccgcgttctcgggcgcctacgacttcgcctacctagccaaggtgctcaccggcggccagccgctgccggcaacgctggacgggttcctcgccctggtacgtcggctgttcggctgcaatgtgctcgacgtcaaacacctcgccaggtgctgcgccatgcgcggggggctggagcaggtgtccgccgcgctcggcgtcgagcgcgccgccggccgcgcgcactgcgccggctccgacagcctgctcaccaccgacgtactcctggcaatgatgaatcgcttcttcaccaacgtcaatgtgctcgcgcacgccggaactatcgtagatctagcctag

SEQ ID NO: 24133 - DNA, 321 bp, Zea mays
  Peptide Sequence Number=SeqID_65912
atgatgttggtagaccaaacaacggtactcgatggaccaagtgtgtcggtcaaaggcccgacatggcaaggtgtcaagagcgtcgtgaaaatgacaatcggggcatctctagctgaggcgcaggggagggctgcctcccagactccaccttctgctgaggcgaggggaaagagtcctgctgctcctgctcctggcgttggtgctcctactcctcgtgtggtcactcaacgaacaggtccttacggaaaggtactcaggaaacagcctgagtcccctaaagtatcacaagatcatcatcaagataacatcatcgtatcatag

SEQ ID NO: 24134 - DNA, 369 bp, Zea mays
  Peptide Sequence Number=SeqID_65913
atggcgcagggtggcgcgtggcggtgtccgcggtccgatcgtgggatggatgtgaaagggaaatgtgcccttgggccatttctaagtattttgaatcagagaaaatacaattggatatgtcttggctcgagcagccaagactctgctcggtctaggtgcaccggacagtgtccggtgcgccaggctggctctggtgaaaaggccgctctcggaaattcgtcgtggcgtacggctaaaattcaccggaccgtccggtgtgcaccggactgtccgggtgagagactccaagttgtggagattcctcacaaatgggaaatagtaaagaaagaagaacaccgtggtattcaagccgatcattggatcacttga

SEQ ID NO: 24135 - DNA, 444 bp, Zea mays
  Peptide Sequence Number=SeqID_65914
atgggagaacgacgacgggaaggtactctgggtgggtcagacaactccggcgaggaattccggctggggagaggaggtctagggcgcgctaaggactgggctagctacgacagggtaaggggaacactatggcccaaagcagaagcacaagaccaggctaaatcagctagtcacggcgcgggcgcgacaaaccgggaagaggctgagcgtggaccgggcggtaaagttgaggaaaggggaaaccactgcgggttcccggtgcgccaagctcaggcggagctcaccgtggccaaagcgctgggagaagtccagcggcgatggcggaacggtctggcgggcggggcgcacaccatgggcacgacggttgcagaggaggaggatgggtctgacgggcagggcccacgtgtcagcgagagtgaatggcagaacgggcgaacgggctga

SEQ ID NO: 24136 - DNA, 207 bp, Zea mays
  Peptide Sequence Number=SeqID_65915
atggagcttctcaatctgctctgtcagatagctttaaaggggagaatggatgaacagtggactaaacaagatcacgggttcagtgcatctatcgccgccagtgatctccgcaccgcggttcacgccggccaccgcgattcacgtgtgaccgccgcgattcgtgccctgtgtgaagtggataaccgcaggagattagaaaatgagtag

SEQ ID NO: 24137 - DNA, 159 bp, Zea mays
  Peptide Sequence Number=SeqID_65916
atgggaacaaatgggcatctcgacctcgacatgggaggtaaatccgtagatcaaaagggatctggtgtggaagacaatcttgccattaaaggccaaaggaccataactttggcaaatggtcttcaagctgggaagtgccttatagaatcatgcagataa

SEQ ID NO: 24138 - DNA, 438 bp, Zea mays
  Peptide Sequence Number=SeqID_65917
atggaggtgagcgctgcacgcagggggaaacacaataggggcgccatggacagggagctgctgctcgcctgcagcaagggcgccgagttggggaggctgagcgcagggaggaagaagctactgctgggagtgccttctctatgggagctcgaccacggctgccctgcgcaagggaggacagggaggagggcgccatgggaggagctgagctccctgctggttgccgtggagaccagggaagaagaaaaaaaaagggcgccggctgctgctgcgcgagggagaaggagtagtgggcgtcgagcagctggagtagaggtccggccatgggagagaggggagctcgcaggagaaactccatggctgctggccttgcttcctgcgcgcttgctgctgcgcgtgggaggaagaaagctgctggcggttgaaagaaatggaggg

SEQ ID NO: 24139 - DNA, 192 bp, Zea mays
  Peptide Sequence Number=SeqID_65918
atggggaagcctgtcccatcactcctcatgctcctcctcagccgaggttgggtcccactcgactgtccaacccggtgtgaccgcacttgtacccaccataaccggagtgggagaccacatctcaggtcgcgtgaggagggcaatctactgccaggttcactcaggtcctatgggactcttagaaggatttag

SEQ ID NO: 24140 - DNA, 1287 bp, Zea mays
  Peptide Sequence Number=SeqID_65919
atgccgccaaagaaagcggcgccatcgaaggcggagctggccaagaagcagaaggtcgtggaggacaagaccttcgggctgaagaacaagaataagagcaagaacgtccaaaagtacgtccagtccctgcaccaggccgtccagcccaagcctgactcgaccaagaccgccgccaaggtaccggagagcgctcagatcgaaagccctccccgttgcttccttcgcttctcgctccgattgcctcgctcttctaacgtttattttctttttgatgtggatgcggacgtgggtgagcagaagaagaaggaggaggagaaggcgcgcgagaaggagcttaatgatctgttcaaggttgccgtcagccagcccaaggtccctgttggtgttgatcccaagtcaatattgtgtgagttcttcaaggctggccagtgccagaagggttttaagtgcaaattctctcatgacctgaatgtccagaggaagggtgaaaagattgatatctatacagacaagcgtgatgcagaaaccatggaggactgggatcaggaaactcttgagaaggttgttgaatccaaaaagatggagtatcagcaaaacaaacctaccgatattgtctgcaagtactttcttgatgctgtggagaagaaacagtatggatggttctgggtttgcccaaatggcggcaaagagtgccattacaggcatgcccttccgcctggatacgtactgaaatcacaaatgaaggccttactagaggaagagagtgagaagatagctattgaagatgagattgaagatcagcgtaaaaagacaaagactacaacccctatgacaacggaattgttcatggaatggaagaggaggaaggcagaagaaagagaagctggtcaggctgccttgaaagcagagagggctaagaatgatcgcatgagtggccgtgagttgttcatggctgacgcaagtgtgtttgttgatgatgctgaagcatacgaagtatatgagagagaggagtctgaggccaatgaagaatcggtaaatgttccttccttcgctgatatttgtcctctttcaagtaggcgtggtcaaagaaataataggttaaccaataaaagtcagaatccaggtccaagttcatcaacatctaatggcaaggaggttgaggagcctgacgacgatgatatcgatgttgacgatgacttagacattgatgaattgaatgaacttgaagcaagcctgtcgagaacttccatccaaattcgagagcctggcgagggaacatcatcttga

SEQ ID NO: 24141 - DNA, 192 bp, Zea mays
  Peptide Sequence Number=SeqID_65920
atggagcacgggtacccctgcaacggctgcggcggcaacaaggagaagaggccgccgctcaagagggggcagctcaagcttagagctatgtcgtggagagcctgttgctctatcgtgatttggctgttctcctcaactcaattggcttcacagttgctcatccgaattcgagcagtggttactgtgagctga

SEQ ID NO: 24142 - DNA, 558 bp, Zea mays
  Peptide Sequence Number=SeqID_65921
atggcaactggtggctgcgaggctgctccgctcggcagagctcgcctcgtcctcgtcaagacgccgtcggggaacccgctgccccggcggaggggccaggtgaaggagaggatcgtcagggacattgcggatgctctggccacggcggcggtcctcgcctgcggcgacaggacggtagtgggcgcgggcaagaaaggcgaagggggcagggcgcccgcgtcgccgtctcccggtgcgaagaagaaatggtatcctcgtgaatcagggaacgacgaagaccatcgatcaatcattgctggtggaccggagattggtcctttgggcgacggaatttcgtcacatgcagatttcatgccgactgcgagacgaagcgctttaaggagaagtggatatgcagctgttggagaaaagcggtcactccctcgcgtctccaggaatcccaaccgcttctcggtcgtcactgtcagtcgccctgcagtgcagtacagtgccaccatgccgaacctgacagacggttgctttgtgccatgcgatgtatctagtgacttgttgaattag

SEQ ID NO: 24143 - DNA, 1884 bp, Zea mays
  Peptide Sequence Number=SeqID_65922
atgcatattgatgacttaagggctttagcacctctgtggctctcaaaaactgaagaagtgaggcaagataagtcccattggtcaaccaatattactggcgatatatatggcatgggttggatcagtgagatgtacgggtattcatttggtgctgcagaagtaggtctacggcacaagataaatgatgacataatgatctacccaggttatactcctagacctggcattgagccacttatcttgcactatggtttgccatttaaagttggaaactggtcattcagtaaattagaacaccatgaagatggaataatttatgattgcaaccgcttgttcgatccacctccttttcctagagaggttgagatgatggaatctgacccaaatataaaacgtggcttatttctaagcatagagtgcattaacaccttgaatgaaggactcttgttgcatcatgcatctgctggatgccctaaaccacagtggtcaaaatacctgagttttcttaaaagcaggaggttttcagagcttacaaaaccaaaatactggaagggtgaacaggttgacagcataatgaccatgcaacatgttgcattgtccaaggcaaacaatgaatatccaaaaatacacacccttttctctaccgaatgttcatcatattttgactggcaaactgttggacttatgcacagttttcgtttaagcggacagcctggtaacatcacgcgcttattgagctgtacggatgaggacttaaagaactataaaggacatgatcttgctcccacacattatgttccatctatgagccgacatccattgacaggggactggtaccctgcaataaacaaacctgcagcagttctccattggctcaatcatgtgcagactgatgctgagttccttgttatcctagatgctgatatgatcatgagaggccccatcaccccatgggaatatggtgcaaaacgtggccatcctgtttctactccttatgagtacctcattggttgtgataacatacttgcaaagatacacactcgcaatccctccgcgtgtgataaggttggtggtgtcattatcatgcatatagatgatcttcggcgttttgctctactgtggcttcacaaatcagaggaggttcgtgcagacaaagctcactatgcaaccaacattactggcgatatatataattctggctggattagcgagatgtatggctactcttttgcagcagctgagattaacctgcgacacatcattaggagggacataatgatatatccaggttatgttccactgcccagggcaaaatacagggttttccattatggtttgagatttggagttggtaattggagctttgacaaggcggattggagaaacgctgatgtagtaaatacatgctgggccaagttccctgaaccacctgatcctgctacgatcacgaaacaagatctagatgcacgggagagggattttctcagcattgaatgcgggagagctttgaacaaagccctatacctgcaccataagcgcagaaattgcccccggctagacaccattagcagcacatctaagaaaactgatcaagtttctgcttctaacaaaattgtgagtgttgcacaaaagtcaagaagtataagtagaggaaacatcgaatccatggacgagggaaggttgaagactgtcaagaggactgcagcttctgtacaacctctacatagatcaaggagactggccaggtcttctaggatgtggataattgctgtatgggcattatcaattgtggtgttcctattagtaatctccatgtttttcactgagcaaaggagaaacgcttcgagatctagggtttctagaagtttaaaggctcatgtctga

SEQ ID NO: 24144 - DNA, 1341 bp, Zea mays
  Peptide Sequence Number=SeqID_65923
atggcggcggggatcgccggcgcggtggtggcagcgctcctgcttctgtatccggccagggcagcggcagcggcggcggtgggggaggggcggcggttgcacactctgttctcggtggagtgcggcgactacttcgactggcaggcggtggggctcctccacagcctccgcaaggcccggcagcccggcggcgtcacccgcctcgtcagctgcgcggaggaccagctcccgtcctaccgcggcctccgcatcggccacaccctccaggtcccctccttcagccgccacccacgcaccggcgactggtacccagccatcaacaagccagcaggggtagtgcattggctaaagcatagtccagaggccgacaatgttgattgggttgtaatcttggacgcagatcagattattcgagggcccattattccttgggaactcggagcagagaaagggaagccttttgctgcttattatgggggcattgagtacctatccatctacttgggacttaactttgtttggaatagtggttttctaactagggacattgaagaacaatatgatctcggtggcagcagcggtggcagatccttagctggtcgcctaaacccgaccattgatgtgttggtggcacatgttgtgtcatggctccaactctacgacaatggaagcttgggtggcaatcggacgtcactgggcatgagtcgtgggctggtgacaggcgcaacaaagactggcagcttgaggccaccatggaacaccgtctacaatagaaaggggaagcggattgctgccgatgattctcacgaatgtcgcaagaagaagaggtatgagcaggcccatgctgcccaggatggggcagtgtccactgaaggggtgctggtgttgggcattgcctccatcatggcccaagctgaagaagaggagctagagattgaaccaccatccagatcgagggtggaggcaacacgcggtgggcgtctgtcgaggacccggagcttgtggcactcatggctctggtatccgccagcaacaccagcaccccccccaaaggtgccccccaccatgatgctagagatccacctcgatgagaaccgattgttcgtccatctcaaggacaagggcggtggcgggagcatgcattggatcctcgacactagcgcggaaaaccacatgacaagggagcgcatggccttctttaagcttgacaccggtgtccgcaagaccatttggttcggtgatggctccatggtcaccatcgaggggcgcgacactatcctctttaggtgcaagagccacgagcaccaggtgctggttggcgtccacttcatccccgactga

SEQ ID NO: 24145 - DNA, 654 bp, Zea mays
  Peptide Sequence Number=SeqID_65924
atggcgcaccggacatggcgcaccggacagtctgacgctcttcaactgaggcttgatcgcgatgaggcgggagccgtcgacggcggcgatgacccagcggccttgcccgagagcgcactgttcgacatcgatctggcacaagctattcatttccatctcaagattcctgggctttggatctatgcagcaacatgggaattcgatcagaatccaaatgacttggcacattctaatgagttaaaactagaggtcctggatgacctaagagagattcctctcataacgaggactagctactgggattggtttgctaggcttcagcttagcaacttgaacagtttagtaattccaatagaaaagatgctatatcaaatcaaaagctgcagagatgatacgtctgaaattgatgtcaaacctgatggttccaggagagttaaggacagagctgaactaaagaaccttacacagtggcatctaccagatgattctgaagagatcagcggcaatgatggtgatgaaggtggagcaatgatagtgatgaagatggtggtgacgatgacatacctagatcggatggcattgaagatgacccagagttcattgatgatggtggcatctttgaagggggtggggcttgatggatatttttggtaa

SEQ ID NO: 24146 - DNA, 612 bp, Zea mays
  Peptide Sequence Number=SeqID_65925
atgaccaaccctccgatcgactttactgccgagctagaggctcatgatgactcaaccaccaagaatgagtcccgaaagagctattctgcactggctaaagtgacgactgatgctaagttccctagagccctcgtggacttagcccaagatcgtctagccaagccgatcaaccttaaagaatttatcctcgagcttaagattgatcctatcattgtgcctgcaacagcatcgaccgcgacacctaccaagtcaacgttgcgaccatcttcaactccggggggttccacttcgaagccctctccttcatcgccggccagaagggaatcctacaccgcgttgtggacgcaggaagggaagcctagaagcccgcaccatcaacacagccggggaggggtcctcgccgatgtcgaagactgcctcgaccgcaactttggtcgagacccaaccaaccaccgtgcgagccacgccaatgagcggcgagccctagaggcctcgactcccactccaatgcgcgcggactccgctgtccactttgcccacccaggaatggacccggatcactctaaagagggggacggaggcccccgatgctcccttgatgtaacaccctga

SEQ ID NO: 24147 - DNA, 171 bp, Zea mays
  Peptide Sequence Number=SeqID_65926
atgacgacgaagactccgatgatggtgttctccttgcgccgatgttgtaaggggtggagcaatgatagtgatgaagatggtggtgacgatgacatacctagatcggatggcattgaagatgacccagagttcattgttgatggtggcagctttgaagggggtgaggcttga

SEQ ID NO: 24148 - DNA, 3219 bp, Zea mays
  Peptide Sequence Number=SeqID_65927
atggagattgttgttggtggaaggaacaaataccttatcaatggccatcttgcacaaccttcccgggtgcagacccttttccactcagtgcagcttaatgtaaacaatcctcattttctaattatgcaagggcgcataacaaaagtgctgaacatgaagcctccagaaattttgtcaatgttagaagaggcagcaggtacaagaatgtacgaaatgaagaaagaatctgctcttaagacacttgaaaagaagcagaataaagttgatgagattaataaactccttgatgttgaaatcctccctgcactagagaaacttagaaaagagcggtgtcaatacatgaaatgggccaatggcaatgctgaactggataggctcaaaagattttgtattgcctatgactttgttcaggctgagagagtgcgagatggcgcactgaatgatgtcaaacaaattaaaacaaagattgttgagctggatgaaactacagaaaacataaaagcagctatacaagaaatggacaataacatttctaccttggctgctgaaaaagaagctaaagtaggtggtgaaatgaaggttctgtcagacaaagtggataaactatcacatgtacttatcaaggaaacttctgtgatgaataatcaagaggaaaccctgaagtctgaggaaaagggtgctgagaagattctcacaaacattgaggacataaaaaggtctatactcgagagagatgctgctgtaaaaaatgtagagaatgaggcttctgacatgaaaagaagagcagaggatctcacaaaggagttggacgagaaggagaaagaataccagggtgtgctagcaggaaaaagcagtgcaaatgagaagaaatgccttgaagatcaactgagagatgcaaaagctgcagttggagatgcagaatctggactaaagcagctagctacaaaaataaagcattctgaaaaggagttgaaggagaagaaaactctattagtatccaagcgtgatgaggctattgctgctgagaatgagctgaaaacaaggacaaaagacttagaaggtatcaaggcatccatgggatctattaattatgacgagggtcagatggaagctttgcaaaaggaccgttctgcagagttagaaattattcaaaaattaaaggatcgtgttcgtaacctttctggtgagcttgctaatgttcacttcagttatcgagaccctgaaagaaattttgacagatcaaaagtcaaaggggttgttgcacgtcttattaggattaaggacagctcaacagcaacagcactggaggttgctgcaggtgggaggttattcaatgtggttgttgacactgaagaaactggaaagcaacttttaaaaaatggggatctacgaagtagagtaaccatcatacctttgaacaaaatccaaacttacatgatacctgacagagttcagcagacagctcgtagactggttggtcctgacaatgtaacattagctctagaattggttggatatggtgaggaagtaaagaatgccgtggcttttgtctttggctcaacatttgtgtgtcgtaatatggatgcggcaaaagaggttgcgtttaataggcaaattagcagtactagtgtgactcttgagggtgacacttatcagccaagtggtcttttgactggaggtagtaaagggggtagagggaacttgctaaggaaactcgacgaactagctaaagctgaggctgatctatctgatcatgagaaaaagctctttgtcattgaacagcagattggagcccttttaccattgcagaaaaggcacactgagttgaaatctcagtttgaactgaagtcatatgatctctcgctgtttcagaacagagttgagcaaaatgaacatcacaagttaggtgagctcgtaaagaaaattgaacaagagcttcaagaatctaaacaagagttgacagaaaagcaagtgcagcatgaaaaatgtgtgtccacagtttctgagttagagaaaactatcaaaacttatggcacggaacgagagggcaaactcaaagcgctggaaaaaagaatcaaatcaattaaatcagagatgcagtcgatgtcgaagcaactaaaggcttatgaaagtgacagggagaggctgatcatggagaaagatgcggttgttggtgagcttgctacactggaagagcagctaacgacttcaaaagctcagattacttctctgtctgaaaccttggaaaaacagaaggacaaggttacatccataaagcaagattatgatcaagctgaaagtgagctcaacgttgggcgttctaaactgaaggaatgtgactcacagataaaccgtatggccaaggaacagcagaaacttcaacagaagttaagtgattcaaatgttgagaggaagaaaatggaaaatgaggttaagaggatggagatagagcagaaggattgctcttcaatagttgataagctagtcgagaaatataattggattgcaactgagaaacaattgtttgggaaaagtggtacagattatgattttgaatcttgtgaaccacataaagcccgagaggaacttgaaaatcttcaagctcaacaatccagtcttgagaagagggtcaataagaaagtaatggcaatgtttgagaaggcggaggatgagtacaatgatttgatgtcaaagaaaaacatcatcgagaatgacaaggcaaaaatcaagaaagtgatagaggagttggatgagaagaagaaggaaacattgaaggtcacttggctcaaagtaaacaaggatttcgggtctatattcagtactcttttacctggtacaatggcaaaacttgatcctccagaaggtggtacttttttggatggtcttgaagttcgtgtggcatttgggacagtttggaagcagtctctgtctgaacttagtggaggacaacgatcccttcttgctcttagtcttatcctggctctgcttctttttaaacctgcaccactttacatattggacgaggaggttgatgctgctcttgatctgagccacactcaaaacattggtagaatgatcaaggctcattttccgcactctcagttcatagttgtctctttaaaagagggtatgttcaacaacgccaatgtgatatttcgaacaaaatttgttgatggtgtgtccaccgtgacacgaacagtgccttcgaaacagagatga

SEQ ID NO: 24149 - DNA, 726 bp, Zea mays
  Peptide Sequence Number=SeqID_65928
atgggcgtgcctgatgtctgcgcgctctggcgcgcactaattgcagttgcaggcgaccgttggcgcgaagtagccgttggcccgcatgaggccggggcagaagtgatctggcgcaccggactgtccgaggcgcttcgctataattcaccggacatgtccggtgcacaccggacagtgtccggtgttccagaggacagcggctctgaactcgccagcttcgggaatccgctccgctataaatcaccggacatgtccggtgcacaccggactgtccgcgccctccgacccccgccgggccaccaggcagaaaaggaacggaacggcgcagccgcggcggcggcggcggcggcggcggctgtaggttcccgcaccagcgactggcggacacgtatatccaatcatccatcttctctcgcacggccgcacccgtcctcggactcgttccgtctgctagcaatgccgctggcgctcgcgcagttgcaggacctgcgggaccgcatctccgaccgcctccgcccatggagccgctccgcgcagttctgggtccgcgccgcggacatctacaccagctacaaggtgtgccagctgcgggctgggtttgtgaaggatgaggacgagcgggaggccatgtgggagcagcagcacgagctcggcgcccagaagatgtattccctctgctccgagctcggcggtcttttcctcaaggcaaaagcaataccaatttga

SEQ ID NO: 24150 - DNA, 405 bp, Zea mays
  Peptide Sequence Number=SeqID_65929
atgagggtgctgcgcagtgagtgcagcgaggagaacgcttgggaggggttcaaggccgacgatgaaagggggctcgtcgctggtgaggtcgctgtggtgggagaggacgcccgcagcgggaaggaggccagcagcggtggcggggaggaggtcggccgcatcgctgctggggagaagaccagcggtggtggggctacttgcgctagccccaaagccaggggtgagaaggtaaatacacggggtaaaccccaaaccctaaacgggtactctaacaaatatgagacacaaaaagacaatattgatgaggtgacacaaaagggattgaagccactcaaagatatggagaaagacaaggctcgacttgctcgagcatataataagaaagccaaaaccaagttgttctaa

SEQ ID NO: 24151 - DNA, 675 bp, Zea mays
  Peptide Sequence Number=SeqID_65930
atgcagtacaatggatcaagcagtctcattagctgcgagaagcagacgattcgaatcgagttttatccttgcaagatcagggctcaccgccttggcatacaatgcctcactgaccccgaccgccgtcgtgcagtgaccgcacttgtacccaccataaccggaatgggagaccacgtctcaggtcgcgtgaggggtaaagtccactgccaggttcaatcagggcttgccttccaaagcagtggcaggcagatcctctggtgcaggctctggtgctggatccggggctacctcctgagcagctccttgctccggcacgaggacgtactctccgtcagcgagggaggctctggtggtcacaacggtgtacggcttgacggcgggggtggcccggaatcgctcggtccacgtacgcaggcgggtgtcctcgtcggtggcggaggctatctgtgcattgaatcgaaaaatggcgcagtgtcttacccggtctacgctcgccggcggtcggatggagtccggcgaccgtggactggcctctccggcgaagcagacttcgattcctcgctcggggagcttcaccgagcgaaggtgcgggctgaggtcgtcaacctcggcgtggagaaaacttcatgcacaagcgacaaagggaagaagtccaagacttgcacgacaagatag

SEQ ID NO: 24152 - DNA, 1701 bp, Zea mays
  Peptide Sequence Number=SeqID_65931
atgcagtccttgcttgcaggaatccccgcgggcggtgccgcggcggcggcagccgtcggtgggctggtcgcggccgccgcgcttgccgagagggccgaccagaagaaccgcctcaacttgcccccagctgttcctggtttacctatcattgggaaccttcatcagctgaaagaaaaaaagcctcatcagacatttgcaagatggtctgaagaatatgggccaatatacagtataagaactggtgcttcttctgtggtggttgtcaattctgcagaagttgccaaagagtttgctcttctggtgattagcttaccagcagttcattttctctgtttcctcaaggtagagatgtatcagggtcttaaacgaccacccttttgcttcgaaaaaatgccatattactgccgaataccattaaacgctatggttgcaaaatattcatccataaatactcggaagctacctaaggcactttcagtgctcacacgagacaaaaagatcgttgctatgagcgaccagggtgagctttacaaaatggtgaagcgctatattatggtgagcatgttgggtgctgctgcccagaaacagtttcgtgacacaaggaacacgatgattgacaacatgttgagcacttttcacgcattggtggccgatgacccaaaggctcctctcaacttccgggatgtattccagaatgagctattcggcctatccatgactcaggcaaatgattttctacatatattgagatttgagactgggctgcaaatccaggctttaagcgaggacgtaagttccgtctatgtagaagagtttgggaaggctttatcgagggaggaaatctaccagactgctgtggctgacatgatgatgtgtgcaatcgaggtcgactggagggatttcttcccatacctgggctggatcccaaacaggagctttgaaacaagagtattgactacggaagccaggagaactgcacttatgcaagccctgatcaatcagcaaaaggaaaggatcgcacgtggagagagtaggatgtcgtacgtggacttcctgctggctgagaatacactgacggatgaacaattgctaatgctggtgtgggaagcagtcatagaagctgctgatactaccttggtcaccaccgagtgggccatgtatgagattgcgaagcacccagaaaaacaggaatacctttatcaagaaatccgaaaagtctgcggcaacaagacagtcaccgaggatcacctgccagagttaccgtacttgaacgcggtgttccatgagaccctaaggcggcactctccagttccgctggtgcctccaagacttgtccatgagagtaccaacttggctggctacgaagttccagccgggacacagatgatcataaatctgtacggatgcaacatgaacaagagcgactgggacgcgcccgaggaatggaggccagagaggtttctggacgggagcttcgaagtcgcagatatgtacaagaccatggcattcggcggaggaaggagggcctgtgcgggaagcatccaggcagtgaacatcgcgtgcacagccatcgcgaggttcgtgcaagagtttgcgtggacgctcaaggaaggcgacgaggacaaggacgacaccatccagcttacaaccaacaggctttacccgttgcatgtgtacctcacacctagaggaaggaaatga

SEQ ID NO: 24153 - DNA, 441 bp, Zea mays
  Peptide Sequence Number=SeqID_65932
atgaagattccattaacaactcacagtggcattatgtcaagtggatctattgattattacagaacactgaccaaaccagaaagacagagaaagcagtacatctggcgatccggactgccccgcgcctccatccattttagagaaagcaatattctgttctcagcagttttctataggtttacccagcaaaatctcccagcttggaagccagcaatgacacctggatttgtaatagaatggtttgataaagctacatgtacatgtatctggcacaatgacagattctatcttcaagaaagttttcacaaagaatgttgccgccgcacaaccccttcctggttttcgactaatgaaaggaggtatacttctgaaacttttacaaccccagatttctgtccatcatttggcgatttcaaattgcctaaaactgtgctcgtgtga

SEQ ID NO: 24154 - DNA, 3162 bp, Zea mays
  Peptide Sequence Number=SeqID_65933
atgcccggcataccgagggatgtcgccgagcactcgctggatattcgggccggagcccgacctgtcagacagcctctgcgccgattcgacgaggagaagcgcagagtgataggcgaggagatccacaagctaatggcagcagggttcatcaaagaggtattccatcccgaatggcttgccaaccctgtgcttgtgaggaagaaaggggggaaatggcggatgtgtgtagactacactggtctcaacaaagcatgtccgaaggttccctaccctctacctcgcatcgatcagatcgtggattccactgctgggtgcgaaaccctgtccttcctcgatgcctactcagggtatcaccaaatccggatgaaagagtctgaccagctcgcgacttctttcatcacgcccttcggcatgtactgctacgtcaccatgccgttcggcttgaggaatgcgggcgcgacgtaccagcggtgcatgaaccatgtgttcggcgaacacatcggtcgcacggtcgaggcctacatcgatgacatcgtagtcaagacaaggaaggcttccgacctcctctccgaccttgaagtgacattccgatgtctcaaggcgaaaggcgtcaagctcaatcccgagaagtgtgtcttcggggtgccccggggcatgctcttggggttcatcgtctccgagcgaggcatcgaagccaacccggagaagatcgcagctatcaccagcatggggcccatcaaggacttaaaaggcgtacagaaggtcatgggatgtctcgcggccttgagccgcttcatctcacgcctcggcgaaagaggtctgcctctgtaccgcctcttgaggaaggccgagtgtttcgcttggacccctaaggctgaggaagctctcgggaacctgaaggcgctccttacaaaggcgcctatcttggtgcccccagctgatggagaagccctcttggtctacgtcgccgcgaccactcaggtggttagcgccgcgattgtggtcgagaggcaagaagaagggcatgcattgcccgttcagaggccagtctacttcgtcagcgaggtactgtccgagaccaagatccgctacccacaagttcagaagctgctgtatgatgtgatcctgacgaggcggaagttacgacattacttcgagtctcatccggtaactgtggtgtcatccttccccctgggggagatcatccagtgccaagaggcctcgggcaggatcgcaaagtgggcggtggaaatcatgggcaaaacaatctcgttcgcccctcggaaggccatcaagtcccaggtgttggcggacttcgtagctgaatgggtcgacacccagctgccgacggctccgatccaaccggagctctggaccatgtttttcgacgggtcgctgatgaagacgagagccggagtgggcctgctcttcatctcgcccctcgggaaacacctacgctacgtgctacgcctccatttcccggcgtccaacaatgtggctgagtacgaggctctggtcaacgggttgcggatcgccatcgagctaggggtcagacgcctcgacgcccgcggtgactcgcagctcatcatcgaccaagtcatgaagaactcccactgccgcgacccgaagatggaggcctactgcgatgaggttcggcgcctggaagacaagttctacgggctcgagctcaaccacatcgctcggcgctacaacgagactgcggacgagctggctaaaatagcctcggggcgaacaacggtttccacggacgtcttctcccgggatctgcatcaaccctccgtcaagatcgacgacatgcccgagcccgaggcaccctcggcacagcccgaggcaccctcggctcggcccgaggcgccctcggttcagcccgaggtaccctcggcccccgagggcgaggcactggacgtcgaggaggagcagagcggggccacgcctgatcgaaattggcaggccccgtacctgcaatatctccgccaaggagagctacccctcgaccaagccgaggctcggcgggtagcgcgacgcgctaagtcgttcgtcttgctgggcgatgaggaggagctctaccaccgcagcccctcgggcatcctccagcgatgcatctccatcgccgaaggtcaggaactcctgcaagaaatacactcgggggcttgcggccatcatgcagcgcctcgagcccttgtcgggaatgctttccgacaaggcttctactggccaacggcggtggctgacgccactaggattgtccgcacctgcgaagggtgccaattctatgcgaagcagacccacctgcccgctcaggctctgcagacgatacccatcacctggccctttgctgtatggggtctggacctcgtcggccccttgcagaaggcgcccgggggctacacgcacctgctggtcgccatcgacaaattctccaagtggatcgaggtccgacccctgaacagcatcaggtccgagcaggcggtggcgttcttcaccaacatcatccatcgcttcggggtcccaaactccatcatcactgacaacggtacccagttcaccggcaaaaaattcttggatttttgcgaggatcaccacatccggagcgtgccaacgggcatgattctacaagggctcaagccccggatttacaacgacctcaacaagttcggcaagcgatggatgaaggaactcccctcggtgatctggagcctgaggacaacgccaagccgagccacgggtttcacgccgttcttcctggtctacggggccgaggccatcttgcccactgacctggaatacggctccccgaggacgagggcctacaacgatcaaagcaaccaagctagccgagaagaatcgctggaccagctggaagaagctcgggacagggccttactacactcggcgcggtaccagcagtccctgcgacgctaccacgcccgaggggtccggtcccgagacctccaggtgggcgacctggtgcttcggctgcggcaagacgcccaagggaggcacaagctcacgcccccccgggaggggccattcgtcatcgccaaagttctgaagcccggaacatacaagctggccaacaatcaaggcgaggtctacggcaacgcttggaacatcaaacagctacgtcgcttctacccttaa

SEQ ID NO: 24155 - DNA, 1200 bp, Zea mays
  Peptide Sequence Number=SeqID_65934
atggctctaaaatttcagctcccgtcgctcctcctcctgcccgcggatgtgactggcgtctactgctacctcagcggttgtcgcaaacacaacatgttgcctgggccctgctacttcggctcatacgatggtggatggttcttcctcgcctacggccagacttgcgggcaccgactgctcaacatccgcaccggagactcccgcgcgctacccgacgtgctcttcggcctcgccgctcacaaaatccacagaatggtcgtccttgccaccaccctctccttcccgcctgaagacctgcgactgcgatgcattgttgcaggaattgtcacctaccagcctgacatcgacgcgtcgcgccgacgccacttcgcgttctggcgcccaggggccaaggtggtcgtctgcgacgttttgcccgccgtgccagttgggtcgggttgggaacaggaggacgtcgtgtactaccgggactccttccatttcctaacccaaggtgggcatatcctcatgtgtggaccgatctatggtccatatggggatgggggtatcctggtcgtgctgtcggcgttgtcgtgcttccaggaaggcaggtgcagttgtagtgacgagcagttcgtccgcgctcgctacctcgtggtatcccgcggggaactgctcatggttgtcaggcttgctgcccaccatcatgtgccgacgtcgtcgttcaaggttttccggatgattatcattgagccagacgataatggggaggatgctgatgagtacacaaggacctggatcgaactgggtgagttgtgtggccggatgctgttcgtggggcgagaacgctggaacatgttgctgctgaagaatgtgatcagcctgaatcctaacgcggaggacgtgtcacagcagaggttgctcttgctcgtggccgagcgcctcgtcccaacattcctggacaggttcggtcctaaatctcctgagatctggatgttcgtgttctatgcgtcaatgcgggaatggcgttgtgttaggatgcagcgacagtttgtgagctggcatgtaatagtttggtttgttgtttgtggcatttcctggcgtgttaatcattttgattcaaaggtcaaggatgaggggtatgttaacacccgggagcagaacatcacagatgctattgatcttttcctgcacctcacgacaggcattgcgtcagcatga

SEQ ID NO: 24156 - DNA, 1230 bp, Zea mays
  Peptide Sequence Number=SeqID_65935
atggacgcgaacgggtgcggggagaatgacgacgcgcgggcgccgctcctggccgggcctgggcggcggcgcaactccgtcgcgtccatgcgcggggagttcgtgtcgcggttgcccaagaaggtgctcgacgccgtcgaccccgagcgcccgtcgcacgtcgacttctcccgctccaagggcctcctcgaaggttcaacccgtgatcccagccactcgccgcattcttgggttgttttcctttgccgttggtggtttgttggattctctgtacatccaaccgtgaagctatggaacatggggagagagagtactatgagaaacaatttgcccacattgaggtcctttgaggaagttgactcactagaagaatccaatgaaatcaacgaggatgaggagcttgcggagcaaatccagagtgaatttgctatgaagatatcaaattatgcaaacattgttctcttagcgttgaaggtatacgctacaataaaaagtggatcaattgctatagctgcctcaacactggattcactgcttgatctcatggctggtggtatcctttggttcacacatctgtcaatgaagagcatcaatgtctacaagtaccccattggcaaactgagggtacagcctgtaggcattatcatcttcgctgctgtcatggccactttaggcttccaagtatttattcaggctgttgaaaagctggtagtgaatgaggctccagataaactgaaccaagtgcaattattgtggctatattcaatcatgatctttgcaacaatagtgaaattaggtctgtggctctactgccgaacgtctggtaacaagattgtccgtgcttatgctaaggatcactatttcgatgttgtcacaaatgttgtgggtttggctgctgctgtccttggtgatagattctactggtggattgacccaattggtgcaattgttcttgcagtgtacacgatttcaaactggtctggaacagtgtgggaaaatgcaggactgacagacaaccttgttattgctatcctccatgtagtatcgctggttgacattgagcttccagaggacttgccacttaaggaggcacacgccattggagaatctctccaaatcaagattgaggagctacctgaagttgagcgagcattcgttcacctagatttcgaatgtgaccataagccggagcattcaattctcaacaagcttcccagcagccagccttga

SEQ ID NO: 24157 - DNA, 552 bp, Zea mays
  Peptide Sequence Number=SeqID_65936
atgggaaaaaagagcgcttgctgcagccggacctgtggcaggagtgctgagcgccacagaagtagaggggaggaaggggaaaaattgcaggggaaggcgccacggagagttcactgctcgagctcggaccagaggaggtccgcgccatggctggagcagaggggtctgctcagcctacagccaccatggctgggcgttagtcaagcctcgccacgctccggcgcgagctgggcacttccagagcccacggggagtttttctgcaggaaaaaaaatgccaggggagctcagattcggtgcagcatggtggggaagaagattgatcgagctcgacggtggctacatgaacctagctgcggacaagtgcacgggaactatggcctgcggcctggcgtccagggctggtgcttggagggaaggagctcgccgcggcaagagcagggaagggggcgcacacgtctgggtgcccagggagaagagcgccatggaggccgatgtggaggtcgaggcagggacctcaggatcgggcatgggagagagggcaccaagctga

SEQ ID NO: 24158 - DNA, 453 bp, Zea mays
  Peptide Sequence Number=SeqID_65937
atggcgccggtgtacttgacaccaccggaacaggtcaccgccgacaagtattcgatcgaacacgaggaagaagttgtctcccagaatgagaatcctccagtggagaacaactattacttcgacatctgcggtgtggaaacagaaactcctgcaacacaaggcaagccctgtgcaccggacagtccggtgcgccactggacagtcactgtgcactgtcaggtgtgcgccacgtcagcgcaaccattagggctagagcagttgaccgttggagatgtttgtcttctagctgcaccggatagtccggtgccacaacagacagtctggtgccctctgacttctgtgcttctaactctatcgcggcactgttgcttttgtagactcgaccgttggcgcagggaccgttgctccactggctcaccggacagtccggtggcacaccggacagtctggtga

SEQ ID NO: 24159 - DNA, 543 bp, Zea mays
  Peptide Sequence Number=SeqID_65938
atggcgagttggagaccgacagaaagctcagcgcgcggcaaggaactcgacgtgcacagagaaacagagactgagctaagctcgacgtcggacaaaacactgcgcagtatggcgttcagctgcgctagcacaaggaacgcgacgcagcggccatgggagatgctgtttcgtacaagacctcggtttgggttgagcagtcacgaccagcgagctgaggggcgcgacggcttaaggattgaaggcgaggaagctcggccggcgaggttggccggtggcgctggggactgcgcgggaggatgcgcgcgcaggggctcggctgccgggaatagggaacagcggctgatgctccatgatttaaacggggaagaggcaaggaatcggctggagctcactgcgacgagggaatcgacgtttaggccgagcaccatggtggacgacatccatggcgagcagagcacggcttccagggaactcagccgccagcagagagagccggagagggacgacctgggcgctcaccaagggagctctgcaggccggtga

SEQ ID NO: 24160 - DNA, 483 bp, Zea mays
  Peptide Sequence Number=SeqID_65939
atggcgagttggagaccgacagaaagctcagcgcgcggcaaggaactcgacgtgcacagagaaacagagactgagctaagctcgacgtcggacaaaacactgcgcatgagccggccatgggaaaaaccttggcgaggtcacggccagcgagctgaggggcgcgacggcttaaggattgaaggcgaggaagctcggccggcgaggttggccggtggcgctggggactgcgcgggaggatgcgcgcgcaggggctcggctgccgggaatagggaacagcggctgatgctccatgatttaaacggggaagaggcaaggaatcggctggagctcactgcgacgagggaatcgacgtttaggccgagcaccatggtggacgacatccatggcgagcagagcacggcttccagggaactcagccgccagcagagagagccggagaggaacgacctgggcgctcaccaagggagctctgcaggccggtga

SEQ ID NO: 24161 - DNA, 153 bp, Zea mays
  Peptide Sequence Number=SeqID_65940
atggcgggcggaattgagctcgctggagctaagggaaagtggctggcccggaaccttcggactcgggatgaagctgtacagaatatggagagcagggtcagaatgaaggttgaaccagtgtcgaagctgcacaagggagcttcggctcagtag

SEQ ID NO: 24162 - DNA, 844 bp, Zea mays
  Peptide Sequence Number=SeqID_65941
aaggcctcacgctagatctcctcatatgggacaggacacaggaggttgaggtagtccaccttcacctcggtcgcctcctcctcatggggtttcggctgcgggacggcggcgatggcatcagcggcagcgggcgtgaaaggaggggtcaacgcgtatgtgagaggatggggaggaggggccccggcctagctgatggaggatcccagggcagggcgagcggggcgggcatggcgtcacgcgacgtctgcaagggtcgagtgacgcgcaccgggcgggagctctgcgagggaggtgaaagcgtggtgagggggatctcgggttgcgcgtgcgggtgcaggctagggtgcggggggcgaggacacggggcgggtatcgcgcgcgagttacccggcggggatgacgaacaggggcatgatggtggtgggggctactgcggtggttgcgtgtcctgtgtggaggacaggataccggcgaccacgaagggatacgaagtagctcgggtgacattgaaacaaggtaagaggaaagtggggcaccggagacttacagaaggcctcgcgctagatttcctcatatggggcgggacacaggagattgagataatccaccttcacctcgattgcctcctcctcatgaggcttcggctgcgggacggcggcgatggcgtcagcggtagcgggcgtgaaaggaggaggggtcaacgcgtatgtgagaggatggggaggaggggccccgacctagctgatggaggatcccatggtgaggcgagcgggggtaggcgtggcatcgcgcaacatctgcgggggtcaagtgacgcgcaccgggcgggagctctgcgagggag

SEQ ID NO: 24163 - DNA, 165 bp, Zea mays
  Peptide Sequence Number=SeqID_65942
atgaagaacagaagccattttcgaagtgacaggaaaactgcactgcaacaagacgtgtgtgtattgttctacttggtgtttagttgtggacaagctgaggaaaaagttgtggcacgagaagaacgtccactgagctctaaagcaggcattcgcgaggccgcttaa

SEQ ID NO: 24164 - DNA, 402 bp, Zea mays
  Peptide Sequence Number=SeqID_65943
atgaactgcctcatatatgctaaaactgaaactaaatgtcatattcagggtattcagatgatcaagcgctttgcagttaacttcgttcttgtcaccaacctgagcactagggttaccaaaggaggatgggacatacgtgagatcaagtttcagcacaatacaattcataaaaaagctggtgagcaattaccacgatatttgtacttcacatgcaaaaagaagaagaagacaacatcatttacagttgtagaacaaacacgaattcagttccttattctggcccttcgtaatttctggggcggttgtgcttacgcaggtcgacactgtggatatcgttcaaggtgttccaagggagctcaccgagaagttaatttgagaattgttacaaggaaagtgatttag

SEQ ID NO: 24165 - DNA, 966 bp, Zea mays
  Peptide Sequence Number=SeqID_65944
atggccgtgaggttggttagtgccagcccccaacctggtagtgttatcttatgccgaagggtcatcgcttcctcctcccccgcccctcatgcgtcgtcttgcgagattaggtcctcggccctcccgctgttggcgatggccgagctgggcatcatcctcccggtgccacccgtcgcgcacggtggagttgttgccttcttgttgtcggggaggatcgcgttcgaaggacggggatggtccgcgcacaacgttcgagggtccgagttcggccaacccgtgcggcctgaacattccacgattgagacgaatgatggcctcccaacggcccagctaggtcttggggagacatggtctccatgtggtcgtgtcaagggatccatgttggggtccttgactgaaccgatgatgctagaggagcttgcgcgtgcggaggagcgccttcgagtcctttgtgctgagcactccaatttgtctatggccatagacctcggttttacaaagaaggcgtggatctgcttcggccgatcatctactacgggctcttgggccattggcattacatccggtgtttcctctggtcctaccatgcgcgacgtcccatcctgccaggactatcgacaaagccatgaacgcattgaagatgagatcctcgtcgccactggccatctccgcaaacaccaggttgtctatcatggggagggcttccctgacaggtaccgaccgtttcgcgggcagcatgcagatcgccaacgccgtgccgcctccgcttgctggcttgcctacgcgctcgggaagaagggaagccatagccatcgatggcacgcgctgagcgtcttgctcttgcctgcggcgccagttatttttgggttggtcctggtcctggtgcatgatgtgatcagcactgcacttgcaggattctgtggagcagaaaaggctccgggattaaacggaaattcggtgctctga

SEQ ID NO: 24166 - DNA, 333 bp, Zea mays
  Peptide Sequence Number=SeqID_65945
atggcggcgttcaagtcctttcaggcaagtgatgaggtggaagctggaagaaaggtgggaactttccgtacggaccgaggcggagagttcacagcacaagctttcatcgagcattgctgcagtgaagggatcaagcgacacttgacagcaccgtacacaccggagcagaatggagtggtggaacggagaaaccaaaccatcatgggaatggtgcggagcatgcttaaagccatgaatctccctaactggttctggggggaggctgtggcaacggttgtatacatactgaacagatcacccactcaaggaaatgaagggagcactccatatgag

SEQ ID NO: 24167 - DNA, 225 bp, Zea mays
  Peptide Sequence Number=SeqID_65946
atgacaaaggaagtcagtctcagaggtcacaatatacatcacaatctttggggcaacaacaaagctccttcaggccaccagctccaaggggtagaggcgccaggggctttggaggaagatttacgaagctcgaaaattgctgaggcttcaaaagtcgctcttaagggagcgcaacaaaagtcttgccgaagcttaaaaagtcgttcccaagggagcgcagtgtaa

SEQ ID NO: 24168 - DNA, 450 bp, Zea mays
  Peptide Sequence Number=SeqID_65947
tctttcggcaccgagaaggcgagaaccgaggaggagaacatggcgggtgacggcaacggccgcgcggagcttccccggatcgcggtgatcggcgccggtatctttgcgcgcacgcagtacatcccaaggctccgcgagatcgcgcacctcgtcgtcctcaagtccatctggagtcgcacccaggaatctgcaaaggcggccgcggagcttgctcgtgacttcgcgcctgatatcgagtgcaaatggggtgatgcggggctggaggagatcatgggagatagttcaatcatgggcgttgctattgttctcgctgggcaagtccaggtcggtgttcccactccaaaaagggtcttctccgtgaataaccctagaactcgcctccgggtagatcccatcaaggtggagagttccaggggttgctccaggatcggcaggccacccggggcctaa

SEQ ID NO: 24169 - DNA, 501 bp, Zea mays
  Peptide Sequence Number=SeqID_65948
gaggagcaatcccaggacaggcgtttgccagttcggatcaacagggaccccagtttgttccccctaagaagcaagccttcctcctcgacggccgagggtacctcgggctcggccgagggtacctcggggtgggccgaggcgcacccatcggaacaaaatacgaccgagaagggctggtccccatgcaaaaatccggcaaaacctctaagcgagtaccaacactcccttcgaggctcgggggctaccgtcggggacccctcgggcgcaacagggagctccgcctcgctcgacctcaggcctcggcctcagcctcagcctcggccttgggagaaggtctccgcctcgcccgaccccaggcctcggcctcagcctcggcctagggaggagtcacatcctcgcccgacctcggcctcggcctcaggagaaggctcaaggcacttctccgatggccacgttagcacatgtacagggctcaaggcacttctccgccagccacgttag

SEQ ID NO: 24170 - DNA, 2013 bp, Zea mays
  Peptide Sequence Number=SeqID_65949
gtgttcttggtctgcttgatagcagggtgcagcatctgctggttcaacacagtctgctttgttctctgcatccgcaacttctctgcaaacaaccgctccctagccctctccctctcaataagcttcaacgggctcagcgctgccttctacactctctttgcaaacgccctctcccctttagccctgtctatctgcctcctcctcaatgcaatcctccctcttggtgtctctattcttgcactcccagtgatcctcctctgccacacaaatgacagccacctccaaagtgcgcccaggcataacaggcgtgtcttcctcggcctctacatccttgcattcatcactggcatatatgttgtggtctttggaactttcaccgcaactggctctactgcatgggtcatcctcataggtgccatggttctcctcgcccttcctctcatcatccctgcctgctccagttcctcatatgtggatacagatggccctgaccctgcatcgctactaaaccatgatgacccacatcagccgctcctaatcagaaacaatcatcaaatggagtccaatgcgatgatgctaaaaccaatggagctccagatgcagggcaattgttgtggaacaatagtgagcaagggctacctggtggcactcggtgaagaacatagtgcaaagaagctcatttggtgtgtggacttctggctctactacacagcctacttctgtggagccactgttggcctggtatacagcaacaacttggggcagattgcgcagtcattgcaccagcagtcacagctcaccatgctacttattgcctactcatcctgctctttcttcggtcgtcttctttctgcactacctgacatccttcacaggaaggtgccacttgctcgcacagggtggcttgctgctgcattggtccccatgccaatggcctttttccttatgtggaaccaacaagatgcaagcaccctggtagcaggaacaacactagttggtctaagctcaggattcatctttgctgcagcaatgtcagtgacctccgagctctttggaccaaatagcattggagtgaatcacaacatcctaattaccaatatcccgctgggctcactcctctatggccagattgctgccatggtatacgatggaaatggccaaaagatgacagtagtggataactggactggcattgttgacaccatgattatgtgcatgggggtgaagtgctactcaaccaccttctttgtgtgggcttgcatcacaattctaggggaaatgcttcgaccatttggaggcgcagacgatggcaaagtgctgccacccgcgcacgcccgagccccatccgtggggacctcctgccgttgccaccgccgccgttctactctgcctcggtggaggagtctcccacgatgcaaaagtcatggtggtgggaagccggtcgtcacagacactgtcgacgaggtgacacccgataaggggccagagactgagattaagggagaggaagagaatgaggccgtcgcgaggcgtggggctccggggtggctgaggcttgacggggttgcggcggacatcctcgccatcgccgcgcccgccgtgctcgcgctcgccgcggaccccatcacggcgctcgtcgacaccgccttcgtcggacatatcggttcggctcagcttgaggctgttggtgcatcgacttccatattcaatttggtatccaagctgtttaatgtgccgctacttaatgtcaccacatcctttgttgctgagcagcaggcaatggatggcaattctaacaccacaagggaaagagatgaatttttgacaccaatagagaaggtaaggcaacaaaagaaggttcttccggctgtatcaacatccttggctctagctactggtattggactgttggaaatggtagctctgattgttggatctgggaccctgataaacatcattgactatgaaaccaggtttccatggtctgtcaactcaaagtttaaggttccataa

SEQ ID NO: 24171 - DNA, 162 bp, Zea mays
  Peptide Sequence Number=SeqID_65950
atgggcgtctggtcacaggggtcggagtgtgcgattgatgagaaggtaactgtcctggggtcagaaaaacgagcttgggaaagcagtctagaggcccaagctatgagagaagctctcaatccatggcaaaagcatgatgaacaagaacaacagaagaaatag

SEQ ID NO: 24172 - DNA, 666 bp, Zea mays
  Peptide Sequence Number=SeqID_65951
atgaagccaaaggcccggatcagctctccactgaagcggtatggtggatataatccacacagttccctgagatccaacggttcccagccctacttccctgcgacgacggcgattggaatagggcagggtcggtccacggtggcgtctcgccgacgcacagcaccacggcggcagacgtctgcaaacccagagcacctccgagaaaaacaatgcagggaccacggcgaacaaaggagtggtggtgttgccgaaggcaacgacgaagttgggggcgtcctcggtgcgatactactccgcggcggcgccacgacatcgacgaacaatccccgatgcataggtgggcaattctccatggttctcggtgctatacaacgtatagatgaaggcgagggcacggaggggtttcttactggtgatgatgccgtagggactgctatccttgacgcagggcggatccgcggcaacccagcgactccggcaagcaatctggccagcaccgatgtcccacccttcataccgaagcctcggatatcctccccgcaccacagtgaagcaccgcggccgctcaccgagggtggagaaacggcgctgaggggatcccaggcgctgcggctcacaatctctctcttcgctctccccgattttgctctgcagcggtggcgttga

SEQ ID NO: 24173 - DNA, 732 bp, Zea mays
  Peptide Sequence Number=SeqID_65952
atgaccgtatgggagctcacccttgctatgatcacaccaggtcaacaacagcaaggaactgatggtacgatgcttacaggtgctggcaacctattaaatgcagtacttgatgcattacttatttttccaattggtctaggagtaagcggtgctgcactggccactgtgacctcggagtacctgacagcattcatcctcctttggaagctgaataatgaagtagatctgttctcatggaatataattgaggatggaggagtcatccgctacctgaaatctggtggtctactaattggcaggacaattgcagtattcttgacactgacactgtctacatctctggctacaagggaagggcctattccaatggtgggctatgagatatgcttgcaattgtggttaacaatttctctactcaatgatgctctagcccttgctggccaggctctacttgctagcgaatatgcaaaagggaactacaagccagcccgcgtggttttatacaaagtcctgcaggttggaggtgtgattggttttctccttgctgcttccttgtttgttgggtttggatctttgtctttgctgtttacagatgatccagcagttttagacgtagcgcactctagagcctggtttgtcactatttctcagccggtgaatgctattgcatttgtggctgcactacaaaaatacccccctattgcaacgcatttatgcgttgctaaaagttga

SEQ ID NO: 24174 - DNA, 579 bp, Zea mays
  Peptide Sequence Number=SeqID_65953
atggtggcgcaaccggcgggtggcggaggtgcggaggaggaggtggtggtggacggcggcggcggccggcatgggcggaggagcggcgacgaggaggcgtggcggcggtgggcggtgctggtggcgacggtgtggatccaggcggtgacggggaccaacttcgacttctcggcctactcgtcggcgctgaaatcgtcgctgggggtgtcccaggaggcgctcaactacctggcgacggcgtcggacctgggcaaggcggtgggctggtcgtcgggcctcgcgctgctccacatgccgctccacgccgtgctcgcggcctccgccgccatggggcttgccgcctacgccgtccagtactactgcctcatcgcggcggcgtcgtccatggccgccgccgtcccctaccctctgatcggacggccaaccagcttcaccccccggccgacagggcacggcggcgcccgcacgggttatggtgaccatgcggacggggaactcaccgatggtgatgatagggaaggtgttgtccacgccggggcgtcgatccgcggcggcgacatgcctccgttgagcaattag

SEQ ID NO: 24175 - DNA, 1116 bp, Zea mays
  Peptide Sequence Number=SeqID_65954
atgacgaatctcaattctcaggttggagtactgaggagcatcatcatcaactccctagtagccttgtatatcattgtcagcttcatcatcttgttctacaaaggtcatgaagtacagatgccaatggtggtcaagcatgaacaccaagaaatgcaggccaaggtggcagctgagcaccatgaacaactgagagggaaagacaccagcagggaggagtgcaattggtccacaggacggaaggatgtcatgtaccagcactggagatggcagcctcatggatgcgaccttccaagattcgatgccatcaggctacttgaaaagctgaggaacaagaggttggtgtttgtgggcgactctctcaacaggaaccaatgggtttccctggtgtgcatggtggagatctctatacctgacagtaggcacaagatgcacaccttcaatggctcactcatttccttcaaggcattggaatacaatgcaaccatagacttgtactggtcaccgctgttgttggagtccaacagcgacgacccacttgtccacagggtggagcatcggatcataagggctgacagaattgagaagcatgccagtgcttggagggatgctaacatcataatcttcaattcttatgtgtggtggaggaagcataaggctgacatgaggatgaaggtcatgtatggttcatttgagagtggtgatgcaaggttagacgaagtggaaatgatagatggtttcgagatagcactcaagaaactgaccgaatggctcggagagaatattgacaagaacaagactagaatattttttgctggatcatcaccttcacattcatgggctagcaactggggtggagaaaacagtaacaaatgcctgaatgagacggaaccgatatacaaagtcggatacaaagcagcaactacagattacagtatgatggagaaggccaagtcatattttgggacactggaagagaagggcatacacattcagatactcaacatcacggagttgtctgagtaccgtaaggacgggcaccccacggtgtttaggaaacagtttgcccccagccagttatgcggattgcatgcactggtgcctcccgggtgttcctga

SEQ ID NO: 24176 - DNA, 598 bp, Zea mays
  Peptide Sequence Number=SeqID_65955
ggcctacaagccatcaagcacgaccctgtcggacccctacatcttcatgcgctcctggaacgacagcggcgtcacggccctgctcgggcgcgtgggcgggcatcaacaacaaccgcctcacgggggccgccggggggccatccccccagccgtcgccaactccaccaggctcatccagcttaatcttagtcggaacacgctctctgacgccgtccccgtcgaggtcgtcgcctccgcgtcgctcgtgttcctcgacctctcctacaacaacctctccggtcccatccccgacgccttcgctggctccgacaagtccccgtcgaagctcctcaacaacaacaacaacaacaaggaggccatcaccgggagctaccagctcgtgttcctcagcttggcgcacaacttcctcgacgggcccatcccggcgtccgtcaccaagctgcagcagctcgacctgtacagcaacagcctcaacggcaccatcccgactcagctcgccacgctcgccgacctaaaagtgctcgacctgtccgggaacgcgctatccggcgacatcccgccggggctcgacaacctcaccgccacgtgttggaattga

SEQ ID NO: 24177 - DNA, 282 bp, Zea mays
  Peptide Sequence Number=SeqID_65956
atgactgccgtgttcaagtccatcttcggctgggaccccacctccctgcacacctctctggccatggcgttgatgtacaacatgtcgctcgtcgcctcatctcatcccatcgaccctacgagagcccgtcccaactccaccagaccaccacctctcttctcggtggcgcatagaagttctactttctacaagaaaaggcatgagatggttgaaacaacaggggctaatcaagttgaaattgtgtttgggcgggtggaggttgaatgtggacagagtggatga

SEQ ID NO: 24178 - DNA, 795 bp, Zea mays
  Peptide Sequence Number=SeqID_65957
atgggtgtatcttcgcggcaaatcctactcccgtctgttctcgttgtggcggccgcccctatccccaattccccattccccatccggcttcggcgacgacaatcccacacgaccacgctcaggcggtcaggcccaggcggtccagcctccactccagcgctccagctccaccgctcagctgctctagcgcggggcgcagcctccaccggcgctcggcctccaggctccagccctccacacagcgccgccctgcgcccctgcccctgtccggctgtcccacgcgggcacgcggcctccaggctccagcgcttagcctacaggctacagcaccgctcggcctccagccgtccagcgcttggcctccacgcagcgctcggccgctccagcgcggggcgcgacctccaccaccgctcggcgagtcggcgtccaccgctcgctcgctccagcagaccagcacgcggaggccaggtcgccaggacccagcgcgtggtcgtgctgcggcagtccagcaccagccgtccagcggcagcggcacagcgtcgtccaagctccaaggaccaagttgtgatggcaacccctgccaatagcagccaacatgaagtgtcgcaaacatctgttcccccaattgcagcagctgcctccattgaggttgttgatgtgccagatggtcaaggtgaagatggatcaggtgttgctgctactcgatctcatggatcacaaaggaagctcacttcgactgtttgggaagacttcacaagagtatgtgatgatgatggagtttggaagaggaaatga

SEQ ID NO: 24179 - DNA, 781 bp, Zea mays
  Peptide Sequence Number=SeqID_65958
atggatttgggaacttcaatgttccaagaggcaatatggaatagattaaatgaatatggattattggggagatccaaaagaactatcaccacgctccagtccttcaacgtctcctacaacaaccgctccggcgcggcgccggcctcgctggcgcgcaagttcggggagcctgccttcacggggaaggggaacgtgctcctctgtggctattctgcttccacgccctgcccggcgtccccgtcccccgcgccggcgtctcccgcggaggagccaccgcgcggacgcggaagccgaaagttcagcaggaaggcgctcgtgctcatcgtcgtcgggatcatcgtcggcgtcctcgtcctgctgctcctctgctgcctcctgctctgtttcctgcgcaggaacaagaggtcttccggcggcactgccgggacgcgaagcgagaagcaagcagcggccaaggaggccggtggtgccggcgctggtgctgcggcggccgggcacggcgagaagcctgggtccggcgctggtgaggtggagtccggcggcgacgtgggcggcaagctggtgcactttgatgggccgctgacattcacggccgacgacctgctgtgcgccaccgtggagatcatggggaagagcacctacggcacggtgtacaaggccacggtcgaggacggcagcctggtcgctgtcaagcgcctccgagagaagatcaccaagggccacaaggagttcgaggccgaggcggcggtgctgggacggatccggcaccccaaccctgctg

SEQ ID NO: 24180 - DNA, 1170 bp, Zea mays
  Peptide Sequence Number=SeqID_65959
atggcagacctttttgttttcggcgatgacaccaagcacgaacgccagaaccccaaagaacgtgacgctaagagaaatccatcgctcctgcaggacaaacaagacgtcacgacaagatgccaacgacgacgtattggaaatttctcccccacaactcgccgctcggggcctcgggctgctgcggcctgcgcagctgcgctccgcggctgtcctgtcggctggcgcctccgcgtgaccgcgcctggctgtggcggcctggtgggcgagccgcgagcgcggtgtggcgctgcgggtggcgggcgagccgcgagcgcgctgcgggtggcgggcgacggggcgagccgcgagcgcctgggcggctggcggtggcggcctggcgatggcgggccgcgggcgagcgcgctggagaggaggcaggaccgcaggaccaggaagcaggagccaggaggtgccgaggcgggtagaagaaagcagacggcagggagcggcgctgcggcggctgaagctgaggctggacgcaggacggctgccgctaggtcacgtcgcgcgacgatgggcctctactgggccgtgactgccgaccggggctgcagcccaggcagccccgggtggagatccgcccctgacgttgtgtctagcaggtttgatctacgcgccgccctttcattttggttcctgatgctttcttccatgattccgcttgcggttcgcctgatcggtattgacgaggagccgattgataatccgtcagaacttgagtaccccttctcctgtcaagagattgatcagatcatcaaatgtctgccttcaaataaatcgccaagaccagatggttttaatacagactttgtgaagaaatgttggctggtgattgctcctgatttctatgaattatacaacaaattttttgaaggatccctctgcatgcgtagcatcaatggttcatatgtgactctcattcccaaaaacagctctccggattcaatcggtgactataggcctatctccctccttaacacaagtgttaaagtgctgacaaaaatcttagccaaccgtttgcaacaggactgcctagcctgggcttttgaatacatttctctttgccataagtccagaaaagaaatggtcattctaaagctggactttgaaaagacttttgacaaattgtaa

SEQ ID NO: 24181 - DNA, 669 bp, Zea mays
  Peptide Sequence Number=SeqID_65960
atggaggaagagggggtcggcaagtcatggcttgcgctggggataggcggcggcgatctgatgaagcggaacaaccgaccaccggtgcagttcgacctgctgttcccgccgcagagcgtcaaggaagaaggtgccgcgagcaagaaggcagagaaaggcggtgggcggaagaggctcaaggttgtcacggccgacgaggatggccgccagtcgccgcacggcggtccaggccccagcgacggctccggcgcaggcgcgaggaagaagctccggctcaccaatgagcagtcgacgctgctcgaggacaccttccgcgcccacaacatactctccaacgcgcagaagcaggagctcgcacggcaggtggatctcagcgccaggcaggtggaagtgtggttccagaacaggagagcaagaacaaagctgaagcaaacggaggtggactgcgagatcctgaagcgctgctgcgagagcctgaccggcgagaaccagcggctgaggctggagctcgcgcagctgcagcggtcagcggcggcggcggcggaggctgggctctacgtccagtcgtcgttcccgccgctggccacggccacggccacggccagcgtctgcccgtcgtgcgacaagatagaacagagtcgttttattttttgtttggttaaagagtaa

SEQ ID NO: 24182 - DNA, 651 bp, Zea mays
  Peptide Sequence Number=SeqID_65961
atggaggaagagggggtcgggaagtcatggctcgggctggggataggcggcggcggcgatctgatgaagcggaataaccgaccaccggtgcagttggacgacctgctgtcgttcccgccgcagagcgtagctgctgcgagcaagaagcaggcggagaaaggcggcggtgggcgcaagaggcacaagatcgtcgttacggccgacgaagatggccgccagtcgccgcacggcggcgcgaggaagaagctccggctcaccaaggcgcagtccacgctgctcgaggacaccttccgcgcccacaacatactctcccacgctcagaagcaggagcttgcacggcaggtgaatctcagcgccaggcaggtggaagtgtggttccagaacaggagagcaagaacgaagctgaagcaaacggaggcggactgcgaggtcctgaagcgctactgcgagagactgaccggcgagaaccagcggctgaggctggagctcgcgcagctgcagcggtcgccggcggcggaggaggctgggttctacgtccagtcgtcgttcccgttcccgccgctggccacggccatggccagcgtctgcccgtcgtgcgacaaggtcgtcgccgtgacgagcggcaagagctccaccagctactcctcgtga

SEQ ID NO: 24183 - DNA, 666 bp, Zea mays
  Peptide Sequence Number=SeqID_65962
atgtacagcactcgtgaggaagagggcgtcgggaagtcatggcttgggctggggataggcggcggcagcggcggctgcgatctgatgcagcggaataaccgaccaccggtgcagttcgacctgctgttcccgccgcagggcgtcgtggaaggagttgccgcgagcaagaaggcggagaaaggcggtggtggacggaagaggctcaaggtcgttacgggcacggccgacgaggatggccagcagcccccaggcgcgaggaagaagctccggctcaccaaggcgcagtcgacgctgctcgaggacaccttccgcgcccacagcatactctccaacgcgcagaagcaggagctcgcacgacaagtggatctcagcgccaggcaggtggaagtatggttccagaacaggagggcaagaacgaagctgaagcaaacggaggcggactgcgagatcctgaagcgctgctgcgagagcctgaccggcgagaaccagcggctgaggctggagctcgcgcagctgcaggggtcggaggctgggctctacctccagtcgtcgttcccgccgctggccgcggccatggcgagcgtctgtccgtcgtgcgacaaggtcatcaccgtggcgagcggcggcgagacaagcggcagaagctcgactagctactcctcgtga

SEQ ID NO: 24184 - DNA, 393 bp, Zea mays
  Peptide Sequence Number=SeqID_65963
atggcgacaatgtctggatctctagttgccggcgttgaagacagagacgccccccgggacgaccgtgccactgatcggccaccgcgtccgcctgagaacaagaaagctcctccgtcatcgttcaccaaacagaccaaaccatttactcctggtgatccgaagctacttcctcggccaccatcaaagaacacttcggattcgaagaggcgctgcttgaagaaatctgcaactgagacacctggacgcaagtttcagatgtcaattgagagtggtggcagtagccaagctccaattagttcacagcctgaagctgaatcacgtcatgaatctattaatgaatcagaagcaattgaaatagaagatgaggagtgtgtagaagaagatggtgttgag

SEQ ID NO: 24185 - DNA, 357 bp, Zea mays
  Peptide Sequence Number=SeqID_65964
atgggcttcgcttcgataacagctatcatgaatcctcccaagatattaggcccacctacagatgtccttgacctaaggacttcagacagtcatgcaggtgcgctcaatggctcggcagaaacagcaaaactcagcagtttcctcacctacaacaacatgggtttgaaaaccctgagtatgaaatgtacttttgcaaagtcttacccgactaaagaaaaagactctcaaggatatgctggcctttgggaatcaagcctttctagtattggtccgaccaaggcaaagcttacccatgatgaggcatgtggccagttaaaaggtcctccatcgtcaagcctacatgagctcggtccttaa

SEQ ID NO: 24186 - DNA, 240 bp, Zea mays
  Peptide Sequence Number=SeqID_65965
atggcggaggtcgaggctccagctgctgcggttgcggcggcgacccctgaggtggcgacggtgaccgagggcggagccgctacggaggcgaagggtccgcacaagctgcaccgccagtggaccttctggtacgacatccagtccaagcccaaacccggcgctgcgtggggcacctcccctcaaaaaggcgtacaccttcgacaccgtcgaggagttttgggggagttgtttatacggtag

SEQ ID NO: 24187 - DNA, 420 bp, Zea mays
  Peptide Sequence Number=SeqID_65966
atgttccacacctccacctctgtcaccaccgacccgtgcacgacaccgtcgtcttccaagaagcagaagtggttctacaagacgcgatccctggtcgtggcctggcagactccgtgcaagttcctggtcaagtcgccaccgagcgcgctgggatccaagctcaggatccatgggaaggccctaccggcgagacccgccgcccatgaaagtgcaggcatcacctgcaaaaacccgtcgctgctcgttctcgccatcaaggttgacgacaatccagacctcccctgcctccgggactgcctctactggctgcaggccgtgcggtctcatgatccgctcatcctccgcgacacgcagctcaagatcctagactgcgccacctccaccgcactccaggcagggaaatcaaatgtagtccactaa

SEQ ID NO: 24188 - DNA, 710 bp, Zea mays
  Peptide Sequence Number=SeqID_65967
atgtcccaccgcccaccggcgccaatgctggacaccctctcggatgccttcgccgctgcggtgctcctctcctccaccgacaagtcggacactctgcccccagggaggctctcacctgtctccccgctcctgcactcctccaagcacgggcaccaccacccgaccccgagctcctcctcgggctcctctggctccgtctctcgggccccgatcgcgcccgcctccgctccgccacctcgccgctcaccaacgcgctccccgcgggcaacatctgtcccttcggtcgcctcgccaaaccgctcccctccccctgccccaccgcgaccccgcgcctctcaccacgacgtgctcggcttcgggatcgccaactacggccacgggagcatcgtccgctcccatggcgagggcgtcgtgcccgccgccaccgacgacgacgcggtcctcaggcgcgccatgtcgaccgccgaccccgaggaggtcaagagggtcgggaacgacctatacatgaagggctgcttcgagggggccctcaggctctacgaccgcgccctcgccctttgccccaacaatgctgcgtgccggggcaaccgcatcgccgctctcattggcctcgaccgcctcggcgaggccgtcaaggagtgtgaggaggcgctatggattgattcgtcctacggccgcgcgcaccaccgccttgcgtcgctgcatataag

SEQ ID NO: 24189 - DNA, 258 bp, Zea mays
  Peptide Sequence Number=SeqID_65968
atgccgagagctagacgcaacaataataccattcctcaaaattgtgctaaacactttaaaggggtcaagagtcacgcatacggtgaagagatagaaaagagtttcacaaagctgcttgtagaagaactaaaacaaagagaagaggaggcaacacaggctcaacaagaggctgatgttaagttgatcgaggccaaaaagttagcttcacagtatcagaaggaggctgacaaatgcagctcaagcatggataacctatga

SEQ ID NO: 24190 - DNA, 4059 bp, Zea mays
  Peptide Sequence Number=SeqID_65969
gctggagtagagccaaaatgggaagacccagagtgtgcaaatggtggcaaatggactgtcccatgcaacagaaagccaacctttgagaccatgtggcttgaaacgttgatggctcttgttggggagcagtttgatgaaacagatgacatttgtggaattgttgctagtgtccgtccaagaggagataagcttgcattgtggactaggactgccagcaatgaagctgtccaggtaaacattggcaagaaatggaaggatgtcatcgactacaatgacaagatcatctacactttccatgacgactcgagaagggataagccaagcagaggtggacggtacaccgtaaaactgggcagggcagggcgcgctcagcacgtttgcttcggaaacactgcgagtgtgcgacacatttcccggcttgatctcgaagcgagccctgatgtgtttgtcatgcacctgcctgccttggcttgtgctctaatcaacgccggactccccaactcacggttggtgcgggacgccaccccgccaccttaccgcccgcctcggcgcctcaccagtcaccacacctcgcgcctgccatcagctatatcaccgtggccacttccgtgtcccttcacggatacctcacccccacagcccccggtcgatcgctcggcaatcggcatggacgccggctcggtcaccggtggcctcgccgcgggctcgcacatgcgggacgagctgcatgtcatgcgcgcccgcgaggaggttagttcccattgctttttgatcctctgtcagttattgatggcattgtcactgatcgatgatcgccgcgcgcagccgaacgccaaggtccggagcgccgacgtgaagacgtgccgcgtgtgcgccgacgaggtcgggacgcgggaggacgggcagcccttcgtggcgtgcgccgagtgcggcttccccgtctgccggccctgctacgagtacgagcgcagcgagggcacgcagtgctgcccgcagtgcaacacccgctacaagcgccagaaagggtgcccgagggtggaaggggacgaggaggagggcccggagatggacgacttcgaggacgagttccccgccaagagccccaagaagcctcacgagcctgtcgcgttcgacgtctactcggagaacggcgagcacccggcgcagaaatggcggacgggtggccagacgctgtcgtccttcaccggaagcggtgagtggtgtgcggttccattgacgatgatgctggcgtgtcgcaagatgggtctgctgaccaatatgagtccgcgtgcagtcgccgggaaggacctggaggcggagagggagatggaggggagcatggagtggaaggaccggatcgacaagtggaagaccaagcaggagaagaggggcaagctcaaccacgacgacagcgacgacgacgacgacaagaacgaagacgagtacatgctgcttgccgaggcccgacagccgctgtggcgcaaggttccgatcccgtcgagcatgatcaacccgtaccgcatcgtcatcgtgctccgcctggtggtgctctgcttcttcctcaagttccggatcacgacgcccgccacggacgccgtgcctctgtggctggcgtccgtcatctgcgagctctggttcgccttctcctggatcctggaccagctgccaaagtgggcgccggtgacgcgggagacgtacctggaccgcctggcgctgcggtacgaccgtgagggcgaggcgtgccggctgtcccccatcgacttcttcgtcagcacggtggacccgctcaaggagccgcccatcatcaccgccaacaccgtgctgtccatcctcgccgtcgactaccccgtggaccgcgtcagctgctacgtctccgacgacggcgcgtccatgctgctcttcgacgcgctgtccgagaccgccgagttcgcgcgccgctgggtgcccttctgcaagaagttcgccgtggagccgcgcgccccggagttctacttctcgcagaagatcgactacctcaaggacaaggtgcagccgacgttcgtcaaggagcgccgcgccatgaagagggagtacgaggagttcaaggtgcgcatcaacgcgctggtggccaaggcgcagaagaagcccgaggaggggtgggtcatgcaggacggcacgccgtggcccgggaacaacacgcgcgaccacccgggcatgatccaggtctacctcggcaaccagggcgcgctggacgtggagggccacgagctgccgcgcctcgtctacgtgtcccgtgagaagcgccccgggtacaaccaccacaagaaggcgggcgccatgaacgcgctggtgcgcgtctccgccgtgctcaccaacgcgcccttcatcctcaacctcgactgcgaccactacgtcaacaacagcaaggccgtgcgcgaggccatgtgcttcctcatggacccgcagctggggaagaagctctgctacgtccagttcccgcagcgcttcgatggcatcgatcgccacgaccgatacgccaaccgcaacgtcgtcttcttcgacatcaacatgaaggggctggacggcatccagggcccggtgtacgtcggcacggggtgcgtgttcaaccgccaggcgctgtacggctacgacccgccgcggcccgagaagcggcccaagatgacgtgcgactgctggccgtcgtggtgctgctgctgctgctgcttcggcggcggcaagcgcggcaaggcgcgcaaggacaagaagggcgacggcggcgaggagccgcgccggggcctgctcggcttctacaggaagcggagcaagaaggacaagctcggcggcgggtcggtggccggcagcaagaagggcggcgggctgtacaagaagcaccagcgcgcgttcgagctggaggagatcgaggaggggctggaggggtacgacgagctggagcgctcctcgctcatgtcgcagaagagcttcgagaagcggttcggccagtcgcccgtgttcatcgcctccacgctcgtcgaggacggcggcctgccgcagggcgccgccgccgaccccgccgcgctcatcaaggaggccatccacgtcatcagctgcggatacgaggagaagaccgagtggggcaaggagattgggtggatctatgggtcggtgacagaggatatcctgacggggttcaagatgcactgccgggggtggaagtccgtgtactgcacgccgacacggccggcgttcaaggggtcggcgcccatcaacttgtctgatcgtctccaccaggtgctgcgctgggcgctggggtccgtggagatcttcatgagccgccactgcccgctctggtacgcctacggcggccggctcaagtggctggagcgcttcgcctacaccaacaccatcgtgtaccccttcacctccatcccgctcctcgcctactgcaccatccccgccgtctgcctgctcaccggcaagttcatcattcccacgctgaacaacctcgccagcatctggttcatcgcgctcttcctgtccatcatcgcgacgagcgtcctggagctgcggtggagcggggtgagcatcgaggactggtggcgcaacgagcagttctgggtcatcggcggcgtgtccgcgcatctcttcgccgtgttccagggcttcctcaaggttctgggcggcgtggacaccagcttcaccgtcacctccaaggcggccggcgacgaggccgacgccttcggggacctctacctcttcaagtggaccaccctgctggtgccccccaccacgctcatcatcatcaacatggtgggcatcgtggccggcgtgtccgacgccgtcaacaacggctacggctcctggggcccgctcttcggcaagctcttcttctccttctgggtcatcgtccacctctacccgttcctcaaggggctcatggggaggcagaaccggacgcccaccatcgtcgtgctctggtccatcctcctcgcctccatcttctcgctcgtctgggtcaggatcgacccgtttatcccgaaggccaagggccccatcctcaagccatgcggagtcgagtgctga

SEQ ID NO: 24191 - DNA, 381 bp, Zea mays
  Peptide Sequence Number=SeqID_65970
atgggagcggacgatgctcccgtggccgtagttggcgatcccgaagccgagcacgtcgtggagtgcaggagcggggagacaggtgagagcctccctgggggcagagtgtccgacttgtcggtggaggagaggagcaccgcagcggcgaaggcatccgagagggtgtccagcattggcgccgagatggaagggtatgggtctttttttaccaaccttgtgaatggagcattagaaaattttgaagacgtctctgaaactccaaatgagttgcagcacatagtccctacaaatgatagcaataccttctcgaagtcaaaccagaagcacaaaggcaaaaactttagtgaggaagaagacagagttcttgttgcagcatggtag

SEQ ID NO: 24192 - DNA, 459 bp, Zea mays
  Peptide Sequence Number=SeqID_65971
atggcggatgcccccgcgatggcctcatcaccaccggcgtccgctgacgacggcggtccatcctcgccttccgtagccgtccctcgtgtacttccctccagattgctcctagacaccccgcctccttccagcggtagggcgcggggcccgcggggcggcagtgcggctgcggcgtcggggcgcggcggcagtgcggctgcggcgtcgaggcgcggcgggcgaggcggaggcacgaggagggagtccactttgccggctgcggcttcaaacggtacaggagggaggaggccggagcgggactggctcgccgaggcggttatgatgatcgggcggccagtcgaggacgcgggactggcatccgccgacattcttcagctggcgatggcgaagggccctatgttcgagtggctgagctactggccggaggaggggtacctcaaggaagatcatccctactga

SEQ ID NO: 24193 - DNA, 156 bp, Zea mays
  Peptide Sequence Number=SeqID_65972
atgctcgtgaaaagagcagtagaggagttctacatcaagtcaaggttgctcctaagagatccagaaatggcatcgacactatttggcaagcaggatgagagtgtactgcaggtttacaaagcggacacgagaaatcctaatgatttggatccataa

SEQ ID NO: 24194 - DNA, 411 bp, Zea mays
  Peptide Sequence Number=SeqID_65973
atggctgaatgcgatagccacaggtatcaaccgagagcagaaggaactcatgaagtggtgcagggatcaaggtcgaacctcaactgcagtccttctaccttaaggacaaaccaatctgctctccttggtaatgcacaatacccagctccgcaacaagtacatgaagatttgagtctccatgaatgcaagccagtgaactgcctcagcctcttcggtgaagaaaactcagcagccaaagaaaggtttcacggggagaaccataaatcagttgaagatgaaagctggagcgccgctgtagagagtgatcttgacctcaaactgagcatcggccctagctcacattcaccagaaacaccacgctggctattctcaggaagcatggaaagaaacccttctggccagcatcgatga

SEQ ID NO: 24195 - DNA, 318 bp, Zea mays
  Peptide Sequence Number=SeqID_65974
atgcccccgcgtgccgagactgttggagctaccccttccctcgcagccacactgacgccggacaccaatgtccctttcttctccccgtgtggcggctcgcacccggcggcggacgtggactgcgtgacgtggagcaacgaccccggcctgctctgctacgcctgcgcctcatgcaaggccgacttgctgggcggcctgcgcgagcagtggcgcagggccaccgtcgcgctcatcttcgtctacgtcgtcggctgcagcgcattccgcaacgcgcagaccgaggacctcttccgccgctacaaatggggaaattattaa

SEQ ID NO: 24196 - DNA, 1077 bp, Zea mays
  Peptide Sequence Number=SeqID_65975
atggcgaagctgggcccggggcaggggctcgggtgcgaggcggcggaggggtcgctcgtgcccagccggaagcgggagtacaagccctgcggcaagcacactgaggggaagcgcccgctatatgctatcgggttcaacttcatggacgcgcgctactacgacgtcttcgccaccgtcggcggcaaccgcgtgacaacttaccgctgccttgagaatggtagtttcgctcttctacaagcttacgttgatgaggataaggatgagtcgttctatactctaagctgggctcgtgaccatgttgatggctcaccactgctggtggcagcaggaagcaatgggatcattcgggtcatcaattgtgctacagaaaagttagctaagagctttgttggccatggcgactcaataaatgagataagaactcaaccgttgaagccttcgctcatcatttctgcaagcaaggatgaatctgttaggctatggaatgtccatacagggatctgtatcttgatatttgctggagctggaggtcatcgcaatgaagtattgagtgttgacttccatcctagtgatattgaacgttttgcaagttgtggcatggacaacactgtgaaaatctggtcaatgaaagaattttggctatatgttgacaaatcatattcatggactgaccttccatcaaagtttccaacaaaatatgtccagtttccagtcttgattgctgcagtacactctaactatgttgattgtacaagatggcttggtgacttcatcctatcaaagagtgttgacaatgaaattgtgctttgggaaccgaagacaaaagaacagagtcctggggagggaagcatcgatatccttcagaagtatcctgtcccagaatgtgacatttggtttatcaaattttcatgtgattttcacttcaatcagttggcgatagcacaatccttggagctggtgaagacggcaccatctggcggtgggatgaagtggaccatccgagctccagaaactgaagaagtgttgccgctcaatgctggactgatggttacgctcggttggggttgcgatggttga

SEQ ID NO: 24197 - DNA, 675 bp, Zea mays
  Peptide Sequence Number=SeqID_65976
atggcagagtacaatagttctggagaaactattgattttgatagcaataattattcatatgaaccattctatcgatattctattgagttcacgtacaaggggtattttatgacatttgaaaggatgttgactactgtaacactaattgacttctccaataatagactggagggcaccattcctgaagctcttggaagccttctatcactacggatactaaatttgtcgcacaataacttcatcggaaatattccagctcaacttggtagcctcacagatttggagtcactagacctctcctgcaaccaactcttaggagagattcctcaagagctgactgatctcacttttcttgcgaccctgaacctatcagacaatgacttggtagggaggataccacagtcacgtcagttctctacatttggcagtagttcatttggagggaatcctaggctatgcggaccaccactgtcagaatttccatgtggtgcgtcaccatcaccatacactccaagcgctcaacttgtgcataggtcgtcacctaacagttttgatgtggtcttgtttctcttcatcgggcttggctttggtgtaggatttgcagctgctattgtcgtgaaatggaatcgggtcggccggtggttcattgcaaatgcaagagctttgcatcgttga

SEQ ID NO: 24198 - DNA, 381 bp, Zea mays
  Peptide Sequence Number=SeqID_65977
atggccctaacaagacaaacacaaagggaggaaaatgaggagaatttgggtgctactgtgaaagtggatgataatcctcataactttgctaaaaaagcaagagttgaagggcagatatggaagaaactttggggaaaagaattaacaaactctgatcctaaagataacaacaacaagaatgaacctatcattggtagtcaagaaaacgggttggttaattcatctcaaggtattgataaatatgggatgaactttattgtcaggactgataaagctgaatatgtgaaggttcagtctcctgttattaatgtgaaaagtctgatttttgaaagaagggcgagcgtatggctcaagaaagatatgggaattagaatcgagtag

SEQ ID NO: 24199 - DNA, 243 bp, Zea mays
  Peptide Sequence Number=SeqID_65978
atgccatcttctggtatgagtcgtcaggtcaggatgccacgcatgaagaatgtgtcggcgccagggggaggagatgacgaggaccctcctcgcccctttaggcaggtcaaggggaagactgtttatttggagcaacaggaaggccgcaagaagcggcgtttggatagagcagcccgagcggctctagcagtagcagcagccactaagcaggcagagagaggtgatcagctgtggatttcttaa

SEQ ID NO: 24200 - DNA, 186 bp, Zea mays
  Peptide Sequence Number=SeqID_65979
atgagcctcagtctaccatgtctctggcagttgcgctgccgcgggcgcgtatggctctgtccctggccgaccggagaagacaacgagcagcccgtggttcctgagtgtgttgccgaagaccttcctgagcaacaacctggtgaaggcaagtgtcctctgacccattatgtcctacttactctatag

SEQ ID NO: 24201 - DNA, 504 bp, Zea mays
  Peptide Sequence Number=SeqID_65980
atgacctcattcatcggtgacgtagtcacttccaccacagacacctccaccgaggccgccctgaccacttcatccgccaacattggaaatgtcagtacctccattgccaaaggtgcaaccgtaggtgtagaagatggggtcagcacctccacctcaatgtttggagtcgtagcaaatccttggcatgacaggggctccaacctcgaggatgaaggcagaggggttgagaccttcagtacatgtattgccataagagttagagtcaccgagtgggtcggaacctcaggcatcaagaccaccataggcactagggctgtcgtgcatgccagagcctcgagcactagggttgtcgtgaaagttggggtttttgcatgggttaatacttcaggtatcaaggacatcgagggaggagtcggacacctcgaccttggagttgtcatgcgctcttgtctcgatgccatcgaggaagcgcccaagcgctcccacctcagaactgttgtatga

SEQ ID NO: 24202 - DNA, 1827 bp, Zea mays
  Peptide Sequence Number=SeqID_65981
atgacaacttcacagttggagagagtgtacttgagcaacaatgcattgtcaggttttattcccaagtccttctttcaactaacaaaactggtagctttagacattagctcaaacaaccttgtgggttccttagaccttacacagttgtggagactacatgagctcaccatgttggatctttcaaacaatcagttgcatgtcattgatgcagatgatgataatccagtggatagtagctatctatcaggacttcaatatataggactcgcatcttgcaagataactcaatttccaagttttttgaggcaagttaaatctatatcatatttggatctttcatgcaataaaatcggtggcaatgtaccaaattggttgtgggacaacatgtggagcgttggaccatcttcttattatgtgaatctttcatataacatgttcaccagcctgcaacttatcaattcaggtgttctcccttttaatagaatagtggaagtgtttgatcttagtttcaataatttttctgggttggtccctatgccaagctcatcaggaaacatgttggaatactccaacaatatgttctcttcccttctaccaaattggactttgtatctcaggcacacaaattatttcagcatatcaaaaaataatataaacgaccatgtacctccctctatatgtgatggccatctagacattcttgatatgtcatacaacaacttttatggcccaattccatcttgtctcatagaaaatgtgtcaacaattctgaacttgagaggcaacaattttaatgggacgttgcctaccaacataactaacaaatgtgctctaaaagcgatagatttatatggcaacaggattgaagggaagcttcctagaggactttctaactgctttgacttggaggtcctagacatcggtagcaacatattagttgatacttttccttcttggttggggtggcttcccaatctttcagtactgctcctaagatcaaacaaactctctggcaccattggtgatgataatattgttggggataccaaatcagccaaggagttttttcctagcctacaaattattgatctttcatcaaacaacttctctggatttttgacgacacaatggctgaagcggttgaagtcaatgacaacagagtacaatagttctggagaaactattgattttgagaaaaatatattacttgaaccactctatcgatattctattgagttaacgtacaaggggatttctaggacatttgaaatcgtgttgactactgtaacagtaattgacttctccaacaatagattggagggcaccatttcagaagcacttggaaaccttgtatcactacggatactgaatttgtcgcgcaatgccttcaccggaaagattccaactcaacttggtagcatgactgatctagaagcactagacctctcctgcaaccaactctttggagagattccgcaagagctgaccgatctcacctttcttgagatcctgaacctgtcaaacaaccacttggtagggaggataccacagtcacatcagttctctacatttggcagcagttcgtttggagggaatcctgggctgtgcggaccaccgctatcagaattgccatgtggtgcttcaccatacactccaagcgctcaacgtgtgcctagatcgtcgcctcattgtgtcgatgttgtcttgtttctcttcactgggcttggctttggtgttggatttgcagctgctattctggtgaaatggaatcgggtcggccgatggttctgcaagagctttgtgtggttgatcaccattggaaggtga

SEQ ID NO: 24203 - DNA, 738 bp, Zea mays
  Peptide Sequence Number=SeqID_65982
atggcttctatcagaagggctttactactcttccttgctcttcttgctcagctgctgcacataccaccaccaataccactgtccagcgcccaccatactcacgctgataattacctcaaatcagctgatggtcacctccccgttgttccgtttctttgccgtccagaccaagcaaagagtctcctccagctgaagaagtcattatcctttgttgattccaccaccacgctttcgtcatggcgagatggtaccgactgctgcctctgggaaggtgttggctgtgacgcctcctcgtctggagatgtcaccgttcttgacctcaacaatcgtcgcttgttcagtcattatggcttggaccctgcagtcttcagcctcacatccctccgtcgccttgacctcagcatgaatgatttctctagaggtgacgacgacgtacagccgttgcctgacaacataacagctactacgccggcaggattcgagaggttttctttgctaacgcatctaaacctttcttatgcgggcttgcgtggtccaatacctgctggaatcggtaaactcgtgaaccttgtctctttggatctttcgagttacttttcaactgatgaagatggtgtaccggatgatctgtggactgggccaattccagctgcaattggcaagctcactagcctcgaaattttggacattgaagatggggttttcagggccaataccagctacaattggcaatcttag

SEQ ID NO: 24204 - DNA, 1878 bp, Zea mays
  Peptide Sequence Number=SeqID_65983
atgccgttccattgccatccagaccaagcaaagcagctcctcaagctgaaggactcgttctccttcagttattcgacgaccaccacgctttcgtcatggcgagatggtaccgactgctgtctatgggaaggcgttggctgtgacgatccctcgtctggaaatgtcaccattcttgacctccacaaccgtggcctggtcagttatggcttggaccctgcagtcttcagcctcacatctctccgtcgccttgacctcagcatgaatgatttctctggagctgcagtagatgacggcgacctcagcatgaatcagttttctggagatccattcaatgaaggcatacattggttggctgaaaacataccggccactggattcgagaggttcactttgctaacccatctgaacctttcttatatgggcttgcgtggcccaatacctgctggaattggtagacttgtgaatcttctctctttagatctttccagttcctttccaactgatggatatgatgtatcgaacagctattttgacaacgtttaccttctgtgggtacctagcttcgataccctgatggcaaatctcagcaatctaagagagctttaccttgacggggtcgatttgtctagcagtgaagaaggttggtgcacaactcttgctacatatgttccacatcttgagatactcagcatggccaattgtttcttgaatggtcctatttgtaaatcactatctagactcagttctctcactgttctcaacctccaaaacaactatattattggtggtccatttccgaggttcttgatggattttctcaatttaactatgctacagctttcaaataccaaccttcagggacagttcccctccagaccctttcaatcaaagaatctaagggttcttgatttgtccgacaatcagaatcttacagggcatgtgccaaaattttctaatgcaagttctctggagagtttgatgctagatgggaccaaccttttgcctgttgacaaagtcaaaccaacatctaccaccaatttcatgtcattgaaggagttaaggctcagtggaaatttagtttctgtggattttctctcctcatttggtatacttgggtctctatgtaagttagacctcactgtcaacacagtgagtgagctaggcccagttttctcatggattggacaccacaataacctgacaagtttggtactctctggcaatttctctgagataacacctaccttggttaacaatttcaaggccttgagaagcttaagtatgcatttttgcacactctctagccatgtacttcatgcagttggaaacctcatcggcttgcaaacacttgagctttttcactgcgacataatgtgggattccaccatgccttcttccattggcaacctcacaaatttgaggaatatgcatattgatgaatgtgggttttcagggccaattccagctacaattggaagactcgtaaatttgagaaacatgtatgtattttttagtggattttcagggccaattcaagctacaattggcaatctcactaaccttgaaagtttgcacattgaagatgggttttctgggccaattccagctacaattggcaagctaacaaacttgaggactatgtatataggtatgaatagtagtctgctctctgggccagtgccagatacaattggcaacctcacccacttgaacactatgggaattttcggtcagttttatgggtcatcgataccctatacaattgggcagctcagtaaattggtgaggttacatattgtaggttccaatttttctgaaaagcataccgagttcaatggcaaatttgactcagttaacagagttgattcttcaagataa

SEQ ID NO: 24205 - DNA, 801 bp, Zea mays
  Peptide Sequence Number=SeqID_65984
atgcaggcggcatgcaactgcaccaaggggatgcaccttttcgactccgacgcgttcagcatggaggcccaggcccacacgtcatggaccaagaaaggggatactccgaaagggatccttctccgtgaaggaagcggaccccgagccctcctactgatcagaggttcgaaggctggcccctcggaagggttcgacagccgcctcagagcactcgggctcctcgcccactactggctggcccccgaagggttcgacagccgcctcagaacacgcagagtgaaggatgactctgggtacgtccgatacatggccgaggctcgggctatgctcccgaggacaaagctctgtccgctcaagggacacgatctcgcctcgcccgagcctagcctcgggcaggaacaacagacccaggcagattcacgcatcgcccgagggcctcctcaagcaacgggcgccataggaagctccgcctcgcccgaccctagggctcggactcaacctcgacctcggacaacggactccgcctcgcccgaccccagggctcggactcaacctcgatctcggacgacggactccacctcgcccgaccctagggctcggactcaacctcgacctcggacgatggactccgcctcgcccgacctagggctcggactcaacctcaacctcggacgacggtctctgcctcgcccgaccctagggctcagactcaacctcgacctcggacgacggactccgcctcgcccgaccccagggctcggactcaacctcgacctcggacgacggactctgcctcgctag

SEQ ID NO: 24206 - DNA, 381 bp, Zea mays
  Peptide Sequence Number=SeqID_65985
atgtccgccgcgggtgactgcgtaggattcgctggtcgttgctcctgggcagctccactcgatccgagatcccgggctgcgtccgccgccccagtgccttacccagatgcatggtgctacacggcgtcgtgctgggggttaccatgggcgcgctctacgggattggtggccggagtaggaccaatttctcaccgtggtcgtggatggtcgcggctccgccttgtgtcgtggccaggaggaattgctctgagaatcctagtgagaaccatcccatttgctaaaccatgttcccaatttcgcgtagctttggtcaattcggaatttagagtacctgggtgcctggtacgcttcgtgcaggcgatgccccaccgtgggcagtag

SEQ ID NO: 24207 - DNA, 399 bp, Zea mays
  Peptide Sequence Number=SeqID_65986
atgggagaacaaagctctccaaatcgcgctgtcagaatgtctgatgaagatcgccatggtacagtgaccataaagatctccggtgtcaaaaataagagaagaaaaagaaaaaggttaaagcgctgtctgggccggctcaacttcatttcgacccatctcaccatttcacctccgcgtgcgctcagcccaattccgaaacctgcgctgcgcgtgcgacgtcctggcatgctgggcccacgtgacagccaccagacgctcgcgcctccactgcagatcttcaccgctcgctcctcaccctctcactgccacttcgggccgcgcttcaactaccgctattgccgctgccagtgggccctctcgccgaccggtcttcttccccgtgagaatagcgtggcgtga

SEQ ID NO: 24208 - DNA, 204 bp, Zea mays
  Peptide Sequence Number=SeqID_65987
atggagtattcggcaaagacaacgcttccactcaactccatcggtattgtttatcctttgccgactgtccggtgcaccagtggagcaacggctatctgcgcgcaacggtcgactctgatggatgaacagtgcagcacagtgtcgcggcagaagtcagagcagcaggcttgtaaagctaccccgaaatgcctaactgtgtgctga

SEQ ID NO: 24209 - DNA, 579 bp, Zea mays
  Peptide Sequence Number=SeqID_65988
atgatgatacacagagcgcaggcgcgcgaacttcagggaaggcatgttaccttcagcagtgaagcagggaattccgtcgccgagttcttgcggaccggagatagccgctacccccgacgagacattgtcggcgccatgtttcaccacggtgcacggtcaggcagagggcggaagcaggggcgcgacggatttatagtgccgcgggttccacaagggctagcgggcgaaccgcgcccttcctggccgagttcgttcgatccacgcggattccgcgccgccgataccgaggtagacgaagatatgcgcggttctgttgcggtgaataagagggaaagtgatgacatgcgggtcccatggatgggcgagacgaacaagcgccagcagacatcgcgcagctcccggcgagatcatcgcgcggattccggcgtccaccgttgcggggaaagggataaagatggcgagtgggccccacccgtaagcgaccgagacaaaagaaaaggggaaagcactgggtgggtcgtgcggaacaagaggtggagctgggccggaggtgggaatttcggcccaggtgaggtttag

SEQ ID NO: 24210 - DNA, 531 bp, Zea mays
  Peptide Sequence Number=SeqID_65989
atggaatcagttggcacccaccgtcgcctgatctacgacaagattggcccaccactgttccttcgggcacgccaaaatgttgcggtcgccacggtgctcctaagcaaactctccgaggcagaaactctgagtggacgaaagacacaccaagaaattcgaggcctactcaacctcgttgtgcggcagcgagccaaaggttttgtgccaggacacctggagctaggggctaaccagagcaccacgtctacgtcagcggcgaacgacgcctcgataaggcgatcgctcgggcctgaggaaggcttggtaccgacctcatcccgctgggacccagggacaagcgggagagcacagagtgtgcctgatccagggagcaatgaggaaatatggatggaagcagaagatgaccatcggtacaaccgcatcgcgggggccgactcaaccgtgatgaagaccgatgcccgagcccccaccgttgggacctcgagcgtacaaccgtcacatcctataggcgccagtatcgcagtgctatag

SEQ ID NO: 24211 - DNA, 222 bp, Zea mays
  Peptide Sequence Number=SeqID_65990
atggcggtcggcgtcatgccattgatggcattcatggaacttgaatggagggagagagaaaaggaaacggtcacggtgggttcggtcgtgggtgttgcgcagggccggggtaaacggttgggggcctggcggctttctggcttgggcgcctggggcgcgtcagggcgcaacgacgctggggcgcgtgctgccgtggtggcatgtgtttttgcttccacctaa

SEQ ID NO: 24212 - DNA, 1365 bp, Zea mays
  Peptide Sequence Number=SeqID_65991
atgcccgaggcaccctcggttcagccagaggcgccctcggctcagctcgaggcaccctcggcccccgagggtgaggcactgcgtgtcgaggaagagcggaatggggtcccacctaatcgagactggcagacctcgtacctgcaatatctccaccgaggagagctgcccctcgaccgagccgaagctcggcgactggcgcggtgcgccaagtcgttcgtcttgctgggggacgggaaggagctctaccaccgcagcccctccggcatcctccaacgatgcatatccatcgccgaaggccaggagctcttacaagaaatacactcgggggcttgcggtcatcacacagcgcctcaagcccttattggaaacgctttccgacaaggtttctactggccgactgcggtggccgacgccactagaattctccgcacctgccaagggtgtcaattctacgcaaggcaaacccacctgcccgctcaggctctgcagacaatacccatcacctggtcgttcgctgtgtggggtctggaccttgtcggtcccttgcagaaggcacccgggggctacacgcaccggctggtcgccatcgacaaattctccaagtggatcgaggtccgacccctaaacagcatcaggtccgaacagacggtggcgttcttcaccaacatcatccatcgctttggggtcccgaactccatcatcaccgaccacggcacccagttcaccggcagaaagttcctggacttctgcaaggatcaccacatccgggtggactgggccgccgtggctcaccccatgacgaatgggcaggtagaacatgccaacgacatgattctgcaaggactcaagccgaggatctacaacgacctcaacaagttcggcaggcgatggatgaaggaactcccctcggttgtctggagtcagaggacaacgccgagccgagccatgggcttcacaccgttctttctagtctatggggccgaggccatcttgcccacggacttagaatacggttccccgaggacgagggcgtacgacgaccaaagcaatcgaaccaaccaagaagactcactggaccagctgcaagagtctcgggacatggccttactacactcggcgtggtaccagcagtccctgcgacgctatcatgcccgaggggtgcggtcccgagacctccaggtgggcgacttggtgcttcggctgcgtcaagacgcccgagggcggcacaagctcacgcctccctgggaaggtccgttcgtcatcgccaaggttctgaagctcgggacatacaagctggccaacagtcaaggcgaggtctacaacaacgcttggaacatccgacagctacgtcgcttctacccttaa

SEQ ID NO: 24213 - DNA, 1143 bp, Zea mays
  Peptide Sequence Number=SeqID_65992
atggagaacctttttaaacgatcttggcttcctggaattaggaacgtggatttgctgtggagtctactactctcgagaatcttgcctaagctgctcggtcttcctggtattttgctgaagaaattccgaaaggaaggtgtgatggaattggatgctgctgcattgccagagctgccacaggatgtgttgatggacatctttggtacacttgaggtccctgacctcatccgagcaggctcggtttgctcgtcatggcatgctacctacaaatgcttgctcgacctgaggcaatacaagcaaccccagacaccatgcctgttctacacttgtgaatctgccggtagcaacgtagggtttctatacagcctcaaggaaaataggtcctacaagttaactctaccggagccacccatccgcagtaggttactgatcgggtcctccaacggttggttgattactgcagatgagaggtcggagctgcaccttgtgaatcccataactggagaacaggttgcacttccctctgtgattaccttagagcatgtgaagcccatctttgatgcatcaggtactatctgtatgtacgagttgtcatatcagacaccacccgacctgtttgatctcggtgatctgcgcgatgaactctacttcaaggcatttgtgtttcccgatccatccaccactggaagctacatcgtggttcttattcatgagccatattcacggctttcgtttgcacgaccgggagatgacaagtggacctgggttggacaaggtagccaatataaagactgcacatatgtggatggtcttttgtatacagtgaattactctggagaaattgatgcgtttgattttaccgcgtcccctgttaaaatgacagtaattatgaaagagctgaagtatcatgtatgtgaaaacatgtacattattcagactccatggggtgatctgctgcatgtttggaggactattgacgttccacccaatgctccgtcgtgggtccctggaaaatgcatggtcgaaaccttaaaaatacaagtgcataaagtggacttggaagcaaagcaacgagtggaaataaacagattgcagtgtgatagtgttttattttttgggccacaacgattcactttgccttag

SEQ ID NO: 24214 - DNA, 1215 bp, Zea mays
  Peptide Sequence Number=SeqID_65993
atgcaaccaaaacagctgtggagtctactactctcgagaatcttgcctaagctgctcggtcttcctggtattttgctgaagaaattccgaaaggaaggtgtgatggaattggatgctgctgcattgccagagctgccacaggatgtgttgatggacatctttggtacacttgaggtccttgacctcatccgagcaggctcagtttgctcgtcatggcatgctacctacaaatgcttgctcgacctgaggcaatacaagcaaccccagacaccatgcctgttctacacttgtgaatctgccggtagcaacgtagggtttctatacagcctcaaggaaaataggtcctacaagttaactctaccggagccacccatccgcagtaggttactgatcgggtcctccaacggttggttgattactgcagatgagaggtcggagttgcaccttgtgaatcccataactggagaacaggttgcacttccctctgtgattaccatagagcatgtgaatcccatctttgatgcatcaggtactatccgtatgtacgagttgtcatatcagacaccacccgacctgtttgatctcggtgatctgcgcgatgaactctacttcaaggcatttgtgtttcccgatccatccaccactggaagctacatcgtggttcttattcatgagccatattcacgactttcgtttgcacgaccgggagatgacaagtggacctgggttggacaagtaattatgaaagagctgaagtatcctgtatgtgaaaacatgtacattattcaggctccatggggtgatctgctgcatgtttggaggactattgacgttccacccaatgctccgcagtgggtccctggagaatgcatgttcgaaaccttaaaaatacaagtgcataaagtggacttggaagcaaagcaacgagtggaaataaacaggttgcagtgtgatagtgttttatttcttggccacaacgattcactttgccttagtgctcaagtacatccagaactcaagtcaaatcatgcatacttcagtgacgatttgaaagaagtggctgtttcattaaaaaattgcatgcgtgatatgggagttatggacttggaaaatagtgtcaagaaggaaattgtctctcaaatttggtccaactggccctgtcccacttggataacacccaatcttatgaagctgaatcaggcattcaacagatag

SEQ ID NO: 24215 - DNA, 1053 bp, Zea mays
  Peptide Sequence Number=SeqID_65994
aacctttttgaacgatctaggcttcctggaatttggaacgtggatttgaaattccgaaaggaaggtgtgtcggaattggatgctgttgcattgccagagctatcacaggatgtgttgatggacatctttagtacacttgaggtccctgacctcatccgagcaggctcggtttgctcgtcatggcatgctacttacaaatgcctgctcgacctgaggcaatacaagcaaccccagacaccatgcctgttctacacttgtgaatctgccggtagcaacatagggtttctatacaacctcaaggaaaataggtcctacaagttaactctaccggagccacccatccgcagtaggttactgatcgggtcctcgaacggttggttgattactgcagatgagaggtctgaactgcaccttgtgaatcccataactggagaacaggttgcacttccctctgtgattaccatagagcatgtgaagcccatctttgatgcatcacgtactatccatatgtacgagttgtcatatgaaacaccacccgacctgtttgatcttggcgatctgcgcgatgaactctacttcaaggcatttgtgtttcctgatccatccaccactggaagctacatcgtggctccatggggtgatctgctgcatgtttggaggactattgacgttccacccaatgctccatcgtgggaccctgaaaagtgcctggcagaaaccgtaaaaatacaagtgcataaagtggacttggaagcaaagaaatgggtgaaaataaacaggttgcagtgtgatggtgttttatttcttggccacaacgattcactttaccgtagtgctcaagtacatccaggactcaagtcaaatcatgcatacttcactgacgattgtaaagaattgactgttgcattcaaaaattccacacgtgatatgggagttatggacttggaaaataatgccaagaaggaaattgtctctcaaatttggtccaactggccctgtcccacttggataacacctaatcttatgaagctgaatcaggcattcaacaaatag

SEQ ID NO: 24216 - DNA, 711 bp, Zea mays
  Peptide Sequence Number=SeqID_65995
atggcgaggagaaagaacaggctcccccgacagcttccggaagatggatgcctccaatggcttgttcgagtcggagcagacacggtggcgcgcctttgttcagggataatggtacctgtgcggtacatcatggagatgttgcggcaacgtcttcttcatggcgagccacgacccataggtcccatacccatcacggatgaagctgcagaccagcagcgcgcaccaggatcaggagtccttcaatctcgtggtcgtgggcgtaatcccaataattactatgcaatcaaaccagagcgcctggacccgcaccggcaccgatcacctccggctccggggccaaccaacccgatgacggatgaggctgagggcagtcatactgccaccgcggggacggacggcgttccaattgatgtgcaatcccagtatagcacatatgtcacactgagtagtcagctgaacatcaaatctattatctgtcatatgtgcttttttgaacggcagctccatcaaaatagcaaagtccctatacgagagataatcttgcactgccataaacaacatgaaatacaaggcattaaatgcaactataacgggtgcgaagttcgagtgcgcaaagaagatgatcttaaactgcacaggcacttctgccatggtctagagtttgtagcgaggttagctgtaacccgctggggtgtgatcttccccatgtaa

SEQ ID NO: 24217 - DNA, 183 bp, Zea mays
  Peptide Sequence Number=SeqID_65996
atggctgcggtgggagctagggagtcgaggaaagaagcggaggatggcagagattggggttcttggagattggggttgttcttggtggcggagagggagggaggtggaggatggctgtggctgcgcgatggtattcagcagcagaagggagacgggagacgaagaggcacagcattcgtcagg

SEQ ID NO: 24218 - DNA, 216 bp, Zea mays
  Peptide Sequence Number=SeqID_65997
atggcgggatgcgctcagcgaaatctacgagggggaccgggaccggaccccatggcggcggtggcggcggtgctcgactccttcatcaagcgatgcacggcgtcaaaggaggacttcggcggccagcccagccagaaggcctgcttccttctcggcatcgggttcgagttcgacatcaggggcctcctggccacacaccaatcacctcatccctaa

SEQ ID NO: 24219 - DNA, 461 bp, Zea mays
  Peptide Sequence Number=SeqID_65998
atggcgcgtagcggtgtgccctcccctgcctacgtgcgcagcggccgccgtgccccactggcatggtcgtgtgcatccctccggcgagggccgctgcacccgcctgatggccggcggcacttcccagccccgtgcccccgtctcgtcgctgttgcgccgccgtctattgttgcagccgcttgccgcggcctgcccgcgctgctccagcacgccaccagacatggccaccgacgagttcgctcagccggtgtcgcctccttccctgtgttgtgccgccccatactgcaagttgaagaaaagaaaactgtctctgcttcgttcgttcatgtgaccaaggatggagaacgggcccattcatgtccacgtgtccccattcggttgggcttcaagaatggtcgtttgtccaacccgggattttcaaggggcaccaaaacccggggatatgtgataatcaccagggg

SEQ ID NO: 24220 - DNA, 696 bp, Zea mays
  Peptide Sequence Number=SeqID_65999
atggcgaggagaaagaacaggctcccccgacagcttccggaagatggatgcctccaatggcttgttcgagtcggagcagacacggtggcgcgcctttgttcagggataatggtacctgtgcggtacatcatggagatgttgcggcaacgtcttcttcatggcgagccagagccacgacccataggtcccatacccatcacggatgaagctgcagacgagcagcgcgcaccaggatcaggagtccttcaatctcgtggtcgtgggcgtaatcccaataattactatgcaatcaaaccagagcgcctggacccgcaccggcaccgatcacctccggctccggggccaaccaacccgatgacggatgaggctgagggcagtcatactgccaccgcggggacggacggtgttccaattgatgtgcaatcccagtatagcacatatgtcacactgagtagtcagctgaacagcaaatctattatctgtcatatgtgcttttttgaacagcagctccatcaaaatagcaaagtccctatacgagagataatcttgcactgccataacatgcataaaatacgaggcattaaatgcaactataacgagtgcgaagttcgagtgcgcaaagaagatgatcttaaactgcacaggcacttctgccatggtctagagctacaaggaactaacgatgaacaagagtag

SEQ ID NO: 24221 - DNA, 318 bp, Zea mays
  Peptide Sequence Number=SeqID_66000
atggcggcggtggcggtgctcgactccttcatcaagcgatgcacggcgtcaaaggaggacttcggcggccagcccagccagagaaggcctgcttccttctcggcatcgggttcgagttcgacatcaggggcctcctggccacacaccaatcacctcatccctaacaacgccgccggacttacctacgcggcgcgcgactacggcggcagcgacccgtttgaggggtttcgcgacgcggtgctggggccgataactcagagaattcggaagaaggaaggagagttcagaggaagaaaggacgaaggagacgaggaatag

SEQ ID NO: 24222 - DNA, 1413 bp, Zea mays
  Peptide Sequence Number=SeqID_66001
atggccaccgccgcaccgggcgtgtgcgccgcccgccccgggatcgagctgggaaacctttttgaacgatctaggcttcctggaattaggaacgtggatttgctgtggagtctactactctcgagaatcttgcctaagctgctcggtcttcctggtattttgctgaagaaattccgaaaggaaggtgtgatggaattggatgctgctgcattgccagagctgccacaggatgtgttgatggacatctttggtacacttgaggtccctgacctcatccgagcaggctcggtttgctcgtcatggcatgctacctacaaatgcttgctcgacctgaggcaatacaagcaaccccagacaccatgcctgttctacacttgtgaatctgccggtagcaacgtagggtttctatacagcctcaaggaaaataggtcctacaagttaactctaccggagccacccatccgcagtaggttactgatcgggtcctccaacggttggttgattactgcagatgagaggtcggagctgcaccttgtgaatcccataactggagaacaggttgcacttccctctgtgattaccatagagcatgtgaatcccatctttgatgcatcaggtactatccgtatgtacgagttgtcatatcagacaccacccgacctgtttgatctcggtgatctgcgcgatgaactctacttcaaggcatttgtgtttcccgatccatccaccactggaagctacatcgtggttcttattcatgagccatattcacgactttcgtttgcacgaccgggagatgacaagtggacctgggttggacaaggtagccaatataaagactgcacatatgtggatggtcttttgtatacagtgaattactctggagaaattgatgcgtttgattttaccgcgtctcctgttaaaatgacagtaattatgaaagagctgaagtatcctgtatgtgaaaacatgtacattattcaggctccatggggtgatctgctgcatgtttggaggactattgacgttccacccaatgctccgccgcagtgggtccctggagaatgcatgttcgaaaccttaaaaatacaagtgcataaagtggacttggaagcaaagcaacgagtggaaataaacaggttgcagtgtgatagtgttttatttcttggccacaacgattcactttgccttagtgctcaagtacatccagaactcaagtcaaatcatgcatacttcagtgacgattttaaagaagtggctgtttcattaaaaaattgcatgcgtgatatgggagttatggacttggaaaatagtgtcaagaaggaaattgtctctcaaatttggtccaactggccctgtcccacttggataacacccaatcttatgaagctgaatcaggcattcaacagatag

SEQ ID NO: 24223 - DNA, 393 bp, Zea mays
  Peptide Sequence Number=SeqID_66002
atggacaccattgcagcagccagtggaggaccccgagccctggcctcgcgcgtaggagatgcagggcgtggtcggggaagaagccggggagctggcacaaccatggtgaactggaacaggttggtgagcagcggtgtccgatacggtcaacagggacgacggcggatagggccatggcaggaagaacgaaatggagggaaggcgccgaaggatacgagagaagctgagctcgcgtacaggaataagaagaagctagcgatgaaaatatcaatagaggagcggcgcaagaagataagaacgacggctgtgatcttcaccggcagtgagcggctggaagatgaaggctggcacgcggtggaaaaagatctgtgggagagcggtgggattagatag

SEQ ID NO: 24224 - DNA, 192 bp, Zea mays
  Peptide Sequence Number=SeqID_66003
atggcggattactcaccgaggtccgcttcgtccgccgccgggtgtacccacaccatagtcaacaggcgccagccatttttcaccgtgatggtcaccgagataccactaattcgacatcgaaagcacgccattaacgccaaaattgtccatggtcagggcaggtgccgccattgccgtctccgcattcggtag

SEQ ID NO: 24225 - DNA, 165 bp, Zea mays
  Peptide Sequence Number=SeqID_66004
atggttttgctccaccacctctgttgttccctccagttgaccctgctcagttccatactcctggacaatctggggcgacatccaacaaccctcatggatcagctagtccatcgccgcaccagtccagccgcccacctcgctgatgatcttctcttagcttactag

SEQ ID NO: 24226 - DNA, 330 bp, Zea mays
  Peptide Sequence Number=SeqID_66005
atggatgggatccctgaccacgcccagggagccaacaccatccaaaacgctgttatgagggcggggaacacatcgaaaccttggaagggactcttacctcgctggtggatgatgccaaactggaaagcggcccacgagtcagtgccctacaaagagccaagcatgaccgaggcaagagaggctggccacatgggcccacaagtcagcgtcgatcatgaaaggctggcgttggagcctacccgtcaaagcccaaaacacgacagccaaggagtcagcggtcacgagcccactggccatgcagaacaggcggctgggcccacaggggagtag

SEQ ID NO: 24227 - DNA, 225 bp, Zea mays
  Peptide Sequence Number=SeqID_66006
atggtgccaaacaggcaagcggcccgcgagtcagtgcctagcgaagagccaagtgtgaccgaggcaggaagagaggctggccacatgggcccacatgtcagcgtcggccatgaaaggctggcggtggagcccacccgtcaatgcccaaaacacggcagccaaggagtcagcggtcacgagcccactggtcgtgcggaacaggcggctgggcctgtaggggtgtag

SEQ ID NO: 24228 - DNA, 294 bp, Zea mays
  Peptide Sequence Number=SeqID_66007
atgtatgctactttcattaattatcttgtgctgttcgagaagcctaacatagcgatgaaagcagcaatctcggaacgttcattcataggcttgaaatcacttatcgaggctggtgctcctgttaatattggtctgcctgaaactccattgatagcagctgcaactgctggcttaactgacttcgtcaagtgtttggtgcaagctggcgcagatgcaaacatacccgatgatgtcagttttatcctaacacttagcttcattgtcacttttgatgagcttatttgttgtctatga

SEQ ID NO: 24229 - DNA, 384 bp, Zea mays
  Peptide Sequence Number=SeqID_66008
atgaaaaggaacggcgagacggctgatggagcaaactgggatgaccgtggacgaggtgatgagacgtatccaggtcgaggatgcattggagcagggttacggtccggtgcacatggcggcgtcttatgggaacttaaaggtctgcaagttcctgctcaaggagctcaagctcgatgtcaacgctactgccagggatggttcgtatctattttctatttttgctttttgcatgacgttcgttgggtcagcaccaggagggatgggatggttagacagttggatcaagtttctgagcatgggaagggagactttgatctgatttatgggatatgtcgagggttcagtttatttgttcgcttctttgttttggataaaattacttga

SEQ ID NO: 24230 - DNA, 474 bp, Zea mays
  Peptide Sequence Number=SeqID_66009
atgtggcagtacaccggggataattattccaaccgtcattcagccgagaacctggtgaggaaggaccttatggcctgcgtccttgctaccaaggcgggggggcattgcagcattaaggtttctcgtccccctcttttgaaggacgacgctattaaggcagagaagaaacgaaagaggaaggtggagcaatcagtcacgacaacgcgtaagaaatgtcgccttgagaggaaggcgaaggctaaacgagcgtgcttgaccgatgtcctgggcacgaacggcagtggtcacctagatgcgctcctcctggctactagtgtggtccctttggctccttccgcccatgtgggaacgccgggcgcgtccgtcctagatacgagggcgggccctgccgtagttgacgttgtcaccatcgaggcccgcatggcggacacgacggtcaccgtcccccgtgcccgcctctggctcctgccatag

SEQ ID NO: 24231 - DNA, 489 bp, Zea mays
  Peptide Sequence Number=SeqID_66010
atggcacgtacaaagaccacccttcggaaagcgattggacctcagggtgtgccccgtcaccagttggctccttgtcatgaggggagcaacagtgagagcaatgatcccataggagacttggaggttagagtcgagcgcctgactgcggagtgcgccatggaggcagggagcctacacccaaatgtgtcgcctgaagttgcggagatgggagctggcgcagcaggagcaggtgaaggaggaccctatggggaactggatatctttagagcccctccttctatgaacatcatggatgaccgtcctcctgaagctagcaacggatctggagcgaccaagaatatgccaacaaggactcgtgctcaggatgggacagggacttctcggggtagtggggaggagactacaatcccaccacctatacctccaactttggctgaggccattgctgccttgcttcatgctactgctgacaatacccggtttctctag

SEQ ID NO: 24232 - DNA, 1020 bp, Zea mays
  Peptide Sequence Number=SeqID_66011
atggagcgtttcttcgtttttaacagaacttgtacaaagatgttcaaaagggaaaaagtaatcctagtttttcaacaacaatgcacatttattgctaacaatagtctggtgcgacgcaacttggagcaagcaaaagcactaatggatgctttgattaagagggaggagacaaagcgggaggccatggagtgccaagttaacctgcagcgtgttcagatgaaatataagccttttttccgagataaatttacgtttggacctctgaacgacttaatgtcgttttggaccctttgctcggcacataggtcatggcgccgaggtaacacggttcctgaggttcttgcccacacagatgccgtggcaatatttacgttcatattcacagtactgcaattaatagcccccagattgtggatagactttttttttcttatttcattcttagatgtcaggaagcatgaggcccagcttgttgaggatgggactaccttgtctggcttccagcaaacttcgagcagatttgaatcgagcgatgatgatgtggattcagatgatactgcaactgaacagacatacatacgtccagcagttttccatccaaggttttctgctaataagctatctgtgatccctccacttcgcataaagcgtgaacgagagctaaaaaggagacctcagcagaatggctgtgtatttaaaaggatcggaaaagactccagttgctttagttcccttgtcaagttcatttaccagcttcttcagatacaggatcctgaggagccagtattcttattcacaagaccgcttgatccggagaagttggttgcagcaggtatcaagccaccaccagatcctcctattgagaatggtgccacatcaccaccatttcggtgtcgaggtaggattggacgaggcggccgcatcatctttgatcgatggaatcctcttctccggacaccaattgaccaggagacttattatgtgccatacggtcacaggcccccctcacctgaaggttga

SEQ ID NO: 24233 - DNA, 879 bp, Zea mays
  Peptide Sequence Number=SeqID_66012
atggagagtgaaggctctgttggtgctccggttgatgttgatgcatatgaccctatggctgatccaaagcggagagcaaagtccaatgatcacgaatggaactatggctattggacagcaacttggaaccgagataaggtcgcatgcagtattttcaagaccgtgacaactggagggatcaaaaggttgaaagaacatcttgcagcctctaaaaggacgagagctgcatctcagtttaggggagcagctccacaaccatccaacatggaaaaagaaacagaaaaaattgcaaccatgctttggagaactccggaacaagttgtggatgacaggcgctcatcagggtcgcaccaaagcaccatagaggctagaatgaagctaaaggctgacagagattatgtgaatgagcaatgggcactgtggttctatgagtgtggcattccttttaatgccattagttcccagaagtttcagattgcttgtgaagctcccgcacaatatggttcagatatgctagctgatttgcttgagagaattgatattggaaaatggaaagacttcaagaagcctactgcacaagccaaaagggtcaccagttttatttataggcatggaagaattttaagtgcaatgagggagaagacaggtgggatggatctgatgcatacaaagaagagaaatcagttgttacacaagaagttgaatgacttggtctatgtttcatacaattggaagatggaaagtaggttccaaatgagaagggagaaagccggctcaagttatgactcgttagttattaaagactttgattgggacaataagtggatagacccatcagtggtacatccgggcagggataatgatggtcttaatgattaa

SEQ ID NO: 24234 - DNA, 468 bp, Zea mays
  Peptide Sequence Number=SeqID_66013
atgagtaggctctcgttcagaccgcggccgctagacatccacaagaagctccccatcctcaagtctgtgcgtgagttcgaggatgaggagccagggatcgcaccactgtcctctgcgagggctggggtgctgctgcgtcactcaggagctgacttcaccgcgtctggggccaacaatgccacagaaggcgagggaaatcaagcactcagtaagaaaaatgcccaggaaatacctacaccacaatttgatggtgttgacacatatgaaagggactatactcgtacctttgcacaaccgacatcttatatacgtggaagaggagagttatcactatctgcagccagggctgagatcggtgaatttgtcgagtatgaccttgacaatgaagacgaggactggcttgaagaattcaatagcgagcggaagaatataaaccctgaaaaatatagtgcatatttgagtgcatag

SEQ ID NO: 24235 - DNA, 693 bp, Zea mays
  Peptide Sequence Number=SeqID_66014
atggctggggagcaccgggaggataaggaaggggaatgttttgtccggtttgggcatggtggtggcctgactccttccggtataatcattaaggtgcttcggcgttgcagcagcccaatgttgatgcaatgtagaggaatagggaaagtgcatgacacgctgcagcagttcccggagcgggcgtacgtgcggctgcggagcgaggtgcacggtgggtacttccacgccgacgaggacggggtgggtgtgtccctacgctggcgccgccacagattaatcgaggaggcttacgcggcctgttgctactgcatcaggaacccatggtgctgcagcggacgatctgctcaagtgaaggtgcgactgttggaggaagacaacaatgcagggaagtttgggttctacagctactgccttaagtgtcataaggttgccaaagaagagcaccttaggcatcaagatgttattatcccttttgcgtggcacaagggaaagttggtagcatgggtgattggcaaagagacttggtctagcagctttcatgatattcagggtcttatgagtttccgttcttctatcgatcgctcattcctcctgcaccagccaaaagattgtagatgcacatcatgcaaggatttgatgtctactaaacagctttatggttgcttaatctcctactactcaattaactgttgg

SEQ ID NO: 24236 - DNA, 807 bp, Zea mays
  Peptide Sequence Number=SeqID_66015
atgccagccctagggctcgccaacttcatctccctgctccagccgctccctccagactgctcaaccgcttgctggattgcgcaaagcaccagcttgtactgctgtagttccagcaccaccacattctcctcctgctcctgttacctcagcaccagcttctcccctgcaccttctgcagcagctccagatactaaagatgaaccattgcaagataaaacagttgaagaaagtacagatgttgtgactggaaacatatctggttttcctgccagccaatttgatcatagtgcatgggcatacaagggtgccatggtcaggaatatgccagatgacccgtcccagtcacaacatctcgttcaagaagatttagttgatgtatttgacattttggatgacctgaagaatgaccctgtacagcgtgatttgttgaaagaagtcgagaaacacgatgtaaagaatgtttctacatttggttctactgaaaggagcatccccctgtcccaaggtttcacgatgccccggtacgttgtacctgatgacactgacattcagtacacacctcctcagccacgagcgacacgttctcaagctcaacctctgaaatcttcgctccgtaccaatgagactaggcagattaggaaaggccagaagaagctcaagaagtcgcctaagaaagtctcccaagatgttgagcttgatgacaatggtttccccatcatcgactttgctgctctagaccgttttgatcctcctccacatcttgccgtggatgttgagagttatggtggaccagctgcctcaggttga

SEQ ID NO: 24237 - DNA, 246 bp, Zea mays
  Peptide Sequence Number=SeqID_66016
atgtcgggggtgggaggcagaaccgtgcactataccggtgtggacgcctacgctctgctcttaagaagtagtagagatatgaggatagaaggggatgaggctgcgtcagatggcgctaaattctcgaaaaagttgggttcatcagcagaagctgcttgctccgccgccgccctcttcctcctctactggtacgctcgctcacttgcatcggtttcttctcttcccacgcttctattcagagcataa

SEQ ID NO: 24238 - DNA, 312 bp, Zea mays
  Peptide Sequence Number=SeqID_66017
atggtgatgcccctctgccccacccctgccgctacgagaacattcaggttgtcggtcgcacggttccccatgcaacgtgtcccttctcctctgtcaccgcctgactccctcgcgtggacaacgccgtgcaacacaggagagcaggttgttgcttcgtcccaggtcaaggtgagcctccctctccctgatccgacacgaagtgctgagcatctcgtgggcgtgctcgtcgtcgtggaggtcgagccagcactcgagcggctgtctggaggcgacgcgcgccgcggtaacagatctgacccaggtcaaggatga

SEQ ID NO: 24239 - DNA, 321 bp, Zea mays
  Peptide Sequence Number=SeqID_66018
atgggccctggacagcaggtgggcgcgtcgctgctccggacgacctccagcctcctcggcggcgcaggcggcgaccagccggggatggggatggtcggcgccggcggggtgctgccctcgcagtcgtcgcccttctcgtcccttgtctcgccgcgcacgcagtatggtggcggcagtgggaacggcttgctggccggcgcgtccagtgtcgcgtccatgctcagcaggcagcactcgtatggaagtggggggactggagcaatgccgggcagcgccgccggtctccccatcggtgggctgcagcacagaggcggcctttga

SEQ ID NO: 24240 - DNA, 543 bp, Zea mays
  Peptide Sequence Number=SeqID_66019
atggggaaaaagctgaccatttggatgccacaagtgaagaagtttcgtttggcaagagaggagggtacgagtttgatgaggctgattttttgggtctcgacttctttgagaaaaaaacgttctaaaggtctaccacctgggctggctccagcttttgagcctttacgagatgacgattttcctgaggtggacataatagttggagacccgagcaaattcgacaagtctcctcgccgaactgaaatccaaccggtaaacaacagggagttaggggaagcatctcaatcgactactaaaccaaatgaagctgacaaggctgggatagcacccccttcaactgttattgagacagaagaagatggagatgtttatagacccacagttatatcatggggaatgtttccgaggccacaaaatatttcaaaggcggtaagatatagttgtagcatctcgtattttgtatttgcatctttcttacatgatgtcaaatattatgccatgagcaatgcctccaccagaaatcaatactgcacatatagttag

SEQ ID NO: 24241 - DNA, 501 bp, Zea mays
  Peptide Sequence Number=SeqID_66020
atggagagctccagactcacctaccccgaccgcttctacgccgccgcggcctacgccccgcacaaggacgaggccatcgtcggctcgccatctccctcccttctgtgggatgagcccttcccgtcctctatgacggtgacggccgcggctgcgggcggcatgggccagctccgcctgatgtgcagcttcggaggccggatcatcccatgctcaaccgggaagatggttttggccgtcttcggggtgtcgcatgcatttgtgattttcttgccaattcaggatctcattatcctatggatgaccaagagcatgatggacgacatccatgggtggggagttctcttcgacgacagagttggggatggaaccgtcactgtctatatttggaatggtgaagaatctaaacctaacatgggacatcttgaatgggctgatccttttgtcataacaacagactcgataagtattttaagtgaggcatgcccactgataacaagttaa

SEQ ID NO: 24242 - DNA, 120 bp, Zea mays
  Peptide Sequence Number=SeqID_66021
atggagctcaaggacacgcctgcaccgctagagaagttttttcgcaattatgatctttcccgcaagcagtaccagagttttgatagtgagattggtgccttgatcgagatttggatttag

SEQ ID NO: 24243 - DNA, 276 bp, Zea mays
  Peptide Sequence Number=SeqID_66022
atggcaaaccactgtagtggctgtcgctcgcggatgatgttgaacgcgaagcggagcagcacgtccctacaggttcaccaccgcagcgcccctagccctcgctcgctcagcgcctccatcatcgacaacaacttgtcgtgcaccagacgctcgacggtggccgccgagaactggacgaaccgcgccaagtgcatctcgatgttggcggccttccgctgcacgcgccacgaggcgccgtcgtgggcggtctccgtcgccgccgctgctcgtgcctag

SEQ ID NO: 24244 - DNA, 222 bp, Zea mays
  Peptide Sequence Number=SeqID_66023
atgacgactgccctaggcacaagcagtggcggtgacggagaccgcccacgacggcgcctcgtggcacgtgcagcggaagaccggcaacgtcgagatgcactaggcgcagttcgtccagttctcggtggccaccgtcgagcgtctggtgcacgacaagttgttgtcgatgatggaggcgctaagcgagcaagggctaggggcgctgcggtggtggacctgtag

SEQ ID NO: 24245 - DNA, 270 bp, Zea mays
  Peptide Sequence Number=SeqID_66024
atgcagtgcgcgctgttcactgcacgtccactccagcagtgggcagtggcccgctggtggcgttctcccgctgagtcagccgagtccgcgcccgtgcgtctctgtctcgtgacgaatccggccctctgtggctgtcacatgacggatccggccctcggacaccctggattagctccagtatttaaagaaagcacgatcgcaagattacagaagaggaatctgaaactcgctagatggatcgcaggggccatgctctcacttctgacttga

SEQ ID NO: 24246 - DNA, 333 bp, Zea mays
  Peptide Sequence Number=SeqID_66025
atgccgcatttcgctgctacgaacaacggacatggctggcccagcgggccttgtgcctccttcctccgacgcagcgactcgcaggcagatagatgcggccaggccaggcgcccggcacagctggagcgctttgctgcgcctgcacggctcggctcggctggccctggcctgcctctgctctgcctgcctggcacaccactgccgctcgcctgctccagcgcagcggcagggcaccgcacgcctctcatccttcgctgcctcgtggggggccacaggcgggtgctctggtctctgtgggcgacgccgagctgggctgaccgggacccggattag

SEQ ID NO: 24247 - DNA, 222 bp, Zea mays
  Peptide Sequence Number=SeqID_66026
atgggacactccaacgtgtggaactcgcaccccaagaactacggccctggatctagggtttgccgtgtgtgcgctaacccccacggcttgatccgaaagtacgggctcatgtgctgcagacagtgcttccgcagcaacgccaaggacattggcttcatcaagattttggcacctcagcaatttggaaccagggtcaagtttcttattgcaagagttcgttaa

SEQ ID NO: 24248 - DNA, 453 bp, Zea mays
  Peptide Sequence Number=SeqID_66027
atgctgaggcaactgtcaagcaggagccatagaagcaagaagctccgggcaagccacggtttccaggccttcctgctggtcgccgtcgccgtctggatcgtgtaccagctcacgcatccgttcggcgagcgacggcggcacgtggccgtggaggagaccagcggcagcagcaacgacgacgacgccgagccggcgcggcgccggctgggcaggatgcgcttcgtccgcttcccgggccacgcgtccgtcgatgacaatgacattgctgctggggccaggagctggagcggcggctcgtcggatgatgatttgagcggcaaggctggcgacgccgaaggcggcgatgagggaccggaggccgatggagatgacgcggacgatggacttgccgttgccgctgatgaagaggatgatggcatggatttccagtcacgagacggcagacgcgactag

SEQ ID NO: 24249 - DNA, 321 bp, Zea mays
  Peptide Sequence Number=SeqID_66028
atgggacgcgacgacgatccgaaggccgtgcatggaggaactcatcagaatggactgaacataagcggtgttgctacagtgaacggcaccggcactgtgctggatggtgctgccgttctactgtccgaagcgactggcggtgctgcagatggcgctgccctgactctgactgcttctgccaaaaacgattcatctgtcgtcggtacggcgttgttgcgtggcacaggatcagctggtgagttgcttgccaacagtttcgctgcaggggcacctggagcagagaagcctgctaacaagacccagaaggcaggaaccttctga

SEQ ID NO: 24250 - DNA, 618 bp, Zea mays
  Peptide Sequence Number=SeqID_66029
atgactctgggtacgtccgatacatggtcgaggctcaggctacgctcccgaggtaccctaggacatttccgagaccaacaggagcgattttgtaacggagtcccatcagagggaggcatcgagccctcggaccctatcgaacaggaccgggtctggcaaatcacctgcagggtgtggctgatagcagctgagtccagcctcagtcgccacaggaagctctgcctcgaccttgggcctcggcctcaggagaagtctccgcctcgcccgaccctagggctcggcccccgcctcggcctcggaaggtggactccgcctcgcccgaccccagggcttggcccccgcctcagcctcggaaggtggactccgcctcgcccgaccccagggctcggcctcgacctcgacctcggaaggtggtctctgcctcgcccgaccccagggctcggcctcaacctcgacctcgggtggaatcgcgtcctcgcccgaccccggcttcggcctcaggaggagtctccgcctcgcccgaccttgggctcggaccgaccacgtcgcagggggatatttagattttcttcacaaccagattctccaagaaaccagattttgagagaagaacgttaa

SEQ ID NO: 24251 - DNA, 1407 bp, Zea mays
  Peptide Sequence Number=SeqID_66030
atgcggcccgccgaccagctactcctcccgttcctcctcctggccgttgcctccgtcgctgccgccggcggctcgtgggagaatggatatgggagcatcctccgcctcccctcctcgtctccgcgccggttcccccgctccgcggccgtcgacctgatccacgcgctcaacctccaccccgccgacgcgtcccctcccctctccaccgccggcgtagagggcgccctcgcccccgcggggaccctcgtcgagaggcccatccgcatcgcgtccttcgcgaacggaggcgccgccacgtcggtggaggacctcggccaccacgcggggtattaccgcctcgccaacacccacgacgccaggatgttctacttcttcttcgagtcgaggggccacaaggacgaccccgtggtgatctggctcacgggcgggcccggctgcagcagcgagctcgcgctcttctacgagaacggccccttcaacatagcggacaacttgtcgctcgtctggaatgattttggttgggacaaggcatcaaatcttatctatgtcgaccagcccactggaactgggtttagttacagctcggattcgcgtgacactcgccacaacgaagctactattagcaatgatctatatgatttcctgcagggttttgctattggcaacggactaacagatccagcaatacagtacaaggcataccctgattacgcattggatatgggattaattacaaaaacacaatttaacaggatcaataaaatagttccaacttgtgaattcgcggtcaagctttgtggtacttctggaactgtatcttgccttgctgcgtactttgtctgcaatacaatattcagtgccatcaggacaatcataggcaataaaaattattacgacatcaggaaaccatgcatcggaagcctatgctatgatttctctaatttggagaaattaaatcgaatctttttttccctacgacctacggttggtgatatagagtttgtttcatgcagcccaactgtctatgagggcatgctattagattggatgaggaaccttgaagttggaatccctgaactccttgagagcgacatcaaagtgttgatttatgctggagagtatgacctcatatgtaactggcttgggaactcaaggtgggtaaactctatggaatggtctggaaaggaagcttttgtgtcctcatccgagaagcccttcacagtcgacgggaaagaagctggcgttctaaagagccacggtcctttgagtttcttgaaggttcacgatgctggtcacatggtacctatggatcaaccgaaggctgctctggagatgctgaagaggtggacttctggaaacctttcggagccatcttcaagctcccagaggcttgattttacaatgtaa

SEQ ID NO: 24252 - DNA, 189 bp, Zea mays
  Peptide Sequence Number=SeqID_66031
atgtcggagaacaacgaagttatgccgtccaaatcacgggcaaaaggttgtccaaaatacgctggacaattcagactacgcatctcacaaggcagaggaagacgtcttgatgtagatgaacgtgtcgagcagtgttgtgcagtcgtcggcaaccttcacatcctcgcgcagttcgtcctagtgctctag

SEQ ID NO: 24253 - DNA, 450 bp, Zea mays
  Peptide Sequence Number=SeqID_66032
atggttcaaacgcgcacgggtaacaaaacaacaaagagacgggctttggtgaagatgaggggaggaattttgagactaatgatccaaattttggtatgcagccaccatgtgataatctcagtaaagaaaagaaagaggcttcagattagtgtgggcatacatcaaagggaaagggtaagcagggcaaaaaactgtgtaaccagtgagttttctcttggggctgttgactcgtttctctctgttcgggatccagctattgcaaatgacgacctgcgcactccggacgcgaaggagcttgcagcagttccggtggcttctattggttctgtggtgtcatacagaagtaagatgagagcaagaagttcggtgggggatagcttggaacgtccgtccaagctgaaggcgactcgcaatcttgattcagattttgaacgaggtattccttcctga

SEQ ID NO: 24254 - DNA, 981 bp, Zea mays
  Peptide Sequence Number=SeqID_66033
atggagaatgtggatgccccatcaaagaaatctcagaagggcacaaagaaatctcagaagggcgcaaaacaaaaggttgtgtcgaggagaggaggttcttttaccaaacaggaggatattgtgatttgctcgacattcctcaatgttagcaaagaccctattacaggtgtcaatcaaacttcgggtgggtattacaaactcatgcatgaatacttcaacaagtgcaaaccagaaggttccaaccgtagccagatctcaattcaacataggttgggagccatacagaaggcagtgaataagttttgtgccctcaaatcatcagtagataggcacaatgagagcagtaaaagcgagcaggatcgaattgatgatgctgttttcatgtatgagaagggtgaaccctttgtcttcatgcattgctggaagctacttcgcaacgaggcgaaatggaacaataggttcctagagaccatcagtaagccaccatcttctcaagtgccacccgaggcaggtaaaggccacaccactatgggacttgatgaaccaggaaatggtggtacatcaagacctgaagggcgtgatgcaacaaagaggcgtagagcggctggagtggcagactcatcggcatcaagcaaggcagttgatgtccttcaacgcttgcatgagaaatcagagatgacagagaagaagcaagaccaacagatgattgaaatattgaacagaaaggatgaaaaaattaaaattcagagggatctattgaaccttcagaagaagcaggtgaaggtaagcatcaagcaacacaagaaggaagctgagatccgggagaaacaaactgaggcgcaactgatctcagccgagactggaattatgtcaattgacatagagaaggtcccttcctaccagaaaagctattatctgggcatgcaacgccagatactggagcgtcgaggtttcaccaccccttcgagcaatgatgattga

SEQ ID NO: 24255 - DNA, 285 bp, Zea mays
  Peptide Sequence Number=SeqID_66034
atggggaaatttttgagtcgtgctttgggcgcgaggcgaggaatttcgggggatgagtgcgttggagacgtcaaatcgggtttggatggtgggatgggttttggcgcttttgccgcggttcgtcaggtggacaagcgaatccgtgggtccctgccccatgagatctggctgacggtaaggttgagagcagagaatgtcgagggcgaaagagaaaaggtcgatcgacatgaactatggaggagtggtggtccggtggcgcaacctatgaggcagttgggtccgacg

SEQ ID NO: 24256 - DNA, 507 bp, Zea mays
  Peptide Sequence Number=SeqID_66035
atggcgaggttggagcggcggcgacatcggatcccgagggcacgcacgcggcggcggccccatgaggtgcgcgcgatggcgaggtggcagcggccgcggtgccgaatcctcggggcacgagcgcgacagcgtctccctgaggtgcacgcggcagcggccccttggggtgcgcatgtcggtgaggtgggagcgacggtgcagcggcggatctcggggacacgtttttatgacctatatttcagttcatggcttcgctttcatctattggacaccagaggcgtggcgcttggcgttgtcgggggcggggccaaggttggagcagcatggtcaccgaggcgtggggcgagcttgtggcggtggcgcgtgggtgaaccggtggcgcggtggcggagggccagtgtgccggcgggcaccacgtacaagcacgcggacgtgggcactggggcaaggagagtacgatcggcagcggaatttggcggcggtgatggttggggcgtagagaagtag

SEQ ID NO: 24257 - DNA, 669 bp, Zea mays
  Peptide Sequence Number=SeqID_66036
atgaacatagtaatcccaaatatggatgacataataccaactagaggcagatcaaggtgccgtggagctaagttggtgagttactaccatcattttcataatggaattttcattgttgtcattgatcaagttcttgttgagttcaacaaccgcttccctgaaagatcaactcagttacttggatctattgcttgccttgatccaagggattcttttgccaattttgatttagagaagttaattgagctatcaaagatttatgatgctgattttagtgattatgaacgtacatgccttatggaccaacttctcttattcattgatgaggttagaaatgatgatggatttagagattgtaatgatcttggacaccttgctacaaatatggttaaaacagatagacacatatgtttcagtttagtgtatcgtcttgttgagcttgcattaatcttgccagtggcaactgcaactgttgagagggccttttctgctatgaacattatcaagattgaaagaagaaataaaatgggtgatgaatggatgaataacagcatgctatgctatattgagcgggatatgtttgtagaaattcaagatgaaaagattttgaagcattttcaaggcttaagaactcggaagataaatttacctcgcagcatcaactcatga

SEQ ID NO: 24258 - DNA, 297 bp, Zea mays
  Peptide Sequence Number=SeqID_66037
atgttccctagatcacgatgtttgggccacttttggaagaggagggagacgaagggcgagcttagtgatctagattcgaatctggtggtgaaggagattgacaacgctggctgcagagcagatcgtgccaccaacacaagagatctaggagtttcttcatcatcaccgacgcggtccaggccaagcactttgcttccagtaaaaggctatgaggaactcaagaagaaggtactcgtggaaaaaatgaaggtgtctgatggatactggataaaccgtgtggcctcgtgggagctctga

SEQ ID NO: 24259 - DNA, 1869 bp, Zea mays
  Peptide Sequence Number=SeqID_66038
atgccgttcggcttgaggaatgcgggtgcaacgtaccaacgatgcatgaaccacgtgttcgatgaacacattggccggacggtcgaggcctacgtcgatgacatcgtagtcaagacgaggaaagccttcgacctcctttccgaccttgaagtgacatttcgatgtctcaaggcgaaaggcgtgaagctcaatcccgaaaagtgtgtcttcggggttccccgaggcatgctcttggggttcatcgtctccaagcggggcatcgaggccaacccggagaagatcgcagccatcaccagcatggggcccatcaaggacttgaaaggcaagcccttccagaggccagtctacttcatcagcgaggtactgtccgagaccaagatccactacccccaaattcagaagctgctatacgcggtgatcctgacgcggcggaagttgcgacactacttcgagtctcatccggtaactatggtgtcatccttccccctgggggagatcatccagtgccgagaggcctcgggtagaattgcaaagtgggcggtggaaatcatgggcgaaacgatctcgttcggccctcggaaggccatcaagtcccaggtgttggcggacttcgtggctgaatgggtcgacacccagctcccaacagctccgatccaaccgaaactctggaccatgttcttcgacgggtcgctgatgaagacaggagcaggcgcaggcctgctcttcatctcgcccctcgggaagcacctacgctacgtgctacgcctccatttcccggcgtccaacaatgtggctgagtatgaggctctggtcaacggtttgcgcatcgccatcgagctaggggtccgacgcctcgacgctcgcggtgactcgcagctcgtcatcgaccaagtcatgaagaactcccactgccgcgacccgaagatggaagcctactgcgatgaggttcggcgcctggaagacaagttctacgggctcgagctcaaccacatcgcccgacgctacaacgagactgcggacgagctggctaaaatagcctcggggcgaacaatggttcccccggacgtcttctcccgagacctgcatcaaccctccatcaagaccgatgacacgtccgaacccgagaaggcctcggccgagcctgaggcaccctcggctcagtccgaggtaccctcggctcggcccgaggcaccctcagctcagcccgagaaggcacccgggggctatacgcacctgttggtcgccatcgacaaattctccaagtggatcgaggtccgacccctaaacagcatcaggtccgaacaggcggtggcgttcttcaccaacatcatccatcgctttggggtcccgaactccatcatcaccgacaatgacacccagttcaccggaagaaagttcctggacttctgcgaggatcaccacatccgggtggactgggccgccgtggctcaccccatgacgaatgggcaagtagagcgtgccaacggcatgattctacaaggactcaagccttggatctacaacgacctcaacaagttcggcaagcgatggatgaaggaactcccctcggtggtctggagtctgaggacaacgccgagccgagccacgggcttcacgccgttctttctagtctatggggccgaggccatcttgcccacagacttagaatacggttccccgaggacgagggcctacgccgaccaaagcaatcaagttaatcgagaagactcattggaccagctggaggaggcttgggacatggccttactacactcggcgcggtaccagcagtccctgcgacgctaccacgcccgaggggttcggtcccgagacctccaggagggcgacctggtgcttcggctgcgataa

SEQ ID NO: 24260 - DNA, 348 bp, Zea mays
  Peptide Sequence Number=SeqID_66039
atggaggcccgggcccacgcgtcatgcaaccggcgcgccggttgctacgtgcgagcaactgcaccgccactcgcaccactaccacgcctcctcgactgcggaaccagtgccgcgactcgaggcaaccctacgtacgacccaggcacccagcagtgccagccagacgcgacggtcaatacggccaaaaatgggccgacgggaccgggaaaggaggataccccgaaaaggatccttctccgtgaaggaaacaggccccgagcctccctactgatcagaggttcaaaggctggcccctcggaggggttcaacagccgcctcagagcgcttgggttccacgcccactactag

SEQ ID NO: 24261 - DNA, 207 bp, Zea mays
  Peptide Sequence Number=SeqID_66040
atggattcggtgccttccccctcctcttctacccgggccaccgctgctcccggtccctgctgccgctttgacgcgctgcggagggcgtgcgccaggcacgccgccgccgccgcgcgggccgccgggtgggcgctcggcgcgctgctcacctgcgtcttcgccgtcggatgtttgtctgctgtgtatattaaagtgtatttgttctaa

SEQ ID NO: 24262 - DNA, 2202 bp, Zea mays
  Peptide Sequence Number=SeqID_66041
atggaggatgaggacgccgacctcgatgatagggcgaggcctccgctctgcatggaggagggtcgcagtggcaagtcgcaacgccgatacaggcgtgggccaggactagggctaggtgtcaggatcaccattgggcagtgctcgaacggacggtgtccaacgacgtcaccccccatcgaccccgacgaggtgctcgacaaccaccgcgtcgacgagctcatctccaccttcacgtctgtgggcgatgttgccttctccagcaccgccgacgtcgagtgtggcacggtccatagctacgcggctaccaacaccgagatcgacgccgtggaggctgctgcggcaactcgcgtcggcgcgctggagtcgtggcgtccgcgagtcgagtcccacgcatcggtcgacctcttcgatagtggcgacgactccaacgagctgcgctacgaggagcccatcaccgccaacaactggggcggactcttcgatggcgatggcgctgccaacgcggagatcgccgacgactgggacaaaccctccaccgcttccaccgacgagcccagcctcgtccacgtgctccgccacggccctccgctgctcgtcgagagccgcctccatgcactccgcgtggcgcaggagctgggcgcccgtccacgtgctggtgggcgagctcgtgtgcttaccggagaagatgatgacgaccaccagcctcgtgacctcgggctcggtcgtgccgcgctcgtccctgtacctggcctccatcaggctctgcagcacgtcgtcatccccggctcggatggaggagcgcctacgcgaccggacgacctcggtgaagatactatcttcgatggcactaacgtcaccaagttgcctaccacctgttcgacttcggagctctcagccgaactcgccatggcgcactacggcgcgcatctacccagtgataagggagattctgttgcatcgtggcagccggcgtggtcactggcgctcgcgtgccagcaggcgtcctccgcacgcggcacaccggccatggccagcatggggaagatgagcgtcggggacctcacggaggccgacctcaaggggaagcgcgtcttcgtgtgcgccgagatccacgagccacccgacgagaaccagaacatcaccaacgacattctctccacctcgtgcgacactgccgtgcacgtcgtgaagcggtgccagcgcctgtttccgctcgcggactcgaccggcacgttcgacgcggccgtggcggcgcgggtaacccagatggtcgtgccgtcgccagccaggaacgcaacgcgcacaggctcctcaccggagagcgcggcgtgctggttcccgtgcgacaacaagagcagcaagcagctgcagcgtggcgggccatcgttggccgagcgacagcagccaagggcgatgctagcgtgccgagcgatcacagaaagggtgaagcggcccaaagaagaggagcaggcggcatcagtgccagaggcggcggtcgtcgccgacgtcaagggcaaggaggagtacaactcggtggcgaggttgaccatggtgaactgctgttctgatttcatcatctggaggagtttgttcgacgcgtgctgcaggctgtgcaagttgttcaactgccaggagctcaagctcacagatagccagtctgcattgaccttgattgatgctcaagtggtgtttgagggaatgcagcaaagtgctacctcggttggtgtctcgcaggatgccttcaacatgttctgcagcaagactagttctagcaagcaggtggccagagccatcttcgtcaaccctgagcatgatctttaccctgagatcttccacctagagcagctcatctcagggaaggaggacacagctaacaatttctctcgtggctactacactattggaaagggaatggtgctggtagctaacaaccttggtgacgacctccttgctcgccgtagtgagatcaagcaaccatggcctccacctcaggagttggcatgcttgggtttgaacatcatggttgtctctgtgttccttgctaccagtgacctacatatatgctcagtctttgtttgggatcccagtggtgttgcgaacagcagcttgggggcaagctacatctcaaagagagggaaatgtcagttctatattgtgtcttcctcatccatttccgcttcctctactgcatatcgtcagtag

SEQ ID NO: 24263 - DNA, 300 bp, Zea mays
  Peptide Sequence Number=SeqID_66042
atggaggcaaaaagaactttgaggtaccgagtgcacagaggaaggtcaaggagaccgagtgtgttgaatctcatggatagcaatctagaccaagttaagccaacttggtgctttggagtccaatcccgacctcaaacaggccaacaagagaaaacagtgaaaaggttaagtatgcaaggaaagtcttccaaagagttgaagctgcttggagaaaatatgaagaaaataaccctcactgcatcctatttgggcgcaccggaccgtctacaggagtggttcgatggcgcactgggcgactga

SEQ ID NO: 24264 - DNA, 1005 bp, Zea mays
  Peptide Sequence Number=SeqID_66043
atggatggaagcggtgccggcaccggcagcgccacgctgctgcggaagcggccgctgtccgtgaacacagcgtcgtcgacggcggcggcgattgagctcgggagcaagcaggccgccggggttgtggcggccatcgaggaggagccggtgagcccgacggggcggctgttccgggagccgaacttccgctgccacatcgtgtccgtgttcggcctcggcgcgccggtggacctgccggcgctgcgggccggggtcgccgccacgctcgcgcgccaccctcgcttctgcagcgtccaggtggtaaatgagaaggacgccagaccgaagtggatacggacagcggtgaacgtggacgaccacatcatcgtccccgagctgaaccccgccaccacgtcggccgacccggacaaggcgctggaggactacgtgtcgtccctgtcgacgcggcccatggcgcactcccggccgctgtgggaggtccacgtcctggacttccccaccgccgacgccgcggcggcgctggcgctccgcgcgcaccactccgtcggcgacggcgtctccatgctctccctcttcatggcctgcacccgcagcgccgccgacccgggcgcgctcccttccctcccgccggcccggcgcgcgggccccgtccacgctgtgcggcggcccgcgggcgcgctggcggcgctggccgcgtggctcctgtccttgctcgtgctggcgtggcgcacggcggtggacgtggcatgcttcgtcgcgacggcggcgtcgctgctgggcgacgcgcccacggtgctcaagggcaaggagggcaccgagttccagcccaggcgcttcgtgaaccgcacgctcagcctggacgacatcaagctcgcaaagaatgcagtgggctgcgtaagtgtgctcctcatggctcttcgttccactggctccactatactacaccactgttccactggctcaacaaataactgcttgcgcgttctgtactttttcagactgtaa

SEQ ID NO: 24265 - DNA, 246 bp, Zea mays
  Peptide Sequence Number=SeqID_66044
atgtcggacgccactatggtgtattccatgactacagatatcaaagattctaagatcatggggcttgtcatcgagctcgtgaataccaacgctcctcaacgcggtgaggaggtcctcacctatctgttggaagagctctcgatcaattatgatccatttgtgaactctatgacgaccaagactaagccactctcccacaatgatgtgttcacacacctagttgcatttgaagctcgccaactataa

SEQ ID NO: 24266 - DNA, 210 bp, Zea mays
  Peptide Sequence Number=SeqID_66045
ctattggcaagcatcactggaagtcaaaagatttctatccctacatcaattgtggtatcaggaatagcaaaaatatttgttgcaagagtagtcatgagtgagaggaaggattcaggacccatcaggccttgtcacatcagggaggcatacagaagattgaagcttgaagggaagatcccacggcgctctgttcctaggctcttccgctag

SEQ ID NO: 24267 - DNA, 435 bp, Zea mays
  Peptide Sequence Number=SeqID_66046
atgacggcgggcggtggcaatctggccttgaacggaacgaaagacttggcggtgccgttagaggtggctcgaaagcgcatgagaaaaaatgaagaaggcagagatagacggatcgcagagtttcagggttacatgctgcaaacagcggccgcggagacgcagctcagcatcaaggaacaaaaaaacctcacgaccgccagaaacacagccctgtgtgtggcaagcaccgccgtcctccgacgcttccagcgcggcggcggctcaagtggctccagctcgacaatcccccaacagccggctgacgtgtgggacccatacgagcacgccgcaattgatgagatgtccttctgtgaccccttcttacgtgtggttcacaagccagatttcaggcacggtggttccgatgtttgtattattcgtgctagtgtgccacag

SEQ ID NO: 24268 - DNA, 749 bp, Zea mays
  Peptide Sequence Number=SeqID_66047
atgaaagagtccgaccagctcgcgacttctttcatcacaccttttggcatgtgttgttatactactatgccatttggcttgaggaatgcaggtgcaacataccaaaggtgcatgaaccatgtgttcagagagcacatcggccgaacggtcgaggcttacgtcgatgacatcgttgtcaagacgaggaaagcctccgacctcctctccgaccttgaaacgacattcaagtgtctgagagcgaaaggcgtgaaactcaatcccgagaagtgtgtcttcggagttccccgaggcatgctcctagggttcatcgtctccgagcggggcatcaaggccaacctagagaaaatcgcggccatcaccaacatggggcctatcaaagatttgaaaggagtacaaagggtcatgggatgccttgcggctctgagccgcttcatctcgcgcctcggtgaaaaaggcctacccttgtaccgcctcttaaggaaggccgagcgcttcacttggacccccgaggccgaggaagccctcggaaccttaaaggcgctccttacaaacgcgcccatcttggtgccccccgctgcgggagaagccctcttgatctacgtagccgcaaccactcaggtggtcagcgccgcgatcgtagtcgagagacgagaagaagaacatgcactgctcgtccagaggccggtctacttcatcagcgaggtgctatttgagaccaagatctgctacccacaaatccagaagctact

SEQ ID NO: 24269 - DNA, 621 bp, Zea mays
  Peptide Sequence Number=SeqID_66048
atggcgatcattctctactgggtatacacagttaccttctcgcccatcgtgctctactgggtgtacaccaacggctaccagctggtccttcactcgcttgagcggtacaggctccacacactagacgaggaggaggagaacttcgtcagcctatgcaccgttgtatgtggcatactccaacagcatcttgtgcatgccatcaacgtgatggtctttgttcatgatgatgtctgtaagaacatggctaggagatcaatccttgggtgggtgaatcggctagcaagaatgggtcggtatcaccggtttaacctgtctttgtcctgtcatgcttcagagtttagttgcaatactgtgaaagaagtgcctggtagattacaacaattcgagtcacggtggcatggtctaggtttttcgacatatagctccgccaatgtctgggagcttgagttgtgcgcacttggtggtttgtttatttcgttcgatagagctagcccaacttggagcaaattgcctcgtgtgatggagaatgatgttattgctcgctattacggacaaggcaaggggattgttgttaaggctatatacgaccgtgaggcaacgccctacaacttctctatgtag

SEQ ID NO: 24270 - DNA, 1029 bp, Zea mays
  Peptide Sequence Number=SeqID_66049
atgacttcaagctccacgaccgagaccgtccaggatgagggctcaaagaccgcgaaagatcagggtccaaagatcgcggaagatgtcacccaattgatcggcaagaccccgttggtgtacctgaacaaggtggtggctggctgcgaggcgcgtgtagctgccaagcttgagatcatggcgccctgctccagcgtcaaggacaggattggctacagcatgatcgccgacgcggaggagaagggcctgatcacccctgggaagagcgtcctgatcgagccgacgggcggcaacaccggcatcgggctggcgttcatggcggcggccaaggggtacaggctggtcgtggcgatgccatcgtcggtgagcacggagcggcgggccgtgctgagggccttcggcgccgaggtggtgctgacggacccgctgctgagcatggacggcgtggtgcgcaaggcgcaggaggtggcggcgcggacgcccggcgcccacgtgctgcagcagttcgccaacccggccaaccccagggcgcactacgaggcgacggggcccgagatctggagcgccacggcgggcaaggtggacgccctcgtcgccggcataggcaccgggggcaccgtcaccggcgccggcaggtacctcaaggagaagaaccccgccatcaaggtctatggcgtcgagccgtccgacagcgcggttctgtctggagggaaacctggtccgcacaagatccagggcctcggtgctggcttcgttcccggcgttctcgatgtcagcctcctcgacgaggtcttccaggtctccaacgaggaagccgccggcatggcgaagcagatcgcgcgggaagaagggctactggtcgggatatcgtccggtgcggccgcggtcgccgccgtcagagtcgccaggagggccgagaacaggggcaagctcatcgtcgctatcttcgcgagcttcggcgagcgatacctgtcgtcgttcatgtacgagtccctcaaggaggaggctgaaagcatggccttcgagccatga

SEQ ID NO: 24271 - DNA, 306 bp, Zea mays
  Peptide Sequence Number=SeqID_66050
atggccgcgtcccggcggggccttggcggcgccgcgcttgctcctccgagcgctgctgctctgctccctcctcgcgcagccgcatccgtcgcgcgccttcttcttcttcggcggcgtgcgcaccagcttgcacgtcccccaggcgggattgtaggaactggttctttgcagcagtatccaacggtggcacggatggacctcgccagtgaatacaaaatccacctggtgtcaagcagctcgtgggcaaccacacatcactgtggtaacagtgacatctgtgcagccacagctgctgcccgctgctaa

SEQ ID NO: 24272 - DNA, 126 bp, Zea mays
  Peptide Sequence Number=SeqID_66051
atgctccgccgtgtgaacctggcggcggtgacactgctcgaggttggtggggaagacagcttagaaccgttggatcaaatgcggatgtccaggattagaaggatctggagacgcagcatagaataa

SEQ ID NO: 24273 - DNA, 345 bp, Zea mays
  Peptide Sequence Number=SeqID_66052
atgggcagaggcaagaggggaaagggatggcctcgccgcgctgacgacaagcgcaagcgtcctccgagtccagcctcggaggactttggtgactcggagtacttggaggcttactggcgatccatcgagcgtgatgggctcaatgggtcagatgactcggaggagacctcctcagaggaggtggaagactcctccgactgcaaggagtggagcagtggcgacgacgtcagtggcgacgatggcagcgaaggtggcgacggcgagggtgacgacgacagcgacggcaagggcgacgacggtgatggtaaaggcaacggtgatgacaagggtgacggtgatggctag

SEQ ID NO: 24274 - DNA, 360 bp, Zea mays
  Peptide Sequence Number=SeqID_66053
atgctggcgtcctccctcaagctgcgcccaagacttagccacatagacggtgttttaaccgcgtccccatcacgtcgcacgactctgcaagaccttgacccgtcatgggcacttctctatgtcgtgcgagctcgcctaggtctcgacatcggtctctttagtgaccagctctctcgccagtcgtcgtgccctactcgctgtcaaacctgcttggatccgtccttagctaaacctctccgtcgttgtagcatgctgctggtttggattgtcgccatgaggcttggcctcatcgcactcattgtgtccacgacatcgttggtccaacagcgttgtcgcttcttgtgttcgcgctgtgggtga

SEQ ID NO: 24275 - DNA, 159 bp, Zea mays
  Peptide Sequence Number=SeqID_66054
atggtggcgctcgcctcactctcatctctctgtccctgcggcatcgcccgccgccgcgctgcgtcagccacttcatccaccgccttttccatctcgtgctgcgccgtcgcgaccccgtccttctcagggaaaggatattttggttgtaatgtgatatag

SEQ ID NO: 24276 - DNA, 453 bp, Zea mays
  Peptide Sequence Number=SeqID_66055
atggagctaataaagaagcgtttgaaggagtttgggatcttcctctcatccaggcttaaggttttaagaattaaaaagagatttcaggctggaccttttgaagttgaacccatccgtgtaactcattcaattcctgactgttgtggcttagtgcttcgctgtggtgatgggataattttccatactggtgactggaaaattgatgaatcaccagtggatggaaaaaaatttgaccgacaagcattggaggagctctccaaagaaggtgttactcttgtgtttgttggaatgtcactcaggacataccttgaagctgctttcaaggatggaaaggcaccactggatccatcaaccttgaaaaaccaagtacacatggaggaaaactccccgaacaccaaacacaagacaccaactcacattgaaaacaacgaacaagacaccatgaccgactag

SEQ ID NO: 24277 - DNA, 296 bp, Zea mays
  Peptide Sequence Number=SeqID_66056
atgggaaaagcgcccctgggccgatactggcgccctcggcccaacttcctccgcgccggcccaactcgcgcgtcgcgccactgtcgtgtgggccacccccgtcaacctcatgtgctcggcgcctgcgttcactccatgccgatgaccgtcgggctccagggcgccgacttggccaacaccggcgggctcaccaccgcctgggtgggtggcgccaccgtcgggccgcgctgggaggaagacagacctgggccatcagatccgaatcgtgaggataggattagatccagtaggggcgg

SEQ ID NO: 24278 - DNA, 495 bp, Zea mays
  Peptide Sequence Number=SeqID_66057
atggtcggtccgagccccaggttgggcaaggcggaggctcctccgaggccgaggtcgagtctgtcttccgtggtcgaggtcgagtccgagcccttgggtcgggtgaggtggagaccgtcggctgaggctagggctgagtctgagccctggggtcgggtgaggcggagttcgtcgtcttccggggccgaggccgagtccgagccctggggtcgggcgaggcggagttcgtcgtcttccgggccgaggccgagtctgagccctggggtcgagcgaggcggagcttcctatggcacccgaggccagacttggcggctgtcagcctcactctgtcaagtggcacagcagtcggagcggcgcaggcggcgctgtcctcttgtcaggccgctttgtgctgatgggggttaccagctgagattaggagtcttgggggtacccctaattatggtccccgacagttaccttgatagaccgatgagctataatgtctctgggtag

SEQ ID NO: 24279 - DNA, 354 bp, Zea mays
  Peptide Sequence Number=SeqID_66058
atgggcaaatatatgtggtcaccgggtgcccctcgtccatattgtgccggcatcgaagagcctccattgccaccgcagtggagagacccaccgcaggggaaaccaccatgcatgacgatgggcgatcgaaatcggccaggcgcaatcactagtgcacacggatgctcgtcgcggcttcgcctgggcggaatcgtgctccagaccactggaattcttcaccggagtgggagctcctccatactgccgccgcgtaccatgggtagctccccaggcgtcgtctctgtccctggtaaaccctcccatctcgtatgctttgtcccctatgcgggtaggtcgctcgggtttggagattag

SEQ ID NO: 24280 - DNA, 738 bp, Zea mays
  Peptide Sequence Number=SeqID_66059
atggagcgcaaccgaaagagcgtcgttgtccgcacccccttccgctgtccatccgccgccgacggcactagacctaccctcttccaccgctctcctgctgcccaagctggtgctctgttgcggatcccatcaataggcagcccccagggactcatcctcggtagaagcctccaccaagcagtcgcctctcaactcccttcccctggtggcgtccagagctcggacgcgggcatcccctcgacagagagcggctctgatagtttcatgaattatatgattggaaaagaaggacaaaatcttgaggagaatgctcattttgttgggacaacttcacatgtgtccgatgtagacatcgagattgatgatggaattgaagaaaataggaagggctcaaggctgatatggaaacatgatgaagatgaagctccgcctcgctcgaccccagggctcagactcggcctcggcccggaagacgacgaactccgcctcgcccgaccccagggctcggactcggcctcggccccggaagacgacgaactccgcctcacccgaccccagggctcagactcagccctagcctcagccgacggtctccacctcacccgacccaagggctcggactcgacctcgaccacggaagacagactcgacctcggcctcggaggagcctccgccttgcccaacctggggctcggaccgaccatgccacaggaggggccatcattaccctacccctag

SEQ ID NO: 24281 - DNA, 258 bp, Zea mays
  Peptide Sequence Number=SeqID_66060
atgagggatagaaagaggacgagtagagggaaagataccgccatcgtcatcggaggacatgtggtggacgcatcagatttgacaacccgaccaccattcttggtgtggctgttcagcaccacaaccaacctaaaggtgtcccaggaaggtgaggatgatgtggaggtcgtcgaggctgagttgaacagtgacacaatgagaaaagcaccttttgaacttgagtttacacatattgcaaatccttttgaaacaaagtga

SEQ ID NO: 24282 - DNA, 2151 bp, Zea mays
  Peptide Sequence Number=SeqID_66061
atggcgtcagcgtgccgggcttggcgagcgctgggctcgtcaccctgcttgtggaggacgctcgacctccgcgcacatcgctatgacagggaggtggcgtcgtcgcttgcctcgcggtgcgggagcctgcgtcggatacgcttgcgcggccacgaggcggcagaggccgtcctgggcctccgtgcgcgtggtcttcgcgaggtggtggccgatggctgccgcggcctcacagatgccacgctcgctgtcctcgccgcgcggcacgaggacctccagagcctccagatcgggcccgatcctctcgagcgcatctctagcgacgccctccgccacgtcgcgctttgttgctcgcagctctgccgccttcgcctctcgggtctccgtgaagttgacgcggaggccgtcggagcgctcgcccggtgctgccccctcctcgaggatgtggctttcctcgattgtggcaccgtggatgaggccgcccttgctggtatccactctgtccgattcctctctgtagcaggatgccggaacctgaaatgggctactgcatccacctgctggacccagcttccctccctcattgcccttgacgtctcccgcactgatgttccgccaagtgctgtttcacgcctcatttcccatgccaaaaccctcaagctaatatgcacgctgaactgcatttctgttgaggaggaacagcttcacaatcctgctgtatttagtaactctaagggcaaggtcgtgctaacgattaacagcgatatcttcaaatcttttgagaccatgtttccagttgtggatgtgaaagagcatgagtttttcaatcaatgtaactggagtcacaaagacaagatacctggtgatacgatgacatggctcgaatggatcctgtcacagtcacttctccgaattgcagagtccaacccacaaggcatggatggtttctggctgcagaagggcactacactgctgcttagactgttgaagagtttacaggaggatgtgcaggagcgggcagctacgtcgcttgctacgtttgtagttatggatgatgagagtgcaaatgtggatcctgcaaggtcggaggcagtgatgcagaatgggggcattcgaatgttgctggaccttgcaaggtgctcaagggagagcgcacaatctgaagcagcaaaagctattgccaacttgtcagtgaataccaaggttgccaaggcagttgcagatgaaggcggcattacaatactcattaatttagccaagtcgatgaataggcttgttgccgaagaagctgctggtggcctttggaatctctctgtaggcgaggaccacaaggcggctattgcagtatctggtggcattaaggccctggtcgatctaatatttcgttggcctgctggaactgatggagttcttgaacgtgctgctggcgcgcttgcaaacctggctgctgatgacaagtgtagcttggaagttgcaaaggctggtggtgtccatgctttggttacacttgctagatcatgtaaacttgatggtgtcctagaacaggctgcaagaggtctggctaacttagctgcacatggggacaacaatgacaacaatgctgctgtaggtcaggaagcaggggctctggaggcactggtgcaactaacaagttctcaaaacgagggtgtaagacaagaagctgctggtgctttgtggaacctgtcatttgatgacagaaaccgtgaagccattgctgcagtgggtggcgttgaagctttgtttttctttgcattggttagcattgcaattgggcagggtggtggggttgcaccattgctcacattggcacgctcagaggttgaagatgttcacgagacagctgcaggggcactatggaatcttgcattttattctggtaatgctctccgcatagtcgaagaaggcggggttcctgttcttgacgtggtcgtcgactgtgacacgctcgcggacgaagtggaggttgatctccacgtgcttcgtgcgctgacgctacacgagattggtggagagccgacggagccaggatgcctcgaccacgtcgttggccacaaagtgttacttggcctcagcgctggagcgggagacgatgagctgccactccgaggacctagagacgaggttggcgcctag

SEQ ID NO: 24283 - DNA, 243 bp, Zea mays
  Peptide Sequence Number=SeqID_66062
atggcgtatgcgtatatgcacctgcgtatgcgtactccgagctccagtccaaatacgcctgccggcaatggcaagcgtagggggctcagccctccgacgctctccaacgcctcactgaggttccatccaaaagccactaaaagcaggtccaagggtgctttcagttttgcactgcgagaaagtcagcttttagaaaaagctgttttctggatccagccctttggtttggcttttggcttttag

SEQ ID NO: 24284 - DNA, 234 bp, Zea mays
  Peptide Sequence Number=SeqID_66063
atgtcgcgcccaagtacgggcggtgcttctgcgcgcccagttcacgcatccttcatttgggagttctgggcgtttggtcatgggttgcgggagcctggtgatggcgccacggcgccaccgttggggcctgcatcgccgccgctgtccgtatacggtagagggcggcgccaccagggttttagccctgttgcagattgggtggatcaactttcgatccgaaccgtcgatctctga

SEQ ID NO: 24285 - DNA, 264 bp, Zea mays
  Peptide Sequence Number=SeqID_66064
atggcgacatcccttcgatttcaccggtgcagcccttctctctatcctctctctctcaggtgcatggtgaagcttggcgatggtgcgctcggtgctatcaaggatgtagcgttccgtttatgtagtcgagtggcgaggaggagatcggcaaccgtgagccgatttccacgggtttatgatgacgacgacgagtggtttgggaagatactcatgggaccaaaaaaggaggatgccatccagaaccagtgtgagttcctgatctag

SEQ ID NO: 24286 - DNA, 156 bp, Zea mays
  Peptide Sequence Number=SeqID_66065
atggctgtaacaactaggatgacaaagtctctggcctcctcatctcgtgttgatgatgtagagggtccagttcttgaaagggtgggaatgtgtccaagaagacaaaggcatcgacccgccaaatcttcgctaccaattcaaacagcaatagggtga

SEQ ID NO: 24287 - DNA, 969 bp, Zea mays
  Peptide Sequence Number=SeqID_66066
atggggtctgagggagctgggggcgacggcagctaccgcgacagggagacgtcggtgagcggctcatggcgatggagaaatggagaaatcctggggcggtacaggtccgacgaaccctggggaggcggcggctatggagaaaatggagaaatggcggcgttccgaggaaccctagggaggctgtgcagactcgtcccccaaccgttcgcgcgcatgagccgcgcgcacgtcgtggactttgcgcccacgacgcacgccgaggccgtgcccgccccaccccagccatttctagctgcctgcaccccactctctctccctcctccctcacccatgcactcgcagggctccaacactcacctcgcacagtgcgcacaccagagaagccccaccgctgtggtctcgggcttgttccgcgaccgccgtcgagtccccatcatgtctgttgccctggtgagcttcgcctcaacgccagcaacccgggacgcccttcggttcaccccttccccctctatttctctctgctcacgctcaccggaccttcaccgtgcagcaggagtcctgccgtcgtcgacccgaggcctcatcgcgtccttgccatcgtccaaaggtcttagagccctatctcaaggtaaccaacctacccctgatttcccctttcctgcccttgggtgtgtgcaatcgctcgtcggagttgagctacaccgccaccgagccatcttgtcgcggatcgccaccctccggtgtcttttgcgtcggtgtcgtgcccacggatgtgttcactacgttgccccgaacccacctgagccctttccggtgccccagggccttcggcgtgcccgtgccctcgtctccggcggagctccgccacggagtcgggaggcgtcgccgctgacagccaagaaaccctacccgggcttgccgtgggatcttaggcgttcacctaagatcaggcggcccagatttaaatag

SEQ ID NO: 24288 - DNA, 264 bp, Zea mays
  Peptide Sequence Number=SeqID_66067
atggtgaggaggtgcaactcttatcatactaccactaggttgtatgtcctcgacctactccttgcgttggggctgtctgactgctctgattggttacaggggcaggaaggtgaggtgcatggttgtttggtctctggtactggtttccttccggttgattgttctagcggtactactgctgccgctgagggaactacctctgaaactgctggtgatgccgacgctggttctggtgctgatatccctgagggtggctttgcttga

SEQ ID NO: 24289 - DNA, 363 bp, Zea mays
  Peptide Sequence Number=SeqID_66068
atggctgtgaagggcaagggcaagcaggtggcccccgaatcccctggcccaggcggcggcggggcctcaggggccggcgggaagcggcggaaggcctccggcgacacgggagagggaccctcgtcgtcctctgccgcgaagcgccgccgccgcgccggggtcctccagttcgtggacgacgttgccggcgtcgacgacgataatgaggacgaggacgaggacgagctcgagtccgaggatgaccccgatgatggtgagtacggattcggttcggtccttaaggcgtgcatgagacgtggatgggtcgaatggatccatctggagttttgtgttatgcgcaatgtggactatctgggcggatag

SEQ ID NO: 24290 - DNA, 960 bp, Zea mays
  Peptide Sequence Number=SeqID_66069
atggaattgtttgagaacgcgcgctccgtgcggctgaaaagccatctcggcacgtacctctgcgccgccgacgacgcggaggccgtctcccacggctaccgccgcaactcccgcggcaccgtctgggccgtggagcccgccggtgacgagtacgtccgcatacagggccagcgcgggctctacctcggtgccgcggaccccacggcggcgctcgatgccgccacgcccagctgcagggtcgtccagggcgtgccgtccacccccaacgacagcgccttcctctggacgccgcggcgggagcgtggagccgggtgcctcaccctgtccgggccactcgggcgcctcctccgcgccagcttcggcgagacaccgcgggacaacgccgtcaccctcgatttcgatgtcggcccggaggagagcgcgtgggtggtcgaggccgtccccgcggagcaggcggcgcgcccgccgccctgccgcgcccagtcttgcgacgcacggatgcaggcgaccgcggcaacgacgtcggacaccgcgtccagttccttcatcaggttttactccaccaaggaaccgaagaccaagctggaggagcctccaccaaccgaggagcctctgcacatgccggcgcggcgcaccatcttccacaacacggctagggaggacggcgccgtggacgacttcgacgaggggacctggaggtacttcacgttcgacgagcagagcctgtcggccctgagccggaggctgcaggaggagaccaaacacaaggacttcgtcatctgccgccggagtgccggcggggacgcgccgaggctgttccccgtcgtcctggacctgccgcccggcaacgacgagatggagtttgtccttgtcctggtgccatctacagtggcaaatgatcttcagtggcccttgggacgtgacgaccagttcggcaagaaaggaacatttttgttctag

SEQ ID NO: 24291 - DNA, 891 bp, Zea mays
  Peptide Sequence Number=SeqID_66070
atggcttcttcgaagaggagatttggtgctgccggcggcgcggacaagaaggatctattccatgtcgtccacaaggtgcccgccggcgacagcccgtacgtcgtagccaagcacctccagaaccagctcgtggagaagcaaccggatgtggcgatcgtgtggttctggaaggcaatcaactcaggggacagggtggacagcgccctgaaggacatggccatggtgatgaagcagcaggaccgttccgaggaggcaatcgaggccatcaggtccttcaggcacctctgctccaagcaggctcaggaatccctcgacaacctcctcattgacctctacaagaaatgcgggaaagttgaggagcagatcgagctcctgaaacagaagctcaagtcgatataccttggcgaggccttcaacgggaaggcgacgaagaaagcgcggtcccatggcaagaagtttcagctgcgcacacagctactcagctcactgaaaaacaaacaacaatctccgcagaacaacttcgaggccgccgagctggtgtaccgcaaggcgcaagctatcgagcccgatgccaacagggcgtgcaaccttgggctgtgcctgatcaagcagggcaggcacgacgaggcacggcaagcgctcgaggacgtccgattgcgcagaatctatggatcagaagatggaaaggtggttgcccgtgcggagcagcttctccgcgagctaaacccgttgcaatgcgtttcatcgccgttccaggttggcctcagcgtccatgaagggatcatgggtaaaccagacctagtagtgatgaacgagtggacgccgttcaggtcgaggaggctgcctgtgtttgaggagatagcaactttccgggaccaaatggcttgttga

SEQ ID NO: 24292 - DNA, 1290 bp, Zea mays
  Peptide Sequence Number=SeqID_66071
atggcgctcacgcctgtcttgctcctcctgctggcctactgcctctcgggcgtgagctcatctgcaggcccgccgccacgcagcttcacctccctgttcgccctcggggactcgtacatcgacgccggcaacttcgtgaccatggccacgccggtcgctccggtgtgggtcgacaagcctccctacggcatgaccttcttcgaacgcccgacggggcgcttcagcgacggaagggtcatcgtagacttcgtaggtaaaataagcagcatgcatgggcgagctgaggctttgtgcgcaccacggttgtttaattcatttaatttgtcgatctatatctcgtgcggcgtgtacgcgtttcgatcagccgcggcgcttggcgtcccgttcctcccggcttcgctagccaacagctcggacgacgacgtcgcgcgccgcggcggcgtgaacttcgccgtcggcggcgcgacggcggtcgacgtcgccttcttcgagaggagacggctggtgccgttcaagctgctgaacaactcgctggacgtgcagctgggctggttcgaggaactcgagccgtccctttgcaacgccacggcggaaactgcaggttcttatggtggcggacggtgtttcagcagatcgcttttcttggtgggcgagtttggggtcaacgactacaccttcctatggacggcgaacaagacggagtccgaggtgatggcgttcgtgccaagagttgtgagaaccatcgcctcggccgtcgagaggctcatcgtccgcgacggcgcggcgcacgtcgtggtgacggggaacccgccgatcgggtgctcgcccacgctcctcaccctgctccgccggacgagccgccccaccagcgcggcggacgacgacgactacgaccacatcggctgcctgcgcggcgtcaacgacgtggccaggcaccacaacgcgctgctcggcgcggccgtggtcggcctcagggccaggcatccccgggccaccatcgtcttcgccgacttctacaccccgatccgtagaatcctggaaaaccccaaccagttcggggtggtggtcagtgacgtcctgaaggcgtgctgcggcaccggcggcgcctacaactggaacggcagcgccgtgtgcgggatgccgggggtgcccgcgtgcgccaacccgtcggcgtacgtgagctgggacggcgtacacttcacggaggccgtcaaccgctacgttgccgaggggtggctctacgggccctacgctcatccgccgatactcaaagccatgcgacggccctag

SEQ ID NO: 24293 - DNA, 909 bp, Zea mays
  Peptide Sequence Number=SeqID_66072
atgaccttttggcataatgtgcaatgcactatgctttatgctgaaaatcatgtggcgtttttttatcctagctatttgcttaagaaggttctgcataatttgaaccttgttgagaccagcaagaagacactgatcctccatggtaccaagactagtgctgtgttgaactctgtgctgtcagatatttaccacctaaagcgtgataatgctgtgaaatataccaagaagaatgacaacattagccttttgaaagtgtatggttctcattcaaagaagaggcccaacaatctgattttggctagaacgtatgaccaccacatatatgaccttgttgaagtaggagttgagaactacaagtcaatggaatcttatgtttatgataagaagctagcaccattacttggatcgaagcctttctttgctttcataggggaacactttgagagttctgaagagctgaaacatttgaaagaagtgctgcttgatcttttcagaggagaggtcgtagagaatctgaaccttgccggtgtggatcggatctatgtgtgcactgcaatctctcccaccactgtctacatgatgcactgtgctctccgtctaaaaaggtcaggtacatctattcctaggatggagctggtcgaagttggaccttcaatggatctggttgtaaggaggcacagacttccagctgaaagtttgaagaaagaagctatgaagaccgctgaacatgctaagaagatgaaaaatgtcaccaaggatccagtgcagggcaagctgggcaaggtctacatgccagaccagcaggttggaaagttgaccttatcaaacgacgtaaagggactaaagagggagcgccgcgaagccaagaaaaatcaggactcaaagaagcaaaaggtcaaccctgagtaa

SEQ ID NO: 24294 - DNA, 660 bp, Zea mays
  Peptide Sequence Number=SeqID_66073
atgtcgcgggaggataatgtttacatggccaagctggctgagcaagcagaacggtacgaggaaatggttgagtacatggagaaggtggctaagaccgtagatgtggaagagctcaccgttgaggagcggaacctcttatttgttgcctacaagaacgtaattggggcccgccgtgcctcatggcgcattatctcctccattgagcataaggaggagtcccgtaagaatgaggaacatgttattcagatcaaggagtatcgtggcaagattgaggctgaattgagcaacatttgtgatggtatcctgaagttgatcgactctcaccttgtgccttcctccactgctgcagagtcgaaggatattgcgttggcggaactggcatctactcatcccataagacttggacttgcacttaacttctcagttttctattacgagattatgaactctccagacaaagcttgcaaccttgccaggcaggcgtttgatgaggctatttctcagttggatacgcttggcgaggattcatacaaagatagcaccttaatcatgcagctcctgagggacaacttaaccctatggtccgctgacagcacaacggaggatggcatcgaggagggcaatgaggcctcgaagggtgatgctggtgagggtcagtag

SEQ ID NO: 24295 - DNA, 891 bp, Zea mays
  Peptide Sequence Number=SeqID_66074
atggcggtatcaaatgttatgagttctgcttccatagttgactttgttaagatggtctacttgagcttgttggagtttttccgcaacagatcttataatagtggctgtggtggtggcctcatggattatgcttataagtttgtgataaaaaatggtggaattgacacagaggaggactacccctatcgtgaagcagatgggacatgtaacaagaacaagctgaaaaagcgagttgtgactattgatggttacactgatgtaccttccaacaaagaagatttgttacttcaggctgttgcccagcaacctgttagtgtaggaatatgtggtagcgctagagcatttcagttatactaccagggtatctttgatggtccatgtccgacatctcttgatcatgctgtgttaatcgttggctatggttctgaaggtggcaaggattactggattgtgaaaaactcttggggtgaaagttggggaatgaagggctatatgcatatgcatcgaaacactggtgattccaagggtgtctgcggtataaacatgatggcatcatttcctaccaaaacaagcccgaatcctcctccttcaccaggcccaggtcctaccaaatgcagtctgctcacatactgtcctgagggatccacctgttgttgctcatggcgtgtcttgggcttttgcctttcctggagctgttgcgaactggacaatgcagtttgctgcaaggataaccggtactgctgccctcatgactatcctgtttgtgatacaggtcgcgggcagtgtctcaaggccagcggcaacttctctgctatagaaggaatcaggaggaaacagtctttctctaaagctccctcgtggactggctggctggagttgatggaccaatga

SEQ ID NO: 24296 - DNA, 669 bp, Zea mays
  Peptide Sequence Number=SeqID_66075
atggcaccaattcttgcatcaaggccgaatcctgaattcctgatcatcgcaacttatgggaaaatcactagatttctggacatttttgtgaaccccgaaggcttcaacaaagaggtgaagggtatccatggttatattaatatctgcagcagccggaataagggtgatgaaaatagaactgtgtttatcccatgttactaccgagatagccagctttggcaatcttttgatccaatccgtgaagctctcactggtagagatctgattcctgagatggttaacgggaggggacctaaggagggaatgcccgggcaagattacagtggaatgtactgcgcactgttaactgtgggctctaccgtggtgtcagcagcacttttgcgtgtgatgggaggtgatgtggccgagctgccactagttgctacaagccaggatgttcaagggctgggctacttccaagccttgttctcgtgcatagagagggtgctagtctcactgaagatcaagcactttgtgcttccagctgcacatgaagctgaagggatctggatgaacaaatttggcttctctagaatctctcccgaagagctggaagcttatcttaatggggcgcacttgactatattccatggaacgtcatacatgtacaaggctgttccagtgtcataa

SEQ ID NO: 24297 - DNA, 1563 bp, Zea mays
  Peptide Sequence Number=SeqID_66076
atgacaacctcatcatccgcaacctcccctgttcctctccgacaccgctcgagcctggctggagcatctgcccttcgggggcagatctcccaactggggacgacctggtccaagctttcgccggcaacttccagggcacgtacgtgcgccctgggaactcctgggatctccgaagctgccaccagcagcccgggagagtctctccgggactacatccggcgattctcgaagcagcgcaccgagctgcccaacgtcactgattcggatgtcatctgcgcgttcctcgccggcaccacctgccgcgacctggtgagcaagctgggtcgcaagacccccaccagggcgagcgagctgatggacatcgccaccaagttcgcctctggccaggaggcggttgaggccatcttccggaaggacaagcagccccagggccgccagccggaagatgtccccgaggcgtccactcagcgcggcaccaagaagaaaggcaagaagaagtcgcaagcgaaacgcgacgccgccgacgcggaccttgtcgccgccgctaagtacaagaaccctcggaaacctcccggaggtgccaatctcttcgacaagatgctcaaggagccgtgcccctatcatcaggggcccatcaagcacacccttgaggagtgcgtcatgcttcagcgccactttcacaaggccgggccacctgcggaaggtgccagggcccacaacaacgacaagaaggaggatcacaaggcagaggagttccccgaggtccacgactgcttcatgatctacgatgggcaagtggcgaacgcctcggctcggcaccgcaagcaagagcgtcgggaggtctgctcggtaaaggtggcggcgccagtctacctagactggtccgacaagcccatcaccttcgaccagggcgaccaccccgatcgcgtgccgagcccagggaaatatctgctcgttgtcgaccccgtcatcggcaacgtcaggctcaccaaggtcctcatggacgaaggcagcagcctcaacatcatctacgccgagaccatcgggctcctgcggatcgatctgtcctcggtccggacaggcgcgacgccttttcacgggatcatccccgggaaacgcgtccagcccctcggacaactcgatctgcccgtctgcttcgggactccctcccacttcagaagggaaacccccacgttcgaggtggtcgggttccgaggaacctaccacgcagtgctggggaggccgtgctacgccaagttcatgtccgtccccaactacacctacctgaagctcaagatgccgagccccaatggggtcatcaccgtcagccccacgtaccgacacgcgtacgaatgcgacgtggagtgcgtggagtacgccgaggccctcgccgaatccgaggccctcatcgccaacctagagagcctctccaaggaggcgccagacgtgaagcgtcatgcctgcaacttcgagccagcagcgacggttaagttcgtccctctcgaccctagcaacgacgcctccaagcagatccggatcggctccgagctcgacccgaaatag

SEQ ID NO: 24298 - DNA, 2019 bp, Zea mays
  Peptide Sequence Number=SeqID_66077
atggcagaagctgcaggctcttggccttgcttgccctctaccctgccgctattcctctgtgatgtgaagcagcacaatcagaatgcagaaggctttccatctcatagaagtaaaaggatgtctttggaagtctctatgcagaaatctcttggttttggcttgaagtctgataatggcaaacatgattatgttgcaaatgatacggttcaatccctgcataagcaagatagtaagatagtgataaaaaagaccataaaattgttggacggtccaccttatccaaaaaggccaaagcttgagccagcacaaactggtagagatgctgaggctaagggacatgaattcatatcacagaagaatgtgcctgatttaacaccatgcacaacatctgaaaaatctcggttgctcaagcagaagcgcatttctgatggaaagagaactgataagaagaatattaggtctggtgtcagatcgaaacatgattgtttctcatcaaaggctggtttagcaaattttgattctggtttctcaggaaacagcgtgcttggagcacatggccttaaatctgatattcgtgacatcacacatcacattgagaacctgtcattgatcgaacttcttgatggcacttacaagtattccagtttaggaagagataaaggaaagaaggtattgcacacgaaggaggaactcctagtctctgtcagaaaaactttttctatgctttctgacatggactatcgccatggaaaggactctaatctcattctgagccctaaactttcttctgcaagtacttctagctgtgatatcaaagaacaatgtggtgacaagccacccctcttggttaaggtaagcaaaatattcagtgttactaccaatatcatgtctgtgcctcaaagtttgtttgacctttttaatactactacccaggacccatcacaaattaatctctgtgatagtgcactttgtcatccaaaagatatcttaagccgtttaactcttcctcatcgacaagatctagactctcttttagcacccggaagggagagcacagctgcagttaagccttatatgccttccatgacagttcatggagctagtttgccaccatttccttggtcacattcacaggctgggggctgtcgacaaggtgttgactgtggtaaacatggatcaagtaggagtaactcccagtggcaatgggtgcgggttggctccaacctcacttctctagatcatgaagacacgtctgtccatagaattgatgatctccttcaagagatggatgcagcaaaattatgtatattggatccatgtgatggacaacataatttgtgtggcacagaatcaacttctggatcacttgtacaaaacattcactccagaaaaattgggggtgagcatggttctcagcaactgcagccccaggatcatcttgactctttagatggtttccagaagcatgacattgattattctcttttaaaaacatctcaagtatcgccaaagatacagtgcgccgctgagatcttatgtgatatgagaaggagcactgaatcatggattggccaaggatacagcaatgggacaattaagtggccaaaatcaccacctgaaaaggcgatgaaagcccggaagccctcatcccagtttggtacaactgagagctcgtcaggttctcgtaacaatgaggcaacttggaatgggagcagtcactctaccaagaaaattgttgacaggaacaatgattctgcacgcttgaataaccctggtaagggaactataagatggcctgtccctgttgaagacaatgcttctcctgtcaggtccgagcggggtcttatggtcgacatgaggcagccccatggaaatggcggaaggcatctggtccaggtgtcatcacagacacggcttgagaaggagtatgagaaccagcagaagttgaggaaggcaacactgacctcttctctaggatctgcaggagattggaatagggagaagaacaggagaatgtga

SEQ ID NO: 24299 - DNA, 462 bp, Zea mays
  Peptide Sequence Number=SeqID_66078
atgactgagagtgtgattcgtgcaatttttgctcagtatgggaaggtcgagcacgtccatgtatttgggggtttagatcctgtgttgactcatgtggtatttgaaacaaagcaggaggcagctaatgcctttggagagttgcatggaaggaacatatatgatggttgttgtcagttggacattcagtggtgttcatctcaggatcctacgaacaccaacttggccttcagttgtggtgacaacatggtgcctattgcagccgccaaacctgcaacttccgtcattggtcaagacatattccccaacaccaacaattttgtcgaggttgccaacatatcacccacaagggatgcgattaaagagaggaaatgtgagctggccttgctagagaatgagcatctttgtgccgacaagagggctaattcttttgaaactactattgaacttcgagaaccatgctaa

SEQ ID NO: 24300 - DNA, 333 bp, Zea mays
  Peptide Sequence Number=SeqID_66079
atgggcaagaacaacaagcgcaagcgtgagccaactcctccatcggaggattttggtgactcggaatactcagaggaggagttctcctctgagtctgagggcggcaggggtggcagcagcggcagcaaggacggtgacggcggcggcagcaggggcggtagcggcggtggcggcagcagcaggggcagcaacagggcggcagtggcggcggcagcaacagggccagtggctagatgccactggtcctttagatgtaacgccgagcgactggagggcaacatcagcgttttagaggtaacgccgagcgactggagggcgacatcagcgttttag

SEQ ID NO: 24301 - DNA, 138 bp, Zea mays
  Peptide Sequence Number=SeqID_66080
atggcgactagtgagtggtccacggcaccaggcggacccacggcggagcagccgccaccgtgtaccagagggaacgaggcctgcggcgttttggctggaagctcgatagtggagacggtggggagcgtccgagagtag

SEQ ID NO: 24302 - DNA, 156 bp, Zea mays
  Peptide Sequence Number=SeqID_66081
atggcggctaccgcaagctcgcacgtcaatgccgacgtcatggacaactgctccccgtcgtcactccaattaatcctcgagagggctaccatgatcaaggagtgcaccgaggaatcaaggcatgacttgcagacattccttggaattgagaagtag

SEQ ID NO: 24303 - DNA, 246 bp, Zea mays
  Peptide Sequence Number=SeqID_66082
atggcgcggccgacgcctggtctgggggcggccacgggggccgccagcggtggccgccaggctggcctgccaagggcacggacgaggccagaggcatatggttccatcctcattatttcattgctgagggcaaaagctggaagcattcggatgtctcactggcaaagacttccatcggaatccctggccgattctacagcctccataggcctaggcctgtatccatgggatgggcgtttcacatga

SEQ ID NO: 24304 - DNA, 288 bp, Zea mays
  Peptide Sequence Number=SeqID_66083
atggctggggttctcggtagaagaaattttataccccaaattcagggtgttacattcctacaggtcaggctagatgtgctgcagcatgagtacagcaaggttgatccgtcgcatgcgttcgctatgtctgttgtgcggagctttgtcagggagcacaagtattggaggttctggaattgccccctttgtgatcgcaagaagttcgtggacactggtttgctattgtcacacatgtgcaccaggcaaacaaagacagtcctgccgtggattgagatacaagaagcttga

SEQ ID NO: 24305 - DNA, 480 bp, Zea mays
  Peptide Sequence Number=SeqID_66084
atggaacccaagggctgggcacgcttgcgcgaagcggtatccggagatctggaccgcgcgatcgagattggatggttgagatcaacgcaaggggggttatggctgcgggcggcgtcgctcctgctcatcggcggtgaagtcaccggagctggggcaggtgtggactacaggggcttcgaggtcatcggagttggccaggaccagcgagaaggacccgccaactcactggtaggattccggccactataccgaaaccagagacgagagaacagtggagggaaagctccgagcgggtcagggagagagaaagcgggtgcgggcggtgctcaaaagggagctggggcgcgtgggcaggcgacgtggtcggggttctcgggggaatggctccttgcgctgacgaggcgggcccgcgaggcagagaaagaatgtgggcacgcaggcgaaggcgacaggcgccgacagaccggccccactgggtag

SEQ ID NO: 24306 - DNA, 117 bp, Zea mays
  Peptide Sequence Number=SeqID_66085
atggccgtacttgaaaaaccgtgtgggtcttggtggatggcccacagggacaggttcgaggacgagcagatgaagccatccatggaggattcaggttggagaagacaagggagctga

SEQ ID NO: 24307 - DNA, 300 bp, Zea mays
  Peptide Sequence Number=SeqID_66086
atggcgttaaattacgagtgtaccttcgtctcaaaggaaggcaaaaagtatgagcgtgacgcaaaaacaaatgccaaatcctgtgtccagagatgtgttcgcatggagagaagggaggtagaggaaatggagacggagatacgacaacgtcaagtccaaggagcggtagcggcaatcggtgccaaacagagaagatccgaaggcggagatcgagaggtggcgctggccactgcgcactggccagcaatggaggcggacatagctatgctacaggatttctcgctacgtatgcacgtgtag

SEQ ID NO: 24308 - DNA, 246 bp, Zea mays
  Peptide Sequence Number=SeqID_66087
atggggttcgtgctggtggtctctctgcccttcatcttcctctccatcctccttggcttcggctgctacttcctcggcaagcacatgggccgggaggagatgcggaccgtagaatggcttatgtctgaagttggggaaaaacgtctgaaggagcgttcgataggaagaaaaccaggtttctctcagaatgctgccaagttgcagaaccaggttaggccttatttggttattcgggaaggattttga

SEQ ID NO: 24309 - DNA, 387 bp, Zea mays
  Peptide Sequence Number=SeqID_66088
atggggttcgtgctggtggtctctctgcccttcatcttcctctccatcctcctcggcttcggcttctacttcctcggcaagcactggggccgggaggagagcggaccggcgtcggcgcgcagatctacggcatgtcgctgccgccgcccggcgtcatcggagcctccttgccgccgactcagccattccacagcaagaaacaagggtccgaggctatgtctgaagttggggaaatgtctgaaggagcgttcgatagggagaaaaccgagataccaaaatgctgccaagttccagaaccagaaaaacaattctgcccagaatgaacaaggaggagaagaggccaagaaggcaaggcaagcaacacgtgctgatcgcttccccacctga

SEQ ID NO: 24310 - DNA, 453 bp, Zea mays
  Peptide Sequence Number=SeqID_66089
atggcgatgaaatggaattggatgagacaacggtatctggtcatggaagcagagagaatgatcaaggtggcggtgctgggtctctccctctcgtcaaacgccgacgtcgtcactggtgtgccatcccacgtcagcgtggtagctgagctcgagaatgggaactcaaaagctaatattcatggaaaaaatacggtcattaacgtcaccatgctgtcgggcagcgccgagggcgacgaaaccgtcgtcacattcaatttgcccgaccagaccggcctgagttgcgacctctgccgcaccatcctcgagttcggcctctgctgcatcacccgcggcagggaggctgcttggactttgccttctcgattttttagcacggaagcgatggggtgcggggagaaacgaggaaaagtggagcggcttactggctttattgtccctacaacagccgtctaa

SEQ ID NO: 24311 - DNA, 957 bp, Zea mays
  Peptide Sequence Number=SeqID_66090
cccaacggtgatttcgccaaattcggcccgtggggcggcgacggaggacagccgcaggacatcggaacactaccctgccgtctagacaggatcaagatcagcagtgggcttatcatcgactcgatcgagttctcgtacgctggccctgacagccagtaccgcaccgcaggcccttggggtggtcatggaggagacaacagctcttttcagctagctggttcagagttccttacaggtgtgtctgggtcaatcggcacattcaacggccatgcaaacgtcataacgtctctgacgttcgtcaccaacgctcgtagctacgggccgtttggaagagggcgaggcacatccttccacatcccagtgcagggcaatggctgcatcgtcggtttctttgggcgctccggacggtacctcaacgcgatcggtgtctacacggcgccgaaacccgaaccaaaagcagttgggaaacaagatggtggtgatgaggccgtcgtcgccaggattgggccttggggcggggttggaaatgctctccatgacatcgcagagaggccgcatcgcctgcacagagtgacgatcttcagcgggacgatcgtaaactcgctggagtatctgtacagcgatggcgacgggcagcagcacaccaccggtccgtggggcggctgcggaggaactggtcgaaagattcatcttgcccctgaagagttcatagtggaagttactgggacattccatccatgcgcgtgggacagaacaatacccagtgtcgtgtcctctctgacgctcgtgaccagcacgggcaaaacacacgggcctttcggaacgcagctgggagccgcgttccaggttccggtgcagagcgacagcaggatcgttggcttcttcgcccacggagacaattacatcgaagcaattggcgcctacgtgaagaaattgacagaatccagcaaccgttaa

SEQ ID NO: 24312 - DNA, 276 bp, Zea mays
  Peptide Sequence Number=SeqID_66091
atgacccgcgccgggtccgctctcgacagggctgggggagcctccgcggagggtgtcagggcggggccctccgtgggcatcgatggggagctcacgtcgggggtggaggcctcgtgcgtcggggccttgggggtggacgcgggcgccagaggaggcatggtcgggagcggcacgggcgttgacaccagcgcgggggtcggtggcggcgtcgctagttggggggacaccttgggagctggcgtcggggtggcggctggggcctacgaatcaagctga

SEQ ID NO: 24313 - DNA, 399 bp, Zea mays
  Peptide Sequence Number=SeqID_66092
atgacccgcgccgggttcgctctcgacagggctgggggagcctccgcggagggtgtcagggcggggccctccgtgggcatcgatggggagctcacgtcgggggtggaggcctcgtgcgtcggggccttgggggtggacgcgggcgccagaggaggcatggtcgggagcggcacgggcgttgacaccagcgcgggggtcggtggcggcgtcgctagttggggggacaccttgggagctggcgtcggggtggcggctggggcctaccccgcctgcgcggcgaagagcatggccatggccatcggcgacttctgttgtactgagcaccatgggagacgggcgttgtgtgccagggaggccgacggccatgggacagagagctccatctgtcctactgtttga

SEQ ID NO: 24314 - DNA, 378 bp, Zea mays
  Peptide Sequence Number=SeqID_66093
atgtacggcgggcagcagctggggccgggatccagcctgccggcgttccagctgcggtatttggagacggcgacggttcccctcgacgcgcgcggccagctgcccgccgctgcaggcgcggtggtcaccaggacgtacgcggacgacgccgcgcggggctactacgccatacaggtgaagctaagcctggctttgggaggaggactccattggtgccactcctcctgcaccctctatttcttcgcgccgctgccgtcgtcgtccccaagaagaggcgcccccaacatcttcgatggcgacgactgttggactacatgtaagaaaagtgtgttgcatgacgagaaaccggacaaagctatgcagattaaggaacaataa

SEQ ID NO: 24315 - DNA, 1092 bp, Zea mays
  Peptide Sequence Number=SeqID_66094
atgggcgagcagggcgcggggggctcggacgtggccggagaactcgcagtcgtgggcgcgtccacggcgggagatcgtgggcgagaggcgagggcgacccaaatcgagtgcgtgaccatccacatgcgagggacgcaattcaagggggtcacactagcaggcgtgatcgggaactaccttcacaagggtggctcctctcacggccaggtggctaccacttttcaggatgaccgccggggctccatcaaaggggactcggctgagcgccccgcccccagcgacgcgaagattactcgttggctcacgaaggacatggaaattcgcaaaggtgcggatgggactatcgtcccatacgtcttcccgatcccaggttgccttcagttgcgtcccgagcctggcttcgtggaatttgcgagttctcccgattccactcttttccttttctttttttctcgtcggttttgcaacctgcgatcccctccctccctccttcctccaaccctcttctctggggccacggaacgaccccgctcccctaccgaaaagcgcgacagagatggaggtagctcgcatgcgggcgaagcagcaacagagggggaccgcggtgccgagaccgactcaaccaacaaagatgaggacgacgatgaagatgcgagtgcgggctccgacctttgggccattctggatgcctcccttactgtgtcaatagctgactccatcttcaagtttcctagcggggcgacaagtgccttctctatcatggaggaggaggacatcccagaactccccgcccggttctttgggtcgatggcttcggtggcactcatcccctcacccgttgagcccccgaccgactggccgctcggggttgcttgcataggaagctcttctgccttgggtccatcagtggtcccgaccgacgcacctctggggccgtctgttcccgcttccaaagcgggtgccaggaccgccgcttcgcccgggtgccacggaggcgaggtgccattcggagggcaaagcggctcccctcagcatgttgctgtcacacctagatttaagggcaaacccggatacgtctcaaatgtgtgctag

SEQ ID NO: 24316 - DNA, 330 bp, Zea mays
  Peptide Sequence Number=SeqID_66095
atgggcattgattcacatttaagcacttgtgttgacactcaatcaccaaaatacttagaaatggcccaagggcacatttccctttcagggcgagctggggctgggcaaaatccagggaggagcggccatggcagacttgatgtaggaaggggagacgagggagaggcagtggagccgttgcggcatggggaggggctagaggccgtcgcgtccatggttgatgagggagggcggttggaggtgagggcgccgaccaccaggaacaagggagaggtgtcggccatggcaagaggagggaggcggtgtccttgctgctggcgtgggggctga

SEQ ID NO: 24317 - DNA, 264 bp, Zea mays
  Peptide Sequence Number=SeqID_66096
atgggagcgttgaatgctcctgacctaaacgtgtcgaacccccacaagcgactgcacaagaacgatgccccaatcttcatgagtggagggctgaggatgggtgatagtgcgtaccatgatttcccggtgatcaacttgttgcgccacaaaaccgtgagggaggaatggagcgggatcaactttgtggaacaccatttcttcagagacttcgtgaggagggggtcgcgggcgcgaagaacactccccgcgcagatgagggcttga

SEQ ID NO: 24318 - DNA, 651 bp, Zea mays
  Peptide Sequence Number=SeqID_66097
atgaagattactcgttggctcacgatggacatggaaattcgcaaaggtgcggacgggactatcgtcccatacgtcttcccgatctcaggttgccttcagttgtgtcccgagcctggctttgtggaatttgcgagttctcccgattccactctttcccttttcttttttctcgtcggttttgcaacctccgatcccctccctccctccttcctccaactctcttctctggtgccacggaacgaccccgctcccctgccaaaaagcatgacaaagaaggaggtagctcgcatgcggagagagcagcaacggagggctaaaaaagatagggtggagaagaagcggcgtagggccaagtttcagatacgtagggaccacggtgccgagaccgactcgaccaacaaagatgaggatgacgatgaagatgcgagtgcgggctccgacctttgggccattctggatgccgcccttgctgtgtcaatagctgactccaccttcaactttcctagcagggcggcaagtgccttccctatcatggaggaggacgacttcccagaattcaccgcccagttctttgggtcgatggcttcggtggcactcatcccctcacccattgagccccgaccgcctggccgctcggggttgcttgcgtag

SEQ ID NO: 24319 - DNA, 1644 bp, Zea mays
  Peptide Sequence Number=SeqID_66098
atgctgctagagctgcggagccacgggctcccgctcgtcgtcgagacggccaactgggtgctccgcgtcgggctgcggcacccgggctgcttcgcccacgcgcgcgaggcgttcgacggaatggcacgcgccgccggcggcgtgcgccccgaccaccgcagcttccgggcgctcgtcctcgggtgctgccgggaggggcggttcgaggaggccgacgccctgctggcggcgatgtgggcgcaggggttctgcctggacagcgccacgtgcacggtggtcgtgcgcgcgttctgccggcagggacggttcaggaacgtgactgacctgttcaggaggatgtcggagatgggcacgccgccgaacatggtgaattacagtgcgtggatcgatggtctgtgcgaaagaggctatgtcaagcaggcgttccatgtgctggaggagatggtggggaaggggttgaagccgaatgtgtacacacatacgtcgctgattgatgggctatgcaagattgggtggatggagcgggcgttccgtctgttcttgaagcttgttaagagtagctcctacaagccgaacgtgcacacctacactgtgatgattggagggtactgcaaagagggcaagcttgctcgagccgagatgctgttggggcggatggttgagcagggacttgccccgaatacaaacacatacactacgctgatccatgggcactgcaaaggaggcagcttcgatcgagcctttgagctgatgaataagatgaagctggaaggtttcctgcccaatatttacacatataatgccattattgggggcttttgcaagaagggaaagattcaagaggcttacaaggtgctccgaatggccactagtcaggggctgcatcttgataaggtgacatacactatactgataactgaacactgcaaacagggccacataacttgtgctcttgatttgttcaagcagatggcagaaaaaagttgccatcctgatatacacacatacaccaccatcattgctatgtattgtcagcagaggcaaatggaacaaagtcagcagctctttgacaaatgtctttccataggattagtgccaaccaagcaaacttatacctcgatgattgcaggatactgtagacttggcaaattgacctcggctctcaaggtctttgagaggatggttcaacatggatgcctacctgactctataacttatggggcactaataagtagcttatgcaaggaatcaagactagaggaagcaagggcattatttgagaccatgcttgataaacatttggtgccatgtgatgtaactcgtgtcactttagcttacgaatattgcaggagggacaagataaccattgctgtatcattcttggatagactggacaaacggcaacaggctcatacagcagatgcactagttagaaagctcagtactgttggcaatttggatgctgctagtcttttccttaaaaatgttctggacaagcattatgctgttgaccatgcaacttatacaagctttatcaattcatgctatgaaagcaatagatatgctctagcttctgaaatatctgaaaagatctcaaagcggatttctggctttaagaaaaaggatactgcagttattgcttga

SEQ ID NO: 24320 - DNA, 285 bp, Zea mays
  Peptide Sequence Number=SeqID_66099
atgttgatctactttgctatgactactgacattcctccttgggttttcaaagcaattgataaaatcagacaaagatttctatggaggagaaggaaggatgccaaaggcgggcactgcctcgtggcgtggggaaagattcgggactgtctcagtcaggtggagttacagcagggggtggctgattctcacatccagttctcgcgtaatggaagatattcagccaaaatggcatatgcgggtttttttgttggctcggttccttttgaaccttatgagaagatttga

SEQ ID NO: 24321 - DNA, 1380 bp, Zea mays
  Peptide Sequence Number=SeqID_66100
atgacagaaaatatgtcacatataatacttgggaagaaaccactttcttacgtggcacaaagtcaaatttatgctccaagaaatagtgatgcagccaacccagtgataataaatcgtgaactaaaaattggagaactggataatagtactcgtggatggagatctcagccaaccatttctggaatttgtttttatccatatgcgcccttgaaacaacctgagcaagcattcactttggggaacagaatgatatcgcacggtttaggatgggagaattatgatattgagtatattcctattccttctggttatgcggaatggggtacaataattcttgcaaaacattcttttaatttaagaggagatggagaagtggatggggaattttatgaggagtatgtcccttcacatcatgagcatgaaccatccatgttattatatcccaagtgcttatcacaacttttggaggtttgggatgaattacaagtggggggagaagtatcgctgcaagaatgcctattggtggtgacaacagcacagctacacttatttccttacccaactattaccggaaacgaggattttgttccatcgtcttctgacgttgcacaagtaggagatggtgatgatgatgtgaccaatttttgcttgacaagacgagagccaccaacttgtgactttgcacaagtaggagatggtgatgatgatgtgaccaatttttgtttgataagacgagagccaccaacttcaccttttattgattcttgtgtcgacacaacagagttagctgaggattattcaagcttcccctgcgccctaccctctgctgttaactttagtgacattgattcttttcttgatggttgcgatcaattgttcgaaaaccaacctttggatataatttctcctgttgagaaacaccctagcatggacaccgttgcaacactagaagatcttttcctcaagacaaccaggcaagcattggcaaatgttcttgatgggctaaatgcccatactttgagagatcctattcgttgcgccagtctgtgcctcgcttcatcttgtcttacaggacaatttgctagcattgcaagaattaaagctatgctggacaaattaattaccatttccaaacagctgcagaggacgtattctaagtttgaagtggcaagaaaacaagacgaacaaagcactgctgaaatcaagcaggcgcttgacgtccaaagggaagctcttcgcactgttgatgaggaattggcctctgctgaaaagcagcgggcagaaaccatgacgacaattgagaaacttaatcaaattttaatggaggtagagcaaaagagagcgcgacttgaggaaatgcgttctacttctgatttggag

SEQ ID NO: 24322 - DNA, 423 bp, Zea mays
  Peptide Sequence Number=SeqID_66101
atgacgaggagaaggtcccaaaattattctactttggtactcggctattattttccaactgaaaagaattcgacgacaaaccggcaagctataccacggcgagacgatgaagcttgtgaacgtaggcagggagaggacgctgcgggacttgacggacacagggcgctgtgcagtggagcacgcagaggtgagcgcgagctgaacgcaaacaacgctggcgttcaacagcctaaggccaccacgcaaggacgtagggagacttctaggtgctgtcatgtgctagaagcgtggagagggccctggcttcgatggcttgagaaacacaggaggatagaacatttccagagacttatacgtattctagataggacaaacaaaaacaacatgcagataaggagaggtgacgtgagggagttggcctag

SEQ ID NO: 24323 - DNA, 459 bp, Zea mays
  Peptide Sequence Number=SeqID_66102
atgacgaggaatgtggcaaatgcaccggggcttgccttattgcaggagagatcccaaaattattctactttggtactcggctattattttccaactgaaaagaattcgacgacaaaccggcaagctataccacggcgagacgatgaagcttgtgaacgtaggcagggagaggacgctgcgggacttgacggacacagggcgctgtgcagtggagcacgcagaggtgagcgcgagctgaacgcaaacaacgctggcgttcaacagcctaaggccaccacgcaaggacgtagggagacttctaggtgctgtcatgtgctagaagcgtggagagggccctggcttcgatggcttgagaaacacaggaggatagaacatttccagagacttatacgtattctagataggacaaacaaaaacaacatgcagataaggagaggtgacgtgagggagttggcctag

SEQ ID NO: 24324 - DNA, 423 bp, Zea mays
  Peptide Sequence Number=SeqID_66103
atgacgaggagaagatcccaaaattattctactttggtactcggctattattttccaactgaaaagaattcgacgacaaaccggcaagctataccacggcgagacgatgaagcttgtgaacgtaggcagggagaggacgctgcgggacttgacggacacagggcgctgtgcagtggagcacgcagaggtgagcgcgagctgaacgcaaacaacgctggcgttcaacagcctaaggccaccacgcaaggacgtagggagacttctaggtgctgtcatgtgctagaagcgtggagagggccctggcttcgatggcttgagaaacacaggaggatagaacatttccagagacttatacgtattctagataggacaaacaaaaacaacatgcagataaggagaggtgacgtgagggagttggcctag

SEQ ID NO: 24325 - DNA, 549 bp, Zea mays
  Peptide Sequence Number=SeqID_66104
atggcagctctttgtaaggcagctcgttcagatattgagggccacatcacttacccacctggtgtgtccaccctcttggattttggtggtctctatgttgagaagtgggtcagagtattttatgctagagtctggattgaccccgaccaccagtggatgagatccacctcgttgccctcatggcagagttgctccagctactgctcacgtcttggctattttcctaccccattcacagacggatcaaggcgttctccagcagacttcaccatagctaccaagtttctacatgctctgatgagacagacccttttacctcgcatgcgagacagggaggccaccactcatattcagctctggctcctaggtgccttggtctctcactcggtgtttgatgttgtagattttctaatctgtgagatagaggacactgtattggatggacatcgtgctcctcgtcagctgccatatgctcactacctctgtcacatctttgcacaactgatcaaacctcctcattccaggcagttcttggtcactcacacctga

SEQ ID NO: 24326 - DNA, 396 bp, Zea mays
  Peptide Sequence Number=SeqID_66105
atgaggaagactttggcgaagactatgatgagttttaagtctagcgacgatccgccagttgtggtggaagaagatcctgaggagctgtaccaccctgttggagggaatgtgattgtggaggactattctgaggagtttctggcgacacccaccccgttaccagcacttcatgcctttgttgctggagcttcttctttagcaccacatgtgccaatcgcccaagcccctgcccttgttggtgatgatcatgatgattcaggtgatgatgaaggcaatgatgatgaagaagataaccaagacaacaacaacaatgaaccagaccaagatggtggatacgatgggatgtggtctattgctgagcactacactttgatgttcaagacaggctataagtga

SEQ ID NO: 24327 - DNA, 624 bp, Zea mays
  Peptide Sequence Number=SeqID_66106
atggatgagctttttagcaagctcaagtgcacaaagattgacaaccagacccaggccaagactgagaaccctagcgcacccaccatagccatggtctctagatgtggttcttcctctaacccttcattttctatgtttgctttgtattctttgttgaccatcatagagaacgacctcgaccacttcatcaccaactgccccaagaagggcaagctagaggccagccatcgtgaccatcactccggtcggtgcaagggcaagcatgagtacacctacgacaagcacaagtctaaggggaggtttgacaaggaggcgctcatgaagaagtacctccaaaaggccaaggccaaggatcataccttcctcgcctccctcagcaaccttgaccatgacttcaacgactcatcttcttcctcgagtggtgtgaagcttgagaggtgggtcgaggacaagctgaatggactttgcttcctcaacaacaccacgagaggcctctgcaccagtgcacttggtgatgacacggtgagttgcggtgacaaggacatcggcgataactccccttttgaggtatcgctttccaccgatgatctcaccgctgacgtaggtgagctgagccttggatag

SEQ ID NO: 24328 - DNA, 414 bp, Zea mays
  Peptide Sequence Number=SeqID_66107
atgggccaaagtaaggtggtgaagaaaaggctagccagcaaagttgctgctagagacccagttcctctagtggactgggatgaattgcatgatgatgatgatgatgatgatcgatcaaaggcgcataatgacccggtcagacttgcctcacgggagcatcggttcaagctccagagccatcagagaacactccgagcattagaagttcctcactgtgaagaacaagcagatgatgagggagacttaaacactggggacacaatgcttctagtagccgagccggttactgagccagaggtaggccccacttccatatctagggctaaaggatctaagcttatgactaaaatagtggctaagctgcagaccgactcaaccctagccctcgggagtgaaggggctaaggcgtcttga

SEQ ID NO: 24329 - DNA, 753 bp, Zea mays
  Peptide Sequence Number=SeqID_66108
atggaagtcgatgttagtatgccagcagaagcagaagccatggtaaatcaatcgaaggagaaatctttagaaaacatcagaatagtgtgtgaatacccagacatatttcctgaggaattaccacgaggaggaggtgcaggagcgaccgccgaccgtccgcgtttcaccatccccttctccgatctcaaggtaaccttctccggtgttgaaaccatccgtggccacctggcgagctggtgcccgcaagaggtggtgctgaggcatgaggcggtgggcgtgttcctgacacactgcgggtggaactcaaccatggagagcttgtgcgtcggggtgccgatgctgtgctggcccttcttcgtggagcagcagaccaactgccggtacacgtgcatgaagtggggcgtggccatggagatcggccaggacgttcggcaggaggcggtggaggagaagatccgagaggcgatgggcggggagaagggaatggagatgcagcgccgcgcgggagagtggcagcagactggtctccgcgcgacgcggcccggagggcgctcatacgccaacctcgacaagctggtcgccgacgtgctcctctcgggtggcggcaagagttctcaggagggcaaacccataaatcatggagcatgtgatggaatggaaggaccgaaggagccagtggcggaagaagttacttctcgtagtaggcaaaaattggaatatgaaaacctggaagctaagagggttaatccctaa

SEQ ID NO: 24330 - DNA, 450 bp, Zea mays
  Peptide Sequence Number=SeqID_66109
atgacacgctcctttctacctagtggtagtggaggaagtccttgtggagctacaccaccttcaagtgaggaatgcaccacctgtgcgagcatctcaagccccgctcctagaggtgatgacccgaatgattccggcgatgatgaagacaacaatgaagaagaagacgatgaaaataatgacaacattgaggatgccaacaatgagcatgaggacaactttgttggattgcggcctatcgcggaactttacacttcaatgttcaagacgggacacttcccaaacttgctacaagatgcgctgcatgtgttgggaacctacattcgacctctctacgacacacaacaggagatagagggtttcaggactccatcatcacatgagtctttgacaccgctatccacctacgctacttcggtgaagctggagaagatcacctcaacacccttgtag

SEQ ID NO: 24331 - DNA, 1758 bp, Zea mays
  Peptide Sequence Number=SeqID_66110
atgggcaacgtatgcttctgcggcaccacctccacctcccctgatcagcctgaaccggccacggccggcaaagcgccgccacaaggcgccaccaacaggaggccggcgacgcctccgagcagccagcagggcagcagccaagagccgagcccggccccgggggccaataagcccggaccgaaggcgaggcccaaggctactactaaggcgaacccgtacgactgggctccgccggcggcggcgcacgcgtcccgggcgtcggcgtcggtgtcggcgtcgcgcgtgctggacggcgtggtgccgcaccacccgcggctgcgcgtgacggacaagtaccacctcgggcgggagctggggcggggcgagttcggcgtcacgcggctcgccacggaccgcgccacgcgggagcgcctggcgtgcaagtccatccccaagcggcgcctgcgcacggcggtggacgtcgcggacgtgcgccgggaggtggccatcatggcgtcgctgcccgaccacccggcgctcgtgcgcctgcgggccgcctacgaggacgccgacgccgtgcacctggtcatggagctctgcgacggcggcgagctgttcgaccggatcgtcgcgcgcggcaggtacacggagcgcgccgcggccgccgcggccaggaccgtggcggaggtggtgcgggcgtgccacgctcacggggtcatgcaccgggacctcaagcccgagaacttcctgtacgcgggcaagagcgacgacgcgcagctcaaggccatcgatttcggcctctccgtctttttcagaccaggcgagcggttcacggagatcgtgggcagcccgtactacatggcgccggaggtgctgcggcggagctacgggccggaggtggacatctggagcgccggcgtgatcctctacatcctcctctgcggcgtgccgccgttctgggccgagacggagcagggcgtggcgcgcgccatcctccgcggcaacctggacctgcagcgggagccgtggccgcggatctccgagggcgccaagagcctcgtccgccagatgctccagatggaccccaagaagcgccccaccgcgcagcaagtgctcgagcacccgtggctgcagaacgcgcggaaggcgcccaacgtgccgctgggcgacgtcgtccgggcgcgcctgcagcagttctccgctatgaacaagttcaagaagaaggcgatgcgggtgatcgcggagcacctgtccgtggaggaggtggaggtgatccgggacatgttcgcgctcatggacaccgacaaggacggcagggtgacgctggaggagctcaaggccgggctcaggaaggtggggtccaagctcgccgagcccgagatggagctgctcatggaggccgctgacgtgaacggcaacggttacctggactacggcgagttcgtggccatcaccatccacctgcagcggctctccaacgacgcccacctccgcaaggcgtttctcttcttcgacaaggacagcagcggctacatcgagcgcgccgagctggccgacgcgctcgccgacgaggccgggcacgccgacgaggccgcgctcgacaacgtcctgcgagaggtcgacaccgacaaggatgggcggatcagcttcgaggagttcgtggcgatgatgaaggccgggacggactggaggaaggcgtcccggcagtactcgagggagcgcttcaagaccctgagcaacagcctcctcaaggacgggtcgctccgcatggcgcgatga

SEQ ID NO: 24332 - DNA, 504 bp, Zea mays
  Peptide Sequence Number=SeqID_66111
atgggctggaggccgattatcagtggtagcggcaacctgggcggagctcaggccgccgtccccccgagtcgccttcgtggcgtccttccacacgccggcacgaacgcttcaagtggaggaggagatctagctctgtctatccaccgcgtcatcccgggcttcatgtgccagggcggcgacttcacccggggcaacgacactggcggcgagtccatctacggcgccaagttcgccgacgagaacttcaagccgcgccacacggagcccagcgtgctctccatggccaacgcggggcccgacaccaacggctcccagttcttcatctgcattgtgcagacgccttggcttgacggcaagcacgtcgtcttcggcaaggtcgtcgatggctacaccgtcgtggacaagatggaggttgtcagttctagtcaggtaattatggatggatggggcggtgatttgatcaagacatctgtatttgttactcttggcaagagcgccgcctga

SEQ ID NO: 24333 - DNA, 462 bp, Zea mays
  Peptide Sequence Number=SeqID_66112
atggggaagctgttggggacaggcgcgttcgggaaggtacactatgcaagggacctcgagtccaaccagggtgttgctatcaagatcatggacaaggacagggtgctcaaggccgggctctcggagcaggtaaagcgtgagatcacgactatgcggctggtggaacacaaaaacatcgttcgtctccatgaggtcatggcgacgcggaacaagatctacatcatcatggagtatgccaaagggggtgagctcatggacaagattaagaggagcggcaggctcacggaggctgacgcacacagatacttcgagcagctcatcgacgcactggatcactgccacagccgaggcgtgtaccaccgggacttgaagcctgagaacctgctgttggatgagaatggggacctcaaggtttctgcccgagatcctacctgcgagctactgcaacagcaattcgcataa

SEQ ID NO: 24334 - DNA, 1710 bp, Zea mays
  Peptide Sequence Number=SeqID_66113
atgggatgtctcgcggctctgagccgcttcatctcacgcctcggcgaaagaggtctgcctctgtaccgcctcttaaggaagaccgagtgcttcgcttcgacccctgaggccgaggaagctctcgggaacctgaaggcgctcctcacaaaggcgcctatcttggtgcctccagctgacggagaagccctcttggtctacgtcgccgcgaccactcaggtggttagcgccgcgattgtggtcgagaggcaagaagaggggcatgcattgcccgttcagaggccagtttacttcgtcagcgaggtactgtctgaaaccaagatccgctacccacaagttcagaagctgttgtatgcagtgatcctgacgaggcggaagttgcgacgctacttcgagtctcatccggtaactgtggtgtcatccttccccctgggggagatcatccagtgccgagaggcctcgggcaggattgcaaagtgggcggtggaaatcatgggcgagacaatctcgttcgcccctcggaaggccatcaagtcccaggtattggcggacttcgtagccgaatgggtcgacacccaactaccgacggctctgatccaaccggagctctggaccatgtttttcgacgggtcgctgatgaagacgggagccgacgcgggcctactcttcatctcgcccctcgggaaacacatacgctatgtgctacgcctccacttcccggcgtccaacaatgtggctgagtatgaggctctggtcaacgggttgcggatcgccatcgagctaggggtccggcgcctcgacgcccgcggtgactcgcagctcgtcatcgaccaagtcatgaagaactcccactgccgcgacccgaagatggaggcctactgcgatgaggttcggcgcctggaagacaagttctacgggctcgagcttaaccacatcgctcggtgctacaacgagactgcagacgagctagcaaaaatagcctcggggcgaacaacggttcccccggacgtcttctcccgggatctgcatcaaccctccgtcaagatcgacaactcgcccgagcctgaggcgccctcggtccagcccgaggtaccctcagcacaccccgaggcaccctcagctcggcccgaggcgccctcggttcagcccgaggtaccctcggcctccgagggcgaggcactgcacgtcgaggaggagcggagcggggccacgcctgatcgaaattggcagaccccgtacctgcaatatctccgccaaggagagctacccctcgaccgagccgaggctcggcgggtagtgcgacgcgccaagtcgttcgtcttgctgggcgatgagaaggagctctaccaccgcagcccctcgggcatcctccagcgatgcatctccatcaccgaaggtctggacctcgttggccccttgcagaaggcgcccgggggctacacgcacctgctggtcgccatcgacaaattctccaagtgggtcgaggtccgacctctgaacagcatcaggtccgagcaggcggtggcgttcttcaccaacatcatacatcgcttcagggtcccgaactccatcatcaccgacaacggtacccagttcaccggcagaaaattcttggacttctgtgaggatcaccacatccgggtggactgggccgccgtggctcatcccgtgtcgaatgggcaagtagagcgtgccaacggcatgattctatga

SEQ ID NO: 24335 - DNA, 1536 bp, Zea mays
  Peptide Sequence Number=SeqID_66114
atggacggatcgaggcagcagcggcagaggaggggatcgccagcgccggggaggccgcgcaccgtgccgatcgccgtcacgccggagggcttctggtgctgcccgtcccccgccgcgctgcacaagagcctgctcaagaacccgcaccaccaccaccaccacaacgccaagcaggcgccgacgcctaaaaccccctcggcccctccgtccagagccccctcggtccagaccgcgacgtccgtgaccgacgacgtcgacgaccccgcgcccgccgtggccgaccaccaccacagccaagcggccgccgaggctccggcgccggccacgccaccacagcacaaggtctgcgtcgggttcgggcggccggagaccagcgacctgacggtggtgctgtacgggaaggagggcgtcgcggtcagcatgagcgtgcacagggacgtgctcgcccagagcagcgccttcttcgcgcggcgcctcgccgccgacggccagccctgcgtggagatccacgactgcgaggacgcggagatctacgtggagacggtcggcctcatgtactgcgacgacggggccaacaagcaccggctgctcaagcagagcgtcccgcgcgtgctccgcgtcatgaaggccgccgacgcgctcggcttccccgcctgcgtcaggtcctgcctcgactacctggaggccgtcccgtgggccggggaggaggaggagcgccgcgtcgtgtcctcggtccgccgtctccagtgcacggacggcgccggagtcagcccgctgctgaggagggtcgcctcctccgactccggctgtctgagaccgcccgccgacacgttcgcgcacataacggagatggtgctggcgagcaccgacgagcggggccggcgcgagacgaaagccctggtcttgagcctcctgaaagacagcactcgcggccacgtcggcggcggcgccgacggatcaccaccaacaccgggcatctcctcttccgagacgttgtacggctcgtgccggggctgcctggaccggctccggcggctgctcgcggaagcttcgtccgagccggcgtactccgccgccgtcgcgcggcggatcgcgctggaggccgacaacctcgtgtggctggtggagatgctggtggcgagccagcgcgcctgcgacggcttcgtggcgctgtggtcgggccaggccgagctggccgcgtcgcacgccggagcgccggcggcgtcccgccacgctgtgagccgcgtcacggcgcgcctgttcgtcggcgtcgggagaggggagatgctcccgcctagggacgcccgcctgcggctcctccaggtctggctgcagccgctcatcgacgactacgcgtggctgcagcgcgccggcggatcccggccggcggcgttcgacaggaggctcgtggaggacggcatcgggcagacgatcctgacgctgccgctggaggaccagaggtccttgctgctggcgtggttcggcaggttcttgaagctcggcgacgattgcccgaatttgcagagggcgttcgag

SEQ ID NO: 24336 - DNA, 189 bp, Zea mays
  Peptide Sequence Number=SeqID_66115
atggccgataatggagaaatcgatccaactgcatcctcctttggagacagtgacgacctccctacttcgttcgtcaatccatcaagtgctgcaattttatttgtaaatggattgggtgtgacgcatgtacagattcatttgtacaggtctgactgtgcagcagcttctttcttcagctggaacttgtaa

SEQ ID NO: 24337 - DNA, 213 bp, Zea mays
  Peptide Sequence Number=SeqID_66116
atggcacggtcggtccgagcccaaggtcgggcgaggcggagacttctcctgaggtcgaggtcggggtcgggcgaggacgcgattcctcctgaggccgagccttgcccgggtgactggcacagcagtcggagcggggtgagcggcgctgttttcctgtcaggtcggtcagcgaaagggcgaagtgactgcggtcacttcgaccttgccgactga

SEQ ID NO: 24338 - DNA, 105 bp, Zea mays
  Peptide Sequence Number=SeqID_66117
atggaattggtccactcaaaatcgccaggttggatttcagtgaccatcatttcttcagtgctcatattatgcatcacagcaaacaaggagaagatgaattcatga

SEQ ID NO: 24339 - DNA, 153 bp, Zea mays
  Peptide Sequence Number=SeqID_66118
atgaagcttccagagccaggaatcgagctctacctcgtcggagacaccagatcgacatcgtcggacttcacccgaccaccggcgtatgtagaccgagctccacgttttattcaaccaaatgtggtcaaaccaattttgctaggttcttactaa

SEQ ID NO: 24340 - DNA, 1098 bp, Zea mays
  Peptide Sequence Number=SeqID_66119
atgacgaagccgcattccccttcctcgtgggccgcctcctctctctcctgtgttttctcctcctccggctcttgctacgtgccgccgtcgtggtcaccgaagcgcagcagcaagaagaagaggagcagccgtaggagggccaagaatggtgccgcggtcgccacgaggaggaccagctccatctacaagggcgtgaccaggcacagggccaccggcaagtacgaggcgcacctgtgggacaagaatgctcggaaccggaccgggacaaagaagggcaggcaaggagcatttgacaatgaggaggcagcggcccgtgcttatgatctcgcagcactcaagtactgtggctggggctcacacagcacactcaacttcccactggaatcttacaggcatgaacacgagaatatgcagcgcatgacaagagaggcgtacctggccgctctacggcgcaggagcagctgcttctcgagaggcgcctctggttacaggggagtggccaactttctgcagccacccctccttccagtgaagccatgcagcagcaaatctgatgagagagttttggttcgcaggcaccaccacaacggcaggtgggaggccaggatcggctacccttgcggcaagaaatacgtctacctggggacgttcgggacgcaggaggaggcagcccgggcctacgaccttgcagctctggaactgcgggggcacgccgcggtcaccaacttcgacatcagcagctacacggcggacaaggactaccagcagcgacggcatgaaccggcggtccgcacggcccagccgaagcccaagcccaaggtcgagctggtggacgaggcaccactgccccaggctcgtcgtccggctccgacgttcctgacgccgaagcccgagcccgagtacgagctgggcgagcccctggcgctgccacccggccccgtgctccgcgacgccaatgacgcggaccacgccatctccgagatcctgccggccgctctgcatggaccccgccgacttcgaggcccggtttctgatacccatgtcgtgtccttgtgcatgcgtgtttatgtcagaagagcctgcagcaagggagattga

SEQ ID NO: 24341 - DNA, 186 bp, Zea mays
  Peptide Sequence Number=SeqID_66120
atgcccttcggacagaaccaatgcaaaaacacaagtttccactacggactgtccggaggaagagcaaagaccgtccgagccctcgcgcggaccgtccggcctcaggcgcggaccgtccggtcggggcggaccgtccgcaccaggagggcggaccgtccgcgctcagcagaaaggcccaacgactag

SEQ ID NO: 24342 - DNA, 483 bp, Zea mays
  Peptide Sequence Number=SeqID_66121
atgtggggccaccagatagtccggtggtgcaccggacaggtcctgttcactgtccgccacaacgtgccagctggaactcatctgattgaggtctcctcaattggttacttcttttccccagttcgagtagatatcagtgtaaggaatcttggttatattcaagcagcattgactgaaactagaagagttctaaatgagcttgtcctggaacctctgaaagaagagcagtactatgaggttagggagcttttctccgtcatgtcacttttgaagagccccatggggttgacggttggttttatggtctgtctttgtgatgcccaagatgatggagaacatagttcattgttacctgtaacctatatacttcaacgtttcatcttaaaatttcaatacaatcctgaggagatgaagcaagctcaagaacaaatgaggaacaaccctgtatcattgtctggcttgctagccagagtgcagggctag

SEQ ID NO: 24343 - DNA, 1161 bp, Zea mays
  Peptide Sequence Number=SeqID_66122
atggagttcaagaactctcaaattgaaggctttcttgagaaggagggcatcaagcatgagttctcttctccctacacacctcaacaaaatagtgtagtggagaggaagaatagaactctactggacatggcaaggaccatgcttgatgagtacgatacaccggaccggttttgggcggaagcaatcaacactgcttgctactccatcaaccggttatatcttcatcgaatcctcaagaagacatcatacgaactcctcaccggtaaaaagcccaatgtttcatattttagagtctttggtagcaaatgttttattcttgttaaaagaggtagaaaatctaaatttgctcctaaggctgtagaaggctttttacttggttatgactcaaacacaagggcatatagagtcttcaacaaatccactagattagtcgaggtttcttgtgacattgtgtttgatgagactaatggctctcaagtagagcaagttgatcttgatgagctagatgatgaagaggctccgtgcgtcgcgctaaggaacatgtccattggggatgtgtgtcctaaggaattcgaagagcctccacaagcacaagatcaaccatcatcttcaaatcaagcatctccaccaactcaagatgatgatcaagctcaagacaatgaagaagaagatcaagaagatgagccacctcaagaggagaacaatgatcaagggggagatgacaatgatcaagacaaggaagatgatcaagaagttcagggtcaaagaccgccacacccaagagtccaccaagcgattcaaagagatcaccctgtgaactccatcctcggtgatattcataagggggtaacaactcgatctcgtgtcgctcatttttgtgaacattactcttttgtttcctctattgagccatacagggtagaggatgcactaagagactcggattgggtgctggcaatgcaagaggagctcaacaacttcacaaggaatgaggtatggtatttagttccacgtcctaatcaaaatgttgtaggaaccaagtgggtattccgcaacaagcaagatgagcatgctgtggtgacaaggaacaaagcccgacttgtggccaaaggatattcacaagtcgaaggtttggatttcggtgaaactgagagcacctag

SEQ ID NO: 24344 - DNA, 186 bp, Zea mays
  Peptide Sequence Number=SeqID_66123
atgcccttcggacagaaccaatgcaaaaacacaagtttccactacggactgtccggaggaagagcaaagaccgtccgagccctcgcgcggaccgtccggcctcaggcgcggaccgtccggtcggggcggaccgtccgcaccaggagggcggaccgtccgcgctcagcagaaaggcccaacggctag

SEQ ID NO: 24345 - DNA, 216 bp, Zea mays
  Peptide Sequence Number=SeqID_66124
atgagggagatcgagaccggtgacaagtccgcaagctcggggagaacacattctggggagtccgcccataagcacaaggaggatactcttcctccatcaagtcccacggagggtgacagagatatgatggtttccttggtctactacgagaccgactcttcgtcatcctccacctccggctcgcaatccggcatccgccacttgaaaatgtcatga

SEQ ID NO: 24346 - DNA, 202 bp, Zea mays
  Peptide Sequence Number=SeqID_66125
atgaagaattacacaatctatgttgtatcaattaccatccgtattgtgatcattgccatcctcaatgacgccgcgcacgcagttttgttcgaggaaaggagggcaagagcgggagagacaccatcgtcgttggaggagccagccgaggcgttggagtcgtccttcggcgaggaccattcatcctttgacctcccggcaaatg

SEQ ID NO: 24347 - DNA, 153 bp, Zea mays
  Peptide Sequence Number=SeqID_66126
atggggtctccgacgcttggcgattcctcatcggtgtggtgctcggcctggatccgcacgctgtcgtggacactcgcccatggtgacatttggggcttgtgcgctgatccaagggttcctgctgcgtaccgtttcgatattagggcaatctaa

SEQ ID NO: 24348 - DNA, 627 bp, Zea mays
  Peptide Sequence Number=SeqID_66127
atgacctacagagttcgtcgcctcgcgtctcggcctcgctcctccgctccctctacaccctcagccacaactgctactctagctgccactgcaccagctcctgtcactccagaggcatccaccacttccgccatacccaccacctccaccactccagcttccactgttccccctcccgctcccatttctgctccacccattcctccaccccgcttcagggagcgtgatgagacagaggtgcagccattagctactgatcctcgactccttgatcttcagcgtgccactgcagcccggagtcatcgactcgactccacactctgtgctatggtacataagatcctcctcgtcgcccctcacggtggagttgcactagccactgctcacgtcgcggccctgttcagacctcctttcacagataggtcgcgacgctctccagccgacttcacccccgcagagaagtatctatatcagctaatcaggtcacctcagttccatggcacccttgaggcctcatgcctccagtttggtttatatcgtccagcccctgaggacctgatcccagtgctagatccagtgccagatattcaggctgaggatgaggcgttccgccagttcgagacctag

SEQ ID NO: 24349 - DNA, 399 bp, Zea mays
  Peptide Sequence Number=SeqID_66128
atgtcaccatgggcgagtgtccacgacagcttgcggatccaggccgagcaccacaccgatgaggaatcgccaagcgtcagaaaccccatctcacccccggtcgtcttccttgcctggacaaggcgatggtggctcgagcacccgcacagctccgaggcgagcacgccagcgcgagctgggcagggacgcgcaaaagcagaggctgctggaggtgaggctcccaacttctcagtgccgcttcgaattggtggacggaggggagggggtcgcagtgctacggcttttatgcaccacagcgaagtccgactgagggcgatgttgccagaattttcgggcgaaacataccgaccaatacgcaccataatcggaacagaggttggtgggatctggaggggataa

SEQ ID NO: 24350 - DNA, 405 bp, Zea mays
  Peptide Sequence Number=SeqID_66129
atgacgctgggggaaggcgctgacttggggagatcacgagcagggcgctgggaaggcagaggccgacggcctaggggagagcagggaaagctgggcgtcgagtggaggaatagagcagagaatggagttggcgccctggctcctgttatttacaggcgacgaccacgtgcggcattggtgcctcggccggctgctgctggttggctggtgccaggcattggccaagagcctggtgtccaactactggctgaggagggaggtggccatccattggctgagggcgcggcgtcctgcgagtggccgaggctacagacggcatcgacgactgtagcaaaatggttcgtgctagttgcacgagggacagtggacaatgtttacaggttcgggccgcttagagatgcgtaa

SEQ ID NO: 24351 - DNA, 717 bp, Zea mays
  Peptide Sequence Number=SeqID_66130
atgccctatgcctctccgacctttatcctctcagcagttaaccggaagaaggcgtcttctgccctaggcaactcacctcgtaaaggaaaaaaggtgaggaaaaatactaatcagaggttcgaaggtccggccctcgacagggctcgaaaaaaccacctcaggacaccctcggcagcactcttactctgcaccatgccagagccttccaccactgagggacgctgcatccatggcaaacttcgggggcttctggaatgcaccgcaattcagcagcctaagagctctgcctctcggctccgagagcccacctcaagtcatcaggtggggccctctcgcttcgagagggaagcctcggtgcaccctacgcctaccagagagagggcgcccacgaacctgaggactactccgagccgagccacaaggtttacaacgttcttcctagtctatggggcagaggctgtgttaccgactaacctagagtacggttccccgaggctacaagcatacaacgaatgcaacaatcaagtcagccgtgatgatttgcttgaccagctggaagaagctcgagacgtagcattccttcattcggccaaatatcagcagtcccatcagcgctaccatgaaaggcgtgtccgaccccgagaattccaagaaggcgacctggtgctttggttacgacaagacaacagagaagacgatgatggcctccgtcgatga

SEQ ID NO: 24352 - DNA, 621 bp, Zea mays
  Peptide Sequence Number=SeqID_66131
atggctacatatgggggaactgatgcacgagctgctgctaggattcagcatcccaggccacaatcttcttgcggaggaggagctcgctgggtgtcggcgcccagtcgggctaaggtgaggcgagccgatgtggggctaggcgagggaggaacacatggtctagacactgcaggagccatggctgaacctacagttgagctcgctggtgcgaacccaagggaaaaagacgcaggggaaagccggctggaggccgacgcggagagcgcgggccgagcaccatgggcagttgagggagctcgggcgtcggttggggagaggagacgaggctgcatgctagtggaagaagtggctggagcagggaggaggatggcgttcaaggagctaggtgccatggagagagggaagagatccctgctgctggcgcccatgggaggaggggttgtgcatccctggaggccaagcaccaaggagggaggagcccgaaagctgggcgtcgagtggaggaatggagcagagaatggagatggcgccctggctccttttattaacaggcgacgaccgcatgcgacattggcgccttggccggctgctgttggttggctagtgccaggcagtggctaa

SEQ ID NO: 24353 - DNA, 350 bp, Zea mays
  Peptide Sequence Number=SeqID_66132
gttttgctgagtgttttagatactcggtagagcagatgattccggtagtgagagctagtcgtgtgcctggcggtggcggttgtgatggtgacacgaacatgtacatcggcataccatacgacggctgggccaagggagacccatttgtagccaatcaccttctcctcctcctctttgtcacgtcgttcggcgagttgtcacagcacgtcctcctcctcgcgccttatgaggtcatcaaagtgatgctggtcatcagccgggagtgcctccatggtcggcttgatgatgctggtggtggagacgtcggtgtgatctttggaaccggccatctgggggccgatttttggtag

SEQ ID NO: 24354 - DNA, 693 bp, Zea mays
  Peptide Sequence Number=SeqID_66133
atggctgatgacactgttgtggaagtcaaaggcggtggcagtcgcaaactagtccacggcaaggtcgagaagaaagccgacacgacagacttgcatgtgcgggagcatgaccaaaatagggacatgggtgtggccacgatcatcggcgccgggaaccgaaggcaggggaaaacgacatatcaggatcaccgggatgacaaacggaaccaagccgacgatgtggtgagcatggagctcggcatgggcgccgcactggagagggcgcagtccgagcaggaaaatcccaggcgcgcagagctccgggcgggcgagctgagcgacggcgcaggatgcggcactaggaagaaggccgagctgggcagggaccagaacacaggggaggagggagatccgggctggggcgcagggagaacgtcggagaggcaaccatggaagagagctggagcttggagcagaggaaggccgccgagctgggtccgagctaggggcgcactcgcgcggaaccagggagagggtcacgagctggaggagctcagctggacgcagacgccagggcgcgcggccgagcaggagccagggcacacgacccagggtgcggcggccagggaggaaggcgcacgaggaggaagaagcagggagagcacgcgctggaaaaaatcaggaccgtgggagagaggaggtcagggcggttga

SEQ ID NO: 24355 - DNA, 201 bp, Zea mays
  Peptide Sequence Number=SeqID_66134
atggcgacgagcaggacctttccgttgagctgttattgggtaatccgagcgggagttcgagctcctttcgataagagttggctagtggtccagagaaacgccccaaaaggtcagttgcccggggcagaagatgccttctttcggttaactgctgagcggataaaggtcggagaggcagaggacgaagggcgtaccttttga

SEQ ID NO: 24356 - DNA, 567 bp, Zea mays
  Peptide Sequence Number=SeqID_66135
atgggcaagaacaacaagcgcaagcgtgagccaactcctccatcggaggattttggtgactcggagtactcagaggaggagttctcctctgagtctgaggggtctccggctcccgtccccctgcgtgagtcgtctgacgactcagacgactcccaggggctcgcggcggaggtctggacgtacatccgggccgtcgagcgctccgggctcgagggctcggatgagtcggagtactcctcggataaggaggactcggacggcggcggcgaggacgaggacggcgacgacgacgacgacgacgaaggcggtggcgacggtgatggtgacggcagcggcaagggcggcagcagcggcagcaaggacggtgatggcggcggcagcaggggcgcagcggcggtggcggcagcagcaggggcagcaacaggggcggcagcggcggcggcagcaacagggccaatggctagatgccactggtcttttagatggtcaactgccgagcgacttgagggcgacgtcaacattttagaggtaatgccgagcgacttaaagacgacgtcggcgttgtag

SEQ ID NO: 24357 - DNA, 315 bp, Zea mays
  Peptide Sequence Number=SeqID_66136
atgacctctagggaatctttgtcaaggctacgtagtgagaccctgctaggtcaccttggtagtgatcaatggagagtcatgatcttcgggcagaatgggaatcacgacttgtggatggctcgtattagatgcactgcacgtaagtcagtgatcacctttttgccctctcgcctggcgcagcgcccactgcgccgcacggtgacaggtcagtctagctacctagagagactgcatcgtctcctgcacgaggagcaggagcgccgatgccaggagcaggaacaggagcagcaggactcttccccctcgcctcagtag

SEQ ID NO: 24358 - DNA, 282 bp, Zea mays
  Peptide Sequence Number=SeqID_66137
atggcgcacagacaccggagaacaactgtctacgacacaactactctccggcgagcaatcgtgcccagacaagaacatgaaaagggtaaattgggggtgggacagggcgagagagagggcgagggagtttggctgagtgcgcaaatgagcaggggggagtgggtgagcggggtgcgggctcaaaatgaggtcagggttttcaaatcaaattcagaccaaaggcaaattaaaattatttcaaacatgtgcatcaagcaaaaggataatttaggtccaacatga

SEQ ID NO: 24359 - DNA, 306 bp, Zea mays
  Peptide Sequence Number=SeqID_66138
atgacgcctcaccctatagatcttccgccgcgaccgcaaccacctgaccaagctttgcgctgccacgcgattatagctggtctggtgccaccgacctatctggactataaaacctatgcgctcggtacctctctcgtcccgtgctctcctcatccaactcagccattgccgccattgcaattcggaggggaaagtcgcctccatggttgggatcgagctgggctgcaatctggacccttggggaaaggccggagtgcagtgccggtgaattggatcgtatctaagggcttcgccaagcctgggtga

SEQ ID NO: 24360 - DNA, 537 bp, Zea mays
  Peptide Sequence Number=SeqID_66139
atgagggtgcaggcgcgctgggacccacgggacaccgggaaacgctctaggaggtttggggaatgtagcgaatgcggtcatgggcacaacaacggcgtggagacaccggagaacaactgtctgcgacgggttggctcaacggcggcacaactactctccggcgagcaatcgcgcctagacgagaataggaaaaggggctcggactcgggctcggcctcggaagacgacgaactccgcctcgcccgacccagggctcggactcgggctcagccccggaagacgatgaactccgcctcgcccgacccagggctcggactcgggctcggccccggaagacgacgaactccgcctcgcccgacccagggctcggactcgacctcagccgacggtctccatctcgcccgacccaagggctcggactcgacctcgacctcggaagacaaactcgacctcgacctcggaggagcctccgcctcgcctaacccagggctcggaccgaccacgtcacaggaggggccatcattaccctacccctag

SEQ ID NO: 24361 - DNA, 279 bp, Zea mays
  Peptide Sequence Number=SeqID_66140
atggaggttgctccccggggaagacgaattttgtcggagccgaacacaaatttgtcgattaaggacaaatcgtcggtcagattaatgaatcgaaggcaccgggatgaagctctcgatgagacgaacgcagtcgtaccctcggattctgccgatgacacacggatcgaaagtaattgctcgctggagttgtcagcgaagttggaaccgttccgaacttcgaaaaaggctgaaatcatttttaatatccgaaaaataattcgaaggctccaaaaattctag

SEQ ID NO: 24362 - DNA, 1146 bp, Zea mays
  Peptide Sequence Number=SeqID_66141
atgtcgccatggaaagggcggctgcgctctcaccacgcgacccctcaaagttttcccaagaggaggcccccttcccagaccaagaacccggaggagaaagaggagctccaaacatgtaagaagcatactgcccgcaagaagaccgcgagaggtcgccacgctggagctgctgcacagcagcccagggctctcttacgcgggtcgtcgcggctcgctggaagagaccatgagcatccaattatgatagacgatgatgtaaacgaggaatgtaaatctagggctgataatcagcaattacacctctccgcaggaaagaggaagagaggaacagaaaggaggttgttatcgaagaagcaaagttgccaggaccctggaccattctctgcgtatcaccaagaaattgcatcttgcaatgaatccagaaaatccacccacagaaggattgaaaatgacccttctaccgaggtgaagcttaaagttggtgatgtgagattggcaaacattgatgaaaacatcaacaagcccagtgggactgagagagaaggaatagaatttttttgtggtcctgatgatgggacaaaagagcaggacatggcattgcgcaaagcttacttcagtgcccgaccatccccacatttctggaagagggtttcaaaaatggtgccagggagatctgctgaagattgcttcaacagaatttatactgacctctcaacaccgactccaattgccccacgtcccagagcaaattctctaggcaagcacagtggaaggtcttcagcacgaaagaaaccattttcaaggttaagaactaaatcatctgatcccagcccaggagttctaaagcctataaagaatgttatcctacatgagaggtacattgataaattggcacgtagagaaggagcaaaaaggcctcgcagaagggctccagctggctctaaagctgctgattctgggaagtctctttctgagcagcaagctggtagtctgaaggctgctaaaaatgctctcatctcagaagcaaccgacttcataagcagttttaagacgctgcaagccaattcgcttgcgcatgctgtggagaatagtgaagacgagattgaatgtgatgccagtaattgtagccatgatgataaagaataa

SEQ ID NO: 24363 - DNA, 1095 bp, Zea mays
  Peptide Sequence Number=SeqID_66142
atggaggagggcgatgagatgttggatgtttatcaaggcacggagttcaagtggtgccttgtctgcaaagacaactcaaaggactccctcaataatggcggtcagaatgagtcccagttatttgagctggccttcaacaagaggcacaaggacaaggccctcaaatcgtacctcccattcatcttggccacagccaaggccatcaaagcccaggagagaactctcatgatatacatgactgagtacgacgattggtccgcgattgacctcaaccacccatctatgttcgacacgctttccatggaccacaagctgaagcagtccatcatcgatgatcttaacatgttcatcaagaggaatgattactataagaagattggcaaggcgtggaagcgggggtacctactgtatggtccacctgggactgggaagtctagcctaatcgcggccatggccaaccatctcaggtttgacatatatgatctcgagctaactgtggtcacatccaactcagacctcaggaggcttcttgttggaatgggcaaccgatccattcttgtgatcgaagatattaactgcaccatcgaaatgaaacaaagggaggaaggtgagggacatggcaagtcaaattctacagaacaaaacaggagggaagagaaggtaacgctgtctgggctgctcaactttgttgatgggctgtggtcaacaagtggggaagaaaggatcatcgtcttcacaaccaactacaaggagtggctcgacccagcactgttgcggcctagaaggatggacatgcacatccacatggggtattgcaccctagagtctttccaaatccttgccaacaactaccactccattgagtaccatgacacatatctagagattgagaaactaatcaaggagatgacggtgacacctgcagaggttgctgagattctgatgaggaatgatgacactgatgttgtgctccatgatcttatcggtttcctgaagtcaagaatgaagggtgtcaatgaggtcaagattgaacacaagaaagtaaataacaagatggacgagaagaaggaagacaaggacaatgataaagattaa

SEQ ID NO: 24364 - DNA, 216 bp, Zea mays
  Peptide Sequence Number=SeqID_66143
atggagacgcggggatccgacaacccgggcagctcagctattcagcagcagatacatgatcttaaaccaccctaccagagccaccatatttggatcccagaaatgggcgtctggaaggaggaacggggcgtctggatgtcacgggagcagcatgatacatcggcttcaacgcctgcagaacatacaagcatgccaagggacactggtaagcagtaa

SEQ ID NO: 24365 - DNA, 717 bp, Zea mays
  Peptide Sequence Number=SeqID_66144
atgatcctttcagggccgactagatggtgccttggagcagtgtcgcatccgagtgtcctcctgccagacgctcgtccacaagctcgactacgcctagatgaagctgacgctgaggttccgcctcgccgtcaccaccgcaacgttggcatcggccttaggtccatatctagacccgcaatagtagcagcagtcatcatcgttcccgaccacaaggcaccgtcattggcgatggcgtcgccggcctgcgacgagtctctccgcgatgcccagatgaggttaatgttgaggttccaccttaccaccaccctcgcaacgccgacgccgacctcaagtccagatctagacccaccacagcagcagcatgctgttgctgccaccatcccccgaccacgaggcaccatcatcggtgatggcgtcgttggccgaccagcgacaagtctccctgaggcaccgtcaccaatgatgacgtcgacggccggcgacgagtctccactgaagcctgtcgtcctgcactataaagtgccttctatggacaggcgacaacgtgcagagatcctaaacgtattgttggttcttgtatatgtttcttttgaacatgaggcaagctgtcatttagctacgacctatgtcacgtctatcaatattcttctttttttgcattggcttgtgggtggatctggtgacctgaagttgacaaaggatgggaacaactcttga

SEQ ID NO: 24366 - DNA, 435 bp, Zea mays
  Peptide Sequence Number=SeqID_66145
atgatgagcctggggatcccaccaccgccttccgtgccacttcgctcacatgatcacgaggctggtagttctagtgttgctcctactgccccaccagctattgaccctgctctggccacgattctccagtcacttaagcagcagcaggctcatctagcaacagagccggtcactttggacttctcgtcaccggtcgtcggacctatcagtgctcagtcgctagtgccaccagcgcctgctgctaccactgctgctgtgatgatcctagatctgagactgactctgatcctcagcttgcatttgcgcttctgcctcgaccggatgcaccctcacctcctccttccacttctgggccgactagatggtgccttggagcagtgtcgcatccgagtgtcctcctgccagacgctcgtccacaagctcgactacgcctag

SEQ ID NO: 24367 - DNA, 300 bp, Zea mays
  Peptide Sequence Number=SeqID_66146
atggcgtctccttctctggttgcagctgtggaacagcagctgccgttgtccctccctggctctagctctccaagccgatgctgttcgctgcccctctccaagctgacgccccaactatggctgcctcccccacaccagcaccttccccatggccgagcttgtccctgcagcatggatgctgtccccctccccacgctagcagcaagcagtgccctcccctttctgcagcaagtggatgcccccagcccctcccttgttcccctggccggccacctctgctgctcccatggtgatctctaa

SEQ ID NO: 24368 - DNA, 396 bp, Zea mays
  Peptide Sequence Number=SeqID_66147
atgggcgatgacaacaccgcagctgcttttcctctaaaccccgagttagatgattgcacaaacgtggatgctatggcaattcttcctgctccacagaagattaatcatctagaggttttggcaatgtctagaatacaatctgtgtgtgacaagtttgtgaaggggctcattcctgtgcatggttcaaatctgaaggagttagcatttgctggttgcttggaacttacctcatcttccatcaagactgttggggaatattgtcaagaattaacttcattggatctccgcaacttgaataggctgcgtgactcagcactgtggcatcttcgtggttgtaggctactaaggaaactaaggcttcaaagaaacacatttagcttctttctggcattctaa

SEQ ID NO: 24369 - DNA, 858 bp, Zea mays
  Peptide Sequence Number=SeqID_66148
atggcgtggatctggatggtcctcgcggcgggagccgtgctcctgtgggcgatctctttggggcgggtcctctcctccgccgcgccgtcctgtgtgccctcgagcccgcagttcatgccccctctcagcggtgacaggaggagccggaacgtgctgctggtcgtcgcccaccccgacgacgagtccatgttcttcgctccaaccattcttttcctcaagtcgaaaggccacagtattcacattctgtgcatgtctcgaggtaatgctgatggtctgggagatactcgtaaggaagaattgtaccacgcctgtgtcagcctcaagtttctgaagcagatcatgtcattacagattccacatgaacaagtcaaagtcttggaccacccaaaattgcaggatggatttcatgagaaatgggaccatggactagtagcagaacttaccatggagcatgtccaactgtgggccattgacacgattgttacatttgattcatatggagtatcaggtcatccaaaccacaaagatgttcatcacggcatatgcaagtttctccatacgaacaggcaagggaacgtggaagcttgggaactagcaagtctcagtattcttcgcaagtacagtggtccgattgacatttggctttcttcattgacgtccttcgcatggacaaaacagccaatctatactctagttaacagtagcccgtccagaagctatgaggcaatggctgcacacagaagtcagtgggtttgcgtactggagatcaatccacgtagcctctataagttcataacaaagtttctggttgcatcatattcatatcgttactcgcaagatatcatgaccaacatataa

SEQ ID NO: 24370 - DNA, 2445 bp, Zea mays
  Peptide Sequence Number=SeqID_66149
atgccggaggcggcgcgggcgcggggcctgcgggaaccggcgggcgagggggaggcggagcaggaggacgagttctacgagtcgctggatcggatcctctcctcctcctgctcctccgcctccgcctccgacgacgacgccgaccaccgccgccgccgcagcaggcgccaccacctcctccaccagcaccagcaccagcaccagccgctgtcctccgcgtacgacgtctggatctccgagccaacctccgtggaggagcgccgccgcctcctgctccagcgcctgggcctcgcctccgacccgccgcctcgccgctcgccgtcgcctcccgcgtctaccccggcgtcgccaccggcgcccccggaggagcccagatccggcgccgggctcgggagccccccgctgacgcggaaccccagctccagcggcggggagcagcaatgccggatccggaacctggacgacggcacggagttcgaggtcggggaggtgcacgaggaggaggtggtgcgggaggtgggcaccggccgccacctcaccttcgaggagttcgagctctgcgttggccgctccccgatcgtgcacgagctcatgaagcggaccaccaccgcggcgtccgcgtccgcctccaatcacgccgcgcccgcggccagcaagccccggaggaagcccgggggcgggtggctgcggggcatcaggcagctggcgggcaccgtcgcgtacgggaggcgcggcgccgacgatggggacaaggagaaggagaaggagaagaaggagagggaggcgcggcgcctcagctctgccaccgatgacagcctcgatggcgccggctcgcgcgatgtaaggagggtccaggtgcgacagtacgggaaggcgtgcaaggagctcaccgggctgttcatgacgcaggaattggctgcccactcgggctccgtgtggtgcatcaacttcagcctggatggacgataccttgccactgctggagaggatcgtgtgatccatgtttgggaggtgtctgagggagacagaaagggtgagttgctcggggaaggttcgctggcaaaggagaatggtggtggctgcagcccgtttctcacgtttcttgggaatgattcaccggagatcgctgcattgtcattcacctgcgctgacatggataagaagagaaggctgaggaagcagagcaatcggaagtctgtagggtctgatcatctggtcgttcctgagtgtgtgtttggtttcagagacaagccagtttgctcgcttctggggcatgccgctgatgttcttgatctgtcatggtccaaatctcagctcaatgttcttcagacagaaaagaaacgcttgattcttgttgtgatgatttctagagatcttgctactgagcactacacaaagttcacagtgaagtttcttgctgcttctaatttgtacctgatctcatcctccatggacaaaactgttaagctctgggacatcactaccagtacctgtttaaaaacattctcacatacggactatgtgacttgcatccagttcaatcctgtggatgacaacttcttcattagtggatcactggatgagaaagttcggatttggagtgtccgtgaccgtaagattgaggattggaatgatcttcatgagatggttaccgctgcttgttattcccctgatggacaggttgcaatggtgggctctcacaagggatgctgtcatatatttgatacatctgagaagaagcttctgtacaaaagtcagatagatttaagaattaggaaaaagaaatctggccagaagaagataactggattccagtttgctcctggaagctcatcggaagttctgattacttctgcagattcaagaatacgtgttgttaacggcgatgaatttgttcacaagtttaaagggcttcggaacacgagtagccaaatctcagcttctgtagctccgaatgggaaatacatcatctgtgccagcgaggattctcacgtctatgtgtggagacatgacaacagttcccaccctagtaggaacaggatcacagttgatgtaaccaactcatatgagcatttccactgccatggcgtgaccgtggctgtcacatggcctggtgctgaagcccggggctcgtttggatctcgaagcagcaggcacagcgattcagatggagcagtgaactctggccgagacatcccagctgagaacagccagcacaattctgacgcaggcaccagtagacatccaggcgatagagcatccacatcctggcctgacgaaaagttaccgtcagccaagagcagccctggtcactgctcgtccgatctttgcattggagctatggatgtccagcgccggtctgcgtgggggttggtgattgtcacagctgggcggggaggcgagatcagggtgttccagaattttggcttcccggttcaagtgtaa

SEQ ID NO: 24371 - DNA, 543 bp, Zea mays
  Peptide Sequence Number=SeqID_66150
atggaatgggatggcactatgccagtggcagcggcggtagcgagagagacgttagccgtcaccgtcgagtccgacctggatcacaatcagctcgcgcggcgttggttggctggtctggtcactactcactgcctcactggtgtgtctcgagcggaggggtcgttggttgcattgcacacatggggactggagtggggaggggaggccgccgccggaccggacaggcgtccaccgcatgcagcagagatgctcttcttcggcgtacgtgaagctacctcgccacttgaccgtgcggcgtgcgtgcgttcgagtggtattggcctagggcccgccatgcatggtctacaggagcaggagtctggtagtgccacgagcacggggaagggcaggacgtcggaccgggtcgtcgtcggcgtacacacgggacgggatggacggacggagagcggttctgcttctgcctgcgtgaccgtgacctgggtttgtttgcctatcgaggaaacggccgtctgcacgcgagggcaggcggcctctatcgcttag

SEQ ID NO: 24372 - DNA, 462 bp, Zea mays
  Peptide Sequence Number=SeqID_66151
atgtccggtgcaccagaggactccgacttcaaactcatcaccttcgggaaattccagaggcgtctccgctataattcaccggactgtccggtgtacaccggacatgtccggtgctccaaggaagagcggcctccgaaactcgccagcctcgggaattcatctcaactgctccgctataattcaccggactgttcgttgtacaccggactgtccggtgtaacagcggggcaacggctactacggcgccaacggctacctgcaggcgcaattaatgcgcgccagcgcgcgcagaggtcagacacgcccatgctggcgcaccggacaatctacagtacatgtccgaagccggcgcgctataattcaccggactgtccggtgtgcaccggacatgtccggtgctccaaggaagcgcggtctccggaactcgccagcctcgggttcgcgtggcagccgctccgctaa

SEQ ID NO: 24373 - DNA, 423 bp, Zea mays
  Peptide Sequence Number=SeqID_66152
atggcctccttcttcgccgacgacggcaccgatgacctcccacgcaccacttcccaccccttcgactccgatgacttcggcgccgccgcggccgacgtcgccgccgccgacggatacggcgggtacgcctctttcgccgaggggggtgtcgaggaggtggacgaggagatcaccgtcgagtccgatggggtcccgatccgccacgtctccggggggtactcgccctcgccgttctcccccgagctcgagcccaacggcggcgacggcccgatcctaccgccgcccaccgagatggggcgggacgagggaatcctcctccgcgagtggcggagggctagattggcaacaccattttcccaagagattctcgttttcccaaagaaaactgaactaatttcccttgggaaaatggaaatcccttga

SEQ ID NO: 24374 - DNA, 1173 bp, Zea mays
  Peptide Sequence Number=SeqID_66153
gtggagaggccaaaagtcccagagatggtacgcgactacgcgtcgtcggccggcgccgtccgactccacctgcagccgcgggacccgcaccgcagggtagacggacagaggccgtggctgcgctggccccgtatgggccccgcgcgtcagtcgcggctttctcgcgtcgcccccggacccggggatgggagggacgcgtgcccgtgctcctccagtcctccgtccgcactcccactcccactcccacagccggtctccctctacccacgcaacgaatacaatacaaacagagggaagggagcgagcgggaagccaaggtggggaaagcagggaagcgaggccaagtggagcggagcggggcttcggctgggttccgcgcgcggccgctcgctacttccagtgttccatggtgtgggtgtgggcggctgtggcgatagccggagcctgaagcggcgggtggtgtgtggtgggcgcaaggagccacacggagcaggccgccacggcgaggaggaggaggaagaggaggagatggtcgtctgctccacgcgcaagtcgttcaaggactcgctcaaggtgctcgaggccgacatccagcacgccaacaccctccccgccgcccacttcttcctcttcctcgtgcagtggaccgactgcagcctagccggcgcgctcgggctgctcaggatcctaatctacaaggtggtttctcttctcctgcgatgtgctgttatctttccctccctgatgcaactgcccaaggggatcagcgacgtggacgaccggaggcagaaggcggcgtgcacggagaggtaccggaggagggacgaggacgagggcaagaggccggtttcggaggccgacatcgaaagggaggaagagtgcggcatctgcatggagatgaacggcaaggtggtgctgcccagctgcagccatgccatgtgcatcaagtgctaccgccaatggcgatcaagatcgcaatcctgccccttctgtcgggacagcctgaaacgagtgaactccggggacctgtggatgctcaccgactgccgggacgtggtcgacatggcgacggtgacgagggagaacatcaggcgtctgttcatgtacgtcgagaagctgcccctcgtcgccccggacaacatcttctacgcctacgattctcatgtaaaatag

SEQ ID NO: 24375 - DNA, 453 bp, Zea mays
  Peptide Sequence Number=SeqID_66154
atggacggcctaactctaaagttgattggtggggcaagggcgctgatgaagaatatacaaaagaatgacgatgctgatgtgaaacaaccaaatagcgcaatcactatggatgtatttttgaatagcaactgggaagaggatttccccgctgacccatcaggcaagtttgaggatttcaagcacttcgtgagatcaaatttcgagatatgtgaatgggtaggcctctcagtggtggctgctcaggtgttatcgatcattcttgggatggtactcaggacccttgggcctgaccgtgagaccgactatgacagtgatgatgacgtgaccgtgcctgcaaggctgcctcttttgataaatcagtcccagcatggttcatactatgctgaacctaacacgtctggaaggagtgattcatggaaactgcggattttagacaaggtacggcgcgcctaa

SEQ ID NO: 24376 - DNA, 803 bp, Zea mays
  Peptide Sequence Number=SeqID_66155
atggcgggctccgcggtggccgtcgtcctcctgtcggccgtcgcgctgctctgcctgtaccacctccttttcctctccctgtccgtcccggacccggcagcagcagcagccgtcccccgccgcgccggtggccaccatggcagcaacgttccgtccgggtcaggaaccgccaacgtcgtcctccgcttcggcctgtccgggcagccgctccgcctccacgaccccgcctccgccgccggcctcccggacatcgacaccttccgcggcaagctcgagcggctgcttcctcccgacgaccacgaccccggctggtcccgccgcttcgacgccgagctcggccccgtgcaccggtacttcggcccggacgcgccgctggacgtgcggcagcggatcgcgtacctgttcgcgatcctcgaccggtcgcccaggggcgtcggcgtcggcgtcggcgtcggcgagctggaggcctggctgcgctggcaggccgccgcccggctggacgccgtcacgcggagggagatggctccgcacgacacggaccgcgacggtgccgtcacgctgcgcgagttcttcgcagacagcagccaagagagcgtgatgctgtggctactcaaggacaagctaaggcacagcagcgagatggaccatgacggagacggcaggctaagccaggaggagttcgtcgctcaatctcacatcatcatctccggcgcgcgtcacgccgacgacggtggccatgcccatgaccttgagcgtgccgaagctgcgaagaagttcacagaactggacgccgacaaggacaa

SEQ ID NO: 24377 - DNA, 1422 bp, Zea mays
  Peptide Sequence Number=SeqID_66156
atggcggcatcggccaagggacggctcgtgcccgtgctcgcggtggcggcggcgctcgcggccgtgctcctctaccgcgcgcccttctccaagagcttgggcggcgaagggtgcagcctcctcccgcacgaccacttctggatcgccagcgaccgcgtcgtcacgctcggacgcgtcggccccgccgcagtagaggtcaaaggagggctcatcaacgccatcgccgtcggggactaccggagcttcgtgctccgccgaccgctccttgactacggggacgccgtcatcatgcccggcctcatcgacgtgcatgcccatctggatgagcctggacgtgccgagtgggaaggcttctccaatggcacaagagcagctgcggcaggtgggataacgacgctggtggatatgccactcaacagcttcccgtcaacagtctctgaagaaactctcaaactgaagctggaagcagctcgggataagctatatgttgatgtggggttttggggaggccttgtgccagagaatgccttcaacccaagtgctttggagggcctcctaaaggcaggcgttttaggactcaagtcttttatgtgcccctcaggcatcaacgactttcccatgacaaattcaactcatatcgaagaaggattggttacactggcaaaatacaagagatctttacttatccatgcagaacgtatacctgaggctgaggatcatgatttgcaagaagatgaattagatcctcggtcctatatgacgtatctgaagtctagaccaccatcatgggaggaagcggctatcagagatctgcaacgtgcaatgaaggatacggagttggggggtcggtccgaaggagctcatattcacattgttcatctatcagatgcaaaaactagcttggaacttatgaaggatgctaaacgcagtggtgcaagtctgtctatagaaacatgccctcattacctggcattttcgtctgaagaagttccagatggagatactcgctttaaatgttctcctcccatacgtgatgacacaaacagagaaaatctttggaaagctctgcttgatggacacatagacatgctaagttcagaccactcaccatccactcctgacctcaaactaatggaggaaggcgactttttaagggcatggggaggcatatcatcattgcagtttgtcctcccggtgacatggtcatatgggcgaaagtatggcgttactctgaatcagctagcctcatggtggagcgaaaggccagccaagcttgcaggccaaaagaataagaatatttcagcgtatttaggaaagcaactttctggtaaggtcctgtcgacttttgtgagaggaaatcttgtgtttgctgaagacaagcatgcaaatgctgcttgtggtgttcctatcctcgctaagtaa

SEQ ID NO: 24378 - DNA, 2301 bp, Zea mays
  Peptide Sequence Number=SeqID_66157
atgaggctctcgtcgtcgtccggcagcgtcctgccggctcagccgggctcgccggaagctgtggaggagcacaagtgcctgaactcggagttgtggcatgcttgtgccggcccgcttgtttccttgcccgcggtgggtagccgagttgtgtacttccctcagggccacagcgagcaggtagcagcatcaacaaacaaggaaatagagtctcagatccccaactatcctaatctgccgccacagcttatatgccaacttcataatgtgacgatgcatgctgatgcagagacagatgaggtatatgcacagatgacactacaaccactcaacccgcaagaactgaaggacccatatttacctgcagaattaggttcggccaataaacagccaacaaactatttctgcaaaacattaacagcaagtgataccagtacccatggtgggttctccgttccccgtcgagcagctgagaaagtgtttcctccactgcaacccccatgccaggagttgatggcaaaagatcttcatggcaatgagtggaaattccgtcacatctttcgtggccagccaaagcggcatcttctaactacaggttggagtgtctttgtaagtgcaaagagactcgttgctggcgactctgtcctttttatctgggcaagcccttcagagtttgtcataccactcgtaaagtatgttaaggctgtgtatcatacccgcatatctgtggggatgcgattcaggatgctttttgagacagaagagtctagcgttaggagtctaaccagatcaaatgcattcaattccagatacatggggacaattaccggaatctgtgatcttgattctgttcggtggccaaattcacactggcgttctgttaaggttggctgggatgagtcaactgctggtgagcgacaaccaagggtgtcactatgggagattgaacccctgacaactttcccaatgtatccatctccttttccgctcaggctcaagcgtccatggccaacaggcttgccttctctgcatggtgggaaggatgatgacctggctaactctctcatgtggcttcgagataccgcaaatcctggttttcagtcgttaaattttggtggacttggtatgagcccttggatgcagccaaggctggatgctaccttacttggtctgcaacctgacatgtatcaggcgatggccacagctgcttttcaggatgcaacaaagcaggcatcgcccacaatgctgcagttccagcagccccagaacatagctggccgggcttccccgcttctttcaagtcagattttgcagcaagcacatcatcaatttcagcagcaaccgtaccttcaaaacatctctgagagcacaatccaagcacagggtcagtctgagttcctcaagcagcagatccaacgcagccagtcattcaatgagcagaagccccagatgcaacaccagcaagaatcacagcagcagcagcaaccacagttttctcagtcttcacctatggcgctgcagactatattaccgttctcgcaggcacagagcttcacagacacgaatgtaggttcattgtctccatccaatggtaacaccatgcaaaacacactgaggccgttctcatcagaagcagtttctcacctcagtatgccgaggcccactgcgatacctgtcgcagacccatggtcgtcgaagcgtgtcgcggtggagtctctgcttccttctcggcctcaggtttcatcccagatggaacaattggaccctgcaccagctagtatacctcatagctctgcgttggcaccacttcccggaagagggtgcttggttgaccaagatgtgaactctgatcctcaaaatcatctcttgttcggtgttagtatagactcgcagtcactgctaatgcaagggggcattcctggtctccaaaacgggaatgattcagctgctataccttattccacttccaatttcctcagcccttctcagaatgactttcctctggaccatacactaaattcttcaggctgcttagatgattctgggtacgtcccgccatgttcagataattctgacaaagtgaaccgaccaccagcgaccttcgtgaaggtttacaaatctggaacctacgggaggtcgcttgatatcactaggtttagcagctatcacgagctccgtagggaactggggcgcctatttggccttgagggccagttggaagacccattgagatcaggctggcagcttgtattcgtcaaccgtgaggaggacgtccttctcgtgggcgacgacccttggcagtaa

SEQ ID NO: 24379 - DNA, 384 bp, Zea mays
  Peptide Sequence Number=SeqID_66158
atggcggcactaagccgcttcatctcacgtctaggtgaaaggggcatgtcattcttcaagttgctcaagaagacaaccctgctcaaagattatttcaaaatcgtctcaaagattggggcttgtgggggacagatatcctcgggtccactagaagacgaaaaccctgcttggagccacaagccagtcgtcccgcaaggtcgccacgtcgcaggccaggcaaagacaacgatggaaatgggccgacccaggaaggcgatgggctcacatccggattattcgcggattgggcgtgatcctgttgaagctgctcgcttttcccgcgcccgacgtcctcaaacgccggtgatagctcgaaacggagatgtcgggttttcctcgggataa

SEQ ID NO: 24380 - DNA, 303 bp, Zea mays
  Peptide Sequence Number=SeqID_66159
atgaaggccctggacctccctgttatagatgcaaggagagggtccaggtgtacaatggggggtaatgatgtatcccccgtggcacggtcggtccgagcccaaggttgggcgaggcggagactcctcctgaggccgaggccggggtcgggcgaggacgtggttcctcccgaggtcgaggttgaggccgagccctggggtcgggcgaggcggagaccaccttccaaggccgaggttgaggccgagccctggggtcgggcgaggcggagaccaccttctgaggtcgaggtgggggccgagccctag

SEQ ID NO: 24381 - DNA, 1413 bp, Zea mays
  Peptide Sequence Number=SeqID_66160
atggacgagaggaggactattttgatggaccgttacgaaatcgggaggcagttaggccaaggaaacttcgccaaggtatactttgctcggaacctgaccgacgggcagtccgttgcgataaagatgatcgataaggacaagatcacgagggttgggctaatagtgcagataaagagggagatctctataatgaggctggtgaagcatccgaatgtcctgcagctcttcgaggtaatggctagcaagagcaagatctacttcgtattggagtacgctaaaggcggcgagctgttcaacaaagtatcaaaggcgaagctcagcgaggatgccgcgaggaggtatttccaccagctggttaatgccgtggactactgccacagccgaggcgtctaccatcgcgacttgaagccggaaaacctactcctggacgagaacgagaaccttagagtctcggacttcggtctgagcgccctgtctgaatccagaaggcacgacggcctcctacataccacgtgtggaacccctgcctatgttgctcctgaagtgcttggtaggagaggctacgatggcaccaaggcggacatatggtcctgcggagtgattctcttcgtgctcgtggctggttacctgccgttccacgacccgaatctcatcgagatgtacaggaagatctccagagctgaatacagatgccctcgctccttctccggtgagctgaaggacctgcttttcagaatgctcgatccagatcccagtaccaggatatccatttcaaggatcaagagaagcacttggtacagaaaacctatcgaggcaaacgcggcaaagatcaagcacggcacagcaagagacaccaccgtgcgcgacggtgaagccgccacggcctcgagctcgatagagtgcagtaaccggccagaggaagaccaagggtcgtcaagcctccctaacctgaacgcattcgacatcatttctctctcgaccgggtttgacctatctaacctgttcgaagaaagacacgggcggagggaggagaggttcaccaccaggcagccagtgggagcggtgtttggtaggctgaaggagctggctgagcggttgaagctgaaaatccagaagaaggagagcggggtcttgaaactggctgcgcagaaggaagggatgaaggggttcctggagctcgacgccgaggttttcgagcttgccccttcgttccttctggtcgagctgaagaaggccagcggtgacaccattgagtaccaaaggctcgtgagggaagaagtgcggcctgcgctgaaggatatggtctgggcttggcagagcgaccggcaccagcagcagcagcagcggtgcgagcagtctgtgcaaggagaggaccagcagcagccgttgtcgtctttgccgacgcagcagtag

SEQ ID NO: 24382 - DNA, 2985 bp, Zea mays
  Peptide Sequence Number=SeqID_66161
atgtcactgggccccacttgcctaatttctccaagggcccgatgggccaacggcccacgccgctcgttcttttccctctttgttttgtccctccttttttcttgtgcatcgtttgcctggcgccgtggcgagaaggcgagggaatggatgcggcgggcggctatcgccggtggcgagggcggcagcaggtccaaggaagccggcctcgcgcacgcgggagttgccacgcctcgagtagaagaaggccccggcgcgctcggggcacgccggtatattgccacgccgaggcgccgaccgcggggaggcgtcagacgtgtggatgcctggccgcccgcccgcccacgcatctcaaccgcctcccgacgctttctcttccatgcgcgcgtcttggtcagagacaggcagatgcaggtgcgcgtgcccaagtcaacatttccttctacttctaccattcgccgactccttgtgccatccggcctaacctcttgtgatgctcaaactgcagcattgatcaggccatcagaagtagtaggggcagaggaggaggactgggagcttttcttgttgcagtggaggcagcataattctcttccatccccacttctcaatggggatctggtggatagaatatggtcaatttgcttaccagacatggccggtgcacaggaaatattgggcaatccactgcaatttgcttcagatcagctattgagtcagccatcagaaaatgctttgaaggcaatgctgtttctggagtttctgtctcttctttcccctgaaaaattatccagtacctatggttgcatccatgcaaactacttcggtttgggcattccacaagaactcagtgtttcactggcaacctaccttgagagccatcagctgttgcttggttcgaacttctatgcgagacggcatttggctgacaactcaattggagatgctccttccatggctccagattttgcgccgtccatgtcctctggcgatgacgtgaagcttcctcagtctgttacagaaacaccgtatgcaccttccagctcttacaacaatgaaaatccaaaccgacctcatcacagtaaacctgcacagaagcatcggggagtacctccaatttcacttctggagaagcataaagactatgttagattagtcttgatcgtggttctaccaacagcggcattctcgttcattgctgcttttctaattttctactgctgcggatgcaacaagaacaaggtctctgtcggttcatcacccgatgcccgtgtttctgccagtcaccttaacaaggataatcgaagtcattctggagtcagcatgagtcggtgcttttcatgctgttttaaaagatccactgatgccacaccatcttcagaagtgattggaggaacaccagagaataatgtcacaagtgatgctcctaaaccgatgtcgcctccagctcctccacctttgccacctccgatcaagaaggctcctcctcccccacctggacctcccagaggttctaaagcaagacttgctcagctgtcacctgttgagtcaagtcgttctgaaggatcatctgccagcgagcagaccagcgaatcatctgaagcagaagttaatgctccaagaaccaagcttcgacctttctattgggacaaagttcttgctaatcctgatcagtcaatggcatggcatgatatcaaattcggttcttttcatgtgaatgaagatatgatagaggaattgtttggttatagtggtggaagcagaaataaccttaaggataaggaactcccctctgcggatcctgcatctcagcacatttctcttctcaatgttaagaaatcatgcaacctggcagttgttttaaaggcaatgaatatcagggtacaagacattcatgacgctcttattgaagggaacgaacttccaagggtgcttcttgagacaatcttgagaatgaaaccaactgacgaggaggaacagaatctcaggctttataacggggatttctcgcagctaggccttgcagaacaagtgatgaaggcattaattgacacgccttttgctttcaagagggttgacatgttgcttttcatgtcctccttgcaagaagatgcttcaagtctcagggattcgttccaccaattggaggccgcttgtggggaactgaagcaccgcctttttctcaagttactagaagccgtgctcaaaactggaaaccgtttgaatgatggaaccttccgtggtggtgctaatgcattcaagcttgacactctcctgaagctatcagatgtcaagggtgctgatggaaagaccacattgctgcactttgttgtgcaggagattgttcggtccgaaggtgtccgcgaagcaaggctagccatggaaaacggaagaagtccagctcatagtgcttcagatgacacttccaatggatctcttgaagaggacggtgatcactactccaaccgcggacttagcattgtgtcaggacttagcagtgagatggacaacgtcaagagggtagccgcactggatgctgagcctctgtttgccactgtggtgaccctcagacaagagttgctgaaatcaagggagttcctgaatgaaattgcgacagtagaagagacgagtggattcagacgttcgttggaaagctttgtggaacacgcggataatgagacggggtttttgttgaaagaagagaagaggttgagatcgttggtgaagaaaacaatccggtatttccatggaaacgactctaaagacgacggtttccggttgtttgtggttgtgagagatttcttggtgatgctagataaggcgtgcaaggaggtcggggcatcacagaagggtacgaataaatcacgaagcagtggcagtggcagtggcaatggcaatggcaaccctacgttcccgtcaatcctacaggagcaacagttccctgctgttattgatggccattcagatagttcacatactagcaattga

SEQ ID NO: 24383 - DNA, 273 bp, Zea mays
  Peptide Sequence Number=SeqID_66162
atgaagctgtggaaggagacttccaggagttccaagactacgacgagttctaggtgtgggttagcggcaacccccagtcggctgcctgtgaaggccgcgttatctacgtttcttttccgcactttgatttattccacgaagtccgtcaagacttgggactttatggccttccgaggagcgaacgagattgtcttgcccatgagttccactgcccactttgctattgtaggatctaggacaccggctagagggggggtgaatagtcgtttttga

SEQ ID NO: 24384 - DNA, 2331 bp, Zea mays
  Peptide Sequence Number=SeqID_66163
atgcccggcataccgagggatgtcgccgagcactcgctggatattcgggccggaggccgacctgtcaggcagcctctgcgccgattcgacgaggagaagcgcagagtgataggcgaggagatccacaagctaatggcagcagggttcatcaaagaggtattccatcccgaatggcttgccaaccctgtgcttgtgagaaagaaaggggggaaatggcggatgtgtgtagactacactggtctcaacaaagcatgtccgaaggttccctaccctctgcctcgcatcgatcaaatcgtggattccactgctgggtgcgaaaccctgtccttccttgatgcctattcagggtatcaccaaatcaggatgaaagagtccgaccagctcgcgacttctttcatcacgcccttcggcatgtactgctatgtcaccatgccgttcggtttgaggaacgcgggcacgacgtaccagcggtgcatgaaccatgtgttcggcgaacacatcggtcgcacagttgaggcctacgtcgatgacatcgtagtcaagacaaagaaggcttccgacctcctctccgaccttgaagtgacattccgatgtctcaaagcgaaaggcgtcaagctcaatcccgagaagtgtgtcttcggggtgccccggggcatgctcttggggttcatcgtctccgagcggggcatcgaagccaacccggagaagatcgcagctatcaccagcatggggcccatcaaggacttaaaaggcgtacaaagggtcatgggatgtttcgcggccctgagccgcttcatctcacgcctcggcgaaagaggtctgcctctgtactgcctcttgaggaaggccgagtgtttcgcttggacccctgaggccgaggaagctctcgggaacctgaaggcgctcctcacaaaggcgcctatcttggtgcccccagctgatggagaagccctcttggtctacgtcgccgcgaccacccaggtggttagcgccgcgattgtggtcgagaggcaagaagaggggcatgcattgcccgttcagaggccagtctacttcgtcagcgaggtactctccgagaccatgattcgctacccacaagtccagaagctgttgtatgcagtgatcctgacgaggcggaagttgcgacactacttcgaatctcatccggtaactgtggtgtcatccttccccctgggggagatcatccagtgccgagaggcctcaggcaggattgcaaagtgggcggtggaaatcatgggcgagacaatctcgttcgcccctcggaaggccatcaagtcccaggtattggtggacttcgtagctgaatgggtcgacacccagctaccgacggctccgatccaaccggagctctggaccatgtttttcgacgggtcgctgatgaagacgggagccggcgcgggcctactcttgatctcgcccctcgggaaacacctacgctacgtgctacgcctccatttcccggcgtccaacaatgtggctgagtacgaggctctggtcaacgggttgcggatcgccatcgagctaggggtcagacgcctcgacgcccgcggtgactcgcagctcgtcatcgaccaagtcatgaagaactcccactgccgcgacccgaagatggaggcctactgcgctgaggttcggcgcctggaagacaagttctacgggctcgagcttaaccacatcgctcggcgctacaacgagactgcggacgagctggcaaaaatagcctcggggcgaacgacggttcccccgaacgtcttctcccgggatctgcatcagccctccgtcaagatcgacgacacgcccgagcccgaggcaccctcggctcagcccgaggcaccctcagctcggcccgaggcgccctcggttcagcccgaggtaccctcggcccccgagggcgaggcactgcacgtcgaggaagagcagagcggggccacgcctgatcgaaattggcagaccccgtacctgcaatatctccgccaaggagagctaccccccgaccaagctgaggctcggcgggtagcgcgacgcgccaagtcgttcgtcttgctgggcgatgagaaggagctctaccaccgcagcccctcgggcatcctccagcgatgcatctccatcgccgaaggtcaggaactcctgcgagagatacactcgggggcttgcggccatcacgcagcgcctcgagcccttgtcgggaatgctttccggcaaggcttctactggccaacggcggtggttgacgccactagaattgtccgcacctgcgaagggtgccaattctatgcgaagcaaacccacctgcccgctcaggctctgtag

SEQ ID NO: 24385 - DNA, 786 bp, Zea mays
  Peptide Sequence Number=SeqID_66164
atggggagacgattccacaagggaatttggctggggatggctgtggaagcaggtccacactgtaacacccctggtgtttatattccgctcgccaacgagtatggatttaagcaccgcgccctgatcttttcctccgcctgcgcgccgtctttatcccgcccgcgcggtcttcttccagtcgcgcagggttctctgcgcgcaactctctctttccccaagctctctcacgccgcgctcccctactccagctctggagcacccctgcgcgcgggtcctttcatggcgtccagtcgctgctcctccggcgcccgctgcgagtcccctccctctgctcagcccaccgcgccagctctctaccggccgctctcactcctgctcttccatggccgcggcaatgtcctacttctccaccgggtctcgcacgctctggagctccagtcgtcgcgccctcctgctccctggttcaagtttctgcgcgccgagctcccttcagttctccggcgtcgcgcgctccccgtggtcgacattcctagccctccgctcgccgagctccatgcacgcacgccccatcccgcctacgctcggaccgcgccctcgctgctggtgctcgccgaccccggttgtcctgctcccggctgtgcttgcccaggtcgccgccatcgagtccctgtgcgcgtagccatgtccctctgttcaccgtggccggtaccctgctcgcgccgtggttctcttccagctccctgcgcacgcgccgccgtcgagttctctggtgtctgcgcgccgtga

SEQ ID NO: 24386 - DNA, 867 bp, Zea mays
  Peptide Sequence Number=SeqID_66165
atggcgatagcggcggtggggaacaacctcatcacctacgtgttcggggagatgcacttcccgctgtcgcaggcggccaacgtggtgaccaacttcgtcggcaccatcttcctcctcgccctcctcggcggcttcctctccgactcctacctcggctgcttctggaccatgctcatcttcggcttcgtcgagctctcgggcttcatactgctgtccctgcaagcgcacctgccgcagctgaagcccgcgccgtgcgacatgtcgtccacggacggcggctgcgagaaggcgagcggcttcaagtcgaccgtgttcttcctggcgctgtacctggtggcgctgggcagcggctgcctcaagcccaacatgatcgcgcacggcgcggaccagttcgacgccgccaccccgggcggcgccaacagcctgcccacctacttcaactcggcctacttcagcttctgcgcgggcgagctggtcgccctcacggcgctggtctgggtgcagacgcactccggcatggacgtcggcttcggcgtctccgcggtcgccatggcggcgggcctcgccagcctcgtcgccggcgccgccttctaccgcaataagcccccgcagggcagcatcttcgcgcccgttgcaaggagtgcaaaactgctgcttttgaccgtgcgaaattcaccaggttttcgtcgctgccttcaccaaaaggaagcaagtctgcccttccagctccaattctgtcaacgccggggcttgcgagccggcgcgcctcgccggcaacttccgccacaacaacaaattcaggtcagcatagcgttgatgcagcgaacagaacggccacctgttgctgtcagcacttgcgacctctga

SEQ ID NO: 24387 - DNA, 219 bp, Zea mays
  Peptide Sequence Number=SeqID_66166
atgaaggtgaagatcatgcaggctcatgtcgatgggccaagagtggcgaaggacgagcgttgggccttgatcgagggaatggagaagctggcgcgaagacgtgctagagtggatcgtgtcgtcggcgtggccgaggactggcgggacaggtgtccaggacgtgtctccctagccattcacaatatgaaggatgctgcgatgagttcggagaggtattag

SEQ ID NO: 24388 - DNA, 435 bp, Zea mays
  Peptide Sequence Number=SeqID_66167
atggacatctccatcttccttttctttgtttccctttcagtcgatctagcgccctgcgccgccttgccgtcgtcgcctgatgtgttcgccgacgtgccagtgcgccttctcactagccgttgggacctcgacggtctaggcctcgatgccgacgcgctctgcctgcctgccacctatttggcgtcttatatggccacgccgtcgccgcctgatgtgttcaccttcgtgccagtgtacctactcgccagtcgttgggaccttgacggcctaggccttgatgccgatgttatcctcctattggcgcaccagtttagcgtattctacggctacggcggtgccgaaggacgcccatcgacaaggggaaccctcaaaagccacaactgcctctttacaggatcgtgtgtcgaccattctgtgaccccgctgcctccttaa

SEQ ID NO: 24389 - DNA, 811 bp, Zea mays
  Peptide Sequence Number=SeqID_66168
ctccgaacgtcgcgccaagccctgctcgagcgctatcctgagccctaggtgtcccacacccctcaccggagcctatgtcggcctcggcgcgcttgatcacccctccccgcggtcgggattgctcgctggagtaaccccgacccacccggagcaccctctccgtcgttttgccagcttccagccccgttctcacggccaaaaccccaccatcgagttcgccgggttcccatcacccgtcctgaccagctccggcaacctcaaccccctggagcccgcacctacctcatctatggcgacttcaccgccgcggacaggagcagcaccgcccgaagccaccaacaccccttggcgtttgatctcaaccgtctgctccggatccagcggcccagatcactggataccgatagcatgggcaccccctgcccctgggtcctacttgtcgatcgccttcgcccctggcgctaggcccgactgtgattcagagagtactcttggtccagcggcctggggctcctcgcctcctactcatccgtcaccgatgatcgactctgacgattccctagctttccctagagggaacaatccttcattcgagtggtggagcgccttggcctcgtcggctcggacgagtcagatgagggcgagcatgaaggctccgaggaagaggaggatgaaagcggtagcaacgggagcatcaacggctctggtgacgtccgcaagggttgacagtgtgggaggtgattgcggcggcgtcaaaggtgcgggcgatggcaaggacgaccatgctggtggtgaggtgccaccggcttag

SEQ ID NO: 24390 - DNA, 195 bp, Zea mays
  Peptide Sequence Number=SeqID_66169
atggcgccgccgcggtgccctgtccctggccgcacgggtggacggagggggaagagggcgcttggcccttggatggtaaaggtgcggttaagattagatctgggggctgatcattatgttaattggaacatggagcgaccacccgggaaaacagtgctaccacaagggtttaatgggacgcccttggctgattaa

SEQ ID NO: 24391 - DNA, 315 bp, Zea mays
  Peptide Sequence Number=SeqID_66170
atggcgggcgccccagttggatcccgaatccgccacgacagagtgggcgttcacagcgaggatttgaggatggccgagcagggaggagagcgcgctggatcgaggctgcggcgaggccgtaggtacccgcgacctgggcgagaaccagaggctggagggaggagagaggtcagcgaacggaggaagatccacaagcgcctgagaggagaggctgaccccggggcccgggctgtcggcgcacgcgggatggagtgggctgcgagaggaaaaacagcagatgggccgaattggcgacagaggcccaggattatttag

SEQ ID NO: 24392 - DNA, 753 bp, Zea mays
  Peptide Sequence Number=SeqID_66171
ggcatttcgccgctctgcgatgagccagggttgcggtcggcggtgttgtcctggctgccgaccctcaatgagagcggtgtggcggtccgccaaactggcggccgggacccccaccgagggatccatattcccagtgtaccacccggaggttcgcagcccgccgatgcgggctctagaccccccccccccccccccgcggcccccaactcctcggacaagggcaaaggggctgcgggcagcccttcctctccgggcaccactgggaggtcggagggagatatgcgacaccgactgcgccttgccgacgggtcttttgtctcagacccaccccttagttcggacttctcccaaaagcatcagaggatgactggcgaaatcgtggaggccagctcccaggcccagggtgcgcagaggcgcgtcagtcctccaccaccaccatatctgacccgccgccgccgccgccaccaccaccatcatcaggtccgccgccgccaccccaggggcagcagcagcatcaacagcagcaacagcagcagcaggggcagtgaacgtcccgcttctagggttgctggaaggttcagggccccaagcgtccgctgggagaggtgccggcgacctgcctccgcctaccactaccgaggcggcaccgtcgggcccctaggttccgtctaccattgccgaggcagcgccgtcgggcccctaggttccagctgggggtccggaggcagtagtgctgctgacggctacagctga

SEQ ID NO: 24393 - DNA, 369 bp, Zea mays
  Peptide Sequence Number=SeqID_66172
atgacgggcctcatgtcctttacctccctcgtcacctgcgaggtggccgtgaatgctttgtcccacgaggggtgcgggcatttcgaggtcttcgaccagtcagacgaaggcttcgaacgcgtaatcttccaggtcgaggacccgatggcgcatgacgaggaggtggaggaccttggcgatctaaacagcacgctgcccgacagcacgctgccggaggcctcgggggtggagctggcgccgtcgcccgatgcgggcaagggcccctcggcaacccccgcgccaactggagccgacgggtttcgacgtttgggcatgcgcaagcaaccgctactgacaatactgattttgcggcagagacttcaaccgtag

SEQ ID NO: 24394 - DNA, 327 bp, Zea mays
  Peptide Sequence Number=SeqID_66173
atggttggagcagaggtacccgcgcccatggagaagcctctgcgcgcaggggacaggaggggaaaaggaagctcggtcatggatgctggatgtgctcggctagggagggagcatggagagggagccggcttccatggggaagaagggaggccagccatgggagggagctcggccatggaggaaaagctcctgttccctgctccatccgaactagacaagggaacgagatggcgtggggaaaagtcaggcggctggtggaagagaagtggcggcttggggggaaatggaaaatttccaatttgcaagggagagagctactatttatag

SEQ ID NO: 24395 - DNA, 495 bp, Zea mays
  Peptide Sequence Number=SeqID_66174
atggcgtctttccctcctccctttcttctctcccaaggccgatgctctctgctccattccctccccagcgccccttcttcttccatggattgcagcagctcgaccctcctctccatggcgcaagctccatttttcagagccgccgaagctcctcccatggcgcaggatatcccaccagcgagctccctccctgtccatggccgccagcccctgctcctcttcgctctactacgcagcacccctctctgctcgaccagcagtagcgagcggcctcaccaaccttgccctggcgctgctcgccgacgatcccctgcagggcgccatcatggcctcgtcggggctcctgctcgccggcgagctcatgttgctcatggcgcctttccctgcctgctcgctgtccccaatgaccagcagccctcgcccactctgccctcccccaaaacagcagccatggtgtccaagttctctgcgcagcggtgccgttcaaaaaaatag

SEQ ID NO: 24396 - DNA, 519 bp, Zea mays
  Peptide Sequence Number=SeqID_66175
atggacgacccggtcctcggagtttggcggatgcgcgatggagatttcaagtcggtgaagaattcgtcgcggcaccataaaccacacagtgttcaaatgatccccacagaccccacaggcatccgcacagcgcccaaacccacaccgaaagcacaacactgtcaacacaaagctttcccttccatggtggttcacacacacagcgacgagctctgggtgtccccgggagcacgacgacctgggttggggaagagctcggtcgacggcctcagaacccgaaatcccaacctccccggcgaactcagcgctgttattgcgatagcgcgagggatggatgctgacgggtgggcccttgacgtcagcaacaccgaccacgcgcggcagcagattggacttcgtgaacggctgacctgcaggccctacttgtcggcgcaggaatacacgcccgtgagacagattgcccctgcccacgtgttggcgcgcgtgatccactgttgggccgcgcaggacagtggatga

SEQ ID NO: 24397 - DNA, 2406 bp, Zea mays
  Peptide Sequence Number=SeqID_66176
atggaggaagagcagagcccaaggctgggccgggatccggcgaccgagcccagtcctgcgccggaatggccggattcggacagcaagaacgacgacagtgcgaacgacccggaggaccctgccggcggcagcggcagcggcagcggcaacggcatcagctccttggagcagccgctgctcaagcggagcaccaccctgacggccagccacctggccatcgtcggcgccaaggtctcccacatcgagagcctcgactacgagatcatcgagaacgacctgttcaagcacgactggcggagccgctccaacgtcgaggtgcttcagtacatcttcctcaagtgggccatggcgttcctcgtcggcctcctcaccggcgtcatcgcgtccctcatcaacctcgccatcgagaacatctccggcctcaagatgctccagatggtcaacctcgtccgcgggaagcgctactgggcgggcttcctctacttcgccggcgtcaacttcgcgctcaccttcgtcgccgcggtgctctgcgtcgtcttcgcccccaccgccgctggccctggcatccccgagatcaaggcttatctcaacggcgtcgacacgcccaacatgttcggcgcgccgcagctcatcgtcaagatcatcggcagcatcggcgccgtgtcgtcggggatggatctcggcaaggagggcccgctggtgcacatcggcgcgtgcctggccaacctgctcagccagggcggcgagggccggtggcgcctgcgctggcggtggctgcgctacttcaacaacgaccgcgaccgccgggacctgatcacgtgcggcgcgtcgtccggggtgtgcgcggcgttccgcgcgcccgtcggcggcgtgctgttcgcgctggaggaggtggcgacgtggtggcgcagcgcgctgctttggcgcaccttcttcagcacggccaccgtcgtggtggtgctgcgcggcttcatcgaggtgtgcagggacgggcgctgcggcatgttcggcgagggcgggctcatcctcttcgacgtcagtgacgtcaccgtccgctaccacgtcggcgacctcctccccgtcacgctcgtcggcgtcctcggcggggtcctgggggcactctacaaccacgtcctccaccaggtgctccggctgtacaacctgatcaacgccaagggccggctggcgaagctggcgctcgccctcgcggtgtccgtgttcacgtcggcggggctgtacctcctgccgttcgctgtgccgtgcacgccgtgcgacccggcgttcggcgacgcgtgcccgacggtgggcaagtccggcaacttcaagcagttcaactgccccaccggctactacaacgacctggcgtcgctgctccacgccaccaacgtggacgccacgcgcaacatcttctccacgggcaccgccggcgaattcaggctcgactcgctgctcatcttcttcggcatctactgcgtgctggggctcttcaccttcggcatcgctgtgccgtcggggctcttcctgcccatcatcctcatgggctccgcctacggccgcatcctggcgctcgtgctcgcgcgcttcgtgaggatcgaccacggcctctacgccgtgctcggcgccgccgcgctcatgtcgggctccatgaggatgaccgtctcgctgtgcgtcatcttcctcgagctcaccaacaacctcctcctgctccccatcaccatgttcgtgctgctcatcgccaagacggtgggcgacgctttcaaccccagcatctacgagatcatcctcgacctcaagggcctgccgttccttgagcccaagccggaaacgtggatgaaggacctcgcagtcggcgagctcgcggccgccaagccgcgggtcgtcacgctgcaggtgatcgagaaggtgtccaccgtcgtggaggtgctgaggtccacgccgcacaacgggttccccgtgctggactggccgcggccaggcgtatcggagctccacgggctggtgctccggtcccacctgatggccgtgctcaagaagcggtggttcctgacggacaagaggaggacggaggaatgggaggcccgtgagaggttctcgtcgacggagctcgcggagaagtccgggagtatcgacgaggtggcggtgcagctgacgccggaggagctggacatgtacattgacctccacccgttcaccaacaccacgccgtacaccgtcgtggagaccatgtcggtggccaaggccgtggtgctcttccgcacctgcgcgctccggcacatgcttatcatcccaaagttccaagggcctgagatagctccaatcgtggggatcctaacgaggcaggacctgagggcacacaacatccttggtgcattccctcatttggcaaacaaaaggaaagtacactaa

SEQ ID NO: 24398 - DNA, 225 bp, Zea mays
  Peptide Sequence Number=SeqID_66177
atggcctcccgcttcacctgcagggcgccgccgaccgagcgcgcctgtggcaggagccgctcgctcagaccagattggcgcctcttcagcagcgtgacttctgtccttcaagctatgaagggacacgtatttgggcagtggtggttcatggccgaggcacagttccacgaccagggcgacgtgcacaacatcgccatcgagtgcagtggtggtgtgaggacgtga

SEQ ID NO: 24399 - DNA, 933 bp, Zea mays
  Peptide Sequence Number=SeqID_66178
atgggctcgttgtccttatcgctgcccttcctcttcgccttcgcgtttgaccctgtgtcgcgacgcctccagtgccaggcgctcgaccctttctcgaggaggtggctcctgctcccgccggtgcccggcggcgccgcggccgggtcgtttgcggtggtggggctcccccgccgcggcgagatctacgtgattgggggcgtcgaggagggcagcgacaaggcggtgacgagcgtggccgtgtacagcgccgcgcggaacggatgggaggaggcggcggcgatgcggacgccccgcgggtacatggcggctggggaggtgggagggcgggtggtggtggccggggaggacggcgaggccgaggtgttcgacccggatgccgggcggtggtcgccggctgcgccgcgccggggcgcggcggtggcgtggtacgacgcggcggcggcgggtgggaagctgtacgtgacggaggggtgggcgtggccgttcgagcgcgcgccgcgcggcgccgtgtacgactccgccacggactcgtggtgcgagatggcgcgcgggatgcgggaggggtggacgggctcttgcgccgtcgccggcggccggatgtacatcgtggcggagtacggggagtggcggctgaagcagtacgacgaggcccgggacgagtggcggatggtggccggcagcggggtgccccccgaggtgcgccggccacacgtcgtcgccggggagatcggggaggtcgccggtgggaggcgaaggatatacgttgttggcgccgggctggacgtcgccgtgggcactgtttcggcctcagacaccgccgcggcacccggcgtccacggcgtcgaggaggaagtggtggagtgggaggtggtcaagggccccaccgagttcgtcgggctcgcgccctgcaacgcacaggtcctctacgcatga

SEQ ID NO: 24400 - DNA, 312 bp, Zea mays
  Peptide Sequence Number=SeqID_66179
atggacaggccgctccctgttcggctgttctgcgtggagagccagagaggaacatccaaagtccaaacgcaatcaatgcattacgcagtatgcactgaagcaagaagcaaagaaagccgtggtgtactggtggccacgatcgagcacaagacagccaggcaggagctaaccgaggtccggcgcgaggggcagagggcgagccggtgtccggcgaggcgaccgcggttggcgcagtggcgcctggcggctgcggctagcaggcagcagctgggcgcctggggcctgggcagcgccgcagcggcagggacacag

SEQ ID NO: 24401 - DNA, 546 bp, Zea mays
  Peptide Sequence Number=SeqID_66180
atgggtaaaaatacccgcgcgggtacgggtatgggtaagattttatacccgcgagtatatatgggtaacccgacgggtagaatttttttgatgggtacgggtatggaatggtactacccgacggaaaacaacgccgcctccgtcgctccgactgctgtgccactcgacagagtgaggctgacagcagctaagtccagcctcgggcgccataggaagctccgcctcgcccgaccccagggctcggacacagcctcggcctcggaagacggtctccgcctcgcccgacccagggctcggacgcagcctcggcctcggaagacggtctccgcctcacccgaccccagggcttgggctcaacctcgatgctggacgacggactccgcctcgcccgaccccagggctcggacacagcctcggcctcggaagacggtctccgcctcacccgacccagggctcggactcaacctcgacctcgaaagacgaactccgcctcgcccgaccccagggctcagactcagcctcgacatcggaggtgagagcacctag

SEQ ID NO: 24402 - DNA, 327 bp, Zea mays
  Peptide Sequence Number=SeqID_66181
atggcgcagtgggttcgtgtcctcagtcgtggcgagctcaccggcgacgatttgacggctgtcaagagtcatggcgacgcgatagcggtgtttggatacgtggcacaagggcaagaggcggcggttcaccggcgagcatatctgctcaagccgccgagcaagggggtacgacgggagtcatcggagtggagtccagctcaccggcggcgaaaattcacctaccccgcgatattatccggtagccacaagcgagaatctgtgcggtggcagcacgaatcttcgtgcagggaggtcgccatcgacgagcaagcagtgctggcaacctga

SEQ ID NO: 24403 - DNA, 3285 bp, Zea mays
  Peptide Sequence Number=SeqID_66182
atggccgatcccgccgccggaggcgccatggtccccgctgccggaggcggcagcgtgtgggcgaacggcgccccccgcttcggcgacatggtctgggccaaggtgaagtcgcacccgtggtggccgggccacatctacagcgtcagcctcaccgacgacgaggaggtgcaccgcggctaccgctacgggctggtcctggtcgccttcttcggcgacaaaagctacgggtggttcgagcccagcgagctcgtccccttcgaggagcacttcaccgagaaggcggcccagggcggcagcacccgcagtagtttcgccggcgccgtggcggaggccgtcgacgaggtagcccgtcgcagcgcgctagcgctgctctgcccgtgcaagagccccgacgccttccgcccccaccccagcgacggcaacttcctcctggtcgatgtcccggcattcgacactgacgctgactaccaccccgaccagatccaggccgcacggcagcggttcgtgccgcggaaggcgctcgactacctgctggacgccgccgtgactcagcgggacgcggcggaaaaagcggcgcgcaccgtgcctgggatggagatggccgcgctgttctcggcgtaccgtcgcgcagtgttctcgccgatagacaacacctacgcccaagcgttcggggtggatcccgagctggcgcttgctgccgagcagaaagccgcggcagagcgagctcaacgaggtatcaacactcacacgcccaatcctagctgtattattgactgcgccgttgttcttgttgctctgtacttgaaattgatggctaaacaacgttattactgcactgcttctatagatcaagcaacgaattattttgatggatctaacatgaaagattccgatggtacatcactgaccattgagcctgttggactagcgattggcgtgcgtgcgtgccccattgctgcgattggaggctttctgagcttcctcttgaggacgaagctctatggggaaagagtggtggcaatgtcttggcttcctgctagcccggaccagtcaccctgcagctggtcgcttggcccagcagagcagtgtggttcagactctccccaacaagcgcggccgctcaaagggggccccaggaagacggcggaccaggccacaccggcggccggccgccggaggggaggcgccggcggcgccgccgccaggctcatggagaagatcgtgcccggagcgcccgccatgaagaccaagtccagcaagaaggaccagtacctgctcaagcgccgggacgcgcccgaggcctccgcacacagccagccgcagctcccagacgcgccgccgccggcacccacgctcgcggcggaggacggaccacctggcttcccggccagcggcgacccgcccacaccgccgctgcccgggagctccgtcgctgacgaggacttcatgctgcagaggcgcgtcccgctcgtcgatgtccctcccgccgtccaggcccagccgagcgagggccccgccgcgcccaagaacgcgaccaagctcaagaagccccgcaagcgcgagcgggaggaaggccccgatgcaacccccgactccgcggacgccgccggcgaccccaagaagaagaagaaaaagaagaagctttccgacgtggacggcgctggcggcaaggtcgccttcgtggttgagggccgcgacgtgcttgatctgacgcaggtactatcggacatccggaacctcccgctggctcccttccatggcgccgaacgtctcatctctgacgccgctcgctccttcgtcctcgcgttccgctcaaaatactacaagaagagctacgagaacgacccacccgaggagttgaagagcctggacaagcccagtgccgccgccactgacggccagtcgcccaagaagaagaagcctgccccgaggcctggcgcagggaacgaccccaccaaagccggcgtcaagcgcgggccatcggaccgccagggggagctggccatcaagaagaaagccaagctcgataagatcaaggtactgtccagtgagaagaaggccgccggtctggagcagaaagacacggcggcggcggcggcgcagcagcaggcacgggctgcaggcgccaaggacaaggccgagatgggcgcagccaagaagaaggagccggcgtcggctcgcacagtcaggaccccgtcgccgacagcgctgatgatgaagttcccgctgaacagcacgctgccgtcggtggcgtcgctcaaggcgcggttcgcgcgcttcggcccgctggacgtggacggcatccgcgtgtactggaagtcccacatgtgccgggtcgtgtacaggttcaagttcgacgcggaggccgcgctcaggtacgccaaggccaacgccatgttcgggcaggtggacacgcagtaccacctccgcgaggtcgaggcgggggcgggccgcgagccgctggcggcgccggaagcagccccgcagcagcgctccgagctgcggctcatggagaccgctgcgttcaggcccggcacctccggcaacggagctccgctgcccatgtccagggccggggccgcgccggcgcgtccggccgtgggggtggggcagccgcccaagtcgatcttgaagaagagcaccgacgagggaagctctgggaccaccagggaggtctcccgtgtgaagttcgtgctggacggcgcggacggtggcacgctcgcgccgccgccgagcgtcggcggcaatggcaatggcgcagacgggggctcatcaatggtggccaaggccgctaaatccgtcgggttcgctccttcccaggctctgcagccaccaccgcgcacgctgcagccgcccatgcgcccggcgcaccagcagcctccgcgcgccgccgtcacgcagcagctcccgccgccgccgctgcctcagcatctcccgtaccaccagcacccccgcggcgccgacgggactccgctggcccctcccccaggtcagctgctggcatacccgcctcgtggccacggcgagggcccctccgcgcttcctgggctaccgccgccgctgccgtaccagcctcgcccccaccggcttccccggtggacagcagctgggttcccgcctcgtcccagcaacgccaaggctggcagtgagggtccagcgtggaggaggggggagaaggagttcaaggaggaggtgtggaggctgatgacggggatcgccaagatggtggagcctctcacggacaagaacggcttcttcccctaccacctgttccgagcgcagtga

SEQ ID NO: 24404 - DNA, 1452 bp, Zea mays
  Peptide Sequence Number=SeqID_66183
atggcagcacctgacggcgatcgccttcgctcgacggtggcggagccgccttcaaaaccttcggcgggcgcctggagcggcagctgtccagcatccgcggggggcgcgcagacgcacccgcaccctgcagccgccgacgtcggcggcggcgaggctagggactccgaggcagacaccgacgacgacggcgagctccccacggccgaccggtacttcgcggccctggaaggccccgagcttgagacgctccggccgacggaggtgcccgtgctccccgaggacgaggcgtggccgttcctgctgcggttcccgatcagcgcgttcgggatgtgcatgggcgtgagcagccaggcgatgatgtggaagacgctggagcaggagccgtccacggcgttcctccgagtgagccccggcgtgaacgacgcgctctggtggctctccgtcgcgctcatggtggtcgtctccgccacctacgtcctcaaggccgtcttctacctggaggcggtgcggcgcgagttccaccacccgatccgcgtcaacttcttcttcgcgccgtggatcgcctgcctctttctcgccaagggcctgccggagccggtcacggcggtccaccacgttgtgtggtacgccctcatggcgcccatcctgttcctggacatcaagatatacggccagtggatgtccggcggcgagtggcggctgtcccgcgtggccagccccacgagccacctggccgtggtgggcaacttcgtcggcgcgctgctcggcgcacggatgggcctccgcgagccggctctgttcttcttcgccgtcggggcggtgcactacgtggtgctgttcgtgacgctgtaccagcggctccccaccaacgtgccgctgcctcgggagctccacccggtgttcttccttttcgtggcgacgccgagcgtggcctccgtggcgtgggccaggatcagcggcgagttcggcctcggcgccagggtcgcctactacgtctcgctcttcctctacgcgtcgctggtggcgcgcgtcagcttcttcttccggggcgtccgcttctcgctcgcgtggtgggcgtacactttccctgtgacgagcgcggccatcgccaccacggtgtacgcgtcggcggtcaccaacgcgctcacccaggctctggcagtcgggctgtcggcggtcgcgtccgtcaccgtcgcaggcgtgctggccaccaccgtgtaccacgcgttcgtgcgctgggacctgttcccgaacgacgtgtccatcgccatccgccggcggcccagggccaagttcggaaagatactcgcgcgcctccgcacctccagcgccgacctcaaggagctcgtcatctccaggcacggcggctcggcgtcggagaccagcagcgtcgtcagcgagccgcccaccccgatggtggacggccgcggccgcagcagagcagagccgtag

SEQ ID NO: 24405 - DNA, 816 bp, Zea mays
  Peptide Sequence Number=SeqID_66184
atggacgccgcggaggcctcggaggtgcaggcgcggctggccgcggccgtgcacgcgctcaaccacgacgcgcgtcccgaggcgcgcctcgccgctaaccaatggctcctcgcgctgcagcggtccccgcaggcgtgggcagtcgccacctccctcctggccaccccagacccgctcccgcccgccgatctcctcttcttcgccgcgcagatgctccgccggaagatccagtctccgggccccgcgctcctcgggctcggcctggcgtcgcagctcctcgatgcgctgctcctggccgcgcggcggttctgcgccgccccggcaccgcgccagctgctcacgcagatctgcctggcgctcgccgcgttggcgctccgcgccgagggcggcgtcgacggcctcttcgcgcgtatgccgcacctgccgccccccgccgtgctggagctgctcaccgtgctccccgaggaggctgcgcaggaccagggcggcgacacgggggttgacgccgccgcgcggtgccggtttacgcgcgagctgctcgcgcacgcgccatcggtgcttgagttcctccaccggcaatccgagaaggcacccgccgatgacgacggggttcccctcgacgagcgcaaccgcagaatcctccggtgcctactgagctgggtccgcgtgaggtgcttctcagagacgccggcagcctcgcttgccaggcacccacttctcacttttgcgttcaactcgctgcaggtgtccttctcgtttgaggtggccatagaggttatgactgagcttgtcagccagcaccaaagcaacatctag

SEQ ID NO: 24406 - DNA, 1104 bp, Zea mays
  Peptide Sequence Number=SeqID_66185
atgtcgccgaggcggcggatggtggagagtggcggcggctggtggtggcgaggaggcttgttagaaactaggaagaggggattaaacaggtgtagtttggcacatttcattcttggtattgatgtgaagtcagccaaaagaaatgtggtacaagagttgtttgtgcctgtgttttcttcgctgctggatgctcttttatttcgtgctcagatggacactgatgagcatggttctgatggagcaccttgtatacctgagagactaacacagttcaggatgaatttggaggagctcctcgttgatatttgtttgcttctgggtgcccctgcatatataaacaggctcttttctggtggatgggacttttcaagccaaacaattccttggaaggaggtagaagttagaatgtatgcactcagcatggtgtataaatcgttcggtgatgtcgttggctcgtactcaaagtggttatcgtcttctcaatgtaacattaagcccttactcctattttgcgcgtcaggaatttcaaaatccgtatcatcaaatgcttgctccttagcattgcgcaaactttgtgaggatgctccttcattcatccatgaaccacagaaccttgaaattcttttctggattggtgagattgacattgatagagatcaattgctaaggcaaaatccagctgcttatacgcaatcattggatcttgctgtccgtggtctctacaggatgagtgctttgtttcatcatttggcaacatcagtcacatctggtctggtcgatgatgatataattatagttcttcttggaatattctggccacttcttgaaagtcttttccgatcatctcatatggagaatgtgcatttatctgcagctatatgccgttctctttcttctgctatacattcttgcggacaccactttcatattttattacctaaagttatggagtgcttatctgcaaatttcttgctatttcaaaggcacgactgcttcttgaggacaggcaaggagctatacttttatgcacaacgatttttttttcttccaaaattcaaacttaaaagattcttctttgcacctcgtcataacaagggccaatag

SEQ ID NO: 24407 - DNA, 1632 bp, Zea mays
  Peptide Sequence Number=SeqID_66186
atgggcattggcggcaaggcgccaaccttcggcacgacggcgggcattggcgacagcgtcacttttggcatgatggccgagatccgacgtagacgtcatcccacagcattattcgcgacagctccggtttggggggatagggagcgagaggcggccgcgccacacaaaactatctccgccgcggctccgttgcatggtataccatgctgccggcggctgccaccgctgcagcgccggacccctcgtgctccaccttcccctcctcccgccgcgctccccctgtcgcttcgcgtcacagcttcgttgttgcaacaagagccaccggcagctcgggtctcttctctctccggtgtcacggtcgccttccctgccactctcgctgtcgctgccgctgccgcgcctggtggaacaatgagcgagcgcgccggggccgtcgcgtcggcgccggaccacatggacgagcagccggcgagggggaggtaccacccgttcgaggagatctccgaggcggtgcagctggacgacggcgagccggcccacctgaccgacgccgagtcagcccgaacaatcgtcgaggtgaacaacaaggcgacggtgatgatctccacgctcgtcggcgacggtgtgcacgagcggatcatcctgccggagttcccctacctcaccgacgagaacggagatatctacttcgaggtcgacaacgaggacgcgctgctggagagcatcatgggggaggacaagatcgcgcacgttatcatcggattggacaacacacaggtcttcgccgacttggatctcgtctcggcctccgccacagagtttgcgcaagaagacgacaacggcgatgaggacgatgacggctccgacgatgatgaggaaagcgactttgacgaggacttcaacgacgtggagggtgtgttttcggttgatgaggacgacgaagatgacagagaggaagaggaggaggaggacgacgacgacgatgacgaggacctaccaagctggtccaaccttgagaccgtgaattcctgccatccactgtactttgcaaggatgattgtagagactgcaaccaagtctagcatagactggctggaccggccacctgcaagccttgtcgtcgagggccagctgaggcctgcctttgctgaggagagcaccatggttgccaagcatatatcaagtgacgcgccaaagaaagatacaaaggagagtggtgccacctttttcaaggtcgagccaaaggtaaagattgaagaataccagaaggctaagccggacatcatcgcgcattctgcaccgaacgtaatatcgcgcctgagagctggtggagacaaggtcacccaggctctgaaatctctctgttggaggagcaaggccattcaagtagaggaggcagcggtgatcggagtggactgccttggttttgacctgagagtgtgctcaggaactcaagtgcagacattgagatttgctttccctacaaagagaagcaaatacatgagcttctgtttcctaggaatacacatcaagaagggcaatcaccacaggcccgacagaagtcctgatgtaattcgatccatcgatgtgaggaagctcagtgcaactccaacagattgcctatccaagtag

SEQ ID NO: 24408 - DNA, 693 bp, Zea mays
  Peptide Sequence Number=SeqID_66187
atgccctccatcctggcatcgtcagtctccattagatcccacgaacgcgacacgaactcggtggacaagcctgtgaagaggctcgtggagttaaggcgcatggcgacggagagtcgtgacaacggtttgaggtgcttgctgacggagaaggtaaagacggtggttggtgagtcaaaggccaccaggatgaactgctcgatgttctctatagtggtgcggaagaatctaagtgagagtgggagacaggaggccgaggacatgggaagcatcctcaagatcatcgtcgcagattgcacacgaggcgtttggcacaatgtatttgcgatggaggcgcaactcccctgcctcctcgtttcatttcaccagagccaaaatcgagcaccagcgccagagcgaaggggagatgagcagggagcgcctgccaacgccgtccccgtccacgaccgacgttcggggatctgtgacgagtctgggagcttcgtggagttgcttgagaggcacacatggctgagtggggaaggattgaccaccgtggcggccggaattcttcatcgaacacagagatccaccgcacgctgtgggtggggcttggcactccttgaatcacggaaaactccgaccatggcgccgccgagattcggcatcgaggggatggaaggggacgtggtcgtggatccgcaatgggacaattag

SEQ ID NO: 24409 - DNA, 426 bp, Zea mays
  Peptide Sequence Number=SeqID_66188
atgggcaagagtaacaagcgcaaacgcgaaccgactcctccattggaggatttcggtgactcggaatactcggaggaggagttctcctccgagtccgagggatctccggctcccgtctctcccccggcatcgtccgatgactcggacgactcccaggggatagccgcggaagtctggacatacatccgggccgtcgagcgctccgggctcgagggctcggatgagtcggagtactcctcggatgaggaggactcggacggcggcggcgaggacgaggacgacgacgacgacggcggcgacgacgacgacggtggcgacggcgacggtagcggcagcggtaggggcagcggcgacggcggcagggacggtgacggcggcagcagcaggggcaggggccagtggctagacgcccactggtcttcttag

SEQ ID NO: 24410 - DNA, 1041 bp, Zea mays
  Peptide Sequence Number=SeqID_66189
atgggtggcgccggcggcggcgggaggaacggggcggcgacgaggcggtacaacaggtccaaggtgccccggctcaggtggaccagcgagctccatcgcaacttcgtccgagccgtcgactgccttggcggacaggacaaagctactcctaagctaattctccagctcatggatgtcggagggcttaccattgcccatgtcaagagccaccttcagatgtacagaagctcaggacaagacattaggaggagagaggtgcaaccgcggcggctaggacatctggtggagcactactcattcgccattgatgaggagggaggccccaaagaattcgtctgctgcccacacatgaaaagaatgataaaaatccctaacctttggcacacacaccgtcttttgcctgctcgggtgaacagggcggaggcagggccagaagctgcggccacggccacggccacgcacgaaagcgtgcaggggaacagtgacatgggggctcctggcacccggcgctgcggcgatgattacacgcgagcgattcccattcccatggggagcagcagtagcaggagcaggaggataaccgagggcctcgcatggcagtggcagagcagcggtgccgcctctgccgctcgtgctgccacggccgcttccacgctgcgcgagctgggattctgggtgcgaggaaccgagcccttcaaggtacggcagaccggcaggcccatggcaaatcgtctcagccctgtggcgaggcagctatcttccaagtccaaggagatcaagtgcggagacgacggacgcttcttgttcggcactgcgactagagacgaagcggccaggagacactcgccgtcgcggcggccagactccattgacccaaaggctgtggccgctgtctcttggtccagcgaaggaggcgcctgcgccctcccgccgccgctgtcgtcgaccggcttgagtgcgcgctcagggccgtcaggcagttgcgtattcgccaggcagagagttaacctggacctttccctgtccatatgtggatcatag

SEQ ID NO: 24411 - DNA, 495 bp, Zea mays
  Peptide Sequence Number=SeqID_66190
atgcagaccactgatctgctgctggctggctcaaggattgacaaatcccatcctgcgcgtctcgtccaaaaaacacactcgccagtttccgtgttcgcctttgatgctgggctgggtgaaagggaacggcatcaacccttttgtcaaaatcacacggccatttaccacttccccaaaagcctgaaaactgacggcatctcgcctcaaggacaaattattaccatgatgagcggcacagtagatcacagggggaaaagcaaggcggccaggccggaacaaaagccgtctcagaggctgatactctggttgacgaggcgccaccgtatttcacttcttttttcctgcttttgcatcaggcaccaaagacctgacacaaaggcgaggtttggtcgagatgagttcggctgggagaacagacaccccagccaccgaagatccaagaggtaccccggaaaccgggagcatctcaacgagtaccgcaacctggacatttga

SEQ ID NO: 24412 - DNA, 1038 bp, Zea mays
  Peptide Sequence Number=SeqID_66191
atggcggcgccggaaccggaggccaagctggaagccgtaaccccatctcggtcctacgagctgccaccggagtccgaatccgacgcccctgcctccaccggcacccaggagctaaagccgtgggagcagcacgccgcggtgatcaacctcccgcgctacgactaccgcgcatcagggtccctcctcctccgttcgcattccggcttcctcatcacgtgccccatcaccgcctacatcgcatcatgtaatgaatggttcatgactcccaagagtcgatactgtcaagtaatcaaattcacaagtgtcgtcattcgtcaaaagcgtgaaaaaagtgcaaccaaggaagccattcccatccttgaagagtcttttctccaacgattgaatagctcagaaccatgtgatgtgaaaaatgcaattaagaaaagaaaactgtgctcggaggcatcaggaagtttagaagaggcagtaacgaatgggaatagtagcagtgtttcagaatcaattggaagcaccggaaacacaagctcaccccagtccaaggtgaatgacaatgttgacagggcttcaaatctctcactggttaagctatcaagaagtggcttgctcttctttaaatttcctagtggaggcgttcatgtagttgagatgcttactgaaatacttcattcactcagatccgggaaactcaaatctccacaatggtgccaccgcatattcccaattcaagaaacttgcattctatcagaagaagacctgcatgccactgtgtcaaagttattccttgacttctcgaggagcaagacaaacgaagacaagcctataaagtttgcggttgcctataatagaaggggcattgatgagacagagaagaacagtaatgaaggttcaaaccagcagactttgatggatagggagcaatgtttcaaagtggtagctgctgctgtcaaatccgttgctgagaactcagtggttgatcttagatcgcctgagggcatatgtccgagagtcagagaagaccctttcaggtttctctag

SEQ ID NO: 24413 - DNA, 381 bp, Zea mays
  Peptide Sequence Number=SeqID_66192
atgggctcactgaagctgacggagatcgtctccaagaaatggggagtcggcggcagcagcaaggtcacctccccaagcgcggcagcgtgcccgcgaggccatttcgcggcctacacccgggagggccgccgattcttcgtccccatcgcctacctcgccagcgacaccttccgggagctgctcagcatggccgaggaggagttcggtgagcccggcgcccgccccatagtgctgccctgctccgccgaccgcctcgagcagatcctcgacgccttccgcagcggcggcggcgccaagaagaagagcgccggcaccgccggcaggatcgtaaagatctggagacctggcgtggcaggcagcactattgccaacctgccatga

SEQ ID NO: 24414 - DNA, 339 bp, Zea mays
  Peptide Sequence Number=SeqID_66193
atgaccggagcttgggtgcataaagcccccttccccccatgcatgacctacccttgttgcccgcgccgcaccgctgtcgttggcttgcctgctaccgtcgtcaaagtcgccaaccgcctcacgccgccggagcttgccagaggtcgatttgaggaggagctccacgtcatcgggtcagtggagccgccccaaggcgagcagtccgtggttcccgagggagttataggagatttccctaagcagcaacttagtgaaggcaagtgtcctctgacccatgatgtcctactcactttacaattcattgtcccgcataccatgaccaacctaaggattgactag

SEQ ID NO: 24415 - DNA, 342 bp, Zea mays
  Peptide Sequence Number=SeqID_66194
atggagaaccacccaggaaaacagtgctaccataagggtggaatgttcttcaacaatttcaactttgaaaagcttctctcagctgatgcaacagttacaagcacagtaaataatatctggcagcacaacaggcctgggaccggcaagaagatggcaggactgcaatgtgaggtgatcaaatggcaagggcggcaagcgcagggcacaatcgcgcaagggcaaggctttcgcgtgcgtttgtggtggccggcggtgattagggatttttttattccaattactgtggtgtccaggcagttgaatcgacatggatctaattggattagttttacctggatctga

SEQ ID NO: 24416 - DNA, 774 bp, Zea mays
  Peptide Sequence Number=SeqID_66195
atgacgatggtggcagctcaagccacaacacagatcttttggaggagtagaagccaaaaggatgggtcgtcctacccatcactcgtgacgccgctcgtggttgtcacttccatgacacttgacatcctgttgcgtcgagcttttgaccaactcacctggtcaatcgagtatcattgtgtagtctaccagcacagtcacgggacatacccggactgctgggaggctacttgcttggtgcaccgtccaaaggatgacctccgaggtgcagagacctacttagacattatgccatctctgagagggacaatgctgaggttgtataacactttcctgcgtcaacaatacctgcaaatatcacttcgatgtatgcatagtaatgcaatgtacagcagcgtagttaacttcaaaattcgatatctcacaaactactcaaccaaaaatcatggaattctactggcatgcctgacggtcctaacctcatgtattaccccatcgttcgactggcattatagggagtgtgtctcacctgttggcgaaggtaatcctaggttgagcagcacagtcaacctggtcgtcatgctcaacattgagctggaccacactttggacaagctaagcaaggctcatgctgagacgcagaattacgggttgagtgcgtggagcgccgccaccaggaggatggttcgcctgcccccactgggactcgacacccttaccgtgcgccgccccgtggtcatcatgcttatggcgccctggattgcaggaccaagatag

SEQ ID NO: 24417 - DNA, 285 bp, Zea mays
  Peptide Sequence Number=SeqID_66196
atgcagccgtcatggccaaatccttcgtcatggcagtgcggaacgtggcttaaacatggacccactgcctactacttcgccatccaaaagcagaaggagatcacagaagccaaagcccgacaaagtcaaccgaagcagcttctgttgcttcggctagccagccacaggcttcctggccacaacttccacctccaccgccactacagtctgcctattcatgagactcacgaagctcaaaaaaccgctgaagctcaaaaagtcattcctaaaggaatgcagagctaa

SEQ ID NO: 24418 - DNA, 495 bp, Zea mays
  Peptide Sequence Number=SeqID_66197
atggcagagcgagcactatgccccggccccattgatgaccctccagcaaagccaactacacccccagagaggtactcaggaaaaaggcctgagtcccctaagggtgcaataagggaaattgggcatggggaaagttgtctcacctcagggcagagcttggggaggcttggggcggtcttcggcgagctggatgccgggaacgcgggcgtgggtctccggcggcggctggcggcaagggcatcatggccgagaaacccggcgacgtgcgcgagtgcgcacgcgctggtccacggcgacgcgcggagagggcggagctggcagggctggcccacgacgcaaagagagaaaagagggacgctcggggcaacggctcgacaactggcgatctgggttcgcgagacagagagagaaggagagcgagcaggtgaagtaactggcgccgacaggttggtcccactgggcagcgagagagggagggcgcgcgcgagagactag

SEQ ID NO: 24419 - DNA, 1632 bp, Zea mays
  Peptide Sequence Number=SeqID_66198
atggtggaggcgccagcgccgtcggatctgagcgcggcggcgcaggtgagcgcgctgtcgctgcaggtggatctcctgcagctgccgccggaggtgcccgcgccgggggcgcccgcgctgcgcggcgtcctcgaccacctcttcgcgcactggctctctctccccgaaactgccgcgcttctcgccagcctcgtgcacaaggccaaggctagcggcgccgcggcggcgggggcctcgatgctgccctccatgatgctgcaggggggagccgccgtgccgccgctctctccgaggtccccgcgcctctcgcggaggcccagcagcctaggctccggcccgccccaccgctccgcgtcgccgctccgcccgccagccgcgcgctccgccaaggaggtcataccgcagttttattttcaagatggacggccaccgccgtacgaggtgaggaagcaatgcatatcaaccgttgatcagctcttcgccggccactcaaatggtcttcgggctccagaatttcggatggttaccagggaactctgcaaactaccgacattctttactactgttctcttcgacaagatagacaaggagggcactggattcgtgacaagggaggccttcattgttttctgggtgaatagcaatttgatgagtatggatagtgcaacccaagtattcacaattctgaagcaacagaatcgcaattacctcgcaaaggaggatttcaaaccgattctgaaagaccttttggacaatcatcctggtttggagttcttaaagagcacacctgaatttcaggaaagatatgctgagactgtcgtgtatagaatattctattgcttgaatcgaattggaagtggacagctaacacttagggagctgaagcatggaaatctactcagtgcactcaggcatgctgatgatgaagaagatatcaataaagttttaaggtatttctcatatgagcatttctatgtgatatattgcaagttctgggagctggacaccgatcatgacttctttattgacaaagaaaatcttattaagtatggaaatcatgcattgacatataggattgtagatagaattttttcagaggttcctaggaaatttacaagcaaggttgaagggaaaatgggctacgaagattttgtccattttatattgtctgaagaggataaatcatcagcgccaagccaagaatattggttcaaatgtatagatttggacggcaatggcatacttacacatattgaactacagttcttctttgaggagcaacttcatcgcatggagtgcatggcccaggaacctgttctatttgaggacatcttgtgtcagctcattgatatgattggacctgagaatgatagctatttgacattgaaagacttccgaaggtgcaaactgtctggacatttctttaacattctttttaatctgaacaaatttatggcatttgaagctagggatccatttctcatccgtcaaatgcgtgaagagccatcattaacagactgggatcgttttgcacgaagagagtatgtaagattggcgatggaagaagatggtgaagatgcttccaatgctagtggagatgtttgggatgagtcacttgaatctcctttctag

SEQ ID NO: 24420 - DNA, 420 bp, Zea mays
  Peptide Sequence Number=SeqID_66199
atggacaatggcatggaaaagaagcatgctatgctacgctggggaatggggataaaagaaattgcggcggaccaggatgacctagcgctttcctcgtaccgagaccaaggcgtaaggcccacacagctttctctggccagtgaccacggtcaaaaagcgtctaggcccatatggcgggcacatcctaatcacggatcaccgcggcttcccggggcgtcgccgccggcatctccgcactccgcagacgatttcaactgcatagtgaactttggagctcgctccgcagacgagtcgttccttgaggtttcagatggtgatgacaaaatttctcttggttctcatatgttttttagtcatgtttgccatttggactatgcacaccaacacggacagagatcgaaccggcagaaattctggtaa

SEQ ID NO: 24421 - DNA, 1842 bp, Zea mays
  Peptide Sequence Number=SeqID_66200
atggcggcggcttcctgccctgttgccctcgcattcttctcctcctcctgtattctcctcctccttcaaacaatctgctgttcaggagtatttgtggagctatcatacgactcgacacaggtcaaggtacaggtactgtccacctcagtggtcactgacggctacagagtgatggtcactgacaagcagcgcgcctacctcttcctgaagccgtttgcgtgcagagacaagccatgcggatcggagtccaccgccggctcgttcatcagcgatgttctcggtcccgaccgccggctcaacgtcagcggcatcgtcgtgacggccaccggcacgcggcagctcggcgcgcttctccgcactttgcggtcgcttcaggcttctctcggcgacgctgggttggcggagcgcgtcaaggtctcgccggagctctcgatgtcttctctgcgggtcgtgggcaaggatctcgctcgtgcgaccaagaagcggcggtggggcaaggtcctggagttcgtcaggaggacacgctcgttggtctttgttcgtgtggacacggaggcgggagcgaacggggaggtcgtcgcggtgatcgaagaggccgccgctcaagttgccgctgtgttgggcgctgacgtcggcgtcgtgctccacatcaagagccgtgcggttccaagcgcggcggcaatggaaaagcttaccggccggggggagaagaggtcgttgggtgttctggtggacgtgtcgtttcctcggcgggaccgggagctcggcgaggcgagagcgacggcgcacgacgagttctctccggtcagtaatccggcgacgacgcccgtgagcaaccccgtgaccgtgccggccacgaaccccgtggccaacccgatgtccccgggattcgtcaccgtgccgtcgaccaacccgggcaacgggttcgcgagcaacacgaacctgccgccgctgtaccccgagccgacgacggcgccggtcaccatgcccacgcctgacccgacgacgacgatgccgccgcccgtgaccgtgccgtcccccttcgcgaacccggtcgccgcgccgacgaccaccatgccggggacggtgacgaacccggccacgacgccgtcgcagttcccaccggtcaccaacccggtgaccacgtacccgtacccgcagcagggcggcatgccgggaacgacgccggaggtgtaccagcctcccgcgacgacgacgcccggcacagcgcagcagagcgcgccgtctgtgaccgggcaggggcaggcgtggtgcgtcgccaagtcggggctcatggacgccgccctccaggacgggatcgactacgcgtgcggcgcgggcggcgccgactgctcggccatccagcccatgggcacctgctacaaccccaacacgctgcaggcgcacgcctcgtacgccttcaacagctacttccagcggaacccgtcggcgaccagctgcgacttcggaggcgccggcatgctcgtcaacgtcaacccaagctcgggaacttgcgtgtaccagacatcagcaggtttcggcgccggttacagcccgggtacgacgacgggcggcggtggcgtgcccagcggttacactccggggatgccgggcgccggttacggcgcagcgggaggaggggtgtcgggcaccatgggagggggctccggctcgacggtgctgaacgcaaacaaccccggcggcaactcgatgtacggcggctacgacaacacggcggggctcaccgccggctcggcgccgctaccctgcggcggcggcggctgggccgtcctgtgcctcgtctggatggtcaccttcgcatttgtcaaggagaaagtgtag

SEQ ID NO: 24422 - DNA, 1011 bp, Zea mays
  Peptide Sequence Number=SeqID_66201
atgggaatcaagggcttgacgaagctgctggcgcagcacgcaccgacagccgcggtgcagcggcgggtggaggactaccgcggccgcgtcatcgccgtagacgccagcgtcagcatctaccagttcctcgccgtggttggaaggaaaggatcagagcttctgaccaatgaggctggtgaaatcacaaggcaagaaatattgcttgccctgactgtgtcatctgcagggtatgttgaaccggacgataagaatgctagaagcagggataaagcccgtgtaagcttcttgcattcttgtggtccttgtcaactatttgaagttagcttacttttgctgaatgtgctgagcttttatgctaggtttgtgtttgatggcgagccacctgaaatgaagaaaaaggagcttgcaaaaaggtccttgaagagggatgatgctattaaagatcttaatagagctatggagattggggatgagaatgcaattgaaaaatttagtaaaaggactgtcaaggttacaggaaggcataatgatgactgcaagaggctgttaaggttgatgggtgtccctgtagttgaggcaccaggtgaggctgaagcacagtgtgcagcactttgtgaaaatcaccaggtttatgctgtagcttcagaggacatggacacactgacttttggtgcccgaaggtttcttcgtcacttaactgaccttggttataagaaatctcctgtgacagaatttgatgtgtcaaaggttttggaagaacttggactcacgatggatcagttcattgacttgtgtatccttagtggatgtgattactgtgagaatattagagtgatctggaagaggtgtaccattaataggacaaagttgcaaatgatgatccatgggtgtgccaaccatccaattatcagtgatactgataccgacacgggcaataagatcgtgtatgtacttggtccgagaactgtagtaaccattggcatattacttaacttcaagcctaagaaatag

SEQ ID NO: 24423 - DNA, 228 bp, Zea mays
  Peptide Sequence Number=SeqID_66202
atggcggcacttgcttcatccaaggaggctgactggaacgcgatgaggctgagggagaaagaattggctgctgtgaagatcaaccctgcggatgtcgaaattatcgctacctatcctcaagtgcatctgaatattacatgcgtacagctggacaagaagatcgcggagagaacgctccgtgagcacaagggtgatgccgtggctgcggttcgattcctgctgcgctag

SEQ ID NO: 24424 - DNA, 571 bp, Zea mays
  Peptide Sequence Number=SeqID_66203
cccagaaacattcagtgcagaggatgctctaattttcctagaagctgttgatgacttcctccatgtggagatatccttgatccataaaccaaacggtccacaggatacttcacaatatgagcattcgtccattcctgcaacagtaaagaagctattcaatttacattctaactttctgacaaagagagacgcatgggctgggacctttgagaactactttaaaatccggagaacgccaagaacagactgtcctgagaagctcccagaggtgacaaagtcactgcgaccatttggtcccaaggaagattcgtctctctcagagttccaagtggagttgattcaacttgcctcgcagcttaacggcgaccatgtactgaacacgtacccagatattggcaggaccatgactgtcggggaagcgaaccgctacgcagaggatgctgtcgccagattcctggaagctggtcggattgctttgagagctggtgcgaatgaatctgctttggtgacgatgaggcccgctctcacaagcagggcctcaatgtcctctggtttatcatcagagctctag

SEQ ID NO: 24425 - DNA, 233 bp, Zea mays
  Peptide Sequence Number=SeqID_66204
atggagtctgctctccacttcttaagtgtttatccagagccaaaggcggaaggtgaatcgtcaagtcttccgcaccggataaacagtcacccgcacccactgaatggtgggccgcagaacttgagaagggaaggtgttttcggatcttcggctttccgaagcctaggatactttttcgcggatcaagctcgttacgaaaaacaatctagcactgcgaaggggctactgttggg

SEQ ID NO: 24426 - DNA, 300 bp, Zea mays
  Peptide Sequence Number=SeqID_66205
atggcggtagggctgccgctcaagatggccggcttctgtgtcgtctgggcgctcttttggctcgccggctccgccaccgtgagcacgagcaccaccgccttcgccggcggcgaggcaatggtcgtggactcgcggtccgccgtcgccgtcaccgacgacgacttcgtctgcgccatattggactggtggccgccggagaagtgcgactacggcacctgcagctgggggcagtggcggaggacgccagaaaatttaggtgttgccaacgcaacgaagaataaaattgatgacatagtttaa

SEQ ID NO: 24427 - DNA, 570 bp, Zea mays
  Peptide Sequence Number=SeqID_66206
atggcggcggtggcagcctcgcgaggcacgagcgccggtgacgatgaccgcctaaggaactgcatgcagccatgcaagcgcttggcgtggggacgtggtctagtggcgaccgaggctttcaatgctatccctgtaaagtatttatactatttcttgatctatttatgctatttacgtaaaaaacagaaccacaatttatggcaggcgtcccatatgggcactaccgaaaatagcttctttgccgagtgtcttaagcacccggcaaagcctggaaaatactcggcgatggctttgccgagtgtgacactcggcaaagaagtctcgataaactatacatcggcaatggcttctttgtcaagtactttttgtctggcactcgacaaagactttgtcgagtgccactcggtactcgacaaagaaaagtcctcgtcacggcgccagatgacgacgacagagactgtgccgagtgccacggtgacactcggcaaaccctcactctttgccgagtatctactgtgttacctgatctatgactatgatgcgaaaatagaggttataccaagacggtga

SEQ ID NO: 24428 - DNA, 717 bp, Zea mays
  Peptide Sequence Number=SeqID_66207
atgaaagataatgagcttattagagatatgtattctcatttggatctaattatcaatgagctcaattctattggaattaacaagctaggtgaagtgggcactttgaggaaaatcatctcccttccacctcaacgaaaatatgggagcatcatcatccttcacaacttagagggcttgagtcaaatgactctgatgctcgtgatcgaaaagattatgtcatttgagatgtcatgcaagatgggtcaagaggaggcaacttcatcaacaccgtatgcttttgcatgtgatgagaagaagaaaggaaagaagaaggctcctagctcaagttcctcacgcaaaaaagaagaggatgatgatgatgatgaagatgatcaagcctcgacatcatcctccgaggatgaagaaacgatccgacaagtcggtcaaggaatcgtctctttaacattgacaggaaaaagaaaaaaagatgatgctttgcatgtggggagaagggccacttccgggataattgcccaaatttggccgaacccaaaaggaggtggagcaataacaaggcgcttacaagcatcaaggcttggaatagttcttcaagctaagatgaacctcaaaggacccgtagccacctctctccatcacgctcttcatgctcatcacacaaatgccttatggcaagaggtaacacaagtatcccatcctctagtgatagcgatagcttga

SEQ ID NO: 24429 - DNA, 222 bp, Zea mays
  Peptide Sequence Number=SeqID_66208
atgcagaacctgggagctccaaccaaactcacagagcttacaggaccggacttgcggttgagccagaaaataaaaaggactgcatgccagtgccagggaagaagtgctcgttcgtccactccagaatctggagcagatgaagctgaccctacagggtcgtcactcagcgttattgagagacagacagacagagagaggtgcgttaaatttgtgatggcctag

SEQ ID NO: 24430 - DNA, 159 bp, Zea mays
  Peptide Sequence Number=SeqID_66209
atggcggcggcgtcgctgcttggtcagtggggaagacaatgtcgtggccgttggatgagaggctcacggcctagattagatgagaaggtatcttcggacttgaatcagaaagggagaagctcaaaagatacgaaggttgacacagtgccgaagctgtga

SEQ ID NO: 24431 - DNA, 147 bp, Zea mays
  Peptide Sequence Number=SeqID_66210
atggccatgatgggttcaacatcagaaaagatgtacctctaccaggtgaggaaacaacagacttttgctgtttttgcactaaggtggtgcccaaggacgaacctcaacaatgaagtggttgcgggaggatgttggcctcccttttga

SEQ ID NO: 24432 - DNA, 480 bp, Zea mays
  Peptide Sequence Number=SeqID_66211
atgggcaagaacaacaagcgcaagcgtgagccgactcctccatcggaggattttggtgacacagagtactcagaggaggagttttcctctgagtccgaggggtccccggctcccattcctctgcgtgagtcgtctgatgattcatacgactccccagggggcttgcggcggaggtctagacttacatccgggccgtcgagcgctccgggctcgagggctcggatgagtcggagtactcctcggacgaggaggactcgctcgaggaggacggcggcggcgatggcgaggacgatgacgacgacgacgacgacgaagggctgtggcggcggtgacagcggtggcaggggcggcagcagcggcagcaaggatggcgacgacggcagcagcaggagcggcggcggcagcagcaggggcagcaacagggggcggcagcggcagaggcagcaacagggccagtggctagatgccactggtccttag

SEQ ID NO: 24433 - DNA, 492 bp, Zea mays
  Peptide Sequence Number=SeqID_66212
atgggtctactgacgcaagccttgccgcccgggcccggcggccggacccatgatgaaagggacctggggcttcggccccactccgaacgctgctgctttggcgttgaggttcgtggaagagacggatggcgacgcgagcggaaaggtttgagtttgaccgagaccgacgccggggagaaggcgcagcgcaagcgcaaggcacggcatggagcagcggccaatgagaattcaaccactgaccccgggattagaataaggtacgaccgtgcctccgcccccgcctccgtgacccccgcgcaccccgctcaggtccgcaccccgctcaggtcagaaccagatcctctgacgtggggagaggacactgtcgcgtggtccgcccccatcccctccctcaccccgtcgtccgtgaccgccgctccttcttcccccacaccccgtcttcggatctgcgaccgtcgcttcccagccgtctgcttcaacctcgggctgtga

SEQ ID NO: 24434 - DNA, 621 bp, Zea mays
  Peptide Sequence Number=SeqID_66213
atggcgcgccgcacgcagagatgtgcccacgtcctcaatctgcctccacgacggcgcgccgcaccacgacttcaatctcccccccccccccacgacctcaaccgctctgccagagtcaacaccgtccagctccgggtcaccggttcatgggaggcgggcggcgggtactccttcggcaggcaaaaaagagcaaagttggaggcgacgagggtccagatccggtcgccggcgtccatctggggtttggaagcgccgcggccagctggagatgtcgccagccaactctcgggcttcctctcctccatccccgagatcgtcgctcgtggagatctcgccagccaatgcccgggtgagaaacagatcgactgtgtcgagcgcttcgacgacaccaagtccgtcccgtcgtcccccaatggcaattccaccaacggcgtcgcgtccaaggacttcgctacaggcatctcctcccgactctacctacccgcgagagtggatcccgagaagaagctccccattgttgtgttcttccacgacggtgcattcatggtccacaacgcctccttcccgctgtaccacatctacatcgcatctgtcaatgtcgcggtgcccgctagccgctga

SEQ ID NO: 24435 - DNA, 693 bp, Zea mays
  Peptide Sequence Number=SeqID_66214
atggccatagcagtagcagcaatttgcatcggacagcgagttgcagccgaccacgccaaggtgaaggacgggtcactctggtcaccagaggggccaactgcacccagatctgctggtccacgcctctcgacacttgtccgagttattctacggctggataatcgtgtcgaaaaatatctgtgcaccggggggatcatccagaatagaggaaggctaatgcgggtacctgagactgaggaggtcgtaacagctgcgtcggggcagagcagatcgggcggacaccgcgcctcacctctctctccccttttctcctgtcccggagagaaaaacgagcggtggtgtctgcaggatttgcagggaggaggagggagcctggccgcctccgattccgccggggagaaggcgctatttaaaagcgggcgcggcctccctggcgcgtggcccgagggcagatgggacgcactaaccacgttcggcaacgggaaattctggccccgttccacgtgtataaccctgtttggcttacaccccgggaggcgtgacccagatcgcgcggcgccggcccgcgggccgttcgtggggctcgtggctcacatccaacggacggggtcccctcgggaaaaacagggggacatcgccatatttgagttctcttttgaaacgatttggttcacaaaagaaaacgccgcttga

SEQ ID NO: 24436 - DNA, 348 bp, Zea mays
  Peptide Sequence Number=SeqID_66215
atggagaaggaggtggtggacagggcagcgttgctgcgattggtcgagttggtcgctctgcggcttataaagatttataaaagtcattggcggcttgcgctaccatcaccattgatgatcaaagctcgtaatgggggttacaagcgggcaagagagggaggagaggctctcaagtctcttatcgaggtggaagtggagctaaggccgagggaggggtcggccagcggtggcttccccaggaaggggccatcgagcaaagggtcgcctggttctctcgtattcttgatggtggacaacgtgagcagtgtggggcccgagcgccatcatttgggctatgccaacctctag

SEQ ID NO: 24437 - DNA, 567 bp, Zea mays
  Peptide Sequence Number=SeqID_66216
atgcaagaattcaatgcacaggccctactcgacgccacgcaatactccagcaagaagctcctacctgatgcaatgcaacacggccgttaccagcccttgcacgacgacagcgttaaacatgtagatcagacgcacgacgacagcgttaaacatgtagatcatacgactatggcaggaccaccgcagtggcattgcatcaccgctcatagggccatagcagggcaatcagagactgcagatgaattcacggatcagcccgacgatgatgacatgttccctctgccttttttgccgcacgacgtcatctctatagaagaagtagacgttcgtgggtttttgaattacagtttagaggatcgatcttcaccggatcgccaaccagacgacatagagcaaggtaaaaatgcaacccctgacacgagtcatgcatttacgacactgaagaagaagaaagttgttcttaagaaagggatgttatttgatgatgtggatattgcacaagacttttacaaggaatacgcacataatattggtttttctgttcgtatcgggcaacaaaagatataa

SEQ ID NO: 24438 - DNA, 627 bp, Zea mays
  Peptide Sequence Number=SeqID_66217
atggaccttccttttatagatgtaaggcggagaccgtcttccggagtcgaggctgagtccgagccctggggtcgggcgaggcggagaccgtcttccgaggtcgaggtcgagtccgagccctggggtcgggcgaggcggagtccatcttccgaggtcgaggtcgagtccgagccctggggttgggcgaggccgagtccgtcttccgaggtcgaggctgagtccgagccctggggtcgggcgaggcggagaccgtcttccgaggtcgaggtcgagtccgagccctggggtcgggcgaggcggagttcgtcgtccgaggttgaggtcgagtccgagccctggggtcgggcgaggcggagtccgtcgtccgaggtcgaggttgagtccgagccctggggtcgggcgaggcagagaccgtctttcgaggccgagacgggggccgagccctggggtcaggcgaggcggagcttcctatggcgcccgaggctggacttagctgctgtcggcctcactggcacagcagtcggagcagggcaggcggcgctgttttcctgtcaggtcagccagtggagcggcgaagtgactgcggtcacttcggccttgtcgactgaggagcgtgcatcaggataa

SEQ ID NO: 24439 - DNA, 1050 bp, Zea mays
  Peptide Sequence Number=SeqID_66218
atgtccatagaagagaggaagataagtgtgataagcaagagcattgcgctaaatccaaatgcagaggaatttgttccttcatcccttagatctgtcaatgattcctccaagagatcatatgcaactacggttgtctcagggatatctaaagaatccagcactgacaagccagagtcaattttacgaagtaactctgatgaagaagcacatcagtactggcagcaacagctccctgacgacattacccctgatttcaaagtcatgggacaagatgaaagtcctggacctgacagtctatcactcacagacctgtccataaatgatggcattggcacatcaatattttctccgaaccagacactgagcatgcagcaccgtgcttcgccttttatcagggacaaactaaatacacacccaaagattaacttgtctatcccaacttatatggatgaacggtcccaagccacaattttgagtccaactgcaggttccatgagtccaaatgctgctccatgggtgaagactctaaggaatgggggacattataacacaagcataagggatgccagtcagtacaatggagattctagcattggagcttcattgcacaaccttactgatgcatatcatggaagcaggcgcagcttaagctcgactatggatatcatgaatcagctggagagtaaagtcgatggacgacgcagtcagaacctcaggtcactatcatttggaaattcaagtcctacatcaccagcatcatatgcccaaaatggtcttggaaactatgctggacgtgaacacgtatccctcgatgttcctagaggaaggtacaagacgactagtttgcctgttcctggtcttggttcaagcagaggttatcagttgttgggtggctcatataatggaaaccatgatatgatctcaaccaataccccacaaaacatggctggaattcagacaggaccagcttggcttgaaagtgacgctgagggtagtgctctcgaattacaatattactacatccgttctcgaatatttatcgtccgctag

SEQ ID NO: 24440 - DNA, 111 bp, Zea mays
  Peptide Sequence Number=SeqID_66219
atgggcgccgtcgtgatgggtctcgccgtggccagagcttctcatgttattcgaatgcctaggaaccttggcgcaaataagccagcgcgggcgcgcacggtttctgcgtag

SEQ ID NO: 24441 - DNA, 564 bp, Zea mays
  Peptide Sequence Number=SeqID_66220
atggcgacgctgccgcagcggttcaagctgctggcgacgcggtgcgcggcgggggcgccgagcccgtcgcgcagccccgcgccggcttacgcgggggccgccagccctgggtaccgcctgcggcgccgggtccggggcaccggggccaccaccagcgccaggcgtcgcggccgccttcgccgcttcctatgccgcggccgcgaggccggggcagagacgctagcggccacgcggcaggaggacgacaggaagccgcttttcggcggccgaccgggcggcgggggccgcacgctgcgagatctgttcgtcgcgtccccggaagccgggcgccgccacagcgggtgccgctgcgactgcggcgaagacgaagacgacgacgaggacggaagggcgggcggtgccagcgcggatcccggcgccggcgtcggcgcgtggcgagtgggccggaggttcggctccggcgggctgcggagcctgctcatgcgacggagctggcggccggtgctggtggccatcccggagggggacggcaacaagatcgagctcggagccatcgaggaataa

SEQ ID NO: 24442 - DNA, 801 bp, Zea mays
  Peptide Sequence Number=SeqID_66221
atgaggcttgcggagccaacgtggaacttagttactcatttggagatgaaatccaagagaactccatttgggcgtaagacacttagcaacacgccatatcggaacccctgtggcatgccgtttcatgatctgggtacgatgtacttattgaaactatttagggtgctgtttggttcaccaaatgtaactcggcaccctgaggtgaagtgggctcagaggatcgacaaggtttacatcactgtacagttacctgacgcaaaggatgctaaggtcaatttggatccagatggtgtcttcacattctctggcagtgctggtacaaacttgtatgaattgaaactagatctgaatgacaaagtaaacgttgaggctagcaaaataagtgtgggggtcaggtccatattctgtatcgtagaaaaagctgaagccaaatggtggaagaaactcgttcgagatgatcaaagggcacctcactttgtgaaagttgattgggacaaatgggttgatgaagatgatgatggtgctgatatcaacatggatgggatggacttctcgaatttcggtggcatgggtggtatgggcggcatgggtggcatgggtgatatggctggtatgggtggtcttggtggcatgggtggtatgggtggtcttggtggcatgggcggtatgggaatggatgatttcgaagatgagagtgatgatgaagaagaagtgtcgaaacctcaagctgcggacaaggctgttgaggctgaggagacggagtcagcggaaaccaagattgaggcggctcagagcagttga

SEQ ID NO: 24443 - DNA, 306 bp, Zea mays
  Peptide Sequence Number=SeqID_66222
atgaggcaaaaggagacaagcccatccaatggctacttgacacgtcagctgaagccaacgatcagcatgagcaccggacagtctggtgccacccaccggatagtacggtgccccctagaagcagaaagtggccaatcaagagatacacgactgttgcattgtgcagtgtctggtgtgcacaggacagtctggtgcacccgaggacagaaggcaatcagggccttacaaatggagctccaacgagtcctaggtctcttaggaaagaaccccctaggtgccatggagaagtacccaagcacactttga

SEQ ID NO: 24444 - DNA, 246 bp, Zea mays
  Peptide Sequence Number=SeqID_66223
atggaggtggtattggtggatggtggcaggggctggatcacggctcaacaacgtcgttggaaggcgcggacggggcgtagcgcgctggaggacaggccggtgggggagtctgacggctggagatcacgccggcaccggaggtctaatgtacattgtatcatggttgctagtggtgtttacaagctgatggctgcagatggtgcttacatttttggcttctttgtatctggttttgagacattgtag

SEQ ID NO: 24445 - DNA, 288 bp, Zea mays
  Peptide Sequence Number=SeqID_66224
atgtcctttactggatatgcgcctgcagtcaggccaatcaagaggttgaacagagctgtgcaggtgagcatgcattcattatattcccacagttcatattctttgcggtactacatctatggtagatttagtcgctgctgccatacatcagatgcccagatcttcttcaggcccttcgtcggcgaggagtatcacaagggtgtgcatctgtatacccatgtcctttacaaggatagcagttcacgtgcctttgcagctcatattcactcctttatgtttgttgtctag

SEQ ID NO: 24446 - DNA, 864 bp, Zea mays
  Peptide Sequence Number=SeqID_66225
atggagctcatccctatatcctccttccagagaagaaaagcgaggatgcttcccctcaaaaacacacttatttctatgcctccaaatgttccaggctccaagaatgataatactactgaacccctttctcttgtttttatggaccctcatggtggttcaacgaatgctttcacatcttctgaacacacaaacttctattttgatgtgaacagtgatagcctgcacgatgctttagataggtttgcccaattttttatcaagccattgatgtccccagatgctacacttagggaaataaaagctgttgactctgaaaatcagaaaaacctcttgtcagatccttggcgaatgagtcagcttcagaagcatctttgtgcagagaatcatccttatcataagtttagcactgatagccttgataacctgcagaaccttgttgaaaataagttttgcgatattagagatgttgggaggaagccattttcatttcctggtcatccatgtacacctgaacatctccaggtccttgtcaaagcagttcccattaaacaagggcacactttgagaatcttatttccaatcactcccaatatccgttgttacaaagaaggcccttgcaagtacattagccatctgattggtcatgaaggagaaggatctcttttttacgtacttaagaagttgggatgggctatgagtttggaagctggtgaaggggattggagtcatgatttttcattcttctgcgttgttattcagctcacagatgtaggccaggaacacatggaggatactctcggactattgttcagatatataaagttgctgcagaactctggaactcctaagtggatatttgatgag

SEQ ID NO: 24447 - DNA, 435 bp, Zea mays
  Peptide Sequence Number=SeqID_66226
atggctcgcccctgcagcagcagcagcgccgctgcccgcctcctcctgctgttcgtcgctgtcgcagcggcgctccaggccacggtcgtcgcgccgccggtggccagcggcttcatccgcaaatcctgccgcgcgacgcagtacccgtcggtgtgcgagcatagcctcgcggccccccgccgcggcgcgaagaaggggtcagcggtcgcaggtcccgtgcgcgactgtctggagaatctagcggacagcgtgggccacctccgcgacgcggcgcaggagataggcggcgccgggatggatgccaagttctggtcttgtcatcccatctccattttgatgggaattgagacaactaaggcgtaccctaacggatcagtttctggatctggtatctcagcagttataaatgagtcaattagctcaggtgttggttga

SEQ ID NO: 24448 - DNA, 846 bp, Zea mays
  Peptide Sequence Number=SeqID_66227
atgcctaataaaccactttcagcattgactctacaagatcgaaatgcagaggttcaaatacagatccacaggaaatgggagtttcgaggtgccgttgacaatggccctatattacacatcgacatgatcctgacagactgcacaggcaatgctatccattgtcagattccttcgttcctagcagctacaagaggcgatgaatttcaagttggcaaaatatacaagatgacccgcttttcagtagcccgtgcaaaatccacctacaagcctgttgatggtgatctcatgttgtatgtcacaccatacacaacccttgaactttgccacacttcacaatcatgttttcccctttatgtttatcatctaacaagctatgacaagattgatccagatggatcaaatgcaagaaacttccatggggaagtactgttaagtggtggcgcaacctgtcattggtacttcaacccatcaattgaagaagctgaagctttttatagcaggattgaatctgaaaagataaacatagaattgcccagtcttgacaaacaagaaattacacctccaagttttccacaacgagaacatcacaaccttaaatacatactgtctttaaacccacatgatgtaccggatcaaggatatgaatgcacgatgacccgaaagctggcatattctccagcaaagaataagcctgagacaaacctccccgatgctaacagaagcagagctcctacaactacaattgagtcgccaacaaaaaggtctataattctcatctcagaatcaaaaggtctacaattgagtccccgatcctccattagtatatttgctatactatgcagctaa

SEQ ID NO: 24449 - DNA, 378 bp, Zea mays
  Peptide Sequence Number=SeqID_66228
atgggcggcggtggcgcggcgctgctgctgctggtgatgtgggcgggcgtggcgtcggcggccgtgtacgaggtgggcggcacgattgggtggaccgtcatgggcaaccccgactacgccgcctgggccagctccaagcagatcgtcatcggcgacactgttgcagcagcggcggcatccgctgccaaaagtctagacacgaaacagtggatacctgtaggtgcagcgctgcccgggagagcagccttacaggcacctcaggtccaggttggtatgggaagtcgcgacgcttttctcggcgtgacgcacgccctcagcccctcacccaaccgccagtgggggcaccggcagcgcagcaacgcacaatgcgccgtgtga

SEQ ID NO: 24450 - DNA, 300 bp, Zea mays
  Peptide Sequence Number=SeqID_66229
atggatagggttaaggaggatttcacaaaaaggtatggtggtgggaaagctgctactgctgcagctaacagcctcaatcgagagtttggatcaaaacttaaagaacacatgcagtattgtgtggatcaccctgaagaggttagcaagctggccaaagtgaaggcgcaggtttcagaagtcaagggtgttatgatggaaaacattgaaaaggttctggatcgtggagagaagattgagctgcttgtcgacaagaccgagaatcttcgctcacaggtcttcatggaattccttgctctgtag

SEQ ID NO: 24451 - DNA, 423 bp, Zea mays
  Peptide Sequence Number=SeqID_66230
atggatgtccattctaggggtccagactgcgtcgctgtcgttgctggtcatctcgagtttgaagaacttcgtcgagaacacataagcggtggagctctgacctttgggccctcgtcggtgcgtcctccttcctatcgtgggtccatcgccaaggaggggtcgaccggcggtggcttcctcaaggaggagacaacgagcaatgacgacgcgggtaacgtggggcccaagcaccatcattcgagctacgccgacccatggcatctgttgcttgtggctcgtcatgacatgtcggtctcgggccaggcgagggatccactcgagtggtttccatttggctcgcccgaccccctgtctagttccaccatgtccgaccccaggcttggtgccgtggggttcgcttgggggtgggtccttctagggtag

SEQ ID NO: 24452 - DNA, 891 bp, Zea mays
  Peptide Sequence Number=SeqID_66231
atggccgtggagaagtatccaaacaacagaatgcttggccatcgtgagattgttgatgggaaggctggtgcatatacttggaagacatataaggaggtgtttgacattgcaaacaaaattggtaactctattaggagctgtggacttgcgaagggtagtcgttgtggtatctatggtgctaattgtcctgaatggattatcacaatggaggcttgcaacgcccatggaatctactgtgttccattatatgacacacttggagctggtgcggtagagtttattctgtgtcatgcagaagttgagattgcttttgcggaggaaaagaaaattgatctgctcgtgaagactttacctaagtcaaatgagttcttaaaaacgatcataagtttcggcaaggtaactcaagaacagaagggagaagtccaaaaatatgggctatcaatttactcgtgggatgaatttctgtccctggcggctgaccaagaatttgatcttccagtcaaggagaaggcagacatatgcactataatgtatactagtggaactactggtgacccaaaaggagtactgatatcaaatgctagcattatttgtctcattgcaggtgtggaccggttgcttaactatgtaaacgaagagttggcagaaagcgacgtttacatgtcttaccttcctcttgcacacatctttgatcgcgttgtggaggaattgtttattttccatggtgcctctattggattctggcaaggggatgttaagctactagttgaagatataggtgtgttgaaaccaacaattatgtgtgctgttcctcgtgttcttgatcggatattctccgagtggagtttgaatatgggtatggggatgggtaagttgctggagatagcctaa

SEQ ID NO: 24453 - DNA, 168 bp, Zea mays
  Peptide Sequence Number=SeqID_66232
atggcgggcggaaatgcgctcgccggagctaaggagagggggctggccggtgaagaagctaagcctacacaggcagctgactgggggtttgccactaagaaagaactagaactcgtcatattcctagaactcctcgaagtcatccatgttgcgagcatcaccttctga

SEQ ID NO: 24454 - DNA, 141 bp, Zea mays
  Peptide Sequence Number=SeqID_66233
atggccatgatgggttcaacattggaaaagatgtacctctaccaggtgaggaagcgacaaacttttgttgcttctgttcaaaggtggtacccaaagaagagaaccaagactagagctgcgggagggaaggcccttcgttaa

SEQ ID NO: 24455 - DNA, 318 bp, Zea mays
  Peptide Sequence Number=SeqID_66234
atggcggatcccgcccttgcctctataaaaccgggagccgctgggcaaatagtcaccatgcgcgagcaaggcaagtggcggggggcacctctagctgaggcgcaggggagggctgcctctcagactccacctcctgctgaggtgaggaggaagagtcctactgctcctgctcctggcgtcgacgctcctgctcctcgtgcaggcggtagtgtagtctctccaggtgactcaactgtcctgtcaccgtgcggcgcagtggacgctccacaaggcgagaaggcaagaaagggatcaccgacttacgtgcagtgcatctaa

SEQ ID NO: 24456 - DNA, 177 bp, Zea mays
  Peptide Sequence Number=SeqID_66235
atggggaggaacaagctaggccgcggccctcgcccctccctcagcttcaaggatgtttatcatccttgctggggtggagggcgaggcgagcttcggctctacctcccgctcaggtggcaacccatatctgtctctgatcgacaatatcttctcacaacctgttcgaaaaacgcccag

SEQ ID NO: 24457 - DNA, 1209 bp, Zea mays
  Peptide Sequence Number=SeqID_66236
atgggggtgatggatgcggcggcggtggacgaggtggtgcgtcgcctcgtcgagggcggccgcgggggccggcaggtgcagatgtccgaggccgagatccgccagctctgcgtcgaggccaaacaggtgctgctttcgcagcccaacctcctccgcatccacgcgcccgtcaagatctgcggttgtttggaatggatgataaaaaatgatcgagtgcattcttcaggtgatatccatggacaatttgttgatctcttgaggctctttgatttgggtggttatcctccaacttcaacttatattttccttggagactatgtggatagaggcaaacaaagcttagaaaccatatgtctgcttctggcatacaagttgaagtaccctgataatatataccttttaaggggaaaccatgaagatgcaaaaattaacagagtttatggtttctatgatgaatgtaaaaggagattcaatgttcgactatggaagatattctgtgattgcttcaactgcttgcctatggcagcacttattgatgacaaaatattatgcatgcatggtggcctctcacctgaattgactagcttggatcaaataaaagatattgagaggcctaccgaaattccagactatggtcttctgtgcgatctcctttggtctgatcccagtcatgatacagaaggttggggggagagtgatagaggtgtttcttccacttttggcgcagataagcctgttgaatttttggagaagaatgatcttgaccttgtgtgcagagctcatcaggtggtagaagatggctacgagttctttgcagagagaagactagtgaccatcttttcagctccaaactactgtggcgaatttgataatgcaggtgctctattgagcatagatgaaagcttgatgtgttcttttcagatcttgaaaccaaatgaaacaggtgcaccacattcaaggaaacctcttccaagcaagtttatactgatgagcctggcatacgtcctgaaatcagtttgcttcttatttccatgcttctttttacgcttgtcatgctggactgacataaaattcatggtcctgatacgacaagggattcaaatctgcattcgtgatgaggttttcctttttcctacatctcagacagttgttggtcccctcaaaacttttctctcgaatacgcaggagagttgcgcatcatttcattaa

SEQ ID NO: 24458 - DNA, 171 bp, Zea mays
  Peptide Sequence Number=SeqID_66237
atggcggcgcgcagcggcctgcgctctagcgtgcagctgcgcgagagggccccacttgcaagagagaatagcagagggagtggtgagcagggcggtttagcaactaatattaacttacttttaattgatggatttgagatgttacattttaatgatgttgcactgatttaa

SEQ ID NO: 24459 - DNA, 399 bp, Zea mays
  Peptide Sequence Number=SeqID_66238
atgggaagggtgctcacctcgagtgcaaactccgagacgcttggagaacagcgggggtgcgatggaacctcgggtcgacgggcggtgggcctccggctgcgcaagaaacgctccggtgagcgtggaccgggcaaaccagagaggggaagggcgaaccagagggtgtctcgagtagctgacggtaaggcggaactcaccgaggcaacagacggggcgcgggctcgacgacggtcgcagaatggacagcagtcgacagtgggcagtggcggagctctctggtcgcgcgcgcagagtgagagagagggcgagaaggttcggctgagggcgcaaatgagcaggggaaggtgggaaagtagggcgcggggctcaaaaggggcagggacgtgcggaggtggctag

SEQ ID NO: 24460 - DNA, 1013 bp, Zea mays
  Peptide Sequence Number=SeqID_66239
atgtgacgcacatactatcagacttggagcttataatccacagagtgaaggtgtcgacgacgccggacggaagagtcgtggacctcttcttcatcaccgacggcatggagctgctgcacaagaaggagaggcaggaggagacctgctcgacgctaatcgctgccctgggcccttccataagctgcgaggttctgtcggcggaagggttccagcagggattctcctctctcgcgccgaagatcgccgaggagctgttccgggtggagctagcaggcgacggcgagatgtgctcgagctcgcttattagcgcagagctgaagaaggtccagactgccaccattaatttcgacaactccctcagccccgcgcacacgctggtccagatcatatgcgccgaccagaaggggctcatctacgacatactgaggacgatgaaggactgcaacatccaggtagcagcagtagtagtatatacatacagctcacagaatggtaggaactctgcctgcctttcagcagccacctcatatactaggtgcactgcgttgcagatattttacgggcggttcagatcggacaagaaaggcgggcggccaggcagcaaaggctgccgagaggttgacctgttcgtgaaacaagtggacggcaaaaaggttacggatcctgagaagcaggacgctctgcgggcgcgcctgagatccgagatgctccacccgctcagggtcatggtcgtcagccgcggaccggacacggagctcctcgtcgccaacccggtcgagctctgcgggaagggacggccgcgcgtgttctacgacgccaccctcgccctgaaagcgcttggggtctgcatcttctcggctgagattgggagacaggcagcgtccgagcggcagtgggaggtgtacaggttcctcctggacgacagcagggagttcccgttgacgaacagtctcgctaacaggaaccgtgtggtggatagggtgaggaaaacgctgatgggatgctacaactag

SEQ ID NO: 24461 - DNA, 783 bp, Zea mays
  Peptide Sequence Number=SeqID_66240
atgtgccccctccgctgcgtcctcaaccgccgtggcccatcgactccaccgccgttgtcggtcctccgccccaccaccttcaaccatcgcggcttccccgatgagggcgacagaaccgctgcgaggacccgacgcgctggatgtgcgccctcctttgcatcctcgaccgtcgcgtttgtgaaccccgatctaaagacggagagagggttcgcggcgctgtacacgaacaagggcccgactgccgcttctgcagccgccaagcccttgctgcttgcctgcactgccatcgagtggagaaggagagatggagtcagaccagggcaaggtggcaagctaaagctcttcataagtggcatctcctgggaaacgatcaacgatggacaagaagctgagcgagcacttctctgcctacgacgaggcacgatgctggtcacaatcgctggagcttgtactagaggggcaggaacttcttttgcagcatctggcacttcgttctctatatatatttggcacctctttcagtacaggaacttcaacaactggctcagtgtcatgaattttattagtcggttgctcttcaagggattgggggcgttcaaattcagattgtgggatgtgaagcaagaacttacattttgtcaaccatttgtctgcacgatatctacatctagacaactggaagctaagcgagatctcgtcgctggtgtcgtctacggcaccgacttcttcacgaagaggaaaattcaagacagtagaggaatcttaattggacagattgagtag

SEQ ID NO: 24462 - DNA, 1011 bp, Zea mays
  Peptide Sequence Number=SeqID_66241
atggagctgcgcgtgctggcctgcatccacggcgggcaggacgtgcccgcggtgatcaacctcatcgagaccatccgtggccacacgcagccacgccgactcgtcaagctctacatcctccgcatggtggagctgacggagcgcacctcctccatcctcatggcgcgcgccgcgcgccggaacgggctgccgttcctgcgcccgcgccgcgcgggggagccgcacgaccaggtggacgtggccttcgacaccgccacacggggcgggcgggcgacgacgtcgagaacctcgggcccgagtggcgcgcccgtcaaccgccggatcctccgcgaggcgccctgctccgtcgccgtcctcgtcgaccgcggcttcggcggcggggagcaggtcagctcggagcaggtggcgcacggcgtctgcgtcgtgttcttcggcgggcccgacgacagggaggcgctcgagctcgccgggaggatggccgagcaccccggcgtgcaggtcaccgtcgtgcggttcgttgatggcaaggccggtagcgaggagcagtccgaggtcacgctgcgcccgtcccacaccaagaacgccgaccggagctacacgttctccacggccgtcgtcgacgccggcaaggagaaggagctggacgaggcggctgtggcggagttccggcagaggatggggtccctggtgcggttcgaggagcgggtggtggtgggcaacgtgatcgaggaggtggtgtcgatcgggaagagcagggagtacggcctggtggtcgtcggcaagggccggctgccgtccgcgatggtggcgcagctcgccgtcgttccggcagagcacccggagctcgggcccatcggcgacgcgctcgcgtcgtccggccacggggtgacgtcgtcggtgctcgtggtccagcagcacgacatgagcaacgccgacgaggtgcccgtctctgtggtggtcgacggccgtcctcaggacggcgagttcgccaaggacatggcggagccgtga

SEQ ID NO: 24463 - DNA, 1332 bp, Zea mays
  Peptide Sequence Number=SeqID_66242
atggcggccgtgaagacgtcgtcgaacggggtgtggcagggcgacgacccgctgcacttcgcgttcccgctgcttatcctgcaggcgctgctgatcctggtgctgagccggttgctggcgttcctgctccgtccgctgcgtcagcccaaggtgatcgcggagatcgtggcggggatcctgctgggcccctcggcgctgggccgcaacaaggcgtacctccgcgcgctgttcccgccgtggagcgcgccagtgctggagtccgtggccagcctcggcctcctcttcttcctcttcctggtggggctggagctggacctccggtccgtgcgccgcagcgggcggcgcgccttcgccatcgcggcggccggcatctcgctcccgttcgcgtgcggcgtgggcgtggccttcgtgctccgcgccgccgtcccgggcgccgaccaggcagggtacgcgccgttcctcgtcttcatgggcgtggcgctctccatcacggcgttccccgtcatggcgcgcatcctggccgagctgaagctcctgaccaccccgatcggggagacggcgctggcggccgccgccttcaacgacgtggcggcctgggtgctgctggcgctggccgtcgctatatcagggtctggcgacgccgcggggacgagccagcagcagcagcaccgcagcccggtggtgtcggtgtgggtgctgctttgcggcgcggcgttcgtggcggcgtggatggtggccgtgaagccggcgatggcgtgggtggcgcggcgcgcggacgcggcgggggacagcagcgaggcgtgggtggcggtgacgctggcgggggtgctggcgtccgggttcgcgacggacgtgatcggcatccacgccatcttcggcgccttcgtgttcgggctcacggtgcccaaggaaggcgggttcgcggcgcgcgtgacggcgcgcgtggaggacatcgtgtcggagctcctcctgccgctctacttcgcctccagcgggctcaagacggacgtggccaccgtgcggggcggcgaggcctgggccatgctcgcgctcgtcatcggcacagcctgcgcgggcaagatcgtcggcaccttcggggtggccatggcgtgcgggatgggggcacgggaggcgctcgtgctcggcgtcgtcatgaacaccaagggcctcgtcgagctcatcgtgctcaacatcggcagggagcgcaagcctcctactctacctacatgcatgcatgcatggtcgcgtgtcatccgtcgtcatgcaagtgctgcccaggaacttgctagtagtagcagtgctgcacaccatgggccatggcagctctgctag

SEQ ID NO: 24464 - DNA, 110 bp, Zea mays
  Peptide Sequence Number=SeqID_66243
atggtgaggccgaacttgcagggaggaagatccgacttccacggcgcggagctcggaccacgcggcgtggcatcggaatggagaagaacgtcagggttccgggcccacgt

SEQ ID NO: 24465 - DNA, 837 bp, Zea mays
  Peptide Sequence Number=SeqID_66244
atgcgcggtgttctgcctcaagaaatctcggccgcgatatcgcctctccgtcccgccgccgccacctccagaaatctcggtcgcgatagtgcctatccatcccgccgccgccataatcgcccccaacctcgcgaacgagatccgcagattgagaggccttcaccaattgatttctgcgcgcctcgggcccggggaggtgatggcacggtgctgagcgacctgctggagaactgcgtcgcggaggtgctgctcaggctggacccgctggagatctgccggatggcgcggctcagccgcatgttccgcggcgccgcatccggggatggtgtctgggagtccaagctactgacgaactacgcgcgcctcctcgctgtcgctgcggccggtgatggggaagcggggcaggccgtcgggtctgcgccgaaggcggagccgctgcccaagaaggaactgtacgcgcggctttgccgtcggaaccgtttcgacgacggcaaaaaggagttctggctggacaagggtggcggaggtctatgtatgtcaatttcttcaagggcgctttcaataacaggcattgatgacaggaggtattggaacttcattcccagtgatgaatcaagattccgcacggttgcgtacctctcgcaaatctggtggtttgaagtcagaggggaggttgaattcttcttcccagaaagcacagagaactggaccgtctccaaggaaaggaatgagttgaaaaatgaatgcattgcgctgaaaaaggacagaacgaagaaagatcttgaaatcaaagctaaagaagctgagattcaaaatatgaaaaaagctaatgtgtaa

SEQ ID NO: 24466 - DNA, 213 bp, Zea mays
  Peptide Sequence Number=SeqID_66245
atggcgacgttgcagcggctccagtgggcgaggctggcgcgggaggccgcgaccgggcacggctcgggcgcggcaaggcaaggcacacaacggttgcttcaggggcgcgggcagcagcaacggggtgaggagcggcttccccagcgatggcgcattggccgcgcgcactgggatccggtggcaggagggaagtggcagcgctgggcgagctag

SEQ ID NO: 24467 - DNA, 423 bp, Zea mays
  Peptide Sequence Number=SeqID_66246
atgcctacaccattggtagacatccctccattaaggatggtcttggcttccaaaagggagccaaagacaaaaaaatgccatgaggcccccaatttcattaagaaaaaggggaaagcgcctatggctagtagctcacattcttctcattttagcaagaaccatgcttacatttatgctaatgttaggaatgttcgagatgtgcaccataatggtgatgatgttatgcatcataatgatgtttatgcttctcatgccatgattgcctcttctagttcatccaatgctcatggtagaagtagatccaatgtttctcatatgcttaaggctaggaatgcttcctatgttctttattgcaagtctggtagagtagttgctgcaaatgtgagacttaaatgcaagaatggtgcaataatagagacttaa

SEQ ID NO: 24468 - DNA, 402 bp, Zea mays
  Peptide Sequence Number=SeqID_66247
atgaacaccgaacgacgctacccgcggtgcgtggtggaagcacaagtccggcgacaaattttgggccacggtttgggtgactacgaatctgacctgacggaacatgatcaagggaggaaggggggcacggaggacatgaatctcaccggtggcagacgcgtagacaccctggctccgacgcacggtggatccactcgaggcgacgcttggcactctctttctcccagaggtatggacgacggtgttcaggcgcggtggagaaacggggagcggctctgcgaggttgtgacttatagccacccacgcccacgaagtcggcgtgggattgacccaccatccaaactccgcacgcgagatccgcaggtcatgctgcgcgtggttattgcgagatgccctcggtga

SEQ ID NO: 24469 - DNA, 372 bp, Zea mays
  Peptide Sequence Number=SeqID_66248
atggcgtctgcatcaatgggggagagtggggagggagaaatagacatgttgaagctccttaacgcgagatggcgaatggtcggttgggcacggggcttcggcgcggcgtcctggtgcggggctcggacgcggggcgcggtggctcgggcgtggggctgctcggctgcgcggtggactgggcgcgtgaggcgctggcgacagggcttggcgtggctgcgcagcgtgctgcctgggcgtggggaaagggacgcccgcgggcgtggtgaggacgaagtgggcagcggcgacaaggacatcggcgacaccagggcacttggtgaggacgaagtgggcagcggcgacaaggacatcggcgatgactccacctcctag

SEQ ID NO: 24470 - DNA, 306 bp, Zea mays
  Peptide Sequence Number=SeqID_66249
atgcgcacaaataaggcgcaactaccctatgacgatcatgagagagcactcaagttactacatgctctatacgggttcggagaggagcaggtggagagccttggggatgaggagctggcgcttgttgccagtcgattcacgcagttccacaacaaccgtctgaatgagctatgtggcaggtccaaggatggatgctataactatggcgagcctgaccacttcatcgccagtttccccaagataaatggcaagccggaggctggcaagctgtcacacccagttttaggggcaaaaccgaatgcatag

SEQ ID NO: 24471 - DNA, 696 bp, Zea mays
  Peptide Sequence Number=SeqID_66250
atgtgcaagtaccttagtgcagaggagctcttagaagcgatatgcaaccaaagaaaaggccgagaagctcaagtgaagcgattcagtgcagacgaacaggggaagcagacagataactcaagctgtttagtgcagacaggcagctcaagcaggagtcggaattggatgatgaatcggattagggagggagagatcaaaggaggggaagagatagggaggcgggggccggggagggagatgagagggtggtcaggaggattacctggtggtggtggtggccggtggcaattcgtgagggttggcggcgcgcaaccgctgacggtggcagcggcgcgtctagggttgctgtgctcgtgtgcgggagcgggagtcaccaagtatagcgaaggccatacaggtaagttgtccgctcttcaaagtatactacttatccccaggatatgtatccgagctgtatcgctatccgatacggatacgagctctttgggaagtatcctggtcaaggagtcgcagaaccatgcagcaccaaggacgatggatgcactctttgcacggatgaaggcgcaacgcatgaggaccgcaccacagcagcaggcaaatcctgcctctggacgtgatttcaaccagcagcgacgtgttcagcagcagcagaggcgaggtagagcatatggtggccgtgttgtcggcaaccaatga

SEQ ID NO: 24472 - DNA, 255 bp, Zea mays
  Peptide Sequence Number=SeqID_66251
atggcgctgcctgctggtggcgagtccccatccaagccctgctttctcccctctgcttcggagctgttggagttggacattgaagatggaagacttgccagtcccttgggtctcaagcgatcagggggttgccatggaagtgaactcgtcagctttgtattgactcaggtccatggacgtcaaccgtggccgtcgctgtcagttaacattgtccaggctccagggaccccagccctttcgccggcaggaaggtga

SEQ ID NO: 24473 - DNA, 267 bp, Zea mays
  Peptide Sequence Number=SeqID_66252
atggcgaacattctgaaggttgttctgaagcctttgaaggtggcatcgcccatggcgccgaagattattgagactccttttagcacgcctatttctgagagtctgacaattgggttaaaggtggatgccatcccaaagacttctcttgatatggacaaggctagcgcttcgaaggtttacaccataacagatgctattagggagaaagaacaagaaaatgctgaagtctttaaagctaaaggctctatagaagaaaagacttcatag

SEQ ID NO: 24474 - DNA, 879 bp, Zea mays
  Peptide Sequence Number=SeqID_66253
atgcgggtggccttcgcctgcagcgtatgtgggcagcgtacgaccaaggccatcaatcctcatgcctacaccgatggaactatgtttgttcagttgttcaatgcaactcttgtcctcccaatttttttgtgcagtaatgtttggctggccaaaaggatttggcaatcgcttatctttgactcaataccttatgacctcgaaaaggtttttcaagctcgtattttggatgcattctattgttactttgttagtgtgttcacagattttgtgttcagctatgctaataaccacctcatagccttttgccatgccacacctgttttagagaatctgaagatagcttgcctcacttcacagacatgttgctgtggagaagttcgtgagtttatctattctgataatgggactgtaaccatgatacaatcaatctcaaatgaacttaaggataataagggtcaacatgagatatgttgttctaaaattgaaacaataaaggcaatagtcctctgtctttttaaattttttggctcgaaattcattggtccaattttgacctcggaaagtcagaaaaaatgcttgtcatttggtcaattagctagcgacatgatattaagtgttgtagcgtggtcaagggtctggaagatgagtaggcggaacgtggttgcaatagatcctattcaagtgtactatgtggaagggatcttggagcagttggcgttcgtggaggagtcgaagcgcaaggaggactgggtcgtcaggaaccaggagcgcagggcggccaaacgcaatcgcatccgcgacgagcacaaggtcgttgtcaggcagcccaaggactcaccaccacgttccacaacagggagcgtgacatcctgcggatga

SEQ ID NO: 24475 - DNA, 222 bp, Zea mays
  Peptide Sequence Number=SeqID_66254
atggcggcgctcaccaccagccccataaccgcgtcctgtccatgcaacacagaagccagcggggagagtgcgaggcgcgatgagattcgggagaatgaagaatgggccctcatgctctccattcctgctttagcgtcgacttcaatggcctacaagatatggacgaggtcgatggaggaaaatgtgcccatcggcccctcacccgaggtgatgtcgaagtga

SEQ ID NO: 24476 - DNA, 432 bp, Zea mays
  Peptide Sequence Number=SeqID_66255
atgtctctcgatttcaagctcatcctcgacgagttcaaccagaggtttgacaaaatagagactcgctggtaccagcgcttcttgccctccgtgtacctcgacctcccgcctacccccctcgacgtcaaccactcctccttcgacgcgtccgccagcgtgccacccaccccagccatggtcgactcctacgccccggaccccgccactcaattcgtcggcttcgacttcgaccctgtgtccttcttcagcaacgggaccaactccgacctcatgagccctgccttcctcaagggcagagaggaggccaacaagtttctgccctcgcaggataagcacgtcatcgacctcgatccaccagaatactccaacagattcatcctccccaccacctccaccaacgaactcagcatctgcccgctgaaagtcacctag

SEQ ID NO: 24477 - DNA, 537 bp, Zea mays
  Peptide Sequence Number=SeqID_66256
atggttaaaaattttggcagcaaaacagtacaaatagcaatgaatgctgtgcatttgagagcaagtctccaacaacccgcgcctagttgtgtcatctccgaccctgaggagcctccacaggaggcgtccacatgtggtgaccgtgcggtgtccgctacctcaagttgctacatcacctgtgttcctagcgagcctactctttccattattgcgagctacagtggtaacacaaagagcttggcttcagcactatttctagtggcatcgacatcgaccatcgccgatgagattatcactgttgccaaggagattgtcaatgactccatctctactattgtagcgtccctcgccatcgatgtggcgctcagcgatttggtgattgatgcgcccaccaagtgtttgagggaattcctgagcacgtacgtcaatgtccaagcgtccgtgtatgctgcagaaggcccactaacatcaccaccaacacatgcgtcacctggaacccccaccctcagccttcacacatcgagcttgaagtcatag

SEQ ID NO: 24478 - DNA, 498 bp, Zea mays
  Peptide Sequence Number=SeqID_66257
atggcgcggtgcgcccaacggcccgcggctggcgtgtcgcggctagctcggccaacgccctggcgtggcacgcggtgcccgacgcagcccgccttgcgcgcggccggtggcctatgtccgtgttggtgcggcagcctttgtggctcgcccgcagcgacgcgacggcccaagtgtggccatggtgcattggtccagcaatgtcccagcgaggctccacggtcgagccccctgcacaccgccatccgtccagtcgtcgctgcctcacccatggtcgctcacgcgcgtgcgggcaactgccgcggtgcctcggatccaccggtggccagcgcctcgccgggcgagtccaaggtcgtgtccccccgtgcgcgcggccagcagcccctaccctccccttcgcacgcgagtccacggctcagccagccagggcatggtcccaaggagctcgacgccaagcccctgctctcttgctcgtcgttaccctcctcgtccctcggctag

SEQ ID NO: 24479 - DNA, 309 bp, Zea mays
  Peptide Sequence Number=SeqID_66258
atggcgcgacgcgcccaacggcccgcggccggcatggcacgactagctcggccaacgccccggcgtggtccgccttgtgtgcggccggtggcctatgttcgtgttggcacggcgtggtggctcggcgtggtggctcggcgcggtagccttcgtggctcacccgcagcgacgcaacgtctgaagcgcgaccatggtgcgctggtccagcaatgtcccggttgcctctggtgcaatctatgctcaggtaaagaaggaggtgtcgaggcggatatccaggagttccaggacttcgacgagttcgaggattag

SEQ ID NO: 24480 - DNA, 420 bp, Zea mays
  Peptide Sequence Number=SeqID_66259
atgggcaagagcaagaagggcagaagttcgtcgcaccattctggcgacaagcggaagcgcgagccgactcctccctcggaggacttcggcgattccgagtactcagaagaggagttctcctccgagtccgaggggtcgccagtccacgcctctcccccggcgtcgtctgatgacgcggacgattcccaggggatcgtcgccgaggtgtggacatacatctgggccgtcgagcgctccgggctcaagggttcgaatgagtcagaggtctccttggatgaggagaactcctctgactcgttcgaggaggggagcggcggtgatgacggcgacaagggcgatggcgacgacgatggtgacggcgacggcggcaagggtgacggcaacgacggcaatggcgacggcaagggcggcagtggctaa

SEQ ID NO: 24481 - DNA, 567 bp, Zea mays
  Peptide Sequence Number=SeqID_66260
atggggccggagctgcctccggggtttctcttctgctgcagttccgtctcagctggaggtgactatccgtatccacgaaatgaaaattctatgaagaaattctcagaggatggaatccctacaaaacagtctccacttgaagtatcagaatcgagtgatgtcataattaccatgcttccttcatctactcatgttttagaagtatacaatggacccaatggcttgctttgtcggggcgaacgcttgggcccatggttatacatagattcatcaacagttgatccacaaacatcaagaaagatatcgacagccatctcaagatgccttttaaaagaaaagaaaggttacgctgaaagccctaagattctggatgctccggtgtctggaggtgttcctgctgcagaagctggcaagctaactttcatggtgggtggtcttgaggaagcgtatttagcagccaagcccttacttcaagcaatgggggaaaaaacaatctactgtggtggtgctggaaatggctcggcaagtttttttaaccttcattcttcacaaaaattctcagtgtga

SEQ ID NO: 24482 - DNA, 267 bp, Zea mays
  Peptide Sequence Number=SeqID_66261
atgactcttggttgggctgccaaacgaagtgcaccccgatctcatcagcgagctaggcgtgagatgcacgtggaaatgggaatgagatttgtggggagggaggaaatgagaaagatagtgcggggagggggaatgggaatggcagaacacagaatggcagtcgggaatgggaatgggctttgcggggaggggagacagtgcggcgagaggggaatgggaatgggaatggcagaacacggaatggcagcctaccccttaccgccttaa

SEQ ID NO: 24483 - DNA, 309 bp, Zea mays
  Peptide Sequence Number=SeqID_66262
atgtcgggtgcccaggccgagcaccccacaaactggccgctctcgggtttctctgggagtcactccgctataattcaccaaactgtccaatgtgcatcggacatgtccgttgaaccaacggagcaacggtcaactgcgcccaacagtcgactccaatgtcagatgaacagtgatcagtgtgcaagtcagaagtcagagcagcgaagccagaacgcactggactgtccggtgtgccaccagactgtccggtgccgcaagaggacaaaggactccaatggtcaaccgctccaaaccccaatggtctactga

SEQ ID NO: 24484 - DNA, 789 bp, Zea mays
  Peptide Sequence Number=SeqID_66263
atgaacctcttcgtgaggcaaattaccagcagggcgagcgtcctcgagaatagatcaaatgccaataagtcaaatgtggatatgatattaatccaggggctcggactcgggctaagtcctggaagacggcgaactccgctccgcccgacccagggctcggactcgggctcagccccagaagacgacgaactctgcgccgcccgacccagggctcggactcgggctcagccccagaagacgacgaactccgcgccgcccgacccagggctcggacttgggctcagccccagaagacgacgaactccgctccgcccgacccagggctcggactcgggctcagccccagaagacgacgaactccgcgccgcccgacccagggctcggacttgggctcagccccagaaggcgacgaactccgctccgcccgacccagggctcggactcgggctaaagtcccggaagacggcgaactccgctacgcccgacccagggcttggactcgggcttagccccggaagacggcgaactccgctccgcccgacccagggctcggactcgggctcagccccagaagacgacgaactccgcgccgcccgacccggggctcggacttgggctcagccccagaagacgacgaactccgctccgcccgaccccagggctcagactacgccccgacctcagccgacggtctccgcctcgcccgatccaggggctcggactcgacctcggccacggaagacagactcgacctcggcttcggaggagcttccacatcgcccaacctag

SEQ ID NO: 24485 - DNA, 576 bp, Zea mays
  Peptide Sequence Number=SeqID_66264
atggtgcccctcagaactgcaagtgcgcacggtgccctttggtgtaggctggttgtcctggcattgccttttgctgttgatgacgtcggtgttgaaggcctgctgagggatgtcgtctgcaatgggagccttgcctttcttctccgccaggagtgccgccttcgttgtgtcgtcgatggaaacaacggccttcgaatttggtatcttgggggggcatcacgggaatgctttgttgtagcacaaacggtgggcgctaaatgctggaacttgcaaactcacggtctggcaagctcaaacggtgggagagtgataaacggtttgatgacactaaatgcaatattctggggcaacagtgtttttctccgtcccccgcaatggcacagtctcggccacgacgccactccggtggttagcacaggtcgaacacctggccgcgctcacatgatctcgccgccggtgtccctagacttgcacaaattcagtgcaaatgtattcccagggtgccagcagtacatgggtatcccatacatggctttcatgcccaagttcctcacagatgcacagacacacccataa

SEQ ID NO: 24486 - DNA, 276 bp, Zea mays
  Peptide Sequence Number=SeqID_66265
atgtggcaatcctcggttgtcccaattgtccctgttggatctgtcctgacacgtgaacatgtgggcccaacactcaggagacgagagggttcaagtgcacagacaataaagacaactgatcaaaccaaggatggaggcaagaagagcttcgaggtaccgagtgcacgggagaaggtcaaggagaccaggaacccaaagccaggggtgaagaagaagacttgcaaagtcaaggttgatcgagttaagagttatggtgcatcaaggatcactgcataa

SEQ ID NO: 24487 - DNA, 774 bp, Zea mays
  Peptide Sequence Number=SeqID_66266
atgggccgccccggccggcccagccgcccccccgcacgcgcccctgtgggcccaaagcggcccagccgcccctcccctcccccctcccccccaaaaattaccctccccgcgggccccgcccgtcattctctctccgtctccccctaccctaaccaccgccgccgccgcggcgccgccctccctcgccatggtgaggccccctcccctccctcccccttccacgcccgccggcgccgctccccggcgagccgccccgcgcccggccccgcccccgccttggcgacccgcccgcccggctccccggcgagccgctcggccgcccaggcgacccgccccgccccgacctcgctcgggccccggcgagccaccccgcgccgccctcgcgccgccccggcgggtccgcctccgccccgcgcccggccgccccggcgagcccgcccccgccctcgcgccgcccccgcatcgccctcgcgacgccccctcggcgagctgcccccgccccgccccggctcggccgccccccgccacgtctgtctccggagagcccgcccccgcctcgtcccggacacacagcgcccgcgctcgcctcgggaccaggacgtgctgtccccgacaccgggcggctctagtcactactcccgactgcgccgtcccggtcgctgtgtcagcgtcgcgacgctagtgctccgagcatcgcccgactacaccacggagtgccttgctcgcgtcgaggacggccccagcgcgtcctcgagccgaccagtgagcatgtga

SEQ ID NO: 24488 - DNA, 282 bp, Zea mays
  Peptide Sequence Number=SeqID_66267
atggcgtacaagatgaaaggcgtattcaagggcctcaaggtcatctcccagatctttgatcttgacgagcctcgagatatatcacccttcggtatatttccggaaagtggcggccaagaaacagcccgacggtaccctgacataccaaagccacccaggaagtcaagaaggaagaaatccaagaacaactcgccgagggcatcctcaaggtcgaggtcgagaagctcatcttcatctaccgctgacagtttcggtgttaaggatatgcaagcggaaatctag

SEQ ID NO: 24489 - DNA, 246 bp, Zea mays
  Peptide Sequence Number=SeqID_66268
atggcgtcggtcaaggcgtgccactggccgacgacagaaatggcagagtgggaggtgccaaaggttcaacacaaaccaataaaagggtccaagttagggttcaaaaagaaaagagcaaaagaaaccgaaggctgccctggtctggcgcaccggacagtgttcggtgtaccagggtggatcaactcgaacttcccaccttcgggtttctggaaaagtcactccgctataattcaccagactgtctag

SEQ ID NO: 24490 - DNA, 222 bp, Zea mays
  Peptide Sequence Number=SeqID_66269
atgacaatgttgatcaataatgttttggatcagggtgcttgtgtcaagttggtagtacatagagaaaaaagtggtgaacttggtataggagtcgacctgaacatgttcagacgtgagcaaaaatatctgcaaggaaatatccctctccactaccgtttctactggtttccagggggtagtaaatggatgaggccagggcttggacagggcgggatcacctga

SEQ ID NO: 24491 - DNA, 147 bp, Zea mays
  Peptide Sequence Number=SeqID_66270
atggcgcttctgctgggctggccgcctggatgcttgggcgctggacgtggccgcctatggccagtgccacattgctcgaatgcgggaggcggaaaaaacaagatgagcatggatgcagtggagaaatcgctcgggagtcggaagtaa

SEQ ID NO: 24492 - DNA, 210 bp, Zea mays
  Peptide Sequence Number=SeqID_66271
atggtggagccgccgaggatcggatttgaagacgatcccactgtagacccgtcaactggcactttctctagtcgatttttctcgcaagcactgaatcctacgattaggattgccagagttgggcgcggcggtgtcgtggacgggagcttgcaaaggaaacgaagtcggaggggcttaagtgattttgtcagcgagacaaaccaacagtag

SEQ ID NO: 24493 - DNA, 423 bp, Zea mays
  Peptide Sequence Number=SeqID_66272
atggcccagctcgcgcgcgagcagccgtgcggcccattcgcgcgcctggcccaacgtcgcgcccacccctccccttgggctgccgctgttagaccaactccagcagtgtgcgactccgtatccctaaaacgcgcggccgacacattctctctcctctccgtatccggctccgtttccagcaacactccccatcccactccgcatgcagtctatgacacctggggcccgccagcaggcgcgcgcgcccgcgagagagctgcggagaggagagagaaagcgtggaaatggggagtctgggtacacgccgtgcgttttacggagccggatacggagcctgctggactgatgaatagtgtgctagactccgcaaaatacggatacggagccgcatgcggagtgctgctggagttggtcttagtgtag

SEQ ID NO: 24494 - DNA, 288 bp, Zea mays
  Peptide Sequence Number=SeqID_66273
acccctcgtactcgagcatgcatgggagctgagctgccattggcaagccgtccgtccgctcagcctcgtggcgaccgcggagcagcgtcccggacgcttggcgtctgggacaccgtggccgcaaaggccgctgcactgagtcctcagcgcgtaacagtggcagagctacgatttaactatagagttgtactgtacaaacggggcccgggccaagtcgtagatcttgctctcgagtccccgctcccgtcaatgagggaacgaggtcttaactcttgtcttgcgggataa

SEQ ID NO: 24495 - DNA, 981 bp, Zea mays
  Peptide Sequence Number=SeqID_66274
atgcccggcataccgagggatgtcgccgagcactcgctggatattcgagctagagcccgacccgtgaagcaacctctgcgtcgattcgatgaagaaaagcgcagagccataggcgaggagatccacaagctgatggctgcagggttcatcaaagaggtattccatcccgaatggctagccaaccctgtgcttgtgaaaaagaaaggtgggaaatggaggatgtgtgtagactacactggtctaaacaaagcatgtccgaaggttccctaccctttgcctcgcatcgatcaaatcatggattccactgctgggtgcgaaaccctgtcattcctcgatgcctactcgggttatcaccaaatcaggatgaaagagtccgaccagctcgcgacctctttcatgacaccctttagcatgtactgctatattattatgccatttggtttgaggaatgcaggtgcgacataccaaaggtgcatgaaccacgtgttcggagagcacatcgcccgaacggtcgaggcttacgtcgatgacatcgtagtcaagacgaggaaagccttcgacctcctctctgacctagaaacgacattcaagtgtctcaaggcgaaaggcgtaaaactcaatcccgagaagtgtgtctttggagtcccccgaggcatgctcctggggttcatcgtctccgagcggggcatcgaggccaacccggagaaaatcgcagccaccaccaacatggggcctatcaaaggcttgataggagtacagagggtcatgggatgccttgcggctctgagccgcttcatctcgcgcctcggcgaaagaggcgtacccttgtaccgcctcttaaggaagaccgagcgcttcacttggacccccgaggccgaggaagccctcgggaacttaaaggcgctcctcacaagcgcgcccatcttggtgccccccgctgcgggagaagccctcttgatctacgtagctgcaaccacttag

SEQ ID NO: 24496 - DNA, 1773 bp, Zea mays
  Peptide Sequence Number=SeqID_66275
atggacgacgcgtggtcgtggctggcctccctgccgcctcctcttcgtgatgaagacgggcccgacacaccgttgccggcgccatggtctctcccgctcgctgcctccaccgacggcgcttccatcgtgctgcgggccgacacaagtcccgctgcttcttcgtctccggccgacggcgatgacggtgacggcgagcccgcgctgctcgtcgctttctccgtcgccatcaacggcgcaggcggcgacgcgcgcgcgctgtgggcgtccgaaggcttcgcggcgtcctcgccggtcgcgccgagggtgcagcttctggtacagctcctcaacgaggtactcgcgctctctccgtacgtcccttgcttgggcgcgggcgttgacggtctcggcggggacgcgtccgaggccaaggtggacgcggagacggtctccgccgtcgtcggcgccgctgaagccggtccatctgcgcccggcgcggccttcttctcgctcgctcttcttctgcggctcttctggctgtgtgcaaccgacgccccggcagacgctgggtacctctacttccgagaccttggatcggagatcgagcgcggcctcggcgagtgccggccggcgctcgccgtgttcctgcgctccgtcggcccggacgtcgaggaccggttcatgcgctcgctcgggtacatgctcgccaagtggtgcttgctgcgggagatacaggctgttgccgggtcggcggccaaactggaagcaccgcgtcgccgtcgcgcgctccccgccgcgtgcctgtcgtacgccaccgaggtgcacggcctcttgatcctgaaaggctacgcgcctgtgctcgccatgccgcgcgtcacgggtcccgcgtccacgtccatcgccgcgtcgccgcacgagctgcccgaggagccggcgctgcggtacggcctggcgcaccagcagctggaggccgtggcgcagctggagtacgcggcgcgcgtgcgtgacaggaggttcgtaaccgtctccgtgcgcgtcgacaacgtccgggtacgcgtcgcgccgctcgcgttccgtagtaatgacggcggaggtaacgacggggaagaagcagaagacgacgacgacgccggcgtcgacgacatcatggacggcgagagccatttcccatcccgtatccgcctctgggtcggcccgcggttcggcgcgtcctatgccaccggcccaagcctcggccgctccacggggaacccagaacgcgacgtcgagatgacgcgcaccgttaagggcgccttctccggcgccactaaaccagccaacggcggcgtcgtgcccaggatcaaggcgaagatgcgctcgtcggcgcggacgcgtagcaggagctggcgctgggagcaggaggccgagggcagcgccggcgtgttcgagggggttctgtacgacccggtcaccgggacggaggtgtccgcgtggcgcccagctggtactggcggcggcggcggcactggagcgacagacccgaggaacggcatgagaaggcggtatggcgggcctgggcgagcgttcagtaagatgcgagggctggtggtggccggcgacgagctgccggaggagatgacgtggagggtggggagggaagcggaagggaggacgctgcgttggcgcttagggctcaaggcttgggtgacctacctgcccaacgaagcaaggagccgccacttcgagacccgctgcatcgagtgggcgcacgaggtggatctgccgcttctggccgtcgacggcgaccagagctaa

SEQ ID NO: 24497 - DNA, 1288 bp, Zea mays
  Peptide Sequence Number=SeqID_66276
atggcgctgcaccacctccgcctcgcgccgctcgcgctccttcgcgccgcaagcctcccgcccctcgcctcctcccgtatcgccgcgcgcggccaccgccgcgttctcctctttgcgccgccgtcgtggccgtggcgccttctgtcgcccggtgcgaggccgcgcgcgcttgccaccgctgcggcagaggccgacgatgctacctcgggctcgggcaacgaattcttcgcagagagcacgtcgtgggcttcactcggcgtatccgaacgcctcgcgtccgccctttgcagtgccgggctctcgaggccttcccttgtccaggcaacctgtataccacatgttctcatggcaaatgatgtaattgtcgcagcagagactggtagtggcaaaacccatggttaccttgtacctttgattgaaaagctgtgctcaaaatcttctaccaccaaagatgacaattgtcaggacaccaccccaggagcacatgacatggtgttggtcctttgtcccaatgtcatgctctgcgagcaagttgttcgcatggctaattcattacttgacgagtctggcaaaccacttaaaagagctgctgctgtttgtgggccaaatggctggccagctgttcatccagatattcttgtagccaccccagctgctctattaaactatctatttgactatgacccggaaaagaggcgaagagagagattcatgcgtaatgtaaaatttgtagtgtttgatgaagcagacatgctactctgtggaagttttgagaaccaggtcattcgtctcatcaatatgttgagatttgatgaaaagctactttctagagcacaggattctggaaaggatatatcacttgggagtgatgatgaatatcatgaggattcaaagtttgagactgctgaatttggtagttctgacaaggaaattgaagacaatattgtggaagatagacttgtcaagttggagaatagtcacgttggagcacacaaggactggaggagagttagaaaaatatacagacgcagcaagcagtatgtctttgttgctgccacccttcctcagagtgggaaaaaaactgctggtggtgtgctacaacgtatgtttccggatgctgtatgggttagtggcacttatctgcaccgtcacaaccccaggtcagtgaaagagagcgtaggctcggctcccgactctgtgcctgtggattcaacactgaccctatggcagatccaaagcgcagagcaaagtcttgcaagaaccgtgacaaccgggaggatatcaggag

SEQ ID NO: 24498 - DNA, 150 bp, Zea mays
  Peptide Sequence Number=SeqID_66277
atggtggtgtgcttgtatgcactgatgctgctgcccgtgggcttgatgttccaaatgtttctcatgtcattcagggtgggccgcacagccagagctggtcaatctggtatagttactagcctatacacagaggcaaatcgtgatctttaa

SEQ ID NO: 24499 - DNA, 1635 bp, Zea mays
  Peptide Sequence Number=SeqID_66278
atgggtgcggctcgtccgcggcgctggaagctgccgttccaccgcaccgtcagcgccgtgggcggcgggggcggcgcgccgtgctcgccctcgtccaggtcgtcctcctcgcccgcgcggtccgaggcgtgggcggccgaggcggtgccggaggagttcctgtgcccgatctccggcgcgctcatggcggaccccgtcatactgccgtcggggaagaccttcgagcgggcctgcctccaggcctgcgcggagctcgcgtttctgcctccgggagtcgaggccggggacgcggacactgtcatccctaactccgcgctcaagggcggccatctgcacttggtgcgcgcgctccggacgggaggtgccggcgtcgcccgtccgccgaggcgggcgcggcaggccgtgcagcgcgctatgcctccggcggctgccaagtccgtgaggacgaccaccacaaggcgcgcggtggtgatggccgcgagcacatcaaactcgtccacgtcgtcgtacgggtcggcctcggagatcaccgcggcggaggacgaggccaaggccaaggaagaggcgccgcggaggaggacggtcaaggaagcggaggtggagccggcggcggcgccgccggctgacccgctggaggacgatgtggtgggcaaggtgatggacgcggacgacgacggcttgttcgctgcggcgatgggcgcgctgcgggaggccacgcgcgagggcgaggagcggcggcgcgcgctatgcacgccgcgccttctcggcgcgctgcgccgcgtgctgctgctcccacgccacgcggccgcccgggtggacgcggtggcccgcactgtgccggcgctcgtcgaggtgctccggtcgggcgcgtcggcgcccgaggcgcgggagcacgcggcgggggcgctcttcgggctggccctcaacgaggacaaccgggccgccatcggcgtgctgggcgcggtaccaccgctcctcgacctgctcacgtcgcccacccacgcgccccgcgcgcgccgcgacgccgggatggcgctctaccacctcaccctcgcggccgtcaaccagtccaaggtcgcgcgcttccccggcgcgcccaaggcgctgctcgccgtggcctcgggcgccgcggagccggggcccatccggaggctggcgctcatggtggcctgcaacgtggccgcctgcgccgagggccgcaacgcgctgatggacgcgggcggcgtggcgtccgtctccggcatcctcctctcgccttctcacgacaccaccaacggcggcggtggcaccgcggacctggaggagtggtgcctgtcggcgatgtacgcgatgagccgaggcagcctccggttccgcggcctggcgctcgcgtccggcgcggaccgggcgctccggcgcgtggtggccgacgagggcggcggcgtccggcgcgagattgctcggaagaccctccgcgccatgcggagcgacctcgacgaggacggcggcgagtacaacgacctgaccggaagcagcgcggagtgcggcgacggtgaggactgcggcgggagcatcgtgtcggacgggctcatgtcgttccggcgccggcagcgcgagctcggcgtctcgtcgtgcggcaacaccgccgagttctga

SEQ ID NO: 24500 - DNA, 561 bp, Zea mays
  Peptide Sequence Number=SeqID_66279
atggattctcaggcgccaacgaactcagatggtgaccaaggaagttatcccttaattggggatggggacccattggggacccgaaacccgaatggggatggggatgagatgagttttacacctatgatgggtatggatatggaaggacagcgccgcctgcgccactccgactgcagtgccactcgacagagtgagtctgacaggcagccaggccttgccaaaggcgccacggcgaactccgctccgcccgaccccagggctcggactcgggctaagacccggaagacggcgaactccgctccgcccgaccccagggctcggactcgggctaagacccggaagacggcgaactccgctccgcccgaccccagggctcggactcgggctaaggcccggaagacggcgaactccgctccgcccgaccctagggctcggactcgggctaagacccggaagacggcgaactccgctccgcccgaccctagggctcggactcgggctaacacccggaagacgacgaaactccgctccgcccgaccccagggctcggactcgggctaa

SEQ ID NO: 24501 - DNA, 117 bp, Zea mays
  Peptide Sequence Number=SeqID_66280
ctcgaccacccgatcgagctcaaggaatcgctcgccgacgcctatcctccgtcacggatccgccgcgtcgcagtcgacgctgttgacgccaccctcctctggtatggacctgcgtaa

SEQ ID NO: 24502 - DNA, 936 bp, Zea mays
  Peptide Sequence Number=SeqID_66281
atggggatgagggtgcgtgttggaggcggagtctgcgacaacaagatcgtggcgtatgcgaggacccctagaaccaagccatgcgacgggacgacgccggcggaggaacccgggttccacgacttgtttgactcggtgcgccgctccatctccttccggcccaccgcccccgccccggaagcccccgcgggcccattcggcgcgggggcaggggggatcggcgtgcggatcagctcttgcctccggaagtcgcgggggatggggctgctaggtctcatcactaaaagcccctcgccgccgcgccgcatgctaccgccgatgcccgatcagtcggacggcggcagcggagggggtggggccaacggcggagtcggagaggagaacccactgatccggtggcgtaagggggagctcatcggggccggtgcgttcgggcaggtctaccttgggatgaacctggactcgggcgagctcctcgctgtcaaacaggttttgatcggcacgagcaacgcgacacgggagaaggctcaagctcatattaaagagctcgaagaagaagtgaagctactcaagaacctgtctcaccccaacattgttaggtaccttgggactgttcgtgaggaagacacactaaacattttgctggaatttgtccctggagggtctattcagtcacttttggggaagcttggttcattcccagagcctgtcattaagaaatacactaagcaaattttgcaaggattggagtatctgcatagcaatgcaataatacatagagatataaagggtgcaaacattcttgtagataataaagggtgcatcaaacttgctgattttggggcatctaagcaagtggcaaagttggctaggttcagggatgtaaaatttatacaaagtaggatgaaggggctgaatttccaagcgaaggcttaa

SEQ ID NO: 24503 - DNA, 285 bp, Zea mays
  Peptide Sequence Number=SeqID_66282
atggagaccgaagactggagaccatacctgcacgctggctgctggcgccgtcgcgccggagatggaggaggggccgagcaggacgatgccgccgcaccggagatggaagaggtgtcggagatggaggagggtagcgcgccgccgtctcctattagggccgagcgggacgatgccgccgcgccggagatggaggaggcaccggagatggatgagggtacttctactcacgtggtgggaattgggatttgggagaaaggaagctgggatgggccgctgggcaagtga

SEQ ID NO: 24504 - DNA, 144 bp, Zea mays
  Peptide Sequence Number=SeqID_66283
atggccgtggctactcctctcggcgccctgctcaccttgagcgtggccatggccgacctccactccaccttgctaacggtcgacgtcgcgcttcgtgccatgcccgttcgacgaaatgccaagccttgtggacagcccatgtga

SEQ ID NO: 24505 - DNA, 363 bp, Zea mays
  Peptide Sequence Number=SeqID_66284
atggggttttccaccatgagatcgaatcggagagaatggaggaagggtagaagaggattggccatgggatcctcggccacgacggtctccacgcctgggaggggctgggctcggtttccctacaggggagagctgggcaccatggccgcgctgctgtgctgcgagggggcgggagcgcgagcagggggtcgccgtcttggaggctatgcaggggaggtgccgcacgagcacggggtcgccgtcttggggtccgcaggggcacgcgtccactggctgccgcgggggcgcgcgtccactggctgccgccgaggcgcgttcgtgccgtgcctggtgaagaccacgaccgccggtggccagggctag

SEQ ID NO: 24506 - DNA, 1641 bp, Zea mays
  Peptide Sequence Number=SeqID_66285
atgccgcgacttcccgattcatgcgggaagcctcggtccacaccgggcgcacgctcaacacagcgcctgcgaccccgggtcgcctcagcaacgagcaccatcaccgcgaccgtcgggcccacctcgacgagagggtgcaccgaggctaccaccccaggcgtggaggacgctacgacagcggggaggatcggagtccctcgcccgaaccacccgggcacgtacgtgcgccctgggaattcctgggacctccgaagctgccgacagcagccgggagagtctctccgggactacatccgacgattctcgaagcagcgcaccgagctgcccaacatcaccgactcagatgtcatcggcgcgttcctcgccggcaccacctgccgcgacctggtgagcaagctgggtcgcaagacccccaccagggcgagcgagctgatggacatcgccaccaagttcgcctctggccaggaggcggtcgaggctatcttccggaaggacaagcagccccagggccgcccaccggaagatgcccccgaggcgtcaactcagcgcggcgccaagaagaagggcaagaagaagtcgcaagcgaaacgcgacgccgccgacacggaccttgtcgccgccgccgagtacaagaaccctcggaaaccccccggaggtgccaacctcttcgacaagatgctcaaggagccgtgcccctatcatcaggggcccgtcaagcacacccttgaggagtgcgtcatgcttcggcgccacttccacagggtcgggctacccgcggagggtagcagggcccgcgacgacgacaagaaggaagatcaccaggcaggagagttccccgaggtccgcgattgcttcatgatctacggtgggcaagcggcgaacgcctcggctcggcaccgcaagcaagagcgtcgggaggtctgttcggtgaaggtggcggcgccagtctacctagactggtccaacaagcccatcaccttcgaccgagccgaccaccccgaccatgtgccgagcccggggaaatacccgctcgtcgtcgaccccgtcatcggcgacgtcaggctcaccaaggtcctcatggacggaggtagcagcctcaacatcatatacgccgagaccctcgggctcctgcgtgttgatctgtcctcggtccgggcaggcgctacgcctttccacgggatcatccccgggaagcgcgtccagccccttgaacaactcgaccttcccgtctgcttcggaacaccctccaacttccgaagggagaccctaacgttcgaggtggtcgggttccgaggaacctaccacgcggtactgggaaggccatgctacgcgaagttcatggccgtccccaactacacctacctcaagctcaagatgccgggccccaacggggtcatcaccgtcggccccacgtacaaacatgcgttcgaatgcgatgtggagtgcgtggagtacgccgaggtcctcgccgagtccgaggccctcatcgccgacctggagagcctctctaaggaggtgccagacgtgaagcgtcatgccagcaacttcgagccagcggagacggttaagtctgtccccctcgaccccagcaacgacgcctccaagcagatccggatcggctccgagctcgatcccaaatag

SEQ ID NO: 24507 - DNA, 285 bp, Zea mays
  Peptide Sequence Number=SeqID_66286
atgccgactccagtgcgccggattattccccatcacggtgggtattgctcgccggattggcctctggtccacccgaggttctcctccgccgtctgcccgtctgagccccgttcttgtgacctaggttttgccatagtgttcacaagggccattgatccgagatctagtggccagagcgccccgcgccctcagcgcgccactgtcccgtgggccctgcgtgtcatcgtctcgccccgccctgaatcacacctattaggcatccacacgctcgcccaccagttctaa

SEQ ID NO: 24508 - DNA, 240 bp, Zea mays
  Peptide Sequence Number=SeqID_66287
atgcagccgatccggcggcggcaccgaggctttgcactcctctgtctctccgccgccctcctcgctgccgccactctgctccccggcgccgccgtcgccgaagttcacgctcatttgagtaggctgctagttaccatgtctgtgtcacactggctggtcttagcaatcaagaccaggatatcaaagaagggctacttcgtggatcttgaagctgatgttggctggctgtggtggacttag

SEQ ID NO: 24509 - DNA, 573 bp, Zea mays
  Peptide Sequence Number=SeqID_66288
atgacgataagagttgaggtccagacgggtctgtggaggaatgagcggccaagggtgggaagctgggagccactgttcccattcagcaaactggaaggagtgagcctggggtcacaccaggtgacctgccaggatgcgatgaatggtgcagccagtgatgccacgtcggtgaaagatatgttctatcatgcgtttgatggatacatgaagtatgctttcccactcgatgagctgcggcccttaagttgccaaggtgaagactcccttggtggttatgcgctcactcttatcgattctttggataccttggctttactgggtgataaggagaaatttggtgctgctgtggagtgggttggtaagaatgtccactttgatattatgtttgagaaaaactctctcctattgactggacagttcataactttgcataataaaaccgtctctgtttttgaaaccaacatacgtatccttgggggtctgctatcagctcacctgattgccagtgattatgccacttactgctgcaacatgaaatcattactgaagttgcactgcaaaaacaaaagctaa

SEQ ID NO: 24510 - DNA, 765 bp, Zea mays
  Peptide Sequence Number=SeqID_66289
atggcggcgcatgacccagccggcggcggggattcgactcggccacaaccgtcaccacgacagcgtgtggaggtgccggatccaaccgtttttgagcgagttacaaaaaaatcagtgcgtggaatatggtcacgcagatcaaaactcaatcttgttggtgcccatataaatgtctttactggtgaatggacacagaaggcatatttattgtttggagatgaagaatacctgtacatttttcaggaggcttacaaagctgccatgcactatctccatcatgatccttggtacgtggaggttaatatgaactctggtgctactgtttggccactcttcaatagtctgcaggcattctggccagggcttcaggttttagctggagatgttgatcctgctattcgcacacatgctgccttcttcagcgtctggaaaaagtatggttttacccctgaaggttttaatcttgctacatccactgtacagaatggacaaaggagctacccgctacgaccagagttgattgaaagcacatattggttgttcaaggctaccagagattacagataccttgatgttggaagggacatattagcaagccttcaatatggtgccagatgcccttgtggttactgccacatatcagatgtggaaacccacaagcaggatgatcacatggagagttttttccttgcagaaacgtgctggactgaaatcccacctcagaataattttgtttcaaaattccagcaattccctgctaattaa

SEQ ID NO: 24511 - DNA, 1299 bp, Zea mays
  Peptide Sequence Number=SeqID_66290
atgatggtatcgatccccagtttctacgcggacagcaccgggactagcatgagcatgagcataagcattccagtgaggtttggaccctggggtgggaacagtggcaccatctttgacgacgggatatacacgggtgtccggcagatcaatttgacgcgggggctagtagggatatcctccatgaaggttctctacgaccgcaacgggcaggccgtatggggcgacaagcgcggagtcagtgggggctctactagagctcaaaaggtcgtgttcgatttcccgtcggagatcttgacgcacataaccggctacttcggctcgacgacggcgacgatgaagatgaagatgggcccgacggtgatcaggtcgctgacgttccacacgacaaggaagagccacggaccgttcgggggggacgagcagcacggcaccttcttctccagctgcctggccgacgggaggatagtagggttccacggcagggcgggatggtacatcgacagcgtcggggttcacgttctggaagggaaggtgctgtcgcagcagagagacgacgagacgcgttgttcactagcactagcagcgagggaaagggaagccggagacgaggtggcgccggctactactactactacatacggcgtggtgaaagagccggtcccgataggccccggaccgtggggcggggacggcggcaagccgtgggacgacggcgtgtacaccggcgtcaggcagatgtacatcacgaggaccgacgacttcatcgggtctgtccagatggagtacgacaggagcggcaagtccgtctggtccaccaagcacggaaacggtggccagcagcagatcacaatcacacacaggatcaagctggactacccgcacgaggtcctgacctgcgtctacgggtactacaacgcgtgcgtcgaggaagggcccagggtgctgcgttcgctcaccctggtcagcagccgggggaggtacggcccgttcggcgacgaggtcggcgcctacttcacctccgccacgacggaggggaaggtggtgggcttccacggccggtgcggcctctacctggacgccatcggggtgcacatgcagcactggctcggggtcggggacgccagaaccgctcgcgcttccgctccttccaagtactacatttccaggccaggccacattgactggggactgaggtgttcagttttgtatcgttccaagacacaagtggctggtcgatcaggcgtcgtcgatcttgctgactttgaaaagtcaaaaagcaccacacagttgttcgcttaa

SEQ ID NO: 24512 - DNA, 1557 bp, Zea mays
  Peptide Sequence Number=SeqID_66291
atgacgcggtgcctcatgttcatgccgccgctgttcctcgtgtcctccctcatctccaccgtggggctgccggtggagccgcccgcggagctcctgcagctcggaggcgacgtcagcggcgggcgcctcagcgtggacgcgtccgacatcgcggaggcgtcgcgggacttcgggggcctctcccgcgccgagcccatggcggtgttccagccgcgcgcggccggcgacgtggcgggcctggtccgcgccgcgttcgggtcggcgcgcgggttccgcgtgtcggcgcggggccacggccactccatcagcggccaggcgcaggcgcccggcggcgtggtcgtggacatgggccacggcggcgccgtggcgcgggcgcttcccgtgcactcgccggcgctgggcgggcactacgtggaacgtctggggcggcgagctgtgggtggacgtgctcaactggacgctgtcgcacggcgggctcgcgccgcggtcgtggacggactacctgcgttccaccacgggccccagatcagcaatgtctacgagctcgacgtcgtcacagggaagggagaggtggtgacctgctcggagacggagaacccggacctattcttcggcgtgctgggcgggctgggccagttcggcatcatcacaagggcgcgcatcgccctggaacgtgctccccaaagggttcggtggatccgggcgctctactccaacttcaccgagttcacggcggaccaggagcgcctcatctccctgggcagccgccggttcgactacgtggagggcttcgtcgtcgccgccgagggcctcatcaacaactggaggtcctccttcttctcgccgcagaacccggtgaagctcagctcgctcaagcaccactccggcgtcctctactgcctcgaggtcaccaagaactacgacgacgccaccgccgggtcggtcgagcaggatgtggatgcgctgttgggcgagctgaacttcatcccaggcacggtgttcacgacggacctgccgtacgtggacttcctggaccgcgtgcacaaggcggagctgaagctgcgcgccaaggggatgtgggaggtgccgcacccgtggctgaacctcttcgtgccggcgtcccgcatcgccgacttcgaccgcggcgtcttccgtggcgtgctggggggcggcaccgccggcgccggcggtcccatcctcatctaccccatgaacaagcacaggtgggacccgaggagctcggtggtgaccccggacgaggacgtgttctacctggtggcgttcctgcggtcggcgctgccgggcgcgccggagagcctggaggcgctggcgcggcagaaccggcgggtcctcgacttctgcgcggaggccggcatcggcgccaagcagtacctgcccaaccacaaggcgccgggcgagtgggcggagcacttcggcgccgcgcggtgggagcggttcgccaggctcaaggcccagttcgacccgcgggccatcctggccgccgggcagggcatcttccggccgccgggctcgccgccgctcgtcgccgactcgtga

SEQ ID NO: 24513 - DNA, 660 bp, Zea mays
  Peptide Sequence Number=SeqID_66292
atgaagccgtggaaggagacttccaggagttccaagattacgacgagttctaggtgtgggttagcggcaacccccagtcggctgcctgtgaaggccgcggttatctacgtttcttttccgcactttgatttattggtccgccgacgacccccgccgcctgtgctcgtggtcagggtagctccgaccacctccgacgccgacttgcacaccgacttgaccgtcgtgacctccccgacgtcactgaccacccccgccgggagctctaatgccgcctgtaatcctcgccgccgtaatctatgccgcgggtactgtttaagccagccagggagcacggattgcaacctcgctgacggagagtatgtcctcgtgccggagcaaggagctgctcaggaggtagccccggttctagcaccagagcctgcaccagaggatctgcctgccactgctttggaaggcaagccccgtggactttacccctcacgcgacctaagacgtggtctcccattccggttatggtgggtacaagtgcggtcactgcacgacggcagtcggggttctctggaggacatggttgctggagtgacttggccgtccatcttgccaccggattggacagtcgagtgggatcctgcctcggctgaggaggagcatgaggagtga

SEQ ID NO: 24514 - DNA, 579 bp, Zea mays
  Peptide Sequence Number=SeqID_66293
atgggcaacctccttgtcaaggggctcgggtacgtgaccgagccctcgtctctcagcggaaatcgagcgtctccaccaaacaaaagtcaacaacaagtacaagccccatgctccaagccataccgtctacataggctcggcttcgcctcctcatcgtacgcggccaactctgaactggaactggaggtaatgagcctctgcgagggcacggacgaggtgttctggtcaggcttcgggctcggtattggcaccatgttagagaatgcaaccgctagcgccctggaggactttgaggatgacttcggcatggccgccaaggccatggttgacatcctcccgttgaaggacagtgctgctcgtggagcccacaacattaccgcgggattttgtctggcgaatcgctttagcacaagattagcattaagaaatgatactgacccagaagtcgctcttgcggccctgctgccgcctgccgatgccggcctctcgcctggccgcctcaaacttgcggccgccgcctcctctctagcctcaccgcgctctcgcgccgcgcgcccgtgcccgtgcccctttgtttaa

SEQ ID NO: 24515 - DNA, 489 bp, Zea mays
  Peptide Sequence Number=SeqID_66294
atggtgttggaacttgctctcctgggcaatgggctgaatcccacctgggcctcccgacgcggtgaggacgtgggactagtagacttcgacagagccttcgtcttgccacagagaggaagaagggggaccgccggtcttcatccgatcgacgcctccggcttgctcgggcgcattctgtggatgtggtcttcgtcggtgtggcgacaccgacgaaggcatcgagcgaagggtagcgtgttcgccttcgctccaacacatggatcggatagttggtcgccggaggacgatcctaaggccgctagatcaaaggacgccgcccaagccaccagatcggaggagttggtcgtcgaagaacgtcagagccacccatgcctcacggcgacaccaccgctggccctcgggatcgccaccgctcgcacggccgagggaaccaccgccgccgatcacacatctgagggaaccgccgtcgccgctaaaactaatccctag

SEQ ID NO: 24516 - DNA, 759 bp, Zea mays
  Peptide Sequence Number=SeqID_66295
atgtcgggagatcacgccaagaaggagatggtgaccggcgagaagcccgccacaagccatgggaaggctccatctggggagtctggcaacaagatgggctggggctctgccgctcggcttgataaccctaaccgcccgaaccctatgtccctatcccgatcgcaacgccgaccccgagtccccaaccccgaagccctctctctctgctctcggtctggcggcggcgccgccgttttctctctgccctctctaccctccggcctccgcccctccctgctcgtcggtcgtgctcgccggcgtcgccctgctcgccagtcgatctcgtgctcgccggcctcgccctgctcgccagtcgccctgctcttctccgcgttcgtcgaggcctgcaagctcgtggtggaggagaaatcccctgctgaagcggcggcgatgcgccctgaccgcgctgcgtgcaattctgtcctttctggttgctaccgcgggctaggttcgctggcagatgcagagcgggtgctggagactatgtcggcggttggtgtctcgccagatgtagagagctttgggtgtctcgccttcctgtatgcttggagaggtgttcccagtcgggttgatgaactggatacattgtttgatgctctgggcttcagcaagaaggggtttttcaagaacctggttagtgggtacctcaaatctggtgacttcgagtcggtttcaccaatcattcttcgtgcagtgaaggagcgcagagttgggggatga

SEQ ID NO: 24517 - DNA, 738 bp, Zea mays
  Peptide Sequence Number=SeqID_66296
atgaaggccctggacctcccttttatagatgcaaggtgtcggcgtttcgaccccggggggtccctggaccgacgagtaaattgtcgccgcgtgccccagcccagatgggttggcacgagacggagcgtgaaggggggaaagccagagggagacatgcgtaaaaggggaaacctgcggccttcgtgtttgtcccgcgcccaggtcggggctgagtccgagccctggggtcgggcgaggcggagttcgtcgtcttccggggccgaggccgagtccgagccctggggtcgggcgaggcggagttcgtcgccttccggggccgaggccgagtccgagccctggggtcgggcgaggcggagttcgtcgtcttccggggccgaggccgagttcgagccctggggtcgggcgaggcggagcttcctatggcacctgaggccggacttggctgctgtcagcctcactctgtcgagtggcacaacagtcggagtggcgcaggcggcgctgttctcttgtcaggccggtcagtggagcggcgaagccatccttgcattaaatgctcctgcgatacggtcggtcgtcgtggcgatttggccaaggttgcttcttggcgaagactgggcctcgggcgagccgaagctttgtgctgatgggggttaccagctgagattaggagtcttgggggtacccctaattatggtccccgacacaaggagagggtccaggtgtacaatgggggtgtag

SEQ ID NO: 24518 - DNA, 231 bp, Zea mays
  Peptide Sequence Number=SeqID_66297
atggggccaaacccaacagcagaccagttcgtcttcctcgtgcttcgtgataagggaagctgccccaacaacaaatatcaggtagagcacattcacatcgcgctacaagcctacaatcccaaattcatttttcctgtggcagcaggcgggaggttggtggaaggtgcagcagcgcagccacaggctcgcgttggactaccaccatggatgcttagccacctgagcagctga

SEQ ID NO: 24519 - DNA, 432 bp, Zea mays
  Peptide Sequence Number=SeqID_66298
atggcgcggcgcggaacgcgaagcaaagtcagtagcggcatacctggaacgggaacgggggacgcagccggtggttcgtccgacaccccagccgcgcccgcgttccggccacgccgtctacgaggcctccgccgtttcctgcccctcgacgccggcgtggcagcaggaccgatcgaagccaccggggttgtgactgctgcgctctgcggctccacggccagcacggccgcaccgaccttcgttttcgtggctgcagctgcgcgctgccgctgccgcaggcgccgtcggcggtcccgccgcctggacgccgcgcgcgtcgccggcggcgggtccatccgatctaggtcaccgaggagatcccgaaaaggaaagggccggcatctgggcacaagtgagaagcgagaactcagaaatatgacgctgagtcgctga

SEQ ID NO: 24520 - DNA, 1080 bp, Zea mays
  Peptide Sequence Number=SeqID_66299
atggcatcgcgtctgagcgataatgtgctgcaaactatgactgagaagataatgaggtcagataaaacaagcaagagaaattttcagcacggaaatgaggcgctaaaagattctgtggctgaaggtgctgcctgctcttctcttgcccgtcgtgaacattctaccagagaaaatggagcctcaaggagtaagatacttaagagatccaatgtaaaatccccagttgatagttgcactgaacaaggaactgatatggattatcacaagatgaagagtgccgatttgctagggaacctggaagaagtgtaccaggaaagaacgtgtcttggttactgctcttcgcagaagttggaagaatattgggaaaatgaaaatgtatcttctctcaactccagcagtttacaggcgggaaaaaagagaaagaaaagaagaggcaggaaaaagcacaatcgtcgcaagaaagctaatttacaggattctccagcatcaactgctgctgataattctggtttggtgacgttttctgagaactgtacttcagcccttaaactagaggaacagaggaagaagcaagatcagaacaagacatccatgactaacttacttttaatcaacaatgcaaagagatcagaaccatttgatgtgaatttggaaggcgctattgaaaagagctgtgaactggcaaagaatagttttgacaacacattagaaaataggtatgaactggcaaagaatagttttgacaacaccttagaaaataggtatgaactggcaaagagtaattctgactacataaatatggtaagaaatggattacaagagcaagacttagcatgcttgtcaaacagtcacaatgttaactacctgaagccttcccatttggctgaggaatatacagaaaaactcaaacatgtcttttcactgggaaagtccttaaggcctccgaagaaaaagcttctcatcttagatcttaatggtttacttgtggatatcaacgaagactaccacaacgctcacatggctgatgccaagtattccgaaggccttactgcgatgattttctcaacttttgtgctctga

SEQ ID NO: 24521 - DNA, 174 bp, Zea mays
  Peptide Sequence Number=SeqID_66300
atggcccaagatcgcaatgtcaaggtaccatcaattttcgatgagttcatggtagatgaaaatgaacgtagctcgacaaatgaagcgggagagaaccagactgacgatgaagaaagtggtgaggacagtgaggatgaggaccggagatatgaagttcttcgtgagcctagctag

SEQ ID NO: 24522 - DNA, 663 bp, Zea mays
  Peptide Sequence Number=SeqID_66301
atggggaagaatatgcgcatcaagacggcgccccaagggcgaaaccgtgtccccctcctcggcgacggggagacgtcaagggcgctctcggacctggaagagggcagcgacgtcccgagccagcggaacgttcggcttctgtcggggtcatcaaaacttcccaaatatggtggcaagataattgacattgtgtcaagagatgttcggcgcccagaagataaggcgcaagccctggaggatgtgaagggcacaattttgtacattgtgacaatcgtcttagtcggttcagtttgcacggctcttcgggcatggttattcaattctgctagtgagagagtagtcgctcgactaaggaaagacttgttcagccatctcataaaccaggcaagcaagtttgttctattcaaagtttatcatgaaatagcgttttttgatgtgactagaacaggagagctcttaagcaggctttctgaagatacacaaataataaagaatgctgctacaaccaacctatcagaggcactgcgcaatgttactactacagctattggtcttggtttcatgttttcaacttcatggaagttaacatatttggacgttttcttcgtgagcttttcacatcaaacacaagctgctgctgctgtagcttcatccatagctgag

SEQ ID NO: 24523 - DNA, 117 bp, Zea mays
  Peptide Sequence Number=SeqID_66302
atggcattgcttaaaggagttgcaaaagccaacatgtggaaggtgaaggctgaggctgatgagcgtcaagctggggccatgggtgccatataccctgctctgacctcggacgcttga

SEQ ID NO: 24524 - DNA, 453 bp, Zea mays
  Peptide Sequence Number=SeqID_66303
atgccgacgctgacaaagctgtacagcatgaaggaggctgccctccacaacacgcccgacgactgctgggtcgtcgtcgacggcaagatttatgatgtgaccaagtatttggaggaccatcctgggggcgccgatgttctgctcgaagcaaccggtgctgcttccctggttcacttttcctgcacttattatccatgtggtaaggatgctacagaagaatttgacgatgcagggcacagcaagagtgccaaggagctaatgcaggactacttcgttggggagttggactcggacccaactcctgagattcctgagatggaggttttcagaaaggaacaggacacgggatttgccaggaagcttatggacgacgtggtgcaatattggtcgatcccagccgctgtaattgggatatcagctgttgttgccatattgtatgcgcgaaggaagtga

SEQ ID NO: 24525 - DNA, 612 bp, Zea mays
  Peptide Sequence Number=SeqID_66304
atggccggctggcccgttccctccctcctcctccgccgccggcgactcctttcccttctccctctctcctaccgggctgcactcgccgcacccctagcggtgccggggccgacgacgttggtcatttgtggcctcggcgtgcgactgtgtgaagctgcggactgcgttggtggtggcgcgacgctctggcgtcaacgtggcggtgctagaggtcacacgtttgtgagggtgacgccgaccagtggcctaggatggcgcaaggtggtggtggcggtggcagggtgcccgcgcgacagctggattcggtggccgtgtgtgctagtgccatcagttgccgggtgcggctctggcaggcgtctgtgtgacacacatggtatggaggacgacgatgatggtagctcttggcctgacgttagtgctggaggcttcttgggcgagagcctcagcgacggcaaggctcgtgggcgtcgcttcccctgttggggcgtcgtattcaccttcgatggttgctttagattatcggcgtctggtatacatgtgaagatggcgctttacaacgtgaagtcgaagctactgcatcaggggttgtggctaagcaacgatgacagctaa

SEQ ID NO: 24526 - DNA, 120 bp, Zea mays
  Peptide Sequence Number=SeqID_66305
atggcgacgttggtggctggctccagcgagaagggtggcgcgctcgcccttgtcgacggagatgtcgtggagaagcgggagcgagtcgccgatggcaggaacgcagcagcagggttatag

SEQ ID NO: 24527 - DNA, 3288 bp, Zea mays
  Peptide Sequence Number=SeqID_66306
atggatctagtgacaggtccgctagccattctcccgtccaagctgcaggagctactccaaatccaagatgagtataggctccagaaggaagtgaggggcagagtggagatgatctgccgggagctgcaaagtatgcacgctgccctccgtaaggtggctgatgtgccgcgggatcagatcgacctccagaccaaggtgtggagacgcgatgtcagagaggcatcctatgacattgaggatgccatcgacacctttctcatgcgcatcagagaccgcgcgccaagtgacccaaacaggtttcgacttgccatgaagaagatgaccaagctgtcaagaaaggttaaggctatccatgaaattggtgctgccatcggagacatcgtgaggaaaatccaggagttggtggaccggcgtgtcaggtacaaacttgatgttgctgcagacaggtcaatcagcatggttagtgttgatcctcgccttgcagctttgtacaaagaagcgacacaactcattggcatcgaccaatcaatgtctgaaataatatccatgctgctctcggatgagtcgggccagcaacacattaagaagatttctattgtcggagctggaggactaggcaagaccacccttgctaaagaaacatatgaaaggcttagaagtgaatacgagtttgcaacttttgtttcagttggccaaaatcctgacttggtgagagttttcaagaacatcctcgttaagcttgacatataccagcaagtggacactatcaacagaacagatacgcgagcgctcatcgatgaaatcagacagcgccttagctatgtgaggtgcaggtatctcattgttatcgatgatgtatgggatctggagtcttggcatacactagaattggcatttgttgaaaataacaatgggagtggaataatcataactactcgtaattttgctgttgccacaatagctggtcgtgtttacaagttaaggccactttcgtaccatcactccaaagaattattctacagatcgttatttggtgaaggagtatgccttgatgatcaaataatcaataaggcatcagataaatttctaaagaaatgtgatggtataccgttagctctcatcacaatggctagtttgttcatgggaaaaccaacacaaatgtggtctgagctagccaataatgcttttggacataaaggtcgtaacagtcatttagaagaaacgactatgaggatattatcacttagctactctgatttgccattgaatttgaggacttgctttgtatatttgagtagatatccagatgattatgttattaataaaagttctttgatatggaaatggatagctgaaggttttatccaagaggagcaaggaaaacagttatttgagctcggggaagaattcttcaacgagctcgtaagtagaagcattatacaagtggtccaatcaaaatttgataacacagtgcaaggctttcgtattcatagtatggttcttggtcttattcgcctgttgtcatccgaagaaaactttgtttctgtattggacgaagaagggcaaatatctatatcaggcaaacttcgtcggttagccatccataacagaaaagaagagcacaaccttggagacaatatggacctcctcccatggttgaggtcgtttactgcaattgaatgtcctatatacatgatacctccggttttcatcttcaaattgttacgtgttctggatttagagagttgtgggtctatggaaggttatgatctcaagcagcttggaaatttacataatctcaggtttatcggtctatgtaatacatatgtccggacgctcccacaggaattagggcatctaaagtttctgcagacgcttgaattgaaaggaagtggcgttgaagaactaccttcgagtatgggtgagcttgcagggttaatgtgcctcaacgctgactggacaacaagagtgcccaagtggattgggatgcttacttccctgcaacagttggtgatgtacccttgtggtggctactcggcaaggtggtttgtcaaggggctgggacacctgagggaactaaggatgctccgtttgttgataaaagcagatgacgagaagcagcttgcacaattgctggagtctgttttaaaactgcccaagatcgaggctttacatcttgattactatggcggcgtacagttaaacaggcttgttaagttggaacctagtgattttgcctgcagtggacgtcttcgttccttagaattgcagttgttggaattctcaaggctgcctgtgtggcttaatgcttactatcttccacagatccgtgacttgtcgctgttgatgtttgatgtggataaacaggatctgaaaaaccttggggacttcaaggagctccgtcatctccatctgctaattgttaacactgaacgcagagatgctattacttgtgccagtggtggattccggaatttgagattcttcagtatcactaaaccattcaagtttcaacagggagatctgcctaggcttgaaatccttgattttcatttcaatgtgccactccaaagtggtgccaatagtggcctggattttgacttcggtttggaaaatatcccttcgcttcagcaagtcattgttcaaatcaactgtctagatgcctttcctcttccagaggaggtggagacagccctaaggcacgcaatcggcgtccatcccaaccgtcccatcgttgacatcagtttgcctcgacgaaaattagacaaggcagacaacgacggggccgaagggcgtagtaagttggctcattattcaaaatcattatcatcggcacatgataagccaatggatgagctaataaagaggttatatgtggtggacaatgaggcctacgataaaaagatgaagattgtgcctattgttagatctgaagggctggggaaaactactcttgcccaaaaagtatttgacaagcttagtccacattttgactgtgcagcatttgttctggtaggccaaaatccggacatgaggaaagttttcactgacattctcataggtctagacaaccaaaagtaccaagatttccctatgactatattggatataattgagctgattgggttagtccgtaaatcgctcataaacaaaagtttttcgctttccatcgcacgatatctccacgtccgtgttttagctgcgcctcggattaaaacagagctatctatcatccacattgcacagccttctctcaagcttcgtaacttaatgaatcgtcactattga

SEQ ID NO: 24528 - DNA, 756 bp, Zea mays
  Peptide Sequence Number=SeqID_66307
atggggctcccattcttaaaaggaagtcagccttgtgttaactaccttgaggtattatggtttatttctcgcattaggtattcttctgagtactggaataaggacattcctgagcttgcttctgttgaagaggaaaatgcaccagttgaagagcctgttctggtaccacatgttactgaagttgtttcacctcccaagaccgaggtggccgatactggtgacttactgggcttaaatgatccaaatcctgctgtatcagctatagaggaaagcaatgctcttgccttggctattgttccaacagcctcacatagccataagtccttttttcatgcttttgagttggataagctggagcttaaagccgtgaaagacggttctgcaagctatgctgctctggaaaagaaagcagagttgtatgaaaagttatctagaggcaaggtacctgatgaagaagacaaggagaaatactatgtggatttcttccaaaaaggtttcgatcgtgtctatgagcctcagataccagagtgtagccatagagccactgatggtgcggaaccagtaaacgatcatgaagattctatgcctaatgccaaaccgttgggccttggccaagcaggcactacaatcgacagagatgaacacaagcgctttgtgagggaagttcacgaggaagtaactgaggcaaggcagaaggcctcaaagaggtcgagtttggtgggaggatggaagaggcagattgaaggatttacctga

SEQ ID NO: 24529 - DNA, 699 bp, Zea mays
  Peptide Sequence Number=SeqID_66308
atggcgcctcctgtgacgtggtcggtccgagccctgggttgggcgaggtggaggctcctccgaggtcgaggtcgagtctgtcttccaaggccgaggtcgagtctgagcccctgggtcgggcgaggcggagaccgtcggctgaggccagtgctgaatccgagccctggggtcgggcgaagcagagttcgtcgtccaccggggctgagcccgagtccgagccctggggtcgggcgaagtggagtttcgtcgtcttccggggctgagcccgagtccgagccctggggttgggcgaagcggagttcgtcgtcttccggggctgagcccgagtccgagccctggggtcgggcgaagcggagttcgtcgtcttccggggctgagcccgagtccgagccctggggtcgggcgaagcggagttcgtcgtcttccggggctgagcccgagtccgagccctggggtcgggcgaagcggagttcgtcgtcttccggggctgagcccgagtccgagccctggggtcgggcgatgcggagtttcctatggcgcctgaagccggacttggccgctgtcagcctcactctatcgagtggcacagcagtcggagcggcacaggcggcgctgtcctcttgtcaggccggtcagtggagcggcgaagtgactacggtcacttcggctctgtcgactggagggcgcgcgtcaggataa

SEQ ID NO: 24530 - DNA, 429 bp, Zea mays
  Peptide Sequence Number=SeqID_66309
atgggagggtcgctggcgtgcaggagcggcgcgcggacggcaggcaggaggcgcggcctggcgcgcagggactcctggcggcggccgcctggcgcggaagcacagccggacggcaggacgcagacggcggcgcggatccctgggcggcgcccggtcggctggctccgggcgcggcctggcgcgcaggggctggacggcggcgcggagtcctgggcggcgcttggtcggctgggcggcgcggcctggcgcgcagggctcctggcggcggcgaccaggcacgcaggggcaggtcccgacagcggcgctgggggcgcgcggcctggcgcgcagggactccgggcggcggccgcctggcgcgcagggcagatcccgacggcgacggctggagaaaccctagcaggggctgccaggcggctggaggaaaactag

SEQ ID NO: 24531 - DNA, 1366 bp, Zea mays
  Peptide Sequence Number=SeqID_66310
gggccggacacacctccgctcctcctcgcgctactcccggtctgcccgggccctcctcacgccgctcctctcccgcctcctcctctcgcacacgccgccgctcccggcgctctccctgtaccgccgcctcctcgcgctccgccacttcaacgtgccggaaagctccctcccggtcctgctccgcctcctcgcgcgctcccgccgccacgcccacctctcgttcccgctgctcgagtccctcccgtacacgcacccgcacctcctctccacgcccgcgctcgccgccctcctctcgaccgcgctctccgcatcagcacccggcgcgtccttcgacgctgccgtcacctgcttcgaatccgccgctcgcgtctgggcgcgcgccggcagggccttcggcgccgccgagctcaatgtgctgctccgcgccttctgcgcccgcggccgcgtggccgaggcccgcgctctcttccaccgctactgcgacgcgtacccgcccgacacgcgcacgttcaacacgctgctgctcgggttcaaggaggccggacacgtccacgcgctggacctcttctaccatgacgccgtgctgcggggcttcgtggcggacgccgtgtcgtactgcatcaggatggacgcctactgcaagaaaggtaggttcctggacgccctcgagctgctcgacgaaatgcgcagcaagggggactacaagcccacgctgcaggtgttcaccacgttgatatacggagctgggattgtcaggaacgcggcgagagcacgcgccctgtttgatgaaatggagaagtggggagtgactcctgaccgcggtgctcataatgcgctcatgggcgtgtatgtgagggttagggacttgcagtctgcgatggcggtgatgagtgacatggagaggaaggggatcggtctagatgatgttagatacaacacgatgctttgcgggtttcagagagttggcgacttggaggggatctggaaagtgtacagcaagatggttagctcagggttcatgccgaggaccaggacgacaatgctgctcatgaaggtcttctgcgagaatggacgacctgaccttgggctggagctgtgggattatctgatgggaaggggctgtgtacctcaccagcatgcattggacattctggtcactggtttatgctgtagaggtgtggttgctgaggcatacaggtgtttcagggaaataatcgagacggggatggcaccaacagagcgagcattcacggtcttggaagggtttttaaggcggaaacgggaacacgggaaggttgaggagattaggcaaatgatgaaggctgcccagctgcaggggcatcagattgaagaagaggctacgtga

SEQ ID NO: 24532 - DNA, 1590 bp, Zea mays
  Peptide Sequence Number=SeqID_66311
atggcagccggtggcccagcgctgctgcgtgccctcctcgtcgcggccctctgcgccgtcccgtggcgggccgaggcggcgatcggggtgaactggggtaccgtgtccaaccaccgcgcgccgcctggcgtggtggtggacttgatgcgcgcgaatcggatcagcaaggtgaagctcttcaacgccgacccgggagtcctgcgcgcgctcgccggcagcggcatccaggtcatggtcggcgttaccaacgacgagctcgcaagcatcgcggggtcgcaggcggctgcagacgactgggttgcgcagaacgtgtcccgttacgtcggccgcagcggcgtcggcatccgatacattgctgtgggcaatgagcctttcctgacaagctaccagggtcaattccaatcatatatcattccggcgatgacaaatattcagcaatcactggtgaaagctaatcttgctagctatgtaaagctagtagttccctgcaatgctgatgcttatcagagtgcttctgttccatctcaaggagtattcaggactgaattgactcagctaatgacccagctggctgcttttctgagttctagtggggctccatttgtcgtcaatatctatccattcctcagtctttatcaaaattcagatttcccacaagattatgcgttctttgaaggatctactcacccagtagtagatggtccgaacgtgtactacgatgcatttgatgggaactttgacacattagtttctgctctcagtaaaattggctacgggaacctaccaattgcaattggtgagattggttggcctactgagggagcaccaagtgcaaacttaactgcagcaagggcattcaatcaagggcttatcaatcgtattacaagcaacaagggaactccactccgacctggtgtgccaccagctgatgtatatcttttcagccttctcgatgaagaggggaagagcatactaccaggaaactttgagcggcactggggaatcttctccttcgatggacaagccaaataccccctgaatcttgggctgggaaattcagtactgaagaatgccaaagaggttccgtaccttccatcacgttggtgtgtcgcaaaccctgctcgggatcttgacagtgtttcagatcacatgaagcttgcgtgcagcatggcggattgtaccactctgtactacggaggttcatgctatggcatcggggagaagggcaatgtttcatatgctttcaacagctactatcagcagcagaagcaggacccaaagagttgtgattttggtgggcttgggatgataacataccttgacccatctatgggcgaatgccgctttcttgttggtgttgatgatagcaagagctctgcagtcgcctcttgtggcggtggatgctgcgggttcaaaaatgatctagtggtcgataaatattcaagaactgagataatatactatattaaagctatgcgggtggacggtggtggcgtgggcgggcaacagttgtcgccgcagcaggcgtggccgcatgtcaccttcggatgctgcaccagccagcagcattggcatgctgaaatgaaatga

SEQ ID NO: 24533 - DNA, 453 bp, Zea mays
  Peptide Sequence Number=SeqID_66312
atggcgggcggcgcggtctccttctccttcttccgaagatgctggtcacgactccgattccgtgggtctgggacattaaatacaatgctctcccacgacccctccaccataaaccacacaattagcaccccgtcggagcaccttgtcgtgagcagcggcagcgtagggtgtgcccatcaccgaagatctttcggcgccgctgttggggcctcagtgcgggttgtggcgctgcgtttagcctcggtggtcacgtccgtagccttggtgggagtcgtggagcatcaggaccgagttaattcctcaccgttgtcgcatcgctgccgcggatccgccgacgccgtggtctgccaaacctccggcgtatacattgaagagcctgtgactgaggatcctggtgcccaacagatagaagttgctgagcaggagctcattgaaggcaagttctgcccttga

SEQ ID NO: 24534 - DNA, 891 bp, Zea mays
  Peptide Sequence Number=SeqID_66313
atggaagacgacgacttcaccttccccaccgttgccgccgcgcggggcccgacggcgccgctcggccgccccgatgacgaagacccggtgccgcacctgctccagcttcccccgcctcccagtcccaccctcgcggggacgacctcccctctgtggccgttcgcgggctccactcccaagacgacgacgacgacggccgcgccgccgtcgtccccgcccgtgacagaggaggacgacgaggacaggatggacctgctgtgggagagcacgctcaccaccaggcccgtcgcgacagcgccggcgccggcgccggagtcagctgggagcgccgtcgtcagcccccacgcggggccgccgccagagcggcgcgcggccgcggccgacgacaagcagcgcgccgcggcgctgggccgccgcggagaggatggacaggctgtgggagagcttcaacgaggacctcgtcgtcctgcggcggcacgtccgagaccgaggccgccgctccaagtccgccgccgagcaccccggcggcaccaacaccaacaccaaggcgccgcggggccctggccgacgacgacgacgacgaccactggtacctctgcaactactcgggcgtcgtcgggcgccgacgacgacgagtccgatggccaggagacgtcggcgtcgtcgcccgcggagcggcgcgggtacgggtgcgcgcccaccatgctgcgcgcgtcgtcgcgcgcgggcggggcgggccagttctgcggcgccggcgccagccaccgcggccgacggcgcggccgcggcggcggggcggcggctgggtgggcgctcctgctgaggctcttccgcaggctcttcgccgtcgacaggacggcgcagccgtcccgcagcgtctgcgtgccatga

SEQ ID NO: 24535 - DNA, 813 bp, Zea mays
  Peptide Sequence Number=SeqID_66314
atgcccgagcctaaggaggtctcggcccagcccgaggcaccctcggcccccgagggtgaggcactgcgcatcgaggaacagcggaatggggtcacgcctaatcgaaactggcagaccccgtacctgcaatatctccaccgaggagagctacccctcgacagagccgaggctcggcgactggcgcggcgcgccaagtcgttcgtcttgctgggtgacgagaaggagctctaccaccgtagcccctcaggcatcctccaacgatgcatatccatcaccgaagacctcgtcggtcccttgcagaaggcacctgggggcttcacgcacctgctggtcgctatcgacaaattctccaagtggattgaggtccgacccctaaacagcatcaggtctgaacaggcggtggcattcttcaccaacatcatccatcgctttagggtcccgaactccatcatcaccgacaacgacacccagttcactggcaggaagttcctggacttctgcgaggaccaccacatcctggtggactgggtcgccgtagctcaccccatgacgaatgggcaggtagagcgtgccaacgacatgattctgcagggacttaagccgaggatctacaacaacctcaacaagttcggcaggcgatggatgaaggaactcccctcggtggtctggagtctgaggacaacgccaagccgagccacgggcttcacgccgttctttctagtctatggggtcgaggctatcttgcccacaaacttagaatacggttccccgaggacgagggcgtacgacgaccaaagcaaccaggccagctga

SEQ ID NO: 24536 - DNA, 456 bp, Zea mays
  Peptide Sequence Number=SeqID_66315
atggcccccctggccgaggccgagtccgagccctggggtcaggcgaggcagagttcgtcgtcttccggggccgaggccgagtccgagccctggggtcgggcgaggcggagtttcctatggcgcccgaggccggacttggctgctgtcagcctctctctgtcgagtggcacagcagtcggagcggcgcaggcggcgctgtcttcttgtcaggccggtcagtggagcggcgaagtcgtccttgcattaaatgctcctgcgatacggtcggtcggtgtggcgatccggccgaggttgcttctcggcgaagactgggcctcgagcgagccgaagctttgtgctgatgggggttaccagctgagattaggagtcttaggggtacccctaattatggtccccgacagctgggcagttacacgctccgcgcgcggcgatctggctgcttctgtcccaggctag

SEQ ID NO: 24537 - DNA, 1280 bp, Zea mays
  Peptide Sequence Number=SeqID_66316
atgcctcgtctgctgcttctgctcctcgtcaccgccatcgccgcaaaagacctcagcgcctctgaaaccgtcggcgatggagaccaggtctacatcgtgtacttggggcatctacccagcagcgcggatgcgtcagaacatactgaaggcttctctgctgtagaacttgctcatcacgacatgctggatcaggtcctcgacggcggcagctctgcttcagacaggattctgcgtagttacaagagaagcttaaatggctttgccgccaagttgagcaaagaagaggcacataaactgtctggcatgaatggtgttgtctcagtcttcccaagtaggaccctcgatcttttgaccacgagatcctgggacttcctgggcttccctcaaacgcccattcaagagctgccactggagggtgatgtcatcgtcggtatgctcgacaccggtgtgtggcctgactcgccatctttctccgatgaaggctttggcccaccgccgagcagtaaaatcatcggagcacgcgcctacaacggaggatccagcagctctggccagtcgccactggacgatgacggccacggcagccacacggcatccaccgcggccgggcgcgcggtgggcaacgtgagcatgtacggcttggccggcggcacagctcgcggcggggtgcccggcgccaggctcgccatctacaaggtttgctgcggcgaggccgacatcctcgcggggttcgacgacgccatcgccgacggcgtggacgtgatctccatctccatcggtagccccttcccgtttgactacttcggcgacgtgatagccatcggctccttccacgccatgaggcgtggggtggtcacgtccgcggcggccgggaactcggggctggatttggggaacgtctgcaacgtcgcgccgtggatgctgtctgtggcggcgagcagcatcgatcgccgattcgtcgacaggattgtccttgggaatggcaagaccatcgtgggagcctccattaacaccttcccaacgctatcaaatgccacgcttgcattccccgtcaacgggtcctgtgatccagagaacctcgccggaggctcatacaaaggcaagatcgtcctctgccagaatgccgctgcaaacgacggttcaggtcctctgttggccggtgcagcaggcgtcgtcatagtcagccgaatacccgatgtggccttcgctctgcctctccccggtctgacggtatctcaggatcagttcgaccaaaccatggcctatgtcaacagcacaag

SEQ ID NO: 24538 - DNA, 357 bp, Zea mays
  Peptide Sequence Number=SeqID_66317
atggacccgtcgtgcaactcgggcagcggcgagctcgcctacggcgctgggcagctgaacccgccgcgggcgcgcgaccccggcctcgtctacgacgcgctcaaggccgactacgtccgcatgctgtgcgcggaagggtacagctccacacagctccgggtatacatgtccaacggttcgtgccgggctggcccggcccgggcacggctgggcccggcacgggaggcactagtccaagcccagcacagttcacccatcgtgtcgggccgggctggcccgtgggtgtttgggttgcccagacccggcacgccagatattagatgggccgggccgggcttaaagcacggtgataattga

SEQ ID NO: 24539 - DNA, 723 bp, Zea mays
  Peptide Sequence Number=SeqID_66318
atgagcttgagacggtgggttagcgggtttatactggttcaagcttgtaccctagtccagtgcagtgctgatcatagtattgttgggagcagcacttggcaggtctcgcagggtagacttatggtggggtttagggatgcttttggtacgacttcgtctttcgtcatgaacctggcatcaccatcccgtatgcgtaggtataccctcggtgtggacctttttgcaccaaactcatggttcgaacgtggttttatggtgacacgtcttgtcgtggttcaacagtgtcggatcgacccttcccctgctcaggtttgctcggcacgggacctggttgtccactccgccttgctggattgctcggtagagaatcctggtcgtccgctccgtctcgcgaggttgctcgacagcgggctggccagctactccgcctcatggggttgctcggcagaggacctagtcgtccgctctgtctcacaaggttcctcagtagagggttggccacccgccctgccttgcggggttgttggtcggcggtcggttggtcggctatgttgccccgcagggttgctcagcaaagggtcggccagtcgacaattgggtcgtttaagaagttttggggcctcctttaggcacccgattcttgggtactcgacaacagaccagagcctttgtgtgacttcttggagttgtgcagaggctttcgttgagaagttacctttctag

SEQ ID NO: 24540 - DNA, 738 bp, Zea mays
  Peptide Sequence Number=SeqID_66319
atggacgccggacccgacactgccgtgcctcgcatcaaggtggccacgaccctccccctatgcatccaccacggcggcaccttcaagatcttggcggtggtgcgggcgagcttggcggtggtccagttgctggccaccgttgccgcgagggaccttgaccatggcgtcaccgtgggggcgattgatccaagagacgatgctggagaccgtggcgcttaccaccaccaccagcaggccaggcagaagctgctcaagagcctcaccttcgttttctcactctgcgggcttgacaacgatgaaccctactgggaggagaaggaggacaccgtcgagctcgtccagctcgacgccaaccgtgccaagaacgtcctcgtcctcatgagcgacaccggcgacagacatcgtgcctccaccaaggccatcaaggatcgattgccgccaccacaccgccaccggagcagcagcctcaaggagggcagatcaagcactagatcctgcctgaggaacactgggccttcatctactccatggtccagaaggtcttccgcagcttcgccctcgtcattcagcaactcgggctcaaactccgcaatgccgccagtacgaactcgcttcgcctcctcccatttttcctctgtccaacacgaattcgctggcgtcgtcaattgtgccactgcaagtattgttctgttcctcgacaagggccctattgattccattcttcatacagagatgtaa

SEQ ID NO: 24541 - DNA, 342 bp, Zea mays
  Peptide Sequence Number=SeqID_66320
atggcgccgacacgtgggccccccctggtgaccgacaagcgggcccgagacgtcggtctctatgcgcgcgcactagtccggcagtgtgaccctgactggtggtccgcatcgtcggtcgcccttacccgcgtcatgtgccatctctgcctgaggactcgggcgcagtgctgcctcaccatccactgccgcgcgcaacgagctccgcaggattcgggtgccaccttcccccatgtagccgatcccgagtggtttaaggcggacgcgagcctcgttaccctaacccttagaccctcgctgccatcttcaccaatccctgtgcgccgagtttcgccatggccgtga

SEQ ID NO: 24542 - DNA, 204 bp, Zea mays
  Peptide Sequence Number=SeqID_66321
atggccgtcgccgtggggcaaggctccgttgctcggcgcgggcgttcagaactgatcgggtggataggatttagtcaaacgcgtggacgttccgtgtgccatggatctctgatccaagggcctggatgggataccggttcacaatctaatccgaaccgcattctggtgatcggacggctgggagttcacgatacccttccgtga

SEQ ID NO: 24543 - DNA, 378 bp, Zea mays
  Peptide Sequence Number=SeqID_66322
atggacgcggcttgggctgaggcgagcactagagaagaacagcggcgacaaggcaagaagatggctggcgagctgggcaccggcgaccagagaaccacgacatccgagctgcggacggacgagcaggaaagcatcagagagcaaggcgactatagaagatgggtgagggagcaccggccagcagaagagcagaggccgagcgagctagggactggtgaccgagcgccaaggaaaggaagaagagggagcaggtgcggcaaaggaagggaggagcagagacgtgcgttgatggtctgtagtagatgcagtccatgcatcggctgggataaggattggagacctgttcgtgctggaaatatcagagagaacatcggctga

SEQ ID NO: 24544 - DNA, 168 bp, Zea mays
  Peptide Sequence Number=SeqID_66323
atgggggaaggtggcacccgaatcctgcggagctcgttgcgcgcggcagtggatggtgaggcagcactgcgcccgagtcctcaggcagagatggcgcatgacgcggaattcaaatttgaatccaattccaattgtgaacttatactcattttaaatgtacaaatttaa

SEQ ID NO: 24545 - DNA, 2667 bp, Zea mays
  Peptide Sequence Number=SeqID_66324
atggcagagattgctgttcttcttgtcctgaagaagattgcaatagctctggcaggagagaccctaagttttgctaaacatttgcttgcaaagaaatctgagttggtggcagcgcttccagatgacatgaaactgattagtaatgagcttgagcttattcgggcatttctaaagaaaattggccgtacgggccggaaagatgaaatgatagaaacatggatagggcaagtccgaagactggcttacaatatggaagacactgtagaccattttatttatgtagttggtaaacacaatcagacaggatcacctttggattacttgaagaagatagccaagaagcctcagcgtctgctttcactagatgaaattgctagtgagattaagaagataaagcaagagcttatacaactatctgaaagtaaagaccgctggactaaacccttggatggcgggactgatgtacctgcaggaagctatgaaacagaaaaggaaatgtatcttcctggacacgattactcaatcagagatgaggagcttgcaggaattgataaaaataagcaaaccttgattagttcattaaaatttgaagatccatcacttcaaatcattgctgtctggggtatgggtggcattggaaaaagcactcttgccaataatgtgtacaaaaatgaagggttcaactttgactgccgtgcatgggtttctatatctcagtcatataaactcgaagatatatggaagaaaatgctgacagatatcctcaagaaagataagaaagaatttgatcctggaacaatggatagtgcagaactaagggagaaattaataaaaactctagacaaaaagcgaattaaaaaagttcttgtagataatggacttggaagcagagtaataatcacaacaagaactgaggaggtagcttcactagctgaggatagttgtaagatcaaagtagaacctcttggtgaccatgattcctggcttgtattttgtaggaaggcatttcctaaagttgaaaaccatatttgcccttcagagttacgtcagtgtggtgaaagcattgtggagaaatgtgatggtctgccattagcccttgtggcaataggaagcatattgtcgttgagaccaaagaatgttgctgagtggaagctattttatgatcagcttatctgggagctacacaacaatgagaaccttaatcgcgtggagaaaattataaatctaagctataaatacctaccagactatttgaagaactgtttcctgtattgtgccatgtttccagaagactatctaatacacagaaagagattgattagattgtggatagctgaaggatttattgaacaaaaaggggcatgcagcttagaagacactgctgaaagttatcttagagaactcatacgacggagcatgcttcacgttgcagagaggaacagctttggtagggttagatgtatccgaatgcatgatcttgtgcgtgaactagccattttccaatctaaacgagagggttttagtacaacttatgatggaaataatgaaggaatgctagtggaatcatattcccgacgagtggctgtgctccaatgcagcaaggacattctatcaaccattgatccatccaggcttcgcaccttcataacgttcgacaccagcatgacattatctttgtggtattcttctatttcctccaaaccaaagtaccttgcagtattagacttatcaggcttgcctattgagactattccaaattcaattggggagctattcaaccttaggcttttgtgcctcgatgacaccaaagtgaaagagctcccaaaatctattgcaaagcttcaaaacctacaagcattgagccttgagcaggcagagttagttaagttcccacaagggttttcaaacctgaagaaattgcgacatcttatggtttcacggttgcgagatgcaactaacaacagtttcagatgttgggaagctgtggagccatttaagggcttgtggagtttggttgaactgcaaactctgtttgccattactgcaagtgaagtattagttgcaaaacttggaaacttatcccaactgaggagccttacaatttatgatgtaaggagtaacttctgtgcacaattgtttggctctttgtcaaagatgtgtcagctgtcacgattaatgataagagcatgcaatgaagatgaagcgctacagctggatgattcgacatttccaaattcgcttcaaacccttactttatatggacgactgtcagaaggaactttcatgtctccctttttcttaaatcgcgaaaatgggcttcttaggctaaggctgggttacagtcacctttcagaaaatccggtaccacacctctctgaactgtcaaacttgactgagttatctcttataaaggcatacaccggccaagaattatacttccaagcaggctggttcctgaatttgaaggatctttacttgaaggatttgccccatgtgaatcaaatacacatacaggagggagctttggctagccttaaacgtatgggaatggttggcctcctggagctacgacatgttccagtcggtttcatatatctcaagtccctaaaaacaactttttttcataatatgcatcctgattttaaaagtattcaaaaggaaatgtag

SEQ ID NO: 24546 - DNA, 456 bp, Zea mays
  Peptide Sequence Number=SeqID_66325
atgggagaggagcaagaaggaagggaagagatttaccgatctgccagagtccactattttgcccatttggcaaccctgctgtgtaattctattggaggtttttcgcataattcaggagaccactacaatgaacccttcatgaatgtggactcaagtgatgctgaaaaccctgggaaacaacctgtgattgatgcaagcattgtgtatgatccttggacaagggaaccgcgggggtttggttttgtcaccatggctgctactaaggaggcagatcactgcatcaaatatctggactgttctgtgttgcaaggtcaggtcataattgttgagaagtgcatttctattttcactgatgaaaccactatttctgttttcaatgaatctgttgaactgaactgcaaaaatagaaactgttctattttgtttgagtgcacaaacagaactcaacggaactag

SEQ ID NO: 24547 - DNA, 690 bp, Zea mays
  Peptide Sequence Number=SeqID_66326
atggtgactacgatagaggacctccacgccgacgtgctgggctgcacgctgcggcgcctggacgggcagtcactggccgtgaccagctgcgccacggccgcgctccaggcgctggccacagacccagagatgtggcgcgcgctctgcctggccgagtggccgtcgctggcgctggcgggcgagcgacggctgctcctgctcgccacactcccgccgcagcggctcttcgccgacgcgcccccgttcccgtccgcagacaacgggtgccccggcgccggcggcagaggtgccctagtcttcttcttgtcggggctggtctcggcggtggacccggcgcccgtggcggtggaccgccattggtacacgggcgagatgctcgcgcggttcgccgtggtgctgggagggtgcaagttcaaggccactgtggcctgccccgagggggctgggcacgtcaacaaggtcaacctgaccgtggaggacaccgacggcgcggcggtcagcggcgagggcgcgctgcggctcctcgccgagcccccaggaggggaggggagagggaaccggaggaggccaagaggcggtgttggggcttttttgaggcgccaatcactgcgagagaagcggcggcggtgctcactgcacaggcgcggacggtccgcggccaggggccgaacggtctacaacctgggatag

SEQ ID NO: 24548 - DNA, 494 bp, Zea mays
  Peptide Sequence Number=SeqID_66327
atgaaggagcttcgtttgtacgagaattctgaaaaggctcttcttagttctacatcagccaatggaactgcgattcttagagttgtgcaggctttgagttctcttcggaggggggcggtggttgagcagctatgcacggcatcgcacgacgacggggagcatcacgtcgacccgctcctcccttctgccttccagccgcaggagccccacttccacctgccctcgtcgtcggtggaggaccccacggccaccatgggaaagcaaatctgcgtgctcgagcagcacttcaggcgaggtggcgggcgcggcgggagcgagggaacgcggggcgccgtactcagggaagaagagggcgggttagcggcggcttcagcacgggaggacgggggcggggatcacgacagggatgttgggggcggaggcttcgagggcgaaggcagcgctggtggacgcagctcccgggcggggtgggctggcgcccgggctcgcgccat

SEQ ID NO: 24549 - DNA, 486 bp, Zea mays
  Peptide Sequence Number=SeqID_66328
atgtcaaagcaaagtttgacacctataatgtctgttatgcctcttgttcctcttgtttacacacacatattcgagttgaagatatttcaatggagggaggaatctcagtctgccaaatcaaaggaaaagttttggaacgaaagtgacctcgacgaggacgaggagtcgaggcatgatgatctgcgaagctataggatttctctcggatttccggttttaggccccttaaagctggatcatattaattttcacgcatctgctctcaagtggcacccggacaaacatcaagggccttcaacgttgctgaagcttagtggctatttcaatagctatttcaatagctaccttcaaggtatggatgaaaccggatcggatagtgtgtatatatcattttgcttaatctgcaagagtatggcgatgtttggttacaaggatttcaaggagctagctcaggcttatgaggtcctcagcgaccctgaaaagtga

SEQ ID NO: 24550 - DNA, 456 bp, Zea mays
  Peptide Sequence Number=SeqID_66329
atggcgaccaaccagcagccggtccaagccgtgcttttactgcttggagggagggagctgagtagtctaggtggagtatcgtcctctacaccttatagtaagttctgtagcttgtctacagtaagacgagagttcacatctatgcattatgtagcttctctaccttttaacgatctgattctttcagctatcgaggagcacaaggatggtgacagtcaaagtcgtgcgtggaatgatcttcagccacttatggattacctcaaagtgaatcttaatgattcccatctagaagcggttaatgcgggtctttcacgcagatcctttgttcttattcaggtttggctacaaacagataaggcaacaaatctcctgagacagtacttcagcaacttgcacgatcgactgagtacacgccctttccacagtcaggttgcaaagaaatggattggtttttag

SEQ ID NO: 24551 - DNA, 255 bp, Zea mays
  Peptide Sequence Number=SeqID_66330
atggacgtctgccacttacaagacatccttgacgaccgaagcgaccatgctaatcctgtcaaggaagtggaggccctcttcggtagggctcttttaaaggcttctccaatggctccttcaaaaaatctaccaaatgacgatctcctttgctggtttctacataaaaacaggaaggagccgcctctaaaaactgagcaaagccaagaccccaaaaatatcttcttcgtttctctcctgtcatcccctcccgagtaa

SEQ ID NO: 24552 - DNA, 279 bp, Zea mays
  Peptide Sequence Number=SeqID_66331
atggatgaacaaagtgcaaatcttcaacaaagagaaggggactggaccctttacaaactaatctcccgagctaatttcacgaatttagctaacaactgtagcacaacggaccatccgatcctcaatttggtgctcaacaggcggtacctcgagttcgtgatgcgcaagaaggggaggaaggagagcaaggcgcgccgcgaggcgctcgtggacctgtgctgctccgctgccagcgctgccgtcgtgctcacctgcctcgccgctgtcgcgctccggtga

SEQ ID NO: 24553 - DNA, 251 bp, Zea mays
  Peptide Sequence Number=SeqID_66332
atgaggccgacggtggccgcccaggccgcggcaggcagggtgctgcccctggcagaggggcccagcagccagcccacgaagccggaaatcgccatcacctccccggagctgctcgtcgcgtcgccggatcggcgtctgctcatcgccaccgcgcagcccggccaccggcgagtcgccgcacctgccaatgcacactgctgctggcgccgcggtcttgcccagcctccacaacctggccgcacgccgctctg

SEQ ID NO: 24554 - DNA, 1281 bp, Zea mays
  Peptide Sequence Number=SeqID_66333
atgaaggagtccgaccagctcgcgacttctttcatcacgcccttcggcatgtactgctatgtcaccatgccgttcggcttgaagaatgtgggtgcgacgtaccagcggtgcatgaaccatgtgtttggcgaacacattggccagacggtcgaggcctacatcgatgacatcgtagtcaagacgaggaaagcctccgacctcctttccgaccttgaagtgacattccgatgtctcaaggcgaaaggcgtgaagcttaatcccgaaaagtgtgtcttttgggttccccgaggcatgttcttggggttcattgtctccgagcggggcatcgaggccaacccggagaagatcgcagccatcaccagcatggggcccatcaaggacttgaaaggcgtacaaagagtcatgggatgtcttgcggctctgagccgcttcatctcacgcctcggcgaaagaggcctgcctctgtaccgcctcttaaggaaggccgagtgcttcacttggacccctgaggccgaggaagccctcgggaacctgaaggcgctcctcacgaatgcgcccatcttggtgccccctgctgccggagaagccctcttgatctatgtcgccgcgaccactcaggtggttagcgccgcgattgtggttgagagacgagaagaggggcatgcattgcccgtccagaggccagtctacttcatcagcgaggtactgtccgagaccaagatccgctacccccaaattcagaagctgctgtacgctgtgatcctgacgcggcggaagttgcgacactacttcgagtctcatccggtaactgtggtgtcatccttccccctgggggagatcatccagtgtcgagaggcctcgggtagaatcgcaaagcgggtggtggaaatcatgggcgaaacaatctcgttcgcccctcggaaggccatcaagtcccaggtcttggcggacttcgtggctgaatgggtcgacacccagctcccaacagttccgatccagctggaactctggaccatgttcttcgacgggtcgctgatgaagacaggagccggcgcaggcctactcttcatctcacccctcgggaagcacctacgctacgtgctatgcctccatttcccggcgtccaacaatgtggctgagtacgaggctctggtcaacgggttgtggatcgccatcgagctaggggttcgacgcctcgacgctcacggtgactcgcagctcgtcatcgaccaagccatgaagaactcccactgccgtgacccgaagatggaggcctactga

SEQ ID NO: 24555 - DNA, 297 bp, Zea mays
  Peptide Sequence Number=SeqID_66334
atgaggaggctccttcggtgcgtgtccacgggggcgtgtagcgtggtgccgggcgtcgtggcagattcgatgccggcgttgccggtggccactagtggggcacgtgccggtggaggtcgacgcggagggggggatacacaacggttagtcgtccctgtcgatctgctctgctacgtcgcgtcgcgcaggagtacggcggctgctccacctgtacaaggctacaagctccgcaacaatgcaaacagatcattccagtggttgattcttcctcctttctttatctttgttatttcttag

SEQ ID NO: 24556 - DNA, 225 bp, Zea mays
  Peptide Sequence Number=SeqID_66335
atggccgataaaggcaaaggcaaggacatcataatgggtgatccttgcatatcgaatatatcacagaagaagattactcaaaaggctccggacgagaaggctaaaaggtccggaggcgccgggcggcagacacaattaatgaaccgaacacgtcagcctggcccgagcatcgcggacggatggggcactgaaagggaaatagggttaaccttttcacagtattaa

SEQ ID NO: 24557 - DNA, 465 bp, Zea mays
  Peptide Sequence Number=SeqID_66336
atggcagctagcaatccatgcatccaccttggccttttgtgtgtaacatctgcatgggctagacacacaacaatcattactaggggccatccctgggctttgtttattcattgttgttctgggagtgagtgtcccggggaacagcatgctcagcatggtgacagttcggtgtgggcactgcacaaatctactgtcagtgaatctgagagcactcatgcactcagtcccagaacaagatcagctccagtgcggcggcggccaccatctggagctgggctcttcgtcgtcctcaaggttccggctgccgatgatgatgtcgtacgcgccgcagaacgagcacttgctgcaggaacagacactgaacaacgctcgtcggaagagattcgcaggatcaaggcgaacaaccccgacattagccacagggaagccttcagcacagcagccaagaacgacttaatcagctag

SEQ ID NO: 24558 - DNA, 450 bp, Zea mays
  Peptide Sequence Number=SeqID_66337
atggaggaagatgatgagttcggcgacctctacacggacatcctcatccccactcataccccccaatccacctccgcgctatccaaccctgttctagtcgaaaccctacaccgcccgcctccacaccctaatcctacccccatggcggcgacagcagaggaggcggcaatgaaggtgcgagggggaggatgttggaggcaggtgcctctaccggccaagacgttagtcggctggctgccactgttggcggcgggcggcacaactgttggatcacctgggggccaaggaggatctgggaaagcagggacggtgcaaagtgaggattgccggtggcggctgcggggcgccaacgcgctcacccctcaggccggatgtcggagacggtggcccagggcctggcccccagggcgaggccgcgtgcccgcgagtaggagggagatctggagctga

SEQ ID NO: 24559 - DNA, 297 bp, Zea mays
  Peptide Sequence Number=SeqID_66338
atgccccagatgctacttgactacaaggtttctgtttctcaggttgaaggtgaacacccattgtgcaaaatcgatagctacatgaaatgtagtgaactaaagtgggttcagcttgaagggccaacttacaatgtttgttatacttttttgcagattgatgtcatgtccaagttcttcaagctgatgatggcttactgtgtgcttgaggttcttcgacctctctatgaatcccctaagataccggcacaaaagataactgttgcgatatgtgtcattgatcaatttcgttgctactag

SEQ ID NO: 24560 - DNA, 300 bp, Zea mays
  Peptide Sequence Number=SeqID_66339
atgggggtgcgttgtctacgagacggaaattggaataaggatgaaggtgtggtaccgtgtgtcaagcgtttgaacgtactaaacacatgccgagaaatatgtagactttgcccctccctcgacctgagacgtggtctccccattccggttatgggtgggtacaagtgcggtaactgcacgacgggcagtcggggttctctggaggacatggttgctggagtgacttggccgtccatcttgccaccgggctggacagtcgagtgggaccctacctcggctgaggaggagcatgaggagtga

SEQ ID NO: 24561 - DNA, 285 bp, Zea mays
  Peptide Sequence Number=SeqID_66340
atggtgaaggtcgatccaaactatggtataaaacactctgacccactcctcaacatatctgccaccaaaggagcgaggtgggggatgggtggagcggaagcaggagctggagcagtggaagctggtgtggtggcggtggtggtcgcagtagatgtggtggaaggctcgagagcggcaggacctagtaaagtgggaggtggagtggtgattgggtctgatggagtggaccgagcagtggaagagcgagctcgagacgagaggcgacagacttggaaggctatctga

SEQ ID NO: 24562 - DNA, 264 bp, Zea mays
  Peptide Sequence Number=SeqID_66341
atggagaaggctccaaacgcgtccgtcgagaacttgggaaggtgcgcgtgccctaatcccacgggattatacactgtactccaaggaatttctcgccaaacttctctaccaacgagcttccgccctgtgttgcggcccacgtcgccgacggattctacgctgggcgcctccaccgcggaccggcagggagaaagaagtgacgctgcattcggattgaggaagacaaccagtgaccgtcgatgcgtaatgggcggcctggattaa

SEQ ID NO: 24563 - DNA, 309 bp, Zea mays
  Peptide Sequence Number=SeqID_66342
atgaggcagaggcgagagggcgggtgtgcgcaaggatcaaaacaaagctgggggtcgtggggcgcgacgtgggtcaactctcttggtgggtgggcgcgccgggcgaccagcagttgcggggaagacagagctgacaagcgggaccagggcgtcagcggcagcgcgcacgagccccaaccaccaaagtggccgttcgggaggctatctgtcgacgggcgcatcggacagtccggtgcgtcaccggacactgtccggtgcgccagccacgtcacccaaccgttagggttcgaccgttggagctctgactag

SEQ ID NO: 24564 - DNA, 1398 bp, Zea mays
  Peptide Sequence Number=SeqID_66343
atgggatgccttgcggctctgagccgcttcatctcgcgcctcggcgaaagaggcctacctctgtaccgcctcttaagaaagactgagtgcttcacttggacccccgaggtcgaggaagccctcaggaacctgaaggcgctccttacgaatgcacccatcctggtgcctcccgctgccggagaagccctcttgatctacgtcgccgctaccactcaggtgaggccggtctacttcatcagtgaggtactgtccgagaccaagatccgctacccacagattcagaagctgctgtacgcggtgattctgaagcggcggaagttgcgacactacttcgagtctcatccggtgactgtggtgtcattcttccccctgggggagatcatccagtgccgagaggcctcgggggcaggcgcgggcctgctcttcttctcgcccctcgggaagcacctccgctacgtgctgcgcctctatttctcggcgtccaacaacgtggctgagtacgaggctctggtcaacgggttgcgcatcgccatcgagctaggggtccgacgcctcgacgctcacggtgactcgcagcttgtcatcgaccaagtcatgaagaactcccactgccgcgacccgaagatggaagcctactgcgatgaggttcggagcctggaggacaagttctacgggctcgagctcaaccacatcgcccgacgatacaacgagactgcggacgagctggctaagatagcctcggggcggacgaccgtccctcccgacgtcttctcccgagacctacatcaaccctcagtcaagaccaacgacacgcccgagcccgagaaggtctcggccctgcccgaggcgccctcggcccccgagggtgaggcactgcgcgtcgaggaagagcggaatgggaaggcacccgggggctacacgcacctgttggtcgccatcgacaaattctccaagtggattgaggcggtggcattcttcaccaacatcatccatcgctttggggtcccaaactccatcatcaccgacaacggcacccagttcaccggcagaaagttcctagacttctgtgaggatcaccacatccgggtggactgggccgccgtggctcaccccatgatgaatgggcaggtagaacgtgccaacggcattattctgcaaggactcaagctgaggatctacaacgacctcaacaagttcggcaggcgatggatgaaggaactctcctttgtggtctggagtctgaggacaacgccgagccgagccacgggcttcacactgttttttctagtctatggggccgaggccatcttacccacagacttagaatacggttccccgaggacgcgggcgtacgacgaccaaagcaaccagaccaatcgagaagactcactggactag

SEQ ID NO: 24565 - DNA, 567 bp, Zea mays
  Peptide Sequence Number=SeqID_66344
atgggacgagaaaaggcgcagacatccagcgggcacgtacctccgctccatgtcgtagtgcgctcagccaagtttgtcaccgatcatctgctcgccattcgcttcgctggacagggcagagatgaagaacgaaagaaacaaagggaagtgggaggaggaaaggagaagatgccccttccatatcgcacatgtgcactcgtggagttaaaccaaacagacccgcctgcaacaactctctcacaaaattcagaacaaaccctccttactgctgaaccctggtcgcatgctcaaacctttcttgcaacaacccacacaaaatttcggctgcaatggcgtccaacagcatgcgaccagcagccctccacgaagatcctaagaatcgccatcatggctctggtgctgttcatctacgctagagactgcttgggcgaccagggcacagtgggggcggggaaaaccgaaggggtggatgtgctcttcttcgttgattgggcgtcgatcgggaagagcgagaaacacaagagcgagtttgggagcgacaaaatcggagggaattggaggggctag

SEQ ID NO: 24566 - DNA, 1752 bp, Zea mays
  Peptide Sequence Number=SeqID_66345
atgaccttggtgttaagtgttatacagtttctatgcacacgtgtctatttggagatactgaatgtggatggtactgtcattttctttcaggttataggcaaagtttgtcctgaactgttcatcatggtggaaggctgggtattctctgctttgttagtggtgtttctagcgttcacaacaccttgtgagtcattctacttgccaggtagttatatgcacacatatcagcaaggtgaagtaataagggcgaaggtgaactctctcacttccattgagacagaactacccttcagttactacagccttccatactgtcgtcccagagatggggttaagaagagtgctgaaaacttaggcgagcttctgatgggtgatcaaatagataattctccgtaccgtttccgtgtaaatgtcaacgaatctctgtatctgtgtactacaaccccacttgacgaggctaatgtgaagctcctcaagcagcgtagccatgatctataccaggtgaacatgattcttgacaatcttcctgtgaggaggttcacagagcagaatggaataaccatccagtggacaggctatccagttggttatattccagaaggcacttctgatgtctacatcatcaatcacctgaaatttaaggtcttggtccataagtatgaaggaggcgaagtaaaggtagttgggactggggaaggaatggaagtgatctcagagactgacaaagatgccaattctggatatgagattgtgggatttgaagttgtcccatgcagcgtgaagcgtgatcctgaatccatattgaagcttaatatgtatgataaagtcgatcctgtgaactgccctgtggagttggaaaaatctcaattggttagggagaaagagaagattacttttacttatgaggttgaatttgtaaacagtgatatcaggtggccatcacggtgggatgcatacctgaagatggagggttcgaagattcactggttttcaattatgaactcattgatggtaattctatttttggctggcattgtatttgtcatattcttgcgtacagtgaggagggacttgactcggtatgaagagttggataaggaggcccaagctcagatgaatgaggagctctctggttggaagcttgttgttggagatgtcttcagagaaccaacctcaccgaagctgctctgtgtcatgattggcgatggggttcagattttgggtatggcaattgttaccattttctttgccgcatttggcttcatgtctcctgcatcgagaggaatgttgttgacagggatgatagtcttttatatgttacttggaattgtgtctgggtatgctgctgtcaggctctggaggactttaaaaggaacgtccgagggatggagtatttggcttggaaggttctattacgtgtttggcttcctccttgtcgtgcttcttttgctgattgtggtgtgtgctgaggtatcagttgttcttacctacatgcatctctgcgcggaggactggaggtggtggtggaaagctttctttgcttctggaacagtggccctttatgtgttcctttactctatcaactacttggtgtttgatctcagaagcttgagtgggccagtttctgctattctctacattggatactctttcgttgtctcccttgccattatgctagcgactggtaccgttggcttcctgacgtcgttctcttttgtccactaccttttctcatcagtcaagattgattga

SEQ ID NO: 24567 - DNA, 372 bp, Zea mays
  Peptide Sequence Number=SeqID_66346
atgaagaagtcgtccgtgaagaagcctctcgtcttgctgctgaggccgccattgcacggcaagtggcggaggctgagctcgttcgtctcctcactgaggcagaccggctcgccacagaagttgcatgtgcccgacaagaggccaatcgcgctcgtcgcgccctggtcggccaggatcccctgtacccccaaccgacgacgcgctggccacaccgtcgccgtcctcaatatcaaggctctcataccggtcgtcctcgacaacatttcgccgaactacactcgatggaaggccctcctcaacaacaccgacaagtacgagctttccgaccacgtcgtggaagacatccgcccggaggtcgttgttgatccctga

SEQ ID NO: 24568 - DNA, 1122 bp, Zea mays
  Peptide Sequence Number=SeqID_66347
atggctgatgtacacttcaccatcaatgcgcataaacgccttacaaatttacaatcatcagacgggacattctcctctggcttctacgaagtctacacccatgccttcacattctcagtatggtactcaaaggcggcggccaacaagaccatcgtgtggagcgcaaaccctgaccaccctgtccatgccaggaggtcggctctaaccctgcaaaaggacgacaacatggtgctcaccgactacgacggcgcagccgtgtggcgagctgatggcaacaacttcaccggtgtccagcgtgctcggctcctgaacaccgggaacctcgtcatcgaggactcaggaggtaacactgtatggcagagttttgattccccaacggacactttcctgctgacgcagctcatcactgctgcgaccagattagtccccacaacccaatcgcgtagtcctagtaactacatcttccgcttcagcgacctgcctcaagtctcagacatatactggccagaccctgaccagaacatctaccaggatggtcggaaccagtataaccgtacgaggttaggaatgcttactgatagcggggtgcttgactcgagcgacttcgctgatgatcaggcgcttgtggcctccgacgtagggccaggcgtcaagagaaggctaactcttgaccctgatggcaatctccgtctgtacagcctgaacgattcagatgggtcatggtcagtttcaatggtagcaatgacccagccttgcaatattcacggtttgtgtggtcctaatggcatctgccactactcacctagacctacatgttcgtgcccaccaggttatgcgacgaggaacccgggcgcaacaggaagctctgcctcgcccgaccttggacctcggcctgaggaggaggtctccgcctcgcccgaccccagggcttggcctcaccctcagcctcggaagatggcctccgcctcgcccgaccccagggctcggccctcaccctcggcctcggaaggtggtctccgcctcgcccgaccccagggctcggcctcaacctcgacctcgggaggaatcgcgtcctcgcccgacctcggcctcaagaggagtctctgcctcgcccgaccttga

SEQ ID NO: 24569 - DNA, 198 bp, Zea mays
  Peptide Sequence Number=SeqID_66348
atgcccccacccctactctactccaccacgacagccgcgaccatcttcttgccgctcgtggcctccacctccctctgctgtgtggcggctatctatggcataacatctagcacgacccgcccaccgcgctaccccgattacccgacttcgagcacgatggatagctggaagatatggatctgcagtggagcattctag

SEQ ID NO: 24570 - DNA, 309 bp, Zea mays
  Peptide Sequence Number=SeqID_66349
atggtgctcgcgccggcgtcctcgactcctcagtctggcgcgctgtttttttttccatgtccctgtgcgcgagctgattcagcttgtcggtcatccactgctcctcggcgctccttgctcggcctccgacggctgtcgtccctcgccacgccctggccgcatcgctggctcccctcggttccagccatcagttgccgcggcatcctctcagttctcggaacgttaattaatcgcgtgatgcggaagaggacccaggccgactccaagcgtggggctatctgcaagctgaagctgatgaatcaaccttga

SEQ ID NO: 24571 - DNA, 211 bp, Zea mays
  Peptide Sequence Number=SeqID_66350
atggctggtcgcggccaaaggccgattgagcggtggccgagtgctcgcccacccctgcccgctgtcaagccggtctccggtgaagccgccatgcgggtcagcgtgcccctgcatgagctcgtgtggcagaaatggacggctctggcgctctgccctgcttgtgtgcctggcttgctacgtgagcgtgaggaagaagaaaccgccgttgcga

SEQ ID NO: 24572 - DNA, 2049 bp, Zea mays
  Peptide Sequence Number=SeqID_66351
atgccggaaccatcaaccaccgaggggcggcgtatccagggagagctcaagaatctcctggaggatgccgcggtccgacgggccgaaagctctgccttccgaaggcaggggtacccctcggagcatcgtgccacgacttcccgattcatgcgggaagcctcggtccacaccaggctaacgcgcaacacagcgcctgcggccccaggacgcctcggcaacgagcaccatcaccgcaaccgtcgagcccacctcgacgaaaaggtgcaccgaggctaccaccccaggcgtgggggacgctacgacagcggggaggatcggagtccctcgcccgaaccgcccggtccgcaggctttcagccgggccatacgacgggcgccgttcccgacccggttccgaaccccgactactatcacaaagtactcgggggagacgaggccagaactgtggctcgcggactaccggctggcctgccacctgggtggaacggacgatgacaacctcatcatctgcaacctccccctgttcctctccgacaccgctcgggcctggctggagaatttgcctccggggcagatctccaactggtacgacctggtccaagccttcgccggcaacttccagggcacgtacgtgcgccctgggaactactgggatctccaaagctgccgccagcagtcgggagagtctctccgggacttcatccggcgattctcgaagcagcgcaccgagctgcccaacgtcactgactcggatgtcatcggctcgttcctcgccggcaccacctcccgcgacctggtgagcaagctgggtcgcaagacccccaccagggcgagcgagctgatggacatcgccaccaagttcgcctctggccaggaggcggttgaggccatcttccggaaggacaagcagccccagggccgccagccggaagatgtccctgaggcgtccactcagcgcggcaccaagaagaaaggcatgaagaagtcgcaagagaaacgcgacgccgcagacgcggaccttgtcgccaccgctgagtacaagaaccctcggaaacctcccggaggcgccaatctcttcgacaagatgctcaaggagccgtgcccctatcatcaggggcccgtcaagcacacccttgaggagtgcgccatgcttcggcgccactttcataaggccgggccacctgcggagggtggcagggcccgcgacgatgataagaaggaggatcacaaggcaggagagttccccgaggtccacgactgcttcatgatctatggtgggcaagtggcgaacgccttggctcggcactgcaagcaagagcgtcgggaggtctgctcggtaaaggtggcagcgccagtctatctagactggtccgacaagcccatcaccttcgaccagggcgaccaccccgaccgcgtgccgagcctggggaaatacccgctcgttgtcgaccccgtcgtcggcaacatcaggctcaccaaggtcctcatggacggaggcagcagcctcaacatcatctatgccgagaccctcgggctcctgcggatcaatctgtcctcggtccgggcaggcgtggcgcctttccacgggattatccccaagaaacgcgtccagcccctcggacaactcgatctacccgtctgcttcgggactccctccaacttccgaagggaaaccctcacgttcgaggtggttgggttccgagggacctaccacgcattgttggggaggccatgctacgccaagttcatggtcgtccccaactacacctacctcaagctcaagatgccgggccccaacggggtcatcaccgtcggccccacgtaccgacacgcgtacgaatgcgacgtggagtgcgtggagtacgccgaggccctcgctgaatccgaggccctcatcgccgacctggagagcctctccaaggaggcgccagacgtgaagcgccgtgccggcaacttcgagccagcggagacggtcaaatccgtccctctcgatcccagcaacaacgcctccaagcagattcggatcggctccgagctcgaccccaaatag

SEQ ID NO: 24573 - DNA, 318 bp, Zea mays
  Peptide Sequence Number=SeqID_66352
atggacgaggatggcgaggaggtcgtgtttgacggcacgctggtgccatccacggtgggctttgtcgacactggtcacgcccagcgccgcatgacgctaggggtggagctcgtagctatgcacatggaccggtggttgagggcatctgtgacatccacttcggtagatggtccagtttccgcctatccaccccgctccaagaaggttcgctacaaatgtggtaagcctggtcactttatagcaaaatgtcctatttctagtgacagtgacaggggcgacgacaagaagggaaagaggaaggaaaagaagaagtactag

SEQ ID NO: 24574 - DNA, 633 bp, Zea mays
  Peptide Sequence Number=SeqID_66353
atggtgctgatcgagctggagcccgaggaggcgacgcgcccctcgttgccggtggcggaggagcaggcggtcgccggggacgcggcgcgcccctcgtcttcagcggcgcccgaggaggaggaggcagccgctggagggaaggcgtcgagggcgccggaagaagaggaggatgcctttgaggacgcgctcaccgacgagcagctgcgagagaaagctagaatccaagcaaatgatgcaaaagcagaaggaaacaagctttttggtgctggacaatatgaggaagcattatcacagtatgaaatatcattgcaaattgctgctgagctggaatctgctgaggatatacgtgctgcatgccattctaatcgtgctgtatgcttcttgaaattgggaaaacatgatgagacgattaaagaatgctcaaaagcacttgagctcaatccaacatacctgaaagccctgcttcggagggcagaagcgcatgaaaagcttgaacattatgatgaagctattgccgcaaagctgaaagatctggggaactctgtgctgggccgcttcgggatgagtgttgacaatttcaaagctgtcaaagacccaaacactggctcttacagcattcaattccaaaagtaa

SEQ ID NO: 24575 - DNA, 117 bp, Zea mays
  Peptide Sequence Number=SeqID_66354
atgagggagaaaactggtggggatgatcttgtgagtttatcaaagactagtgctggattggatgtgtataacattgtcttctccacaattttggaatttagtagaagattatcttag

SEQ ID NO: 24576 - DNA, 186 bp, Zea mays
  Peptide Sequence Number=SeqID_66355
atgccctcgtacttctatttcttccccaacttgctccctgaccgcggcgcgctggtcgaacgtctcggacaagagccttaccagagtggtctggccacggatgagctgttcttggcggcgcggcggaccgaattgggggaaaacggcgtcgcggtggctctgtttgaaattggggttggagattga

SEQ ID NO: 24577 - DNA, 969 bp, Zea mays
  Peptide Sequence Number=SeqID_66356
atggcgtccagtggagtttctcctcgccgacgctgctccttcctgccccagcgcctgctgcgagctcgccaggatgcccctgctcgcggcgccctctgctcaagctcgtcgtcctgcgccgtcagtcgaccttgccgtgaagccctggccgctcggatctccctccccagccgaggcccttcttccctggtctcccatggccaccgttcttcagtcgagctcctcagcgccgaaggctcaggtccctgccgagctcgtctcgagctcccgcccaccctctgcccagccccagcgcccagcccatgtgtctggtgcttctacctgctcagatttggtgaccgtgtcccctggttcttcaagtttgtcgctgtccctgcttgcctcggcacagttgggtccgaccaccacccccatgtcgacggtgccctcgattcgtcggtgcccaggcgtgcatcctctgcaccggctattctcgcccaaattcacccctgcacttggtcctcgtcgaggatacgtcgccctccactcggttcatggcgctcggcctccagctcgcgaagcttccctggtggccgcttcctcgtcgttttctatagtcgcgcccggccgaggttcctccctgcgtgcgcaagctctgttgcgagcgccgatccgtacccacaaagcctcgtcggtgctcaattggctcgaaccctctgctcggacctttcttccgtggcgctcagctcggccagatgcgacctcgccttggctctctgtccctactgcgctcgccagtcggactcctggccatcgtcaacgaatctcgcgatcacagctctctgttgctcaaccggcgactcgctactcgtcttgctccagcctccagatcctcagctgagtataatcgattcggatcgccgtaccttcgcggttatgaagacttggtcactgccctacacagagcaatccagtgaagatgaaggataa

SEQ ID NO: 24578 - DNA, 1983 bp, Zea mays
  Peptide Sequence Number=SeqID_66357
atggcgggcctttttctgagggagagacagagacgttggcgcggcgcggcgagactgctgagcccgaggaaacgggaagagaggagaaaagcaaaacgaagctcggaaccacgagacgacggagaggatgggcttcagcgtcctgctctcaccgccgccccttccgctcccgagcgccaccgctgcggccgacttgtacctaatattcggcggccacgatcgccgccgccgccgcccgctggaacacgggctgcccgctgcggccgccccccggagacggcgctcggcggcagctcaggccgccgcggctcgtacgatgacgacgggacggctccaggctccctcggcctcgacggcagcagcacgtcctcctcggtccgtcggacgggtgagccgcgctggcttattagctatatcgtaattgtaaagcaattctgtgtggtaactgactgttgcaggaatttcttatggtcatccagaaaacattcaggagaccccttttttctaagcctggactaccaagggagtgcaaaaccaagatatcaagtaacttcgaaagaagaggacacacaaaatgcagaccgcgaggggtggcaatatagtacagaaggcctttcaaagagcatgtccaagtcaaggtacatcaaagtatttggggttgatttgtcccctgataatgtggctgttgctattgtttacttcgtgcaaggagttttaggcctttcgaggcttgctgtcagcttctacttaaaagataatcttcatcttgagccagcagagactgcagttatatctgggttctcagccttgccatggttggtcaagcccctctacggttttatcagtgattccatccctctctttggatatcgaagaaggtcgtacctatttctatcaggcatccttggagcactttcatggagtttgatggccgctgttgtggatgataaatatagtgcagcactctctattattcttggatctcttgcagttgccatatctgatgttgtggttgattctatggtggttgagagagctcgaggtgaatcacagagtacatctggatctctccagtcgctatgttggggatcctcagccttcggaggagtcgtgagtgcatacttcagtggttctttagtggatacttatggtttcactgatcatgtgtcccatgaatgcagatttgtttttggtgttacagcacttctgccactgatgacatctgctgttgcagttcttgtaaatgaagaacgcttacctttggggaaaagttcagtctcactttcagtttcaggttcagaattaattgagagctctaagcaacgtatcatgcagatttgggattcagtaaagcaacccagcatactcctacccaccttgttcatattcctttggcaagcaacaccgcaatcagactctgccatgtttttcttcataacaaataagctcgggtttactccagaatttctaggacgcgttacgcttgtcacatctgttgcatccttactgggaatcggagtgtataatttgtttctgaaggaagttccattgaggaaaatctttcttgtgacaacagtcttaggttctgctctcggaatgacacaggttcttcttgtcactgggctcaaccggaagcttggcataagcgacgaatggttctccattggggattctttgattatcacagtccttggccaggcttcctttatgcctgtcctggtgttggctgcaaagttgtgccctgtgggagcggaagcaactttatttgccactttgatgtccatctctaacgccggaggtgttgccggaggtctggtgggcgcgggtctgacgcagttactgggagtcagcagagacaacttcgaaaaccttgctctgctgatcgcgatttgcaatctcagttccctgctacctctgcctcttctgggtctcctgccagatgaatcccgtaatgcagatggtgcacagaccaaaaatgactga

SEQ ID NO: 24579 - DNA, 456 bp, Zea mays
  Peptide Sequence Number=SeqID_66358
atgggcaagaacaacaagcgcaagcgtgagccgactcctccatcggacgattttggtgactcggagtactcagaggaggagttctcctctgagtctgaggggtctccggctcccatccccctgcgtgagtcgtctgacgactcagacgactcccaggggctcgcggcggaggtctggacttacatccgggccgtcgagtgctccgggctcgagggctcggatgagtcggagtactcctcgggcgaggaggactcgtccgaggaggacggcggcggtgatggcggggacgacgatgacgacaatgacgacgacgacggcggtggcggtggtgacgatgacggtggcggcaggggcggcagcagcggcagcaaggatggcgacggccgcagcagcaggggcggcggcggcagcagcaggggtggtcctccagtggctagatgccactggtcgttagat

SEQ ID NO: 24580 - DNA, 162 bp, Zea mays
  Peptide Sequence Number=SeqID_66359
atggtggttacaagtgcggtcactgcacggcggcagccgaggtcagtggagcattgtttaccttgcaaggataaaaacttgattcgaatcatctgcttctcgcagctaatgagactgcttgaccccttgtactacattaagtacgcttcagaatatggttga

SEQ ID NO: 24581 - DNA, 291 bp, Zea mays
  Peptide Sequence Number=SeqID_66360
atgctgacggctagaggcgacgacggcggcactcaagacttccgtggcgggtggcggcgtgtggtttctatgcggggagaaggttgggagatccgcgtggcgttcaaggggggtcttatccccagtgtaaggctgggtcttaacgcgggtgcgattgagcaacagacaagtgggctccacatgtcggcgcggtgcaatgagcggagacggacgcaagtctggcgaagtgggcccacgtgccagcggcagggtgagagggcgcgggatgcagagctgggctgggcgcgctga

SEQ ID NO: 24582 - DNA, 441 bp, Zea mays
  Peptide Sequence Number=SeqID_66361
atggcgccccgcgactggctaaaatcatgccacaccccggtgcacaagtcgggtccagcgcacagcgatcaggcgggttctagcctaccgactggagcacgaccaggacccacgcagtacaggaacgacgacgaacaccaaggccagaaccttaccggcgtcagtagcataggccgagccgcccacggagatgctgatccacgacggggccgactggtgatcctcgccacgcgcaccaatgaaggtcaggacgatcccagtcccacagagcaacggttggagcccacgacgaagcaccagtccaccaagttcttcccccctttctccctctctctcacagtcggcggcaatggcgaggatttcggcggctctaccgtgatggaagctaacaccgaggccacaatccaccccgtatttatagcccgagccaggtcaaagtag

SEQ ID NO: 24583 - DNA, 3078 bp, Zea mays
  Peptide Sequence Number=SeqID_66362
atgcgtgagctagatattttattcacagcagaaacccataatttcccatgtgctgttgcaccataccctggagccgagacaggtgcaggtggccgtataagggacacacatgccactggaaagggttcttttgtcgttgcttccactgctggttactgtgttggtaatctgcgaattgacaattcaaatgcaccctgggaagatccttcattttcttacccagtgaatctggcttctccattgcaaattcttgttgacgctagtgatggtgcatctgactatgggaacaagtttggtgagcctctaattcagggatataccagaacatttgggatgaggttgctaaatggggagcggcgtgaatggttgaagcctataatgttcagtggagctatagggcaaattgaccatgcacacatatcaaagggtgacccagaaattggcatgctagttgtgaagattggtggtccagcatacagaattggtatgggcggtggtgctgcctcgagtatggttagtggccagaatgatgcagaacttgatttcaacgcagtacagcgtggagatgctgagatggcacagaaattgtatcgcgtagtcagggcatgtgcagaaatgggagagagcaatcctatcatcagcattcatgatcagggcgcaggaggaaattgtaatgttgtgaaggaaataatatatcccaagggagctgaaattgatatccgttcaattgttgttggtgatcatacattgtcggtcttagagatatggggtgctgagtaccaggaacaggatgcactacttgtaaaacttgagagcagaagcctcttagaatcgctttgtgagagggaaagagtttcgatggctgtcattgggaaaattgatggcagtggaaaaattgtgttgattgatagcgctgctgtggagtattccaagctgaatgacctccctcctccaacccctgttgaagaacttgagcttgaaaaggttttaggagatatgcctcagaagaccttcgagtttaggcgtgtttctcaagtcacagagcccttggacattgcacctggggtaacactattagatgctctgaagcgagtattaaggctcccatctgtgtgttcaaaacgtttcttgaccactaaggttgataggtgtgtgacaggtcttgttgcacaacagcagacagttggtcctctccaactcccgcttgctgatgtggctgtgattgcacagacgtacacagacctaacaggtggtgcttgcagcattggagaacaaccaataaaggggttgcttaatcctaaggccatggccagacttgctgttggggaggccttgactaatcttgtttgggctaaggttacatcacttgctgatgtgaaagcaagcgggaactggatgtatgctgcaaagcttgatggtgaaggtgcagatatgtatgatgcagctgttgcattggctgactgtatgattgaacttggtattgcaatagatgggggaaaggacagtctttccatggcagctcaatgtgatggtgaagtcatcaaggctcctggaaatctggttatcagtacatacgtgacatgtcctgatataacattgacagtaacccctgatttgaagcttggtgaggatgggattcttctacatattgatctcgctaaaggaaatcgccgtcttggtggttctgctcttgcacaagcatttgatcaaattggaaatgactgcccggacattgatgatgttctgtacttgaagaaggtatttgaggccattcaagaattgctcagtcaacgtcttatttcagcaggccatgacataagtgatggtggccttattgtttgtgttcttgagatggcatttgctggtaactgtggttttaagcttgacatagacttagaagataggagccttattgaaggactttttgcagaggagcttggcctcattattgaagtacactcgaaatatctcaacattgtgaagcaaaagcttgaaatagcaggcatttctgctaatgttattggagaagttactaactcaccagaaatagaagtttttattgatggcaatctgcatctcaaggaaaaaacttcagatctcagggatctgtgggaggaaacaagcttccagcttgaggagttacaacgtctgaaatcttgtgtaaaacttgagaaagaaggattaaaatgcaggacatcaccatcatggtctctgtcttttaccccaaaattcacagatgggaaactgttgactgcttccttgaaaccaaaggttgccatcattcgtgaggaagggagcaatggggacagggaaatggctgctgcattccacgctgctggatttgaaccatgggatattacaatgtcagacctcttggctgggaagtcttctctcaaggagttccgtgggattgcatttgttggtggtttcagctatgcagatgtgctggattcagcgaaaggctgggctgcatcaatcaggtttaaccaacccctcattcagcaattccaggacttctaccataggccagacacgtttagccttggagtgtgcaatggttgtcagcttatggctcttcttggctgggtgccaggatcaggtgttggaggttctcttggtacaggtggagatatgtcccagccgaggtttattcacaatgaatctggtcgttttgagtgccggtttaccagtgtgtccattggcgattctcctgctattatgttcaaagggatggaaggttccaccttaggtgtttggagtgctcatggtgagggaagagcttttttcccagatgaaaatgttctagctactgttgtgaagtcaaatctggctcctgtgcggtattgtgatgattctaacaatattactgagacctatcccttcaaccctaatggttctccactgggtatagcagccctttgctcacctgacgggaggcacctggctatgatgccgcatccagagcgttgcttcatgatgtggcaatatccatggtatcccaaggaatggcaggttgagaagagtggccccagcccttggctgcgaatgttccagaatgctagagaatggtgttcatag

SEQ ID NO: 24584 - DNA, 237 bp, Zea mays
  Peptide Sequence Number=SeqID_66363
atggcagagccatcagatgcgccagtcaccaagtcatggtcacgtcttgcagccccacgtgccatagagacaccagcacctttgttgcgccattgtggctccgcagcgcagctagtactgggctgtaggtggagcattagcgattggaaaataccaaagaggacaagtagccagccagtaaccgagcaacaacaaacagatgcatttcgatttaaaacttttgaaatagtttcatga

SEQ ID NO: 24585 - DNA, 420 bp, Zea mays
  Peptide Sequence Number=SeqID_66364
atgcatcgtctccgactccgagggagaaagcagcccatggtgttcccctctgctgctcagcgccatggcgcctccgcggacgtgcgcctgcccagcaacatgcacacgatgatggttgttggcgacgtcgtcgttgggagggccagcgacgctgctggccgcccggcaccgtcgtcgttggactcggacgacgcgacaagtgtgcagggcaaggacaaggaggaaggcgttgggtcggggccgcggcagcagcagagcaccggagcgctccgacgggctgcacagctgctgcggttgccgaggcggtttcttgcggttgaagcaggggtggtggaggagggttccggcacggacggagccgggctgtcgtgtcgctcgcacgacgtgcacataaactgcccgccgccgtcgaagcgctag

SEQ ID NO: 24586 - DNA, 213 bp, Zea mays
  Peptide Sequence Number=SeqID_66365
atgtcgcgccccgtgcacggactgctgcttccactgctcttcgccgtctgcctcatgatcccactcaaggtctccgagtgctctaggccaccaccgtcaccgtcgtcgggggacgaccacgttcacgtcggcaggccgcaccaccagcgccagcggctgctgctcgatgccgaggcccgcaccgcccgtccgcccacctgcaggacggatgtg

SEQ ID NO: 24587 - DNA, 600 bp, Zea mays
  Peptide Sequence Number=SeqID_66366
atggcacgccccgtgcgcgcaatgctgccgtgcatcctggtcgtcgtggtcctcctcttccagaccgctgcctcgtcaaggccgttgttgtccacggaggaacgacgacgacgaccgcgcgttgatcccacggcctcgccagcgcccgcccaccgtgcagagtcgcgctcgcaccaccaccgagccgccgccgagaccggaactggacgcgtggcggcagtggagacgacgacgacggaggacgatgacggaagcaggactactagtagcagcacccgtgccgaggaaggcggtggcgccgccgccgcggcattgtcatcggcaacgacgacgacatctgcgcgcggcaagcaacaggacgatgacgtcgtcggggtcgggttgaggaacgggaggccggcggcggcgctgctgcgttccgtgttggcgcggcggtttcttgctggggtggtcgggggcgcggactcggctgccagggcgtcgtgtcgatccagtgacgatcccgccgctggcgctgccgaagactccacgcgcagcaggttcgccagaagactccgcgcgcagcagcagcaggttcgccagaagactccgcgcgcctaa

SEQ ID NO: 24588 - DNA, 396 bp, Zea mays
  Peptide Sequence Number=SeqID_66367
atgaccaccggtagcggatcggcgtgcctgggcgtggcatccaagagcgcgatgaggctagcgatgttggaggccagatacgcctacaacgcttacatcatgtgtaggcctgcaaatggggtggttataaatgccgtcagccccatgggtcctcacccatccgacacagaccatgtcactgagagcgaagagtcccactcagactgcccccaccccccacccccgcgctcggcctctcgccagtcgactcgatgcgagcgcctccccatcgtccctcgtctatcttcttcagtctggttcgtcgtcgtcccgcccccgggcagcttgtggctgcggctgcgtgctagctgtatcaatctttgtcagggacggggtgctgatgtgaagagggtttag

SEQ ID NO: 24589 - DNA, 921 bp, Zea mays
  Peptide Sequence Number=SeqID_66368
atggggtcgggcgaggcggaggtcgttcggccgaggccagggcggagtccgagccctggggtcgggcgaggcggagttcgttcggccgaggccagggcggagtccgagccctggggtcgggcgaggcggagtttcgtcgtcttgcgggtcttagcccgagtccgagccctggggtcgggcggagcggagttcgccgtcttccggcccgagtccgagccctggggtcgggcggagcggagttcgccgtcttccgggtctttagcccgagtccgagccctggggttgggcggagtggagttcgccgtcttccgggtcttagcccgagtccgagccctggggtcgggcgaagcggagttcgccgtcttccgggtcttagcccgagtccgagccctggggtcgggcggagcggagttcgccgtggcgccttcggcaaggcctgactgcctgtcagactcactctgtcgagtggcaccgcagtcggagtggcgcaggcggcgctgtccttctgtcagactgctttatgctgatgggggttacgagctgagaattaggcgtcttgaggggaaaccacacgcccaccggcccacgcccacgcccacgcccacgcccactgatacttcgagaagtagaggatcggtcacacagcttgccaacgtgttcaacattaatggctgctcgtacgcgcgcgggctggcgtccgcttctggggaagtggttttcggaggcaggcggatcgaggccgtgcagaaccaacgccgcgaggccggtagggggcccaacagcacgacgcggcccagtcattcgtcgcttttttaccgtgccgcgaccgcgaccgccagacaattgccatcagctgctggttggtttctttttaatcttgactcgatgatgacgctttcagcaaagaatttgacggcgtaa

SEQ ID NO: 24590 - DNA, 897 bp, Zea mays
  Peptide Sequence Number=SeqID_66369
atgggcgccttggacctacaccttgactttgcttctgctcaacatggacaagccaagttaaaggaatatgccaagagctctttgttgtctgatggaaactacaatacagacaagatcaatggttcaaaccctgatgactatgagaaatttgagaaagggataatgcactatgggtgtccacattatagaaggagatgccgcataagagctccttgctgcaatgaaatttttgattgccgacactgccacaatgaaactaagaattccattaaaattgataaaatgaagaggcatgaacttccacgccatgaagtgcagcaggttgtatgctcattgtgtggcactgaacaggaggtgcgacaagtatgtatcaattgcggtgtttgcatggggaaatacttctgtggtttgtgcaaactcttcgacgatgatgttagtaatagagagcttgctattgtatctcctgtgtttgcttttttaaaacgtaggatgaagtgcatcgtaaatatggcccaagcactggtccatgaacttagtggctctagtggcagtcagttctcatattttcctactgacctgtttcgtgagtttcagtacttgttcgattcgacaaatgatgtttccgtcctgccttgtggtcataccattcatgtaaagtgcctgaaagaaatggaagagcactgccagtttgcatgccccctttgctccaagtcggtttgtgacatgtcgaaggcatgggaaaggctcgacatggagctggcaactctgtctgactcctgtgatcacaaaatggtccgcatattatgcaacgactgcggggcaatatcagatgtgcagttccatttgattgcgcacaagtgccagaattgcaagtcatacaacacccgccagatttga

SEQ ID NO: 24591 - DNA, 1998 bp, Zea mays
  Peptide Sequence Number=SeqID_66370
atggggccggcggccggcgacggcgaccgcggccccggcgccgcggcggagcacaaggtgaacctgtcggcgcggcagccgttcgtggagtcggtgcggacgtgcctggccgagacgttcttccccgacgacccgttccggggcctggggtcgcgcccgcccgccgcgcgcgcgtggggcgcgctcaagtacttcgtgccggccctggagtgggcgccgcgctacaccgccggcaagttcaagtacgacctcctcgccggggtcaccatcgccagcctcgccatcccgcagggcatcagctacgccaagctcgccaacctcccgcccatcatcggcctctattccagtttcgtgccgccgctgctgtacgcggtgttcggaagctccaacaacctggcggtgggcacggtggcggcggcgtcgctgctgctggcgtccatcatcgagacggaggtcccgccggaggagaacccgcagctgtacctgcagctcttctacaccgccgccttcttcaccggcgtcttccagaccgcgctaggcgtcttcaggttagggctgatagtggatttcctgtcgcggtcgacgatcaccgggttcatgggcggcacggcgacgatcatcatcttgcagcagctcaaggggatgctggggatgaagcacttcacgccaaagacagacctcgtctccgtcatgcgctccatcttctattacaggcacgagatatacttgggtgtgatgacaatggctacgcccagtcagatatataagtggaggtggcagagtttagttcttggcatatgcttcctcctgctcttgctgttaagcaagcacttgaggaagaagaaaccaaatctgttctgggtgtcggccattgcgcctttcctgatcgtggtcatcggcggcgtcttcgccttcctggtcaaaggagacgagcatggcatcccgatagtcggcgatctgaagaaagggatcaacccgctgtctatttcgcagctgacgtttacagacaagcacgtcaatacggcaatgaaagcggggttcttgtccgggatcctggcgctggcagaagggatcgccgtcggacggagcctggcgctggtaaagaacgagcagatcgacgggaacaaggagatgatcgcattcggcatcatgaacatcgccgggtccttcacttcttgctacctcaccacagggccgttctccaaatcggcggtgaacttccacgccgggtgccggacgcccatgtccaacgtggtgatgtcggtgtgcatcctgctggtgctgctgttcctggccccgctcttcaagtacacccccctggtggcgctctcgtccatcatcgtcgtcgccatgatcgggctcatcaaggtcagggagttctgccacctgtaccgggtcgacaagttcgacttctgcatctgcatggtcgcattcatcggcgtcgtcttcttcaccatggtcatcggcctcagtgcctcggtaggcttgtccgtggtcagggcactgctgcacgtggcgagacctagcacctgcaagctcggaagcgtcgcgggaggcgacatcttccgcgacgtcaggcactacccgcacgcgaggagcgtccccaacgtcctcgttttgcagctgggatctccgatatatttcgtcaatgcaggttacttgcgagaaaggatcttaagatgggcggaagaggaggagaacggcagcaagattgacgggcaagatctgcagtacgtggtccttgatctcgctggtgtgacttccatcgacaacacggggattgggatgctagtcgaggttcacaagagccttgatcgtaaagggatcaggatagcgctgacgaaccccaggctggaggtgacggagaagctggtgctgtctgggtacatcaaggacatcataggggaggagtgggtgttcctcacggtgaaggacgccatcacggcgtgccggtacgcgctccagagatctagaagcaaggatgacggtgaagtatag

SEQ ID NO: 24592 - DNA, 591 bp, Zea mays
  Peptide Sequence Number=SeqID_66371
atggatgacgatgaggaggaggcgcggacgatggcgtgggagcggcggaaggcggagcggagcggaggcggcgagcagagtggtggcatggcggtggcgaaggggagccagggcaagggcatggcggtggcggaggaggtggtggtgccctacgcaagcggaggggagacgggccacgaggcagaaacggtggccgaatggaggcgagacggagacaccgagatgcaaggaagagtggagagagtacgggaggtcgtgatcactcagagctggattggaaaacgatttcaggttcggactccacgaatcggcacgcccggcgttccgccgtacgacgttatatcagtttatcttgcctcaggagtttttttaattaagaatttgacatcattggcatatggcgtccgcgcgttgaagaatgttgtaggacaacccaatagagcaacgatgatcgccagcaccatgaagaatgttgtagggacaaccaccgccaatgccaccccgccaagcctccgcgcgttgccaccttcttcgaatcatcgacacaccaacccagtaggccccaaccaccagagctcctacaccagctaa

SEQ ID NO: 24593 - DNA, 264 bp, Zea mays
  Peptide Sequence Number=SeqID_66372
atgcagggaagatacgaaataatgaggaattacatgcctaaagttggtactcttgaccttgatatgatgttccgaacatgtactgtacaggttaatcttgacttcagttcagaacatgatatgataaggaaatttcgtgttggcctcacattgcagcctattgcaactgcaatatttgccaattctccgttcaaagaaggaaaaccaaatggatttctaagcttcaagaggcatttacttgatagcccttcaggacatagatag

SEQ ID NO: 24594 - DNA, 378 bp, Zea mays
  Peptide Sequence Number=SeqID_66373
atggctgacgtcgcggcgtgcaccgtggcatcggcaagggtctcctcaaggctccccgcagatatggaggggtccccggtcaacgacatcatggggcattcctgggacgaggcgtggatgatcccattcgacgggaaccaggtctgcctcgcgatctcgacaagggaaagccaaatgacgggccttaaacgggacccaatgcccccactgccttggataaaatgtattggggtgagcgttgtcgtatgttcccacctcctagggctgtggaaagtgtacgcagtgggcgcaatatttataatggtttgggcagaacgtccctacttccagccatcggcagcttacactcccggtaccattgatgataaaaactcgtag

SEQ ID NO: 24595 - DNA, 330 bp, Zea mays
  Peptide Sequence Number=SeqID_66374
atgggcatcacgccggcgcagaagtaccagaaggcgctacacatggcgaggcgggctaacggcgggcgcgaggctactccggcgaataatcacgcgctaaccagggcagtaatggccaaatcaagggcgcgggtaggttgctcacctcaaggggaagcgctggagtcacggggcaatgacggtggcacagggacacgacggggcaacggtggcaaagctccagctacgcaagaaccgctctgggttttcaattcaaattcaaatcaagtttcaaattcaaaccaaatcaaatatgtgcaacaattcaaagaatatttgggctcaatatga

SEQ ID NO: 24596 - DNA, 3117 bp, Zea mays
  Peptide Sequence Number=SeqID_66375
atgcccggcataccgagggatgtcgccgagcactcgctggatattcgggccggagcccaacccgtcaggcagcctctgcgccgattcgacgaggagaagcgcagagtgataggcgaggagatccacaagctaatggcagcagggttcatcaaagaggtattccatcccgaatggcttgccaaccctgtgcttgtgaggaagaaaggggggaaatggtggatgtgcgtagactacactggtctcaacaaagcatgtccgaaggttccctaccctctacctcgcatcgatcaaatcgtggattccactgctgggtgcgaaaccctgtccttcctcgatgcctactcagggtatcaccaaatccggatgaaagagtccgaccagctcgcgacttctttcatcacgcccttcggcatgtactgctacgtcaccatgccgttcggtttgaggaatgcgggcgcgacgtaccagcggtgcatgaaccatgtgttcggcgaacacatcggtcgcacagtcgaggcctacgtcgatgacatcgtagtcaagacaaggaaggtttccgacctcctctccgaccttgaagtgagattccgatgtctcaaggcgaaaggagtcaagctcaatcccgagaagtgtgtcttcggggtgccccgaggcatgctcctggggttcatcgtctccgagcgaggcatcgaggccaacccgaagaagatcgcagccatcaccagcatggggcccatcaaggacttaaaaggcgtacagagggtcatgggatgtctcgcggccctgagccgcttcatctcacgcctcggcgaaagaggtctgcctctgtaccgcctcttaaggaaggccgagtgtttcgcttggacccctgaggccgaggaagctctcgagaacctgaaggcgctccttacaagggcgcctatcttggtgcccccagctgatggagaagccctcttggtctacgtcgccgcgaccactcaggtggttagcgccgcgattgtggtcgagaggcaagaagaagggcatgcattgcccgttcagaggccagtctacttcgtcagcgaggtattgtccgagaccaagatccgctacccacaagttcagaagctgctatatgcagtaatcctgacgaggcgaaagttgcgacattacttcgagtctcatccggtaactgtggtgtcatccttccccctgggggagatcatccagtgccgagaggcctcgggcaggatcgcaaagtgggcggtggaaatcatgggcgaaacgatctcgttcgcccctcggaaggccatcaagtcccaggtgttggcggacttcgtagccgaatgggtcgacacccagctgccgacggctccgattcaaccagagctctggaccatgtttttcgatgggtcgctgatgaagacgggggctggcgcgggcctgctcttcatcttgccccttgggaagcacctacgctacgtgctacgcctccatttcccggcgtccaacaatgtggctgagtacgaggctctggttaacgggttgcggatcgccatcgagctaggggtcagacgcctcaacgcccgcggcgactcgcagctcgtcatcgaccaagtcatgaagaactcccactgccgcgacccgaagatggaggcctactgcgatgaggttcggcgcctggaagacaagttctacgggctcgagcttaaccacatcgctcggtgcttcaatgagactgcggacgagctggctaaaatagcctcggggcgaacaacggttcccccggacgtcttctcccgggatctgcttcaaccctccgtcaagatcgacgacacgcccgagcccgaggcacccttggcacagcccgaggcaccctcggctcagcccgaggcgtcctcggttcagcccgaggtaccctcggcccccgagggcgaggcactggacgtcgaggaggagcagagcggggccacgcctgatcgaaattggcaggccccgtacctgcaatatctccgccaaggagagctacccctcgaccaagccgaggctcggcgggtagcgagacgcgccaagtcgttcgtcttgctgggcgatgaggaggagctctaccaccgtagcccctcgggcatcctcaagcgatgcatctccatcgccgaaggtcaggaactcctgcaagaaatacactcgggggcttgcggccatcatgcagcgcctcgagcccttgtcgggaatgctttccggcaaggcttctactggccaacggcggtggctgacgccactagaattgtccgcacctgcgaagggtgccaattctatgagaagcagacccacctgcccgctcgggctctgcagacgatacccatcacctggccctttgctgtatggggtctggacctcgtcggtcccttgcagaaggcgcccgggggctacacgcacctgctggtcgccatcgacaaattctccaagtggatcgaggtccgacccctgaacaacatcaggtccgagcaggcgatggcgttcttcaccaacatcatccatcgcttcggggtcccaaactccatcatcactgacaacggtacccagttcgccggcaaaaaattcttggatttttgcgaggatcaccacatctgggtggactgggccgccgtggctcatcccatgtcgaatgggcaagtagagcgtgccaacggcatgattctacaagggctcaagccccggatttacaacgacctcaacaagttcggcaagcgatggatgaaggaactcccctcggtgatctggagcctgaggacaacgccaagccgagccacgggtttcacgccgttcttcctggtctacggggccgaggccatcttgcccactgacctagaatacggctccccgagggcgagggcctacaacgatcaaagcaaccaagctagccgagaagactcactggaccagctggaagaggctcgggacaaggccttactacactcggcgcggtaccagcagtcccttcgacgctaccacgcccgaggggtccggtcccgagacctccaggtgggcgacctggtgcttcggctgcagcaagacgcccaagggaggcacaagctcacgccccctgggaggggccattcgtcatcgccaaagttctga

SEQ ID NO: 24597 - DNA, 243 bp, Zea mays
  Peptide Sequence Number=SeqID_66376
atggccgccttgtgcttcggtgcccgctggtgccgcgggccgcaccgtgcgggagcgaaggactgtctcgacatggatcgcgtcatcggggttcttgctgccctcatcggatgtgcgcggccgccgctttcgggcgccaccgcgggctttgcccacgtcgttactggggcacccaccggcggcgatacgcagaatcgcgctcgcccgtctaggttgtctcttcggctctggtcgcggccctag

SEQ ID NO: 24598 - DNA, 543 bp, Zea mays
  Peptide Sequence Number=SeqID_66377
atggccatgccatcatcttctacctacggctcggctagtgatgacaccgcgccagccctagggccgcgaccagagccgaagagacaacctagacgggcgagcgcgattctgcgtatcgccgccggtgggtgccccagtaacgacgtgggcaaagcccgcggtggcgcccgaaagcggcggccgcgcacatccgatgagggcagcaagaaccccgatgactacaacccagcgcagcaaggcgaaataggaaaacaggtaaggtcgcatgggtgccttaccgcgatccatgtcgagacagtccttcgctcccgcacggtgcggcccgcggcaccagcggcaccgaagcacaaggcggccatcatattccgtccctctagatctctccctgcgcacccctctctctcctactatctcacggccatggcgaagaagaactcgagttgggggctccccagttcggcgggcggcggatctcagcacatccggcttctacgtccgcgccgcacggaccagcggtggaggcaatcgacgcgcgccaggtag

SEQ ID NO: 24599 - DNA, 109 bp, Zea mays
  Peptide Sequence Number=SeqID_66378
atgaccaaatccaatatcttgaagccactcatggggtcatggaaccagatcaccgcggcgatgctcatcaggggcaccctgacagcgttcagcacgcctgcaggacatt

SEQ ID NO: 24600 - DNA, 327 bp, Zea mays
  Peptide Sequence Number=SeqID_66379
atggcggtggcaggcgggcgggcgcagcagtcacgtcgtcagccaggctcacgtctcatcctggggcagcaagagagcctcctcccacggcgtgaagacgggaccgggaaaggggggataccccgaaaaggatccttctccgcgaaggaaccgggctccgagccccccctactgatcagggatttgaagactggccctccggagggttcaacagtcgcctcagatcgcgtgggcccgacacccactactggtcaggggttcgaaggccagccccccgaagggttccatggccgcctcaggctactcgggctccgcgcccattactga

SEQ ID NO: 24601 - DNA, 1776 bp, Zea mays
  Peptide Sequence Number=SeqID_66380
atggggcctatcaaggacttgaaaggcgtacagagggtcatgggatgtctcgcggctctgagccgcttcatctcacgcctcggcgaaagaggtctacctctgtaccgcctcttgaggaaggccgagtgcttcacttggacccccgaggccgaggaagccctcgggaacctgaaggcgctcctcacaaaggcgcctatcttggtgcctccagctgccggagaagccctcttggtctacgtcaccgtgaccactcaggtggttagcgtcgcgattgtggtcgagaggcaagaagaggggcatgcattgcccgttcagaggtcagtctacttcgtcagcgaggtactgtccgaaaccgagatccgctacccacaagttcagaagctgctgtacgcggtgatcctaacgtggcggaagctgcgacactacttcgagtctcatccggtaactgtggtgtcatccttccccctgggggagatcatccagtgccgagaggcctcgggtaggattgcaaagtgggcggtggaaatcatgggcgagacaatctcgttcgctcctcggaaggccatcaagtcccaggtcttggcggacttcgtagctgaatgggtcgacacccagctaccgacggctccgatccaaccagagctctggaccatgttcttcgacgggtcactgatgaagacaggggccgacgcaggcctactcttcatctcgcccctcgggaagcacatacgctatgtgctacgcctccatttcccggcatccaacaatgtggctgagtacgaagctctggtcaacgggttgcggatcgccatcgagctaggggtccgacgcctcgacgctcgcggtgactcacagctcgtcatcgaccaagtcatgaagaactcccactatcgcgacccaaagatggaggcctactgcgatgaggttcggcgcctggaagacaagttctacgggctcgaactcaaccacatcgctcggcgctacaacgagactgcggacgagctggctaaaatagcctcggggcgaatgacggttcccccggacgtcttctctcgggatctgcatcaaccctccatcaagatcgacgacacgcccgagcccgaggcaccctcggcccagcccgaggcaccctcggcccagcccgagaaggcacccgggggctacacgcacctgctggtcgccatcgacaaattctccaagtggatcgaggtccgacccctgaacagcatcaggtccgagcaggcggtggcattcttcaccaacatcatccatcgcttcggggtcccaaactccatcatcaccgacaacggcacccagttcaccggcagaaagttcttggacttctgcgaggatcaccacatccgggtggactgggccgccgtggctcaccccatgtcaaatgggcaagtagagcatgccaacgacatgattctacaagggcttaagcctcggatctacaacgacctcaacaagttcggcaagcgatggatgaaggaactcccctcggtggtctggagtctgaggacaacaccgagccgagccacgggcttcacgccgttcttcctagtctacggtgccgaggccgtcttgcttacagacctggaatacggctcctcgaggacgagggcctacaccgaccaaagcaaccaagctagccgagaagactcgctggaccagctggaggaggctcgggacaaggccttactacactcagcacggtacgagcagtccctgcgacgctaccacgcccgaggggtccggtcccgagacctctag

SEQ ID NO: 24602 - DNA, 321 bp, Zea mays
  Peptide Sequence Number=SeqID_66381
atggggcacaagtacacgccgacgtactactggggcctgcaggacaccatcgcgtcgctctgcaagtccatcctgccctccttccgcgtgggccggcggctcacctccgaccaggccgcggcgcggcgccacgccgagcagctcaagtggcagcaggagtccttccaccgcatcctccaccttgccgcgctccaccgcgagggcatcgtcccggcccacgacgtcgccgccttccgcggcaccatgctcgcggcgctcgtcccgccgccgccgcagcaccccgagcagcccgcgggctccggaaacgaattcaaagcctga

SEQ ID NO: 24603 - DNA, 660 bp, Zea mays
  Peptide Sequence Number=SeqID_66382
atggcgtgcaccttcctccgccgcgcgttctccctcaccgccgccggcacccacgcgaccccccgagttgccgccgccttcgcttccacttcctcctcatcctccgtcgtcgtgcctctgcgctccccactagaccaccgtcttctccgccacctccgctccgagatcacctacctcgcggagcgccgccctccccacgtgccgccgagtagcttcaagtcgttcgccgtggaggaccgcccgggggagcagtggcctgtcccggacgacgcgcccctcttccgccgcgtggagtcgctcgagcgcgggccccgcctccacctcagcctcatcgtcgaggtcgcccggggcgaccgcgtcctcggcttcgtctgctccgcctggcccgacgacctcgccgtccgcccacgtgctcacgctcgcagctggcggtggcagcagtggtggtcgtcgtggtgggcgcgatttcgagtatggattactgtgtggcgctgcgagctgaaactggggggcgaggagagggaagcggtgacgaagttcttgaaggagagggaggtggacgccgagctcgccggattcttgcacgactacatggcaaacaaggagaagatggagctgctccggtggttgaagactgtcgaatcattccttaacaagtag

SEQ ID NO: 24604 - DNA, 1995 bp, Zea mays
  Peptide Sequence Number=SeqID_66383
atggagaacgtatcgggtgctaaagaggacggcaagaaggtgcaggagagggcagcatggtgcgttagcgacggtggcggcaacctagtgcaggatgccgtcgactacaggggctgcagggcggacaagtccagcacgggcggctgggcgtcggcggcgctcgccgttgggatcgagctgtgcgagcgcctctccaccatgggcatcgccgtcaacctggtcacgtacctcactgccaccatgcacctgcctagcgccgcagctgccaacgtggtcaccgacttcatgggcacctctttcctcctctgcctacttggtggattccttgccgactccttcctcggacgatacctcaccatcgccatcttcgccgtcgtccaagccatcggcacggggctcctcgcagtgtctacagaggtgaggcagctgaggccgccgccgtgcggtcccggcgcggctgggccgtgcgagcaggccacggggctccagatgggcgtgctgtacgtgtgcctctacctcatcgcgctcggcactggcgggctcaagtccagcgtctcgggcttcggcaccgaccagttcgacgagcgcgacgcacgcgagcgcgccgccatgggccttttcttcgaccgcttcttcttcttcgtcaccttcggcacgctcctcgccgtcaccgtcctcgtctacgtccaggaccacgtcggccggagctgtgcctatggcatctgcgccggcgccatgctcgtcgcggtcgccgtcttcctatcaggcaccaggcggtaccgctacaagcgcagctccgggagccccatcgtgcacatcctccaggtcctagttgctgccacccgaaaacggaacatcgtcatgcagccactcaccgccgccgcgctctacgaggaccaccctgagcacgcgcgtatcccccacaccgcccagttcccgtgcctggacagggcggcggtgatggctggcgacgacgacaacgaggtgggccacgacgggcggccgacgatgaacccgtggaagctgcgctccgtgtcccgcgtggaggaggtcaagatggtggcccggctgatgccggtgtgggctacgaccatcctgttctggaccatgtacgcgcagatgatcaccttctccgtggagcaggcgacgaccatggaccggcgcatgggcgggttcgagatcccagccgcctcgctcaccgtcttcttcgttggcgctatcatgctcactctcgccttctacgaccgcgtctttgtcccgctctgccggagcctcatgaccggccggcagggatttactaacctggagaagatcggaatcggcctggtcctctccacattcggcatggctgctgcggccatctgcgagaaaaagcgcctcgccgtcgctgccacgagtgtcgccgtagggcatgggtcgctgcccatcagcgtgttcatgctgacgccgcagttcctgctggtgggctccggcgaggctttcatctacacggggcagctggacttcttcatcatgcggtcgcccaagagcatgaagaccatgagcacgggcctcttcctcaccacgctctcgctcggcttcttcctcagcagtgcgctcgtctcgctcgtcaagagctgcacgcggtggctcggcgacaccatcaaccacagccgcctcgactacttctactggctgctggcccgtgctcggcgttgtcaatctcgtcgcctacatcgtctatgccatgtgggccgcagcaccggccagcagtcaggcggagcagccgcagcacgcgatggccgcggacgagaaatgctagcaagatctatcaactaccaatcgacctcagctgctgtgctgcacccatcgcttaataactatcagaggcacacctatacgcttaccaatttagaggattttatagttctgatgcgtggatgcagtgacgacatgatttccctacatactaaaacaagttctcctctggttattgaaaaagatgaaaaaagttaa

SEQ ID NO: 24605 - DNA, 294 bp, Zea mays
  Peptide Sequence Number=SeqID_66384
atggaggacaggaacgcaagatcgatggatctcaggttgggagtagcagtcatccctgctactcaggcaacccaccccagcaatttaggcaaggtcaccctcaaggtcaccaacatcagcgtcaaaaccagcatcatcaccagtaccagaggcaatttcctcagcagcaacagcagcagtaccgtcagaacacccaacctggaggaaatcagtaccaacgtcagaataactaggcagctcgccttcctgccccagcacccaaccagaatggccaagcagctccagcgcaagtaa

SEQ ID NO: 24606 - DNA, 939 bp, Zea mays
  Peptide Sequence Number=SeqID_66385
atgacatttaagcggctaaaaattaaagcttgtgatatcgaagagaacaacactaccgcatggcgcccttcctcctcctgctgctcgccgtcctcctccccgcgccgcccggcctcggcgccggcttcggggagggcgcggggcaccatcgacatcaccaagatcctcgccggcttcccggagttcagcgccttcagcaccatgctcaccgagaccaacgtcgcgctcgccatcaacagccgcgacaaggccaccgtgctcgcgcccaacaacaccgccgtcgccgcggcgttcggcggccagccgcgcatcccgcgctcattcatggcggacctcctcgcgctccacgtcgtgctcgactacatcgacgagcccaggctgggcgcgctgaagcgcggccacatgggccaaggctccgtggtcaccacgctgctgcaggccatgcgcggccgcggcacggggttccttcgcgtctactccgggcacgacgggcgcgccacgatctcctccgccgcgcccgcgaggctccagagcgccaccgtcgacaaggtggtcgccgcgcagccgtacagcctggccgtgctgcaggtgagcggcttcgtcgtcccacccggcatcagagtcccgcagccgtttccagttccaccaccaagggcgcgccacatggcagcgccaccgggacaggcgccggcggctgcgcctgaatcccaccaggaaccgttcattggttccggcccgctggttccgtccccgatcaggccggtgcctacaccaaacctcacaaatacgccaccgccggcgccaggtcagacaggagtgcacggcggcatggcagcaaagcttccatctgccgctggacgcagtgccgcgagctggtggaccggagctggagtagctgtggcgctcagtatcatgacatgcctgaatttgcatttgtaa

SEQ ID NO: 24607 - DNA, 597 bp, Zea mays
  Peptide Sequence Number=SeqID_66386
atggcggcctttctgtctctttttatggatgtcactgcttctgatctcagtcatacctatcagaagttcaggccagtggtttcacctttaccagtaccactgaagtatcatataatagctgcagttgtttctgctaacttaatccaaagaagctttgtctcactgcaaaatgctggggtaaggcttgcctcggttattccttacccaaaccctactgggtctgtccttcctttccaattgatggcagaaagttatcatctagttgaccaatggacttcagtaataataagctacagagatccaaagaatgaaatgagtcttgttatctctcgttttgtgcagaccgttccagttaacccaaaaccttttctgaacaacctgacaggaaagcctgttattgtcaaactcaagtggggtatggagtacaagggttatcttgcttctgtggactcatatatgaatctccagcttgccaacactgaggagtacattgatggtcaattctctggaaacctgggagagattctgatcaggtgcaacaacgtcatgtatctccgaggcgttccagaggatgcagagatagaggacgcagagtga

SEQ ID NO: 24608 - DNA, 1743 bp, Zea mays
  Peptide Sequence Number=SeqID_66387
atggtggcgaatacagcaaggcacccagcgttccaccatatcccctccgctctcttccacaatcccatctactgctacgctcccctctgcaatctcccagaagaccacgccctattacgttttgttcatatctttttgtttgtttttctacgaaaaatatatcaggttagcgaagctagaagtttggaaagggatcaagtagagagcgacctaacgtttgctggctttgcggtcttcaactgccctataaggggtgactctggtgctgttttacaagaactcggacaatcttcccatgacttggtcatgatcaccggagaccaagcgttgactgcctgtcatgttgctagccaagtacatatatcttccaaacctgttttgatcttgacacggataaagactggcggttttgagtgggtttcgccagatgaaactgatagagctccatatagtgctgtggaggttgcagtgttatcagaatctcatgacctttgtattaatggggactgttttgaaatgctacaaagtactgaggctgttctccaggttatcccttatgtgaaggttttttcacgtgttgctccagaacaaaaagaacttgtactaactacattcaaaagtgttgggagggtgacactgatgtgtggagatggaaccaatgatgttggtgcactgaagcaggcacatgttggcattgctcttttgaatgctgaaccagttcagaaagtcaactcaaaatccaaagctgaaaataaatctgggaaattgaaaaaacagaagcctggtaatgaagcatcatcacgagtgactccggcaaccaatagttctgctaaagcatcgagcagccgccccttgactgctgctgagagacagcaagaaaagttgcagaaattgttggatgaaatgaatgatgaaagtgatggccgctcagcaccaattgttaagcttggtgatgcttctatggcttcacctttcacagcaaagcatgcctctgttgcccctactcttgacatcatccgtcaggggagaagcaccctagtcactacacttcaaatgttcaagattcttgggctcaattgccttgcaacggcttatgttctcagtgtcatgtacctggatggtgtcaaactgggcgatgttcaggctacaattagtggtgtctttactgcagccttcttcctcttcatctcccatgcccggccactccaaacgctgtctgcagagcggccgcaccctaacatattctgtgcatacgttctgctctccattcttggccagttcgccatgcacatactcttccttatcacagctgtcaatgaagcatccaagcatatgccagaggaatgcatcgaacccgactcagacttccatccaaaccttgtgaatacagtctcgtacatggtgaacatgatgatccaggtggcaacctttgctgtaaactacatgggccacccatttaatcagagcatatcggagaacaagcccttcaagtacgcattgtatggagcggttgctttcttcacagtgatcacatcagatatgttcagggatttgaatgactacatgaagcttgagcctttgccggagggaatgcgtggcaagttgatgttgtgggctattctaatgttttgtggttgctacggatgggagtggctcctccgatgggtgttcccagggaagatgccggcgtgggagaagcgtcagaaacaggcagttgcaaacttggagaaaaagcgcgactag

SEQ ID NO: 24609 - DNA, 1683 bp, Zea mays
  Peptide Sequence Number=SeqID_66388
atggcgcggttcgaggtgaacggcaagtcggtgcaaggcgtggacctgctgcggcggcgccactgggcgtcgcgtctcgacttctggcccttcctcgcgctctatgcgctttggctgctgctcgccgtcccggcgctcgacttcaccgatgctctcatagtcctggccgcgctctccgctgctcacatcctcgccttcctcttcacggcctggttcgtcgatttccgggccttcatcgggtactccaaggcgagtcgcctctcaattcttaacccatctaattttagggctgaaaagcttgagcttggcaatattacaggtgagacagcggagatttactttgattttcggaagcagaggttcatctactctgcggagaaagataactttttaaaactccggtacccaacaaaggagttgatcagtcattatgccaagggcactggttatggaactgaggccaagattagcactgctgtggataagtggggtagaaatgtatttgagtatccacagcccacatttcagaaattaatgaaagagcaaataatggaaccattttttgttttccaggttttttgtgttgttctttggtgcctggatgagtattggtactacagtttgtttacacttttcatgcttttcctgtttgagtctactatggcaaagaataggctgaagacattgactgagctaagacgtgtgaaagttgatagccagattgtgttgacctatagatgtggaaaatgggttaaaattcctgggactgaactactaccaggagatattgtgtcaataggccgctcaactagtggtgaagatagatctgtaccagcagatatgctattgttagctgggtctgcaatagtaaatgaagctattcttacaggagaatctactccacagtggaaggtctcaattgctggacgtagtcctgatgatatgctatctataaagcgggataagaaccatatcctatttggtggcactaaagtattgcaacacactgcagataagtctgtaaatcttcgagcacctgatggtggctgtctagcttttgtattgaggactggatttgagactagccaagggaaattgatgaggactatcttattttcaactgagagggttactgcaaataacaaggaaagtggcctgtttatactctttttgctcttctttgcaattattgcgtctggttatgtgcttgtgaagagccattcagaataccgttcgctgggaagctttttaagagttctcttttatcaggttgacatatgctgctttgataagacagggactctgacatcagatgatatgggtgaacatgggatgacaaaccctgcgtttcaggagttccaaggtattgttactttggaagatgacactgagttaatatctgatgcaaataagctgcccctccgaactcaagaagtactttccagttgtcatgcattggtatttgtcgacaacaagctggttggtgatcccctcgaaaaggctgctataaagggcatagactggatctacacatctgatgagaaggccatgtctaaaaggcctggtggtcaacctgtacagattgtgcacaggtaccattttgcttctcacttgaagagaatgtctgttattgtccgtattcaggaaaggttttacgctttcattaagcataatgaaacatag

SEQ ID NO: 24610 - DNA, 432 bp, Zea mays
  Peptide Sequence Number=SeqID_66389
atgaagcttgctgaaaaaatattcctcaagatgaaagatgacgaggctaagaaaaatgccgaagaagaagaagcaaggagaaaagtcaaggaagaagataaaggaaagaagaagatcgactacaacgatgacttggttgaactcctggtgtctaaggtaatgaggaaaatgaatgtcaacaatgaggactcaccaaatagcattttcctccttaagtcggttcctttttctgctactgagccaaagctcccttgcgcacagcttcgacgctggttcagccttcgttctgagcctgctctccatattgtgtacagctttgtcccgagtccgaaggttactgtacatatattatgcttgggaaacattgttaattatgtttttgaggaccttcggaagatgaaggtccccaacagtagcctctcgcagtattaa

SEQ ID NO: 24611 - DNA, 219 bp, Zea mays
  Peptide Sequence Number=SeqID_66390
atgtcggagcacgacgcctttgctggtgactcgatcgtcattggcgaccttgacggagagtccttcgggaggggtgaccaacaagccgagctggctggccacctcctcttgtatgaataccttcagcttcatggttgtgccaacgtcaatcccagtgagcgcgtgcagcgggactcccaacgcctcaacggcttcttccagattctgatcttcatctag

SEQ ID NO: 24612 - DNA, 576 bp, Zea mays
  Peptide Sequence Number=SeqID_66391
atgggggaggcgctgcgggcggctgccgctgacgcggtggtgacattcctgtgggtgctgtgcgtctccacgctgggggcctcgacgacggcggtgacgtcctacctgaggctgcagggcgtccacttcgcgctcctggtcaccgtctccctcctctccgtcctcctcttcgtcttcaatatcctttgcgacgcactcggcggcgctagcttcaaccccaccggcgtcgccgccttctacgccgccggagtcaccagcccctctctcttctccatcgcgctccgattaccggcacaggctgccggcgctgtgggcggtgctcttgccatctcggagctgatgccggcgcagtacaggcacatgcttggggggccctcgctcaaggtggatccccacacaggcgccggcgccgaattagtgcttacttttgtcatcaccctggccgtgctcttgatcatagtcaaggggcccccgcaaccccatcatcaagacatggatgatctccatctgcactctgtgcctcgtcctctctggaatcttacatatgtggatagcctgatctattccattctttag

SEQ ID NO: 24613 - DNA, 129 bp, Zea mays
  Peptide Sequence Number=SeqID_66392
atgctgctgctgctgtcccacgctgtccttgccatggtttttaaagcggtaacgatttattccaacacaggctaccgctccgtatctctcgaccatggccacgtcgacttcggctaccttggcatctag

SEQ ID NO: 24614 - DNA, 297 bp, Zea mays
  Peptide Sequence Number=SeqID_66393
atggcgagccctggtcctggccatagccgcgtggccgccgaatcggcgaggtcgcgctcgcccgaagctgacctggagttcatgctaattgatgaaaatgcaaagccgaagcccctgccttattcacttctcgaaaagatcacaaatggtttctccggggcacatattattgggtatggtggatctgcagatgtttatgagggattcatcgggaatcacaaaatcgctgtgaagaggttgcgcataccatatcagcacgagaaggaattcagtcaagagattgaatgcctgatgaag

SEQ ID NO: 24615 - DNA, 630 bp, Zea mays
  Peptide Sequence Number=SeqID_66394
atgacgcttggggaaaggtgttgctatagggcgaggatgtgtggaggccgaaactggttcgcggcaaggccggcccaagcggtgccgatgagcaggaagccaggtgaggcgagcccgcggcggctgacaggcagaagggaaatggtcgtcgtgcgcgcgatgggcagagcagcgcgcacaacagacggccttctcgacggagatgccgtggacgcaggacagggcgccgcactcgaggtcctcgagggtgacgaagcgggtggacttggacggggaggagaggtggtggaggacgtgctcgaagaggccctcgtcgcaggggagcacgaggcagatgaagggcgcggagcagggcgttgtggggccgggcggggcgatggcagggtcgccctagggagcggcggcaacggcggggcaggagaagaggaggtggaggcaggcggagcagaaggcggacgggctgtagaggatgacgcaggaggagcagaggaggcagaaaacgccctcatgacggaagtggtggagcggccaggcgtcgcggacggggccgagctgacggcggcgcggcagtggacaggggcgaggcggtggcgtggtggcgagcggacgggggagcgccttcgaccgtag

SEQ ID NO: 24616 - DNA, 369 bp, Zea mays
  Peptide Sequence Number=SeqID_66395
atggcggggcggactgcgatggcgtggtcaaactctgacgacgacgtgggcgatccagagcataaaggttatcgatgttatgaccctttagcccatcacattcctatttctcgtcatattaatgatgggtcacaatttgttgatgcattaccaaatcaccagggatatcatcttcgtgatcgtagtacaattgaacctccggatcgctatggatcctccacttccaccttgagtttgaaggggagtattaaggcctatgtggcccatattagcttttcctatatattctaccaagtcctaaagactaatcactctttcttgaatccaaggttagtaacagttgtcactcaattaccaaaatcaaactag

SEQ ID NO: 24617 - DNA, 327 bp, Zea mays
  Peptide Sequence Number=SeqID_66396
atgacgaccccgccgcgccgatcgccgccgctccggggaagaggccatgcgggacttcgggctctggcgcctatggtcaacatccacgagcgctcgcctgtgcccgcgtgcgtgccggcacacccggacccttcgtcgtcgatctccccggacgactggcggcgtttggagggcgcaacgttctctgtgatgtgcaagatccatcccaccgtctcctcccagcaccttcgcgccagggtaatcgactacgtccagcgcctcttcaggctccaccatgacggctaccaggtcaagcttgtgaaggagaactacgcatcattatattga

SEQ ID NO: 24618 - DNA, 408 bp, Zea mays
  Peptide Sequence Number=SeqID_66397
atggagaaggaggggttgacgtttgagcgtcaacgatcggtagggcgacgtaacaaaaagaagagtagcatcagactgaggaccttcttgcttcttatgttgttcggtcttcgaggagccccgctagggaggctggcggcagcacacgcgtttgcgtcggtcagggtggccacgctcgccaaaggaacagaagggggtaggcatccgaccgggaaggccacgacagcgacggatccagccatgaagacgcgattcggtcaaagggacgtcggatctagtcaggaaggtcacgacggtggtggatccggttgggaaagccgatgtagtgatgaatccagttgtggcggcaacgaagaaggggtgggcggcgggtcaggtccagctggcaggagcctgccccgggcctag

SEQ ID NO: 24619 - DNA, 615 bp, Zea mays
  Peptide Sequence Number=SeqID_66398
atggcttcgtgccccagctgcttcagcgtggaggacgcccggacctctccctgtgtggccatcgcgtcgggcgcggcggcggacgtccgccccaccctcgagccccctccccgcgctgctcctccatccgccgccgcgtcctgctgctgctccagccgccggatctgcgcctcctccgcgctggtgtgctctggcgccaccacaagcgagcacgcgggcgcgggccgccgccgacgagcaggcgttcaggcccgagctgccgacgcgcaagttggcgtgcggtgcgtccacgaccccccttctccggcgcaggccccttcatccacaccccgcacgctgctctgtgggcatgccggctgctgcgccaccgcgcggacatgcaggcaggctaccgctgcctctcggacatgccggcagattgccgctacctcgcgggcgcgtatgcagtctggatccgcgccggcgtcgcccggatctcccctgaccgaccgccatgagcgcctctacggctccttcgccggccagcgcctctccttttctgggcgcaacccccccatcatggtgtcggctacctactccgtgcccgcgccgatgcccatcaacgccaacctttaa

SEQ ID NO: 24620 - DNA, 630 bp, Zea mays
  Peptide Sequence Number=SeqID_66399
atgcagaaggtcaagagttacagagctcatgacggcgtcagcatatcgctggccgtgcatccaaccctaccatatgtgctgtcatggccttgttcgggcccccacgagaagaagctatggaactgggaaaagggatgggactgcacacaaacatttgagagggagtacgttgcaaggaattttgtatgtcaagttgcttttgacccaaaggagaccaacagatttgctagcgcttcgaactatagggttaaggtttggagcgttgatcttcccaaatgtaactataatctgcctggtttttttaacgaagtgaacttcctggaattcttcacacgtgatgatcaacagtatttgattattactgtctctcatgataagactgcaaaaatatgggacatgcggaacaagaaatatgtttatgatagtatggaacaaaatttgatgtctcccgtgtcttctgtcttctcacatcccaatctgccgatactacttacacgttcaattgatggcacttctcatttctggagtcccaaagatttcaggaggatagggccaaaattaatacaggaccaacaacttatccgtctgcaccaaagggatgaacaaacctccaaaacaaaacaacagtaa

SEQ ID NO: 24621 - DNA, 315 bp, Zea mays
  Peptide Sequence Number=SeqID_66400
atggaaggtgtcgctcttgatttcttgtcgtggatgaaggcgcaactagctcgactacagcatcgatggcgtgctgggggtcccctgccccaggggcagcggcgcattgtgctggacatcggcggcggcaactcgacggtgccgctggccacaggcatgaccgacaccgccactgtgctgctgaaagggaaatccaaagacagttcagtctgggagcaccggactgtccggtggtgcaccggacagtgtccggtgcgccaggttggctctggtgaaaaggccgctctcgggaaatcgtcggcggcgtacagctaa

SEQ ID NO: 24622 - DNA, 231 bp, Zea mays
  Peptide Sequence Number=SeqID_66401
atgggggagcaggtggccttcgtctcctcttggcttgccttcgcttggatagaccgagcccccactggctactggggttcggatattgggtacgaatatgagatgactgatatccgtcggattttggatatccggatatcttctcggatacctgtccagatttcagattttggatatccggacatcttcctagatatcttaccatatttcaaatttcggatattgagatag

SEQ ID NO: 24623 - DNA, 282 bp, Zea mays
  Peptide Sequence Number=SeqID_66402
atggccgacatgagatctgagcgcgagcgcgggcgtgagcgagcgctgacaagcggaccagggaggtcagcgactggggacgaagacaggctgaccggtcgggcccagcgccagggcacgcaggcaaccaatgggtggggcccaggggcagagcgcgctcatgtgaagcgcggggtcgccagagacaaggcagacacggcctacgggggtctggggtcaccggggttggccaggactgacgaggagggctcgacaaactcactggcgggactatggccgtga

SEQ ID NO: 24624 - DNA, 120 bp, Zea mays
  Peptide Sequence Number=SeqID_66403
atggccccaatgcgggttcgtcgccgcacccgaggtgggctcgggggcctctgtcggtaccctaaatatggggtatccactcctgctatgtcaaaaggtcaggtgctgatgcatggctag

SEQ ID NO: 24625 - DNA, 1881 bp, Zea mays
  Peptide Sequence Number=SeqID_66404
atgccttcccgccttctccagcagcccctccctccagctgctccaccgccgcctcccttgcttgcccatagtcaacaccgccgccacgccctcctcaccgccaccatcgcttccgcagtggccgcagtagctttgttgctcttgctcgttgtcctcctccggcggcggaggctccggatccccacactcccgtgctccccgctgttggactccggtcgcccgctccggcgttactcccgccgcacgcttcgccgcgccacgggcgggttccacccgtcccgcctcctcggcagtggcgccgcctcgcccgtctacctcgccaccttccccgacgcctcgctcgccgctgtgaagacgtgcgcgtcggcgcacgagctccacctcctcgcgtcgctccctgaatcccctcgcctcgtttccctccatggctactcgcccggcccgggctccggcggcggcgctgccgagcgcccgctcctccttgtcttcgagtacatgccacagggatcccttcagggcgcgctattcggaggcggcgacgccgctgcccgcgatggccagttcctggactggcagaagcggctcgccatcatccgtgacgtggcgcgcgcgctcgcctttctccacgttgagtgccagccgcccgtcgtgcacggcgacctcaagcccagcaacgtcctcctcgacgctaacttccgcgccaaggtcgccgatttcggcctcgcgcgcttcaagactcccgatgcaatcgccgcgtctggtgctgccggggacgatttcatgagccaagaactcggcgaagccggcgaccacctctccaccaccgcctccgctgccggcggggccaaaacggacacaaaggatgattctggcccggctggtgcgtgggggaaggagtggtggtggaagcaggatggtagcggtgagcttgactcgagggattacgtcgccgagtggattggcagccaaatctgcccggagaggaacccggattgggtcaacgagaacgaagacgccgccaacgaacgtaagaactctccctcgggtacgcacgaaaacgctgtgtcagcctcgccgcccgaggacaagaacaacaccgactgcaatggcaatgtggacgtcgccaggaaggaggggaccaagatgagggagtggtggaaagaggagttctttgaagagatgagcaagaagggaggaagcttcgagaagcggcgctccggcggcaaaccgtggatccgttcgatcagcatgaacacgggccacggcgacaccaacggcggcgagagcaattctgtggacctgagcttccggagaagccggaagcggagccggcggcgcggccggtcagtgggcagcgacgtccacagcggatgcggcggggacttcctcagccgggagcttagcagcacgacgagcatgcgcggcacggtgtgctacgttgcgccggagtgcggcggcgggccttttgagcacggcagcgatctgctggagaaagccgacgtgtacagcttcggcgttctcgtgctagtgatcttgtccggtcggcggccgctgcacatcctgtcgtcgccgatgaagctggagaaggcgaacctagtgagctggtgccggcagctggcgcgagccgggaacgtgctcgagctcatggatgagcggctggccggcggctacgacaaggaccaggccaccaagtgcgtgcagctcgcgctgctctgcctgcagcggcagccggagctccggccggacagcaaggacatcgtcaagatcctcgacggcgacatggaacttccgccggcgccggtggagttctcaccgtcgccccgcctgcggcctttcccgcggtcttcgcgccggccagcacagcctgatgccgccgagtga

SEQ ID NO: 24626 - DNA, 159 bp, Zea mays
  Peptide Sequence Number=SeqID_66405
atgcgagaaacacccgcggcgccacctcaattcctcaccgaagttatgacggcgccgtggagccctctgtaccgtgggcgggcattcggatttgagcttggggccctggcgcacgatgtggacaacgccagcgatggcctccgccgtggccctgtataa

SEQ ID NO: 24627 - DNA, 252 bp, Zea mays
  Peptide Sequence Number=SeqID_66406
atgaatgatagtgctatcttcctcaatgtcaatattgtcgctatcctcggatggattcatggcgccgactttgtcttaagaggcagtagcctctactactgtatacaatggagattggacgaagttggccttcgactgaagcaacatataaagaagcttcgcctccttcaaagaaccttcgtgctaccttgtattaaggagccgaaggggattgaaatcaagtaccaacaacaatgcataggaatagcgtga

SEQ ID NO: 24628 - DNA, 423 bp, Zea mays
  Peptide Sequence Number=SeqID_66407
atgcactctcaaggaaccagtaccactagcagctttactagacctttcatagcaactggattagggtctatttatgctctagacaccactccttctaaatcaaacgtgcatacaactaaaccagtgactacacctcttgctgccaaaccctccaatgagactcaggatggtgctaaagaacatgtgtatggtgcatccaacaatgcaggttcactgatcaatgcacagaacagcccaaccaacattgagatacaacagaggactactaaaaaaagaaagactgcaaagaggctatttacaaaagaacttggaagtggagacattgctgacgaggccaggcgccaaaaggaagttgaagtgagactattagaggaggagacaacaaaaagagttgagcaagctattaggaagaaggttgagtag

SEQ ID NO: 24629 - DNA, 309 bp, Zea mays
  Peptide Sequence Number=SeqID_66408
atggccaggaatagagagaaagaagccttgtgcggcacagcagcagcgaaggggtggcgcgggaccaggcatgatggcgtggaggccgctgatgtcgcgacgggtgggaagggggctgatgccatgctgtgggatagccgcgggggaggggaggctaagaggatgctctcctcgcgggaggctgaggcacagggacgcggccgcccgggcaagggcgtgcggtggcggaggagatggtgcccagagcggtggtgggacaacgacgaggctggactccatgaggcggcggatgcggatggagagacgtag

SEQ ID NO: 24630 - DNA, 420 bp, Zea mays
  Peptide Sequence Number=SeqID_66409
atggccctacttgttgctctaacggaagggaatacgggtaagggctctgtaccagggattaccggcgccgacgagctgtccacgggaagggggagctccgcccctgattcgcactccggtgaggaattcacttcgattcggaactcacgacttgattcgggggcacggacagacttcacgagcgctggcgaaacccacccgaccacgcgccgaggacggaacaccggcgcagacggttttcactggcggcgcgactgtggtgactcgacctccccacggttccacggcaatgaggctgggctacggggcatagaggaaaccggtcccagttctacgtcttatagcctcggagaatcggtcccaggtgcccgcaacgtcctccacgatcgacgcagggagctccgggttccacggatttga

SEQ ID NO: 24631 - DNA, 444 bp, Zea mays
  Peptide Sequence Number=SeqID_66410
atggttgatccctaccccgattcaatggccctacttgttgctctaacggaagtgaacacgggtaagggctctgtaccagggattactggcgccggcgagttgtccacgggaagggggagctccgcccctgattcgcactccggtgaggaattcacttcgattcggaactcacggcttgattcgggggcacggacagacttcacgagcgctagcgaaacccacccgaccacgcgccgaggacggaacaccggcgcagacggttttcactggcggcgcgactgtggtgactcgacctccccacggttccacggcaatgaggctgggctacggggcatagaggaaaccggtcccagttctacgtcttatagcctcggagaatcggtcccaggtgcccgcaacgtcctccacgatcgacgcagggagctccgggttccacggatttga

SEQ ID NO: 24632 - DNA, 564 bp, Zea mays
  Peptide Sequence Number=SeqID_66411
atggagtccggcgaccgtggactagcctctccggtgatgcaaacttcaattcctcgctcggggagcttcaccgaggaagctttaaagcaaacacaagttgtcaccaaagtgtatgagaggcagatgcctaagcagtccaagaagattgtcaagaagaagggcaagtcaacacggaagaggtctgtccgacaaccatatccacctcaagttaggaaaagtggaaggattaatgccaagaccaaggggctcaaggtttcctttgatcttggctcgtcctcaggatccctagaggtaccttctcagcatatgtctcatgagttgggagacttgcatgacctcaatgctttcctagggcccgttaaatttacatctttgcaaaagccattggattttgatggattttatcctgcaattactgtggccaccttgcagaaggtggctattgagagacatgatgtgcccccctgtggaagcatctatggaggtgctgctctgtctggaccccagagtggagggcagtgttggggggccttcaactatcgaaagtcctcaagatacacttaa

SEQ ID NO: 24633 - DNA, 531 bp, Zea mays
  Peptide Sequence Number=SeqID_66412
atggcgcggtcggtccgagcccaacgtcggacgaggcggagactcctcttgaggccgaggccggggtcgggtgaggacgcgattcctccgaggtcgaggttgaggccgagccctagggtcgggcgaggtggagaccaccttccgaggccgaggttgaggtcgagccctggggtcgggcgaggcggagaccaccttccgaggccgaggttgaggccgagccccgaggtcgggcgaggcagagaccaccttctgaggccgaggttgaggccgagccctggggtcggcctcaccttggcggggtggcacaatagtcggagcggggcaggcgtcgctgttttcctgtcagaagaagataatgatgaggacttcgttcaagttgagggagatttcatggatcatgcagctaatcacaacttgggtggtgttcagggtcctgctctgggtgatcctgtctgggagaacacggttctgaacatgggaattgctactgactggcagccttggccacagcagccccacattcctccctag

SEQ ID NO: 24634 - DNA, 264 bp, Zea mays
  Peptide Sequence Number=SeqID_66413
atggcccacgactcgacggcgcgttgcgacagcagggagaatacgggcacagaagagggaaagcggggaagaaatagctgggagggagatttatatggctggggaaagcgtggacttggtgttcttgtgtgtgtttctttccctgccttgctcttgtgcttttattgtgatcaacattgtaagggtgagaggctccaacttgtggagattcctcgcaaacgagaaaagactgctaaggaagaaaactgtggtactcaaggttga

SEQ ID NO: 24635 - DNA, 660 bp, Zea mays
  Peptide Sequence Number=SeqID_66414
atggcaccaaaactgcctgcattctcagctgctgagtcatgcgagattatgtcactgaaggctatcgagtcgggtgaagtgaagattatgtcaccgaagagaacggaggaagtcgagaaaaagggagtcaatgaaactccaattcaagatgaagtatccatatatgatacagagccgaaggtgcaggagcaatcgaagggaattatcttgagtaaaattttaaaagctcagaaggacgtcgaggacgaaatcaataagctaaaggagagccaagctgaactggcaaaattttctgaacagggctcaagaatttcaaagctagaagacgagaaaaaggctgacgcaaagcgtattgctcacctcgaatctatgttgaaagcgcaagttgagtcgcataaatctgaggttgaaaaggctaaacgtgagatagccaaagctgagcgtgacagggttcgcagagatgttgaagagcttcggacatcaaaggagcaatgcttttctgttgctggacattgctgtgggaggctggataatatgtttgccaacattgctcatgatatagaggaaccttggggcaaagttgttgcacttggaggaaagttttattctgagactcaccgggctgtcgcagaggatagaaaagtagaagaagctttatag

SEQ ID NO: 24636 - DNA, 393 bp, Zea mays
  Peptide Sequence Number=SeqID_66415
atgggcaagagcaataaaggtgggagttcctcacaccattccggcgataagcggaaacgtgagccaactcctccctcggaggacttcggcgactcggagtactcggaggaggagttctcctccgagtcagagggctcgctggggatcgccgcggaggtatggacttacatccgggccgtagagcgtgccaggctcgagggctcagatgagtcggaggtctcctcggacgaggaggactcctcggactcgtccgaggagggcggcggtggcggcgatggcaagggcgacggcgatgacggcgacggcggtgaaggtggcgacggcgacggcgaaggtggcggcgacggcggcagcaagggcagcagtaggggcagcaataaggccagtggctag

SEQ ID NO: 24637 - DNA, 873 bp, Zea mays
  Peptide Sequence Number=SeqID_66416
atggggctgctgtctcagcgagtggagctgtcggacatgaagcccggggaccacatctacacctggcgcgccggctacacctactcccaccacgggatctacgtcggcggcagcaaggtggtgcacttcacgcgtaagaaggaggcgggcaacgcgggcctggactcggccgtggtcgccgcgtccagcagcctcctcctctcgcagcaggggcccgacggcgccgcgtgtcccgcctccctcccggactgcggcttccaactccccgacagcggcgtggtgctgacctgcctggactgcttcctgcgcggcggcgcggcgcaccgcttcgagtacggcgcggccgcggcggcgttcctggccaggctgcgcgggggcacgtgcaccacggcgcgcgccgacgcgggcgccgccgccgtgcgccgcgccatgcacctcctccggcacggctgcttcggcgactacgacgtgttcgggaacaactgcgaggacttcgcgctctactgcaggacggcgctgctgcccgccgccgcaaccgggatcgggcggagcgggcaggccgcgtccgccgtcggcgtgccgctggccgcgctcctctccaccccgctcaacctcctggccgccgccggcccgctcggcgtggccgccgtcaccgccggcgtgtactgcgccggccggtacgtcaccgacatcggggtgcgcaaggacgtggtgaaggtggaggcggaggacctcgcggcgcacctcggctgctgccgccgccgtgccgaggagcaggaggaggcagcggcgctcaacaacaagaaggagcagccggccaaggccaagcagagcttgcttccgctgaagcggaaacgggaggtttgcgtctga

SEQ ID NO: 24638 - DNA, 390 bp, Zea mays
  Peptide Sequence Number=SeqID_66417
atggtgctggatctgtggagccgtcggagatgtcgcacgctcgtcgccgtcgtgccttgcggacgaggagggggcgtgcaggagcgcagcctgcgactgcgtctcccgcatccgacagcgccaagtgatgggaagcccacgatgtcgaagacgatgtggccgagcactgttgcccatgctaccgtcctcacgaggaactccgtggggaggaaggagacatactcacggtggcacgaacagagattggggcgtggcgtggtggcggcggctggcgaagagatgcgcgtcagtgtcgtcttcggggtcgtgcgggacatggtgagggccctgcccggagcagagatcgaggcgtggcgcggtggcgtcgacgtcttcttcagggtcgtgtga

SEQ ID NO: 24639 - DNA, 1659 bp, Zea mays
  Peptide Sequence Number=SeqID_66418
atggaggagcgcattcaaacgggtggtaatcttcaagatgaagaagattggcggcgagtactcatgagtgcaacaattgatgctgagcgtttttcgcaatatttcaatggatgttcggtcatacaagtccctggttttacctatcctgttagtaaactctctcagattgaatacattaagcgatctgaaattatttttggaagttataactttttcccccctcagtctgcaggtgataaccatcttaccagtcataaaacagagggcagcgttttaactcacgatttcaaaagctcaatggatgattcaattaatctggctttggtcaatgatgaatttgatcctcttcttgagcttatttctgcagagcagaacacagaagtctacaattaccagcattcagagactggtataactcctttaatggtttttgctatgaagggtcagcttggggacgtctgtatgcttttatcttttggtgtggattgttcagcacaggatcatgatggaaaatccgcattagattgggcacaacaagagaatcaacaagaggtctgtgaagtaataaagaaacatatggagtgtagttcagaaaaatcaactgaagataacgagctgcttaacaagtacttggcatctattaatccagagcacattgatactctgctaattgaacggctgcttcgaaaaatttgtgtggattccaatgaaggagccatcttggtattccttcctggctgggaagatatcagtcaaacacgtgaaagattatttgcttctccattctttcaggattcatcaagatttcttgtgttgtctcttcattctatgatcccgtcctcagagcagaaaaaggttttcaaacgtccaccagtgggggttcgtaaaattattctctcaactaatattgcagagactgctgtgacaattgatgatgttgtgtttgtcatagatagtgggagaatgaaagagaaaagttatgatccatacaataatgtgtccacacttcatgcttcttgggtttcaaaagccagtgcaagacaacgcgaagggcgtgctggccgatgtcagccaggaacttgctatcatctttactcaaggtttagagcttcatccttgccagactaccaaattcctgaaataaaaagaatgcccattgaggaactttgtttgcaggtcaaactgcttgattcaaactgcagaatagcagactttctgaagaaaaccttggaccctccaattccagaaactatgctcctgtttgctatattaatgaactgcctggatccagcattgacattggcatgtgcagctgattatagagatccatttgtccttccagtagcgcctgatgagaggaaaagggcagctgcagcgaaagttgagcttgcttcgttgtatggtgggttcagcgaccaacttgctgttgtcgcggcatttgacttctggaggcatgccaaagatagaggccaagattctcaattttgtgcgaagtactttgtctcttcaaacatcatgaatatgctatcaagcatgaggaaacaacttcagaatgaactgtctcaaagagggtttgtccctgcagatgcatctgcctgcagcttaaactctaaagatccaggtactcaggtctctatgaaaatggattttttcctttaa

SEQ ID NO: 24640 - DNA, 1104 bp, Zea mays
  Peptide Sequence Number=SeqID_66419
atggtccacctgtctggtgtgcccgttcgtccaaacccgctgcgctacccgctcgccgtctcgactagctctaggttttcattcggcgcaccggaacagcgcaccatcaagagagcgaccgccgcacaggcgcgacaccgccgcccgccggtacagccaaaccgagctcgccgcatcgaaggggcttcccgaccgccgagcgtgcttctagacgacgacaacgagcacgaggaactgatggggcggaaggggcggaaggggaagggcgcagcggccggggggagcgccggcatgaaggaggcgacgctggtgcgcgtctcaaaggcgctcgaggacttccgcgcctccaacgccgagggttcgcaccattcgcctccctttattttggctcctgtttttgaacttcggagcggcaaatttgtgtacacatttgaacctgatatatccaaacaagagcgagctgcaatccatgagatgtgtaggaaaatgggcatgatatccaaaagttctgggaacggggaacgtcgacgcctttctgtttataaaagaaaacagaagcgggggcctgaattggaacaaggccctagctaccttgggttttctgaagaggctaggcatgttttgcaggatttatttatgcattatcctcctggtgatgctgatttaagtggggatgttgaccagagttctagtgataaggctgcaaacatcaaatggagaacagataatgcgttttgcaggcccgcaatgagtaaacttgatataacgaagaaagttgagatgcttgcctcaaaaataaatggatccgaacagttgagaaaggtcatggaagatagaacaaaacttcctatttcatctttcaaggatgtcatcacttcaactttggaaaatcaccaggtggttcttatttctggacaaacaggctgcggtaaaaccacccaggtgcctcaatacatcttggatcatatgtggggcaagggtgaatcatgtaagatcatatgcactcaaccacgtcggatatcagctatttcagttgctgagcgaatctctgctgaaagaggtgaggctgttggtgacacagttggatataaggtctctatttaa

SEQ ID NO: 24641 - DNA, 573 bp, Zea mays
  Peptide Sequence Number=SeqID_66420
atggcccacttaacgaccaactccctattgagcaacccagcgagccggagcagcgaccaagtctctgtcgagcaacttagcaaggcggagcatacgaccaagtctctgttgagcaactcagcgaggaggagtggcggaccaactccctaccgagtaaccctacgaggcggagcaaccgaccaaccctctgtcgagcaaccctgcgaggcggaggtcttggtccagtactatagacccacatcaactacgacaagatgtgtaatcaccaaaccacgtccggactgtggtcgtggcatatcaaaggggcgtcggaaggtcactgtcaacacgactgcacgccaccacgtacggtctcaagcgtatccccactgccttgtggggccagtcaaccccggtcacgaggaactaagcaccggagtctctatagtgacccgcatacctgtgaaggacatgacaatacgctataccatgtgtatccctacacaagctagggttcacgatgacaggcgaacccgcgccatgcacgactacgccgtgagactgccccaagggacccaccacacaccactatga

SEQ ID NO: 24642 - DNA, 1050 bp, Zea mays
  Peptide Sequence Number=SeqID_66421
atggaactgcgactcacagtcacaggctgtcatctactcaccgtccgtagaagactggcgcgtgtgcaaaatggtatcatgcgtgctgttcttatggctggtgcttacccaatggtagggaaaatgctccctcctcgcaaaaatgctagaaaatcagttctggaaacagcgagtggtgccaaagttcgtctgcacccacactcctgcaactttaacctatctttcagtaaatcttctgggaatccactgctgatatacgatgagatcactcgaggtgatggtggaatgtatataaaaaattcttcagttgttgggtcatatcctttgcttctaatagctgcagaaatggttgttgctccacctgatgatgatagtgatgaagatgaggaagattctagtgaggatgaagctgaggaaagcacattggtacagcacaaagaagagattatgtcttcacctgacagcattgtttcagttgttgttgatcggtggctccggtttgacgctacggctctggatgttgctcaaatatactgcttaagagaacgtctagcatctgctattcttttcaaaggtgaagaagttggattgctgcaacagttatcaagaaggattaaatttcatcggatctctttatatgctgatgatgtttaccggattcagtgctccgaggatgatctgatggtggttcataacttgttaccttgtgagagatctgatttcccttgcagatatctaggaattcctctctccctacgcaaatcgaccaaagaacaacttcagcctatcatagacaggattgttgatcgcctaccaagctggaaagcaaaccttatgacaaagtcgggtagagaagatatggtgcagcatgtgctcacacgcatgattgtctacttggcaatggccattgatcttcctcattgggctttagatgcttttgacaagatcagaaggggatttctatggagaggtcgcaaagatgccaagggaggacattgcttgatagcctggggaagggtgtgtcggcctaggaggtcttggaatatctag

SEQ ID NO: 24643 - DNA, 1257 bp, Zea mays
  Peptide Sequence Number=SeqID_66422
gttttgagaaaaaactttagggatcttatttttgtctgtacatttggtgaggatgacacatctgaaaagaaagtagtttattcagacactgatgaggacagaatattattaatgaaagatgtgcaggaagatctactaaaaaacagggaagaaagaatcaaatcagcaataggaatccgccatgtcatcgaccttctttcatcagaaaggaaattgattgttgggcatagttgtttcctagatattgcacaagtgtacagcaagtttgtacgtcctcttccatcatctatcaaggaatttgcgttaagtttccacaaatttttcccacacattgcagataccaggcatcttatgtctgtcaatcaagcagttcagaaactgatgaagcacaaaagcaaatcactatcttcagctttcttattgttgtgccctgcatcttattcatctgttgagaagccatccagtcattctcctgtgacaattgaagttgaaggagatgaaacgatgtcttctcgcttcatttctggtgccaagcatgaagctgggtacgatgcatacatgactggatgcatttttgcgcagttgtgtgcttatcttggcatacaatttgagcagttctcacctctggataacctagcaacgaacactaagctgcagaaacacatcaattttttgtcccctagctggaacagtggaacagtgcttgatttgagcactggcatggagacaccagatccaggttatacgagaaggtaccctgctgctgtgtatgataacattgttgtcatctggggattcctgtctaaggttagaccgaaggaaattaaggattgcatctgcaaagtatttggttcaggttcagttacaaccgtcttctcaattgattccactgctgcccttgtgcagttcaagaaacaagagtctgtaaacgatttcttggatttgaaggctgttttggagagggcagatagtgctatctcaattctacaccccctgtcaactatattggaaggaggccaaacacgagctgcaaagtatgatacctacagagacatatgcagctcttctgaatcaaaatatctctttgctgatcaagctgaagcagtctgtgcaacctcaaagaatcaactcatagaaaatgttgatggcaatcttatatctgatgttcttgatggagtcgcactcgcctctgtaaccgaggaagatggaataataccgagttcgaagaatcaaaacgttgctgaagctacatgttag

SEQ ID NO: 24644 - DNA, 192 bp, Zea mays
  Peptide Sequence Number=SeqID_66423
atcaataagaagacacatgatgtggttgaaagttctccaaccggtgatgaatctgaagcacatggacaacaacaaggagataatgctaaagaagtagacgatcatgttactcaatctgaactcagggactcactgatgaagggtgttaaatatcctaacattgaggttgttaatgagactgtgaagcagtag

SEQ ID NO: 24645 - DNA, 855 bp, Zea mays
  Peptide Sequence Number=SeqID_66424
atgcaggtgccgggccgcctccggcgcgtcctccgggcgccgccacccagaatcctactctaccgcgcgatctcctccccgccgcccggtggcggcagcggggtggcggtgaagcaggtgacgcgggggaacatggaggaagccctggagaagctgcggggacgcgtgcgggaggccgcattcgtggggttggacctggagatgagcggcgtcacgagcgcgccctggagagacaccttcgagctcgaccgcgccgacgtgcgctacctcaaactccgcgactccgcggagcggttcgccgccctacagctcggcgtctgccctttccgatgggaccctgccaagtccgccttcgttgcccatccgcataacttctttatcttccctcgcaaggagctccctagtgattgttcatctcatgagtttctttgtcagacaacttcaatcgagttcctagcaaagtaccagtttgatttcaacacatgcttccgtgaaggaatatcttatctatccagagcacaagaggaagaagcgctacagaaatttaacatgttgcatcatggccgaacagttacatcttccactaattctgaagaggatggagacatgcctttaaagagtgcttctgatattcttttcacggaaaggatgaaaatgaacttcaaggaatggcgtgatgcgatagccagcaagccaatggttgacaaccatttgtcaggaaacattaaatgtggttcaggacaattccagacagttttcttcaaaatgcgccctgctattattcttaatggattctcatcacatcaattgaagttaattcaacaggtagaacatagtatttaccttgaaatatag

SEQ ID NO: 24646 - DNA, 627 bp, Zea mays
  Peptide Sequence Number=SeqID_66425
atggcggacccactttcggcaggcggcgtcgtcgtcgactcatcgtctcccggcaccacatgctgctgccagtgccagctcgcgcgcgggctgctcttgttgcgccggcagcggcaggcggcagcgcaaaacattaaaccatcatttgcggcggcggctgctgccggcgacgcgatgtccaagcaaaagtccgtgatcaggctgggcgtaccgaacgacaagaaccggtctaaggccatgcagatggcatccaagttcgtgggagtgaactcggtggggatcgccggcgacgccaaggaccggctggaggtggtgggggagagcgtcgacatcacctgcatgatcaacctgctgcgcaagaaggtctgccgcgccgacatcgtcgtggtggaggaggtcaaggacaagaagaaggaggaggaggagaagaagaagaaggaggaggaagagaaaaagaagaaggcggaggaggaagccaagaagaagaaggaggaggaagagctcaagaagaagctctgtccgtacctgtacccgccgccgccgtgctccggtgcctgttgccgcgggccgtcgccgccgatgtttctgtgcgagccggaacagccagcgggatgccacatcatgtga

SEQ ID NO: 24647 - DNA, 1143 bp, Zea mays
  Peptide Sequence Number=SeqID_66426
atggacgccgccgttggccgcccgagccgcgcgcctatccgctgcaccagcgcggagacggtcagattcccggtctcgatatgggttcgcctcgaattccgagttgtgaggtttcgggtcgcgacgagctcgcacgccgcggaggccaacgcggggggcaccacggagcaagagggcaacgggagccccgtggccgccgctgccgcgtactcccccgtggtcgccggcgtcgacgggataaggatccggcggcggcccgtgacggggcccgcggtgcactacgtgggcccgttccagttccgcctcgagaacgaggggaacacgccgcggaacatcctcgagaaaatcatctggaacaaggacgtcgaggtttcgcaggcacgtctgatgaaggagaggaggcccctgtacatgctgaagggtccgcttgaggctgctccccccgctagggacttcgttggggcgctcaaggcgtcctacgatcgaactggcttgcctgctctgattgcggaggtcaagaaggcttcaccaagccggggtgttatcagggagaattttgatccggttcagatcgctcaggcatatgagaaaaacggagcagcatgccttagtgttcttacagatgaaaagtactttcagtgccctcttctgtgcaaagagttcattattgatgcttggcaactttactatgcacggtccaagggtgcagatgctgttcttctaatagctgctgtattacctgaccgcgatatcaaatacatgttgaaaatttgcaaaatacttgggatggctgctttagttgaggttcatgacgaaagagaaatggaccgtgttttagggattgatggtgtacagctcatcggcatcaataaccgtaatctcggcatggggggtcaaggggacatgtgctgccatagccatatagctcctatatatgcctacttggattggcccacagtattaaccattggcttaggcatctcaaatgtcacgaatcatgatgttatgatttatgaacattctattgcacggctgaacgagtcattgattccttcccttttcctgttcattgaagttgatcttcaaacagaagtacttctggaaggtgaacgaggacaggttatagctcaaaaggatgtaatt

SEQ ID NO: 24648 - DNA, 132 bp, Zea mays
  Peptide Sequence Number=SeqID_66427
atggggaggttcgcggtggagtggatctacaggcaggaggggttgcagcggcccacgaggcgggaggaggagttcttgggcgatggaggcggaggttgcgcggatgcggcagctggcggagaaagggactaa

SEQ ID NO: 24649 - DNA, 783 bp, Zea mays
  Peptide Sequence Number=SeqID_66428
ttgtgccatgtttttcagcaggaatgtcgtttcagagaagctactgagttcatggaatcatgttctccgtcatgggaggcatgcacatcatttctgttaactcacaactggtggcatgtagctgtttgttacttagaagctgagtcccctttgtgtaaagttctggagatatatgatcacaacatcatgaaggaacttgagaaaagtgattgtgagacagcagaggtgtatttgaatggtctagggttgctgctgcgattattcatacgcggtcatatagattcagctaaagagaggttaacgacattgctagatgcactaaagaatgagtctatatggcatgtggaatggctccttgacttgcttatattgtgggcactatcaagtatgggtgagctaaaaagtgcacataatatgttggaatcattgaagtcaaggaacacaagaaggtttattaatagtactaaatcagaaaagcaacctgattgcagggtacgtttaatggacaggaatcggcagcaagcgatgcagaaggcaatcaagctggcggaggctgcttatgaatatgggaaaggagatcacatgaaagtctatgacactctgggtccagactttgatgcgcttggttataaaatgattggtgcatcagatgaacaagtggatgtcttcaatgaagtttggtacactgttctaataaatgctggagagacttccaaagcaattgagattcttggcaaacaaattaggaaacgagagggtgcacctttcttgtggcgcttgctg

SEQ ID NO: 24650 - DNA, 216 bp, Zea mays
  Peptide Sequence Number=SeqID_66429
atggaaaggcatctgactctggctgggaagcatctgactctgactaatcgtccactacaatctgatggaagatcaatggtaggggaagagtctgtcccagatggtggtggagggtcagctactgctgatgcattccatttggatgagaatctgctacttaaggtcttactttaccctttagaggtgctactcaaggtggctgctactctgctgtaa

SEQ ID NO: 24651 - DNA, 447 bp, Zea mays
  Peptide Sequence Number=SeqID_66430
atggcgagcggcagcagcaacggggagccaagcacggcgccgcaagcgaaccggtggtacgacctccggctgggctcctcctgccgtgacccatcccccaccgccaagttctgcactctccgctcgcagaccatcagttctcagctcttagaggaacaggagtcacataccctggagaaccttgtacatgctctaaacatcgctggaggtgcgacatctcttcagactgcttgttttagtcttgatcatctcatctctcttacggacattatcaaaactcaagagaaaatacacttgcctttctgcaccctctccatcgtcaaatacaagtacttcctcaaaatctggcatcttcacccccagaactcaaaggactctagcccctttcagtctctagcatggttttcaagtaacctggtcgttgatggtgaccgattaggcaagtaa

SEQ ID NO: 24652 - DNA, 462 bp, Zea mays
  Peptide Sequence Number=SeqID_66431
atgtccttcggccgcggccgcgtggcggccgtcctccgcgccgccgcggccgacccgacctgcgccctcgccgccgcgcacgccgcgcaatcagtcgcccccagggaccccgcgggggccgccgccttcctcaacgccgccgcggacaacctcgggaaagcaacggagtacgagagggccgtttttcgggacgctctccgtgctggtgggcgagaagagggacgaggaggtggcgatcgagcggcacttcgaggtttgacataccttaatttgttgattttggggactggaaggcttctcgagcaattccccagggatctcctgtctctcaagagagcgcagctcatctgtttctatatgggaaagccagatttgtccctgaaattcgttcaacaattagtttcagtagttaaaagcatctcatacaggatctgttcagtagaaatagaaatgaaggaatag

SEQ ID NO: 24653 - DNA, 291 bp, Zea mays
  Peptide Sequence Number=SeqID_66432
atggaggctagggcggcgatccggggcgtcggacgctccccttccatagaggctggggcgtcaatgcggttggtccccttccctggacagcgtggatgcatatcacgcggatcgagaggaggctggggcgatgattctggcgagcggatgggtcacgcggaccgacaggaggctggggcgacgattctagagagcggatggggttctgggattatggagagcgtggacgtgacacggctggtcttccagaaaatccggcgagtcatcgtggagcagacgtcgaggacatag

SEQ ID NO: 24654 - DNA, 579 bp, Zea mays
  Peptide Sequence Number=SeqID_66433
atggcgttcctgccccggcccctgacctgcccccacggccggccatcctcgccactgggaccgcaagcgttctccgtcgctggcggcgcccaagaggggcagagcctcatggcgagcctatccctggttacccaggacggggaggagaacggacaggctcgttcaggcttgctagcggcgggcgccctgggggcgtcgtgcgcgtgggcgccgctgcctggctcgctcttgctgcgatggaggagcatgtccttgatgaacacccagcaccgggacccgtgggctgatgacgtgcccgacgaggacaaggaggacgtggaggaggatgaggacgagtgggacgaggcggttaccggcgggactgcctctccgtgcgttcccgtcgcgtcggggtcggggccaagatttggcgccgggacgacaagcacattgatcagcttgagccgcggtgacgcgctgcggagcgggggacatggaccgcgcgcggcggtgcacagacacgcgtcggcgcacggccgcccacgcagtccacgtcgtcgtcgcttccggggtcgagatccgggagtgggggcagggtga

SEQ ID NO: 24655 - DNA, 261 bp, Zea mays
  Peptide Sequence Number=SeqID_66434
atggggctcggggaggcggcggggcggctcctggcggccgtggactgggagcgagaggcctacccggcgtacgacgacttcctcgcgctccccgtcttcgtccttttcttccccaccgtccgctacctcctcgaccgcttcgtcttcgagcaaaatttccctctcctcgacctatgttcactgaaatatgcttaccgtatgggcaccatgtttctcaacgagaaatggtggtcccggaatccaggattagtccaatgctga

SEQ ID NO: 24656 - DNA, 237 bp, Zea mays
  Peptide Sequence Number=SeqID_66435
atgccgatgccgagagcccgagagtcgtcgatggagacgggaacccgtgtcgaagaccctggtcaccgcagcaacgacgccgatgaggaagacacgaaccgctccccgagacgccgaggatcggaagctttgataccacttgtcacgcccctggccaccggaaggtcaccggcgacgtttcagtatatatttgcctggtctattgtttccggcccactcactgattccctggcttaa

SEQ ID NO: 24657 - DNA, 648 bp, Zea mays
  Peptide Sequence Number=SeqID_66436
atggggagaatcggccatggcaagagcagtttgggggagggagatgctgctgcggggcgccgacaagaggtagaagaaaggggtgctgtgcagggaggaatgagggcgtcgcggggcttcctgctatcggagaacagagggcgcacccatgggtaccaatatgtgaaaatatgcccatggatggacaagttgcaaatcacaagtaaagggagcagggaagggagctcgctggtggaatatcctgcgccatggaaggagagggaaacgccggggagctcgaccaacgaggttgctggccgaccacagatacatcctgctgccgagcgccatggaacagggagggcgcggctggaggagatgggagcagagagctgggcggccatgggaggaagggaggaagctccctgtgcgctggggaagaaggccccctgctacagccgctcgctaggaggaggagcagggagggcgccgctggagaacagggaagggcacaggcaggaaggagctagggcttgggcgccatggctggggcacgatggagagggcagctcgctggtggctgttggtgccgtgaagaagaagaggcagggaagaaagaaggtggcggctagggggagtgaactagagttcggacgaacggacgattga

SEQ ID NO: 24658 - DNA, 486 bp, Zea mays
  Peptide Sequence Number=SeqID_66437
atggaggccgtacgcctcgccgccgcgggcaggcccttcacagtcacctacttcccgagacaggccgccgtggagttcatagtcccgcgcagcgaggtggatgacgcgctcgccaccagctgggaaccagggtgtcctgccgaccctggacaaggcctaggacctctcctccccgatgtggtccctcctaggagcgagatccaggcgccgccggcgaactccgccgcccctgcgcacgcgcggaccatccagcctccatgcgcagaccgtccggcccgtcaagcagggaaccagcctctacgccaggtcgtgtaccgtccggcccctggccgcggtctgtccgtgcctccacagagagcactatcgccgattctcaacacagtgattgacgcccagattggcgccaacacactttttggcgactctgctggggacatcgcttatagacctatcagatcagccctcaatggtcggttcaaaagatag

SEQ ID NO: 24659 - DNA, 408 bp, Zea mays
  Peptide Sequence Number=SeqID_66438
atggggcgtggaaaagtagagccgaagaagattgagaatccaacaaaccgccaagttaccttctccaagaggcggatggggttgttcaagcaggcaatccgaaggagatgcacatgccagccagagcagggcggctacctatgcctcatgaacctggctgcggctattgctagcgggcaacaccagcaggctggcgagatggtgggaattaacccgaggctgttcctgtggtgggacgtgggagccagtggcagtggcagccagagccagcagctgctgcacggccgggacgccgcggagtcgtcgatgacgacgctggggctgtcaccgcagatgcataggtacagactccagccgcgacagcccaacctgcggcaggacgccgatgtccatggagggctatggtaa

SEQ ID NO: 24660 - DNA, 930 bp, Zea mays
  Peptide Sequence Number=SeqID_66439
atgtgcagcctcgctccccgccgtgcctgggccaccgaggtgtctacgacacccgttcggaagcgcagccgccaccacgacgcttccgactacgtcgtcgacactgcgtcctcagcgctgcgggtccggctgcatacggagctcgccgccatccagggcatccgcaagaaagccaagctcgtggccctctccgctccccccaccgagaagaagcagcacgggccaccagcgccacgacgatcagaggcgccgtcgtcgtcagcagcgagccgccaccacgacgcttccgactacgtcgtcgacactgcgtcgtcagcgctgcgggtccggctgcatacggagctcgccgccatccagggcatccgcaagaaagccaagctcgtggccctctccgctccccccaccgagaagaagcagcacgggccaccagcgccacgacgatcagaggcgccgtcgtcgtcagcagcgaggagggcgtcgccggcgccatcgaaggctgcgcacgtagcagcgaagcagcagcagtgccaggtgacgcagcgcggggcggccaagaacgacccgatcgctcccaacaacatgcagcgagcggcggaggcaccagccgcagcgaagcagcagggcctggttgtggcgtggtgcagcgcgcagcggccaagaacccgatcgctccggaggttcccaacaacaatcggcgaccagcggaggagtccagcggacaatccggtagccgccaaggcggaagctccgaagaagcggctatccaaggaggagcttgcgcgcgcagccgccagggaggagtcccgccgcatgctgctggagatggagaaagcggcgccgcccgatcagacgatatacccggaggagctcggcatcatatcgcgcgattattccagcatgcatgcttggaactcggaagatttagattaa

SEQ ID NO: 24661 - DNA, 282 bp, Zea mays
  Peptide Sequence Number=SeqID_66440
atggtccgcactgtaactttggtgttcgacaaagatcgtgttggaacctgccctcactaccggaatcttcgactttgcagagtgtctgaagcactcggcaaagccttaaaaacactcagcaaaggctttgccgagtgtcgcactcggcaaagagggctcggcatacagtgcatcggcaaagccatctttgccgagtactttttctcgagcactcgacaaagaaaagcaaccgttacggcgatgggtgacggagacggagcctttgccgagtgtcccaggtga

SEQ ID NO: 24662 - DNA, 366 bp, Zea mays
  Peptide Sequence Number=SeqID_66441
atggagatggaacagtatggcgcgttgacgatacgaccttacgaccggggtccatgcattttccctaggttcaccgcgtacgcaacgatgtacaacccgactggctcgtcccgctacttgctgagcggctgcttcgccgccaccgaggagatccaggaggtggagtctgccccggccgtcgacgtcaagcccaagcgggaggaagcaagtgaagctgctgatgcgaagagcgcgcaggcgcaagagcaagcgcaagagcaggtggttgtgctcaaggtatccctgcactgcaaagcatgcgccggaaaagtgaagaagcacctctccaagatggaaggatctgaaacttctgttcggagttcatag

SEQ ID NO: 24663 - DNA, 288 bp, Zea mays
  Peptide Sequence Number=SeqID_66442
atggcaaaggccttcaagatgtcacatctcacaattgtccagccatgctttagacgcctcccaattgtccagtccgccaagatccagatccccccagattcccggaacgtcgcagctctgaaggtggggtatatccgcctttttgtgagagggtctgcaaacattctggtttgcagccgattgcaccaaatttttttcccatgcgtcatagggatatgcccgtgcgttacgacggcacaaaatctctactctcacgaaaccaaaatcaacaatacaatcaggtcttaa

SEQ ID NO: 24664 - DNA, 237 bp, Zea mays
  Peptide Sequence Number=SeqID_66443
atggcgaggtggctgaggaggcggccgcagcctccgtgtggtcagccccctcacctggcacatgttctgaagcaaccgttggacgagtccagcatgggggacagctgggacacaggcccagtggcgaggtgtcgcacgcgcataggctatcgcccgcggaaacacgagggaggcctcagttcccagcgtcttttaagacttcagtggggtgtttgtttgaggaatcgcttcatctaa

SEQ ID NO: 24665 - DNA, 198 bp, Zea mays
  Peptide Sequence Number=SeqID_66444
atggcagtttacatcctggcgaggatgcttcgtgatttcggcggactagcaagggtcctcttccgtgagaacaagtttggtggcctcccaggccaaggtgtctggttcctgtttcatgctggcccttctggttcggtaacctttgtctttctggctcctaccctgttcttatgcagtcctgcttgtgcttctgtgtaa

SEQ ID NO: 24666 - DNA, 747 bp, Zea mays
  Peptide Sequence Number=SeqID_66445
atggtcgaaccgtcgaaagtcagacgccaccccccagttccccactccgctggctcgctgcctccgcccatgcccatcgatcgcccatactactataaagcagcgctccttccattcccagcgcagaccgcagagacatccaccgacgccgccaacgcatcggcatcggcacttgggcagcagctccgggttcatctaccctcgcaacgccgcaagggagcgatcacatcgatcgtcaccgagacagaccctgttcttcggacgcatatcaccaacaactctccaagccagcccggccatggcgttgtcgccgtctgcgcaagcgacaagcccgctcgcgcgccagctgctgcgccacgtgtcgtccggcctggtcgccgccgccttccaccgcccagctccagccatcagtctgccaagcgcgccgcggggagcggacgacgtggccctggcggcgtctcaccaccagcggctctggcccgctccgtcaccgaaagggcgccccggagccccgaggcaggggagcggcgggcaagtccaccacgcagctccggcgatggcgacgatagcaagcgtagttacgccgcccacgaacgccctgacggcggcgaccacgcacgtggtgacgcgaggacccgcccggcctggtctcccggcacaaggcggcggtggcaaaacgcatggcgcaccggcggcggcgaaagcgcgcgcggttatgcgaggacctgctccgccggcccgccctaa

SEQ ID NO: 24667 - DNA, 114 bp, Zea mays
  Peptide Sequence Number=SeqID_66446
atggggaatgctcccacaaatgccaggcgcattgagaacaatttatccaaatgcattaaggaatgctccttgaatgggtgggggaaaagatgtgtagtaaaatcagagaaatga

SEQ ID NO: 24668 - DNA, 207 bp, Zea mays
  Peptide Sequence Number=SeqID_66447
atggtcgatatggccaaaagtgggccgacagtaatggcggcggcaggcaggcggaagcagcggacaggcggcaccttttggcaggcgaagcaggcgacgcttcacctccgccttaatgaccgcgtcaaaaaagggaccgggaaaggggatactccgaaagggatcctttctccgcgaagcaagagggccccgagcccctcctactga

SEQ ID NO: 24669 - DNA, 489 bp, Zea mays
  Peptide Sequence Number=SeqID_66448
atgggcctctgccgtctaccccggtggatttgcctctcagccttacgccggcagcgtcaaccggcccgccacttcctaaggctggatctgtgttcaatacctctttttcccccatcaataataaacgacgttagcaagaagaaggacggtgccaataaggaggccacagcggccaagccgaagaaggccgcggcgctgccgctgccggagatgatgcaggaggagatcatcccgccgctgaaggccgcccttggaggcggaggaggacgtgtcccaggtccagctcgccttcgaaaacaacacggacccaagggcttcgcgctatcgtcctacagcaacgaggtgagcaccatcgagccgttcctgatcgacgagaagagggtaacggccaagtacgtggtgttctgggtttacaagaggctggctgggcaaggcatccttccggtctggaaggaagaggagggggaggatcatcaggacgccaagtag

SEQ ID NO: 24670 - DNA, 405 bp, Zea mays
  Peptide Sequence Number=SeqID_66449
atggccacggccgacggcgccttggctcttgttcttttcccggaacaggaactggctgcctctgctgggccttcgtcagtcagcatgcattggatccgctcagctcagctcagctgcactgccgtctgccggtcgagaaggcagcgagggcagggcagggcacggggcaccgcgtgcattcacgcaactcgaggcagctccgagtttgagccatcaagcctgccagtgccacaggcacagggcagccacagcaaagaaaaggcagcgacaggtcatgggagagagcggcagcagaggcagagcgcctgccttgtcctgtccgtatcggtgtgcatgctctggcgctttgttgataatttagagagtgtggaagataaaaaatttgtgaagaatgaaaagatttag

SEQ ID NO: 24671 - DNA, 870 bp, Zea mays
  Peptide Sequence Number=SeqID_66450
atgggctcgctgatgtcctgcctctccgacccaatcccgtcggggaacaggtccccgccgccgcagccgaagcggcgctcgtccacctcttcccgcggccgtggcggcggcgggagggactccgctaaggcctccgtgtccatagacgaggaggcgcttactgcagcagcggcgctcgtgctggggcagaggggcgcgtccggtggccctgggcgcgttcgagcggtccgcgtcggtgcgaagctcttatgcataggggccgtggaaactgattggttgttgcttctagctctggatttgaatactaaggatttggaaaccaacgtcattgttcttgttcatggtggtggattcggcgcttggtgttggtacaagactatatcacttctcgaagatagtgggttcaaagttaacgccattgacttaacaggctcagggattcaccattacgacacaaacaagattagcagtctttcagagtatgctgaaccacttacgtcttaccttaaaggcttaggcgatgctgaaaaggtaattttggtcgctcatgatcttggcggtgcctgtgtatcctacgcaatggagatgttcccatccagagttgccaaggcggttttcctttgtgcagcgatgctggcaaacgggaacagtgccctcgacatgttccaaaagcagatggacacgaacggtactctccaaaaggcgcaggaatttgtctactccaacggcaaggaccggcctcccaccgccatcaacatcgacagggcatcgcttagggacctgttgttcaaccagagcccttccaaggttggtaggactttggagtacaatgttactgccactgacaatcacctccattcacatcactga

SEQ ID NO: 24672 - DNA, 2868 bp, Zea mays
  Peptide Sequence Number=SeqID_66451
atgccgcccgcgagggtgcgcggcgccgccgccggcctggccgacgacgcgcgggacctccagcgccagatgggctgcatggccggcatactccagatcttcgaccgccagcgtctcatcgctggggccgccggccgccaagccgcccggcagcgccaggcgcacaagaggctgcctccgccttcggctcctccaccgggcaatactcattcaaatagcagcagcaatgtcccagttcaaagttcaagtacctcaaagatcgttctggagaaaacatttagcaaatgtatgaccgagaacagcagcctttcaatcgaatcatcaagagcttcttcttcctcctcttcctgctcatccttctcctcccttgatggcaacaaatcagtccagcaggagcttccttacatcaacgaggagctctttgtgcagaggtcactgaagacctcgccaagtttgaaggaatctgacatgaacaccaagtctgggcatcctaatgtcggtttcagagacatagtgaaggactccatcaaccgagaccctggaggcctgactgtaaaaacctcggtgcaggaggcaaggaggaacgggcagtacaaggactcaccgaggccactgctgctgtccaaatcaatggatggaacctgtatcattgggatcgataggaccacaaaggttcctgcaaatgtcactgaatctggaaggtgtttgcaggaacggtcacgcttctcatgcgatgaccgaagactcctgcggccagctgaaacccaggaatgcaagaggccttcctcgaggctaaaagagcttcctagactgtccttggacagtagaaaggagtctctgagtccaggctcacgtcagaagagcatcagttacaagagaactgatgatattcttctggatactttgaggcctcaagattcccccagcaacaggagagctaacagtgtcattgccaagctgatggggttggaagaagcaacaaatgctacaggggtgctaaccgctgatagctgtgaacccacaagatcaccaagaccagcccaagccactcaacatgagcgtccatcgcgatcccccaaaaacacttgccaggattcctgcagcatgcagccgaagaaccaactgaaagccaagccttcccaaagaattgccacagaagcggctccttggaggcagcaggacagaagtgccaacaataccaaggcggaacaatgtcgagaggctgaagggagggcaagaactgcatctgtctatgctgatatagagagaagcgggggttttaacttcttagagtgtaataacaaggacttcagggctctcagaatattgggtgcattgaacgcgaaagatgccaagagcaagaatgacagcagtggcggatctgtggctattcacaggacagggtatgatctaaccactagctctggaagttttcaggctcctattgtggtcatgaagcctgcaagaaccactgagaaacatggggtttcacttgcttcggttgctcccatagctggcctgagaagcctcagaaagttgccggcgggtagatattcatctttcactggcacaaatgacaagatgcagcttcggatgtcaagagatcaatcgaagtctgaggaaactgtcagcagtgccagctcaccaaggcctacaagctcatcaagccccagaaatgtgttaaagaagtcagaacctgaaaggaggtctcgtccacctgtctcaccaaaatctccaagcaagaagtccaatgaagccgtctccccaaaaggaagaacaagatcgaagccttctcaggtgaaatgccaccgtgatgaggtcttgcagatcacagggaacagaataagcttggcaaaacaggttgatgtcagcattatggattgcccaaagcctttgggtggtaactcaaccttcgttccagaaggcaatactgctgcaacagcaagccaaaaggctgcttcaattctgggttcagaccaaaacattcattcgctggacaacattccaagccctgtctctgtccttgatgcatccttctaccacaaaaggatctcggattcattcaaagatggtgagacacattcttcagaggaatgctggaacccaaacagcttgcctgacacgccacagtcaaaggcgaacagtgaagtcaaccagattaaaccagaaaatctggaagttctgatccagaagctcgagcaactgcaatccatgagcgaagaagacgcaagtatcaaagaagtcatggcgtcagtcgctgcgaacaaagatcaccagtatatctacgagataatgttggcatctggtcttctgcacaaagaacatagtgtcacagcactacctggccaactccaaccatcaaactacccaatcaatccggagctcttcctcatccttgagcaaacaagaccagtctcagtttccgccttccaaactgtcggtggagctaagagaagctgtaagccttgcgcagggaagcttcatcggagacttgtgttcgacctggtaaacgaaaccatagctcagaagatgagcatctgcagatccggaagccagccagtgaagtttcttcgatcaaggaagctaagtgggtggcaactgttcaaggacttgtgcgccgtggttgacaggctaacaaaatgctccgaggaggaggagaacgaaaacatggtattggatgaggatgcaatcaatggaaccaaagactggatgagcttcgacactgtgctgcatggcatggtttgggagatcgaacgatccatcttcaagggccttatcgacgaggtcgtcagcggtgagaccacagagaagatgcgatttggacagaggaagctgcagaggcagctttctttcggtagcacaaactga

SEQ ID NO: 24673 - DNA, 276 bp, Zea mays
  Peptide Sequence Number=SeqID_66452
atggcgaaggtgatgttttccgaagatgttcaaaagctcaagaaatggaagtttaggcaagtaatactcaacagatttttacccattgccatctctatccgtgcggcaacggagcaagcatcttctcatcaagtcgccgccaggcttcgactcttcaaggaaaccaaagactcgcagcaggctgggatgcgctgtggagacggggacacggagggcttgggtaccgacgtggattcaatggggcacgctcggccaggtggtgactctgttgcttga

SEQ ID NO: 24674 - DNA, 189 bp, Zea mays
  Peptide Sequence Number=SeqID_66453
atggggattgacatgacagttattggaagattatgtgcttctacccatgatgcagaagacgaggtgtatgctaattctgcctctgaaactgacctcctcctgactgattgttctggcgattttgatattggtgttgaggatactgcctttggaactgctaatgctgaggtggacgctggttctgcctga

SEQ ID NO: 24675 - DNA, 459 bp, Zea mays
  Peptide Sequence Number=SeqID_66454
atggtgaccggcgagaagcccgccacaagccacgggaaagctccatcggaggagtctgacaacaagaagagggaggaatcacctccccgtgtcaagtcgcatcggagtggcgacaagaagaagaaaatgaagaaagtggtctactacgagaccgattcttcgtcgccttccacctccagctccgacacgccgtccgtcacttctaagcgccatgagtgcaagaagtttagtaagatccccttacgctatcctcacatttctaaacgcactcctttactttccgtcccattaggcaaaccaccgattttttatggtgaagattattgtatgtggagtgataaaatgaggcaccatctaacctcactccacgctagcatttgggacattgttgagtttggagcgcaggaaccatccataggggatgaaggctatgattcggacgaggtagccagaatctga

SEQ ID NO: 24676 - DNA, 819 bp, Zea mays
  Peptide Sequence Number=SeqID_66455
atgctgtgtggcatccatttgcccaggcgtccgtcatggattgatccctcatgtgtcccgctcctctcgtacttgtcgctcacggtccaggccgtgcaagtgcaggatctagaaatcctcgggaggctgccgttgctcagctacctctacatctggagtgagggcatcaactgcttatcctatactgctaccagcagagacgagtttcagaatctgagacatctggacacaaacctggagatcatgtgtggacagcagggagcactgcctatggttgagaagttgacatgccgtgccagcatggggaagtatgttgcctttgccaggagcagcatgcctttcgacgatggcagcgtggtgaatcctgctactgttgctgaggcagaattgccagtaattctacctttggacattggctggcccgtgaacatgccttgcctccggggcatcacctatttgctggattaccaggactgcagtgccaaggagtgggctcatgtggagacattgctcttgcacgtgagaaaaatccaccccaactgtccacccttccgaatcaaaaagaactgcagagacaagaagattaccttgatcgacgcattcagctaccttgaagctgtcaaggatgtgttcaagggcaacccctccaaatactcggagttttttgatctcatgattgattacaagagagacagaatcaaaatcaaagatgtgatcatccgtctcaagaccctatttactggacatgatcctaatctcatccttgacttcagcgtcttcctgcccagggagtgggccatcactctcggggacctgtag

SEQ ID NO: 24677 - DNA, 123 bp, Zea mays
  Peptide Sequence Number=SeqID_66456
atggaggatgactcgtgggcctgggcctccatgtcaaggactgggctgttggtttcggaggtgaagaggttgtacggacccttcaacactcccaaggtgagtaggcagggtctcactacgtag

SEQ ID NO: 24678 - DNA, 360 bp, Zea mays
  Peptide Sequence Number=SeqID_66457
atggagaataagacggcaaagaagacggtgccagacaaatctgaagttcatcccctcaacgtgattaaggtcacaatagaagaccttaccgaggcagacaggaaggtgttggcaccaatctgggcaccaatcattacgttgagaacctgcggtggtgctctctgcacaggcacgaacggtccgcggctaggggccggatggtccgcaacctggcgcagggctcgagttccatgcctgacgggccggatggtccgcgcctataggccggatggtccgcgtgtacgcaggggcggcggagttcaccgacggcacctgaatcttgctctcgggagggaccccgttgaggaggagagattctag

SEQ ID NO: 24679 - DNA, 474 bp, Zea mays
  Peptide Sequence Number=SeqID_66458
atgagatggggaaggggcaatgatagtggtgggcaggaggataatgccggcaattggactaagactcggttggatgaagaatgtgaggtggatggagcgtacaactttgttggaaacatggttaagccccagttggttgaggaatatgaggagacaggtaatgacaaggatggattaaatgatgacggtgaacatgatcttggtgagtgggggatgactcagttggttgaagaccctgatgaaggcataagtgacgatgagttgagtggtggcactgttgtcctaattgacaatgagatcttgacagaagatgagaggggtgcaaagtcaggaatggataaaagagatacgaagttgggattggaagaaagtatcgaggggttaaatggttggattaagcagcatgatgataacaataatttggtagattatggtgcatcaacagatgaggatggtgacacaagttcaggttag

SEQ ID NO: 24680 - DNA, 495 bp, Zea mays
  Peptide Sequence Number=SeqID_66459
atgtgcacaccagcagagcacatgtgcacaaacaaagcatttgatcccaaccaacgaggcaagttaatagtaaatgctttcgtcgccttcgatagcttaccgaaccttactgcgtttgtgagcacggtgctagtgaaagtggctgagcaggtagacgcgaacgtggaagaggctgatttggacggtgaggccggcgtcaagcaagatgtggactgcccagttgttcattgttcatgggccgactcacggaggccaaattcaaggggaagagcgtctttgtgcgctgtgacctcaacgtgccactcgacgggcaccagcgcagcactgacgacacccgcattcgggccaccatccccaccatccagtacctcctccgcaaggatgccaagatgggatgcggtgtcgcataggcaatcatggccagcacctgtgaagtgtgtgatactgggtgatggtgttcaagtcaggcttctgcctgggtcaccacctgtttag

SEQ ID NO: 24681 - DNA, 987 bp, Zea mays
  Peptide Sequence Number=SeqID_66460
atggctcaggttccttctgagtccagcaagagtgacgctgaaacctcgccaccagccgataaagctccacccgaaatctctagccccgaatgctacagcgatctcgtatccactcgtccagcgagaggagggtgggtgcagccgctggtactgtaccagaactactggctgacccccggcaggctccagcacatcatccccgtgaaagagctctacaagcctcgcgccgacgacatcgtcctcgtcacctacccgaaatgcggaaccacctggctgaaagctctcgccttcgccatcacgacccgcagccgccacgctttcgccgcccaccctctgctcgcccggcaccctcaggagctcgtgccgcaccttgagctgccggccctggcgggagacctagcggacgtcgagaagctagctgccctccccgaggcttctcgcgactcacctacccctttccctgctcccgccggacgtgacgccttcgtctcgtggtggttcttcgcgaacggcatgctgcgcagaggctcctcctcctcctccgtggacctcgacgacgcgttgagcatgttctgcgaggggttctcgccgttgggccccttctgggagcactacctcgagtactggaaggcgagcttggagaggcctcagcatatcctgttcttgaggtacgaagagatcgtggcagacccggtgaaggttgtcaagacgcttgccggcttcttctctgacccgttcactgaggcggaagagagaggaggagtccccgagcaggtggcgaggctgtgcagcttcgaggtgctcagcggcctggagaaaaaccaaaccggaggtgtcgcttttggaaacgatttagtcattggcaagtctacgttcttcagggaaggcaaggtgggggactgggaaaaccacatgaccaaagagcagggacagaggttggatgacgttttggaggacaagcttaagggatctggtctcgtgttttga

SEQ ID NO: 24682 - DNA, 714 bp, Zea mays
  Peptide Sequence Number=SeqID_66461
atgagccgagtgctccgtctgaagatcagagggaggtttctgatgaggaagatgacgcagggtctcacccctcggcagggctataaagcttcgtcgtctcttctgtcgctgcctggtttcgctgtgctgtggttctcgccatcttttggtttacttatgtattacaacaaaacttctctttctgttattgggcctgtcgtgccggtgctgacgaccgcaccaaacttgacacaagattatgtcttttgggtgaatgataaattttctcatggcccttctattggagcttctggaggattcatcactatttggaaaggctccctctttgaggctgagcctgatcctgcaaaatggcttatggctaagtttaaaagagcaagaaaggtgatccatgggtggcagaaatccttacccaacctagtcaagctgattgataaggtggaattgatcattcagtttatggattttattgaggaaagcatagacttaacaattcaagaatggaattttaaggatgttttagtccatcacctgcagcctgttatcagcctgtcaactttagaaacgcctttctcccgcagtgagatagaccagatcatcaggaacttacctgctaataagtcacctggccctgatggttttaacacggattttgtccgaaaatgctggccggtgattgcttcggacttctatgaactttgtgataagttttaa

SEQ ID NO: 24683 - DNA, 2202 bp, Zea mays
  Peptide Sequence Number=SeqID_66462
atggagccacgatgtctcaacggaggtgctggtgtctccatggcacgtggggctgcaagatgtaaccacgacttggtggctggcgcatctggtggctgtcatggtgcgactacaatagagtttggggattttttttgtcgtgaggtactgaagtgggctttgtcgcttcgttgggcttcatgcaaggtagccagcagaagtactggggctcacacaagtggcactcctacctatctcgctcaagagacctcttgtgtccgtgcctccgtggtcgcgtcgtccctgagaaccaaccagacggtggacatggtgttcggcggcgaccgtgccatgggagcggcccccggcgccgacgccgcaagcacgatgcggttcgcgttgcacgtcgtgcgcgggcggtggttcatgttcttcgcgtccatcctgatcatggcggcagccggcggcacgtacatattcgccatctattccaaggcgatcaagacgtcgctcgggtacgaccagcagacgcttaacacgctgagcttcttcaaggacgtgggcgccaacgtgggcatcctgcccgggctcatcaacgaggtcaccccgccgtgggtggtgctggcctgcggcgccggcatgaacctggtgggctacctcatgatctacctggccatctccggtcgcacggcgcggccgcccgtgtggctgatgtgcgtctacatcgccgtcggcgccaactcgcagtcgttcgccaacaccggctcgctcgtcaccgccgtgaagaacttccccgaggaccgcggcgtggtgctcggcctgctcaaggggttcgtcggcctcagcggcgccatcttcacccagctgtaccgcgccatctacggcaccgacaacgacggcaccgacctggtgctgctcatggcgtggctccccgctgccatatcgctcgtcttcatccccaccatccgcatcatgccgcggaacaccgccgcgcgcggggagcgcaaagccttcttcctcttcctctacgcctccatcgtgctggcagtgtacttgctcgtcatgaacgtcgttgagctggaggtgatccacttcccgaagccggcgtactacgtcacggccgtggtgcttctccttctcatcttcttcccgatcgtcatcgtcgtgaagcaagaactgaagacgtaccttgcgccgccggagccggcgacagcagcagcaacctccgccgccatcgtgacgatcaccgtaaacgagaagacgcgggcgtcgagcaataacgtggcaccggagtcgaccgatcatcgtcatcaggccacggccgccgccgccgccaacgacgacgcagacagctcgccgtcctgcttccaggacgtgttccggccgcccgcgcggggccaagactacaccatcctgcaggccctgttcagcgtggacatgctggtcctgttcgtggccaccatctgcggcatcggcggcacgctgacggcggtggacaacatggggcagatcgggcagtcgctggggtacccgcagcggtccatcacaacgtttgtgtccctggtgagcatctggaactacgccgggcgcgtggtggccgggttcgcctccgagtacgtgctggcccggtacaaggtgcctcggccgctggcgctcacggtggtgctcctcctggcgtgcgtgggccacgcgctgatcgccttcggcgtcaacaatgggttgtacgcggcgtccgtgatcctgggcttctgcttcggcgcgcagtggccactgctgttcgccatcatctccgaggtgttcgggctcaagtactactccacgctctacaacttcggcgccgtggccagccccgtgggctcctacatcctcaacgtccgcatcgccggccgcatgtacgaccgcgaggcactccggcagggcgggcagcggggaaaggacctcacctgcatcggcgtgcgctgcttcagggagtcgttcctcatcatcaccggcgtcacgttactgggcgcgctcgtgtcgctgctgctggcgtggaggacgaggaacttctaccgtggcgacctttacggacggttcagagaggtcggcatggtcggagcgactgccggaggagcaaatgacagaaaggtgcatgaggccgaggcgagcaccagcggtggtgccagtgactctgacaccaaggacactagtagcagtgagaccgttaatggcagtaagggttaa

SEQ ID NO: 24684 - DNA, 525 bp, Zea mays
  Peptide Sequence Number=SeqID_66463
atggcccatgatcggacatcaaatgcacaaaaattgtcaggagatgtaaactgtgagtgtgagttgcaactagcagttgatgaagctttagctagagagttgcatgaaatggagagcaaactagccaacacttcacttaatgacaataatggaagaaagacaacatcatcttcagcatttgatagaggcaataattctgcaagtagacctcctcaggtattggaggaggatgtgattgatccagataatatgacgtatgaggaactgcaacagctaggggaagccattggtacccaaagcaaagggctgcctgaaagtgtcatagcactcttgccaacttcaacttacaaaactgggatattctccagaaaggaaaaacatgatgaatgtgtgatctgttgtatggcatacaagaaccgagataggctgactaaattgccatgtggacatcactaccatcaagcttgtgttgctaaatggttacagatcaataaggagagtcacattgtcatttcattgaggtaa

SEQ ID NO: 24685 - DNA, 1890 bp, Zea mays
  Peptide Sequence Number=SeqID_66464
atgctccacctcgcggccgtcgccgtcctctgctcgctgtcctacctcctcggcatctggcaccacggcggcttctccgcggggcccgccgccggcgactcctcctcctcggtctctatcgccaccgccgtctcctgcgccacccccgccccgacgaccgcctcctcgtctccccccgcgggaccgctcgacttcgccgcgcaccacacggcggagggggtggaggcggagggcgcgctccgccatcgcaactacgaagcatgccccgccaagtactccgagtacacgccctgcgaggacgtggagcgttccttgcggttcccccgcgaccgcctcgtctaccgggagcgccactgccccgcggccggcgagcgcctccggtgcctcgtcccggcgcccaagggctaccgcaacccgttcccgtggccggccagccgcgacgtcgcctggttcgccaacgtgccgcacaaggagctcagcgtcgagaaggcggtgcagaattggatccgcgtcgacggcgacaagttccgcttccccgggggcggcaccatgttccctcgcggcgccggcgcctacatcgacgacatcggcaagcttatccccctccacgacggatccatccggaccgctcttgacaccggctgcgggcagtatcctatgcacagcaaatcgaacttttccgagaacgtggcgagctggggagcctacttgctgtcacgcaacatccttgccatgtccttcgccccgcgagactcccacgaggcgcaggttcagtttgcactagagcgtggtgtgccggcgatgattggggtccttgcctccaatcaactcacttatccggcacgttcctttgacatggcgcattgctctcgttgcctcatcccatggcagctttacgacgggctgtacttgatagaggttgatcgtatcctgcgtcctggaggttattggattttgtctggaccaccaataaactggaagaaacactggaaggggtgggacaggactaaagaagacctggacgcagagcagaaagccatcgaggcagttgccaggagcctatgttggaagaagatcaaggaggagggcgacattgctatctggcagaaaccaactaaccacattcattgcaaggccatccacaaagttatcaagtcaccgcccttctgttctaacaaaaacccagatgctgcctggtacgacaagatggaggcttgcataactccactaccagaggtcagtgacttaaaggaggttgctggcggctcgttgaagaaatggccggagcggctcactgcagtgccgcccaggattgccagtggcagcatcgagggggtcacggaagagatgtttgtggaagatactgagttatggaagaagagagttgggcactacaagtccgtgattgctcaactcggccagaaaggccggtaccgcaacttactggatatgaatgcaaagtttggcggattcgctgcggcattggtgaatgaccccttgtgggtcatgaacatggtccctactgtggggaactcaacaacccttggggtaatatacgagcgtggcctcattgggagctaccaggactggtgtgagggcatgtccacttatccccggacctacgacctcattcatgcagatacagtgttcacactgtacaatggcagatgtgaggcggagaacattctgctcgaaatggacagaattctgaggccagagggcacggtcatcatcagagatgacgtggacctcttagtgaagataaagagcatggcggacgggatgagatggaatagccagatcgtggatcacgaagatggtccgctcgtccgtgagaagctcctccttgttgtgaagacatactggactctcgatggcagcgaacaatag

SEQ ID NO: 24686 - DNA, 315 bp, Zea mays
  Peptide Sequence Number=SeqID_66465
atgccattagggatgcacatgatagagaacgaagcaggactgcaggcgaaagttcaacttttcttttttgacaataaatgttcagttgattgtcctatgctctcactcatactccggttgctgggatttatcgcgtggatgagaggaggccaagagtctgttggtgtgggaacgaagcgaatggccagccagccagggcaaggtcgtgcggggatgatgaggaaacgcagcttttgcaacgacacagtttttgggctcgaatctttgcttaccaagttggagaaggggtttgaggaggttaaaattgtgttgtga

SEQ ID NO: 24687 - DNA, 285 bp, Zea mays
  Peptide Sequence Number=SeqID_66466
atggtctctgctaagcctttagtggcatgcatgacgctgcaggtaatgcgccgcattgctcaaggaccatatcacggccaaattagtgatatctccagcgaaagcaataagatctctgcttttgaactttttgacattcagagtttcagacttggtgccacactacagtcctttttatcatcgcctgtatactattcatttcagtatcttgtctccagtccattcagcatactttctggaatgttgcaaacttgcattgaaacagcgagaaatgttgaaatttag

SEQ ID NO: 24688 - DNA, 903 bp, Zea mays
  Peptide Sequence Number=SeqID_66467
atgccggagagctgcatcgcggcggtgctgctctacctcggcccggctgagatctgccaggtggcctgcctcaaccggacgttccgggacgcggcctccgccgactgcatctgggccgccaagttgccctccaactacaggtacctcgccgcactcgcggccgcggccgacgacgactgcgcttgcgatgacgcggccgaaggcagtggcaggtgctgctcctctgcggcgatcaagaaggaggtatacgcgcgcctctgccggcccacccggttcgacggcggcaccaagaacaagggaggtttctgcatgtccatctgctcaaaggctatgtcgatcacagggagagatgatcggaggtattggagccacctatccacagaggaatcaagatttcacggcgtcgcttatcttcagcagatttggtggcttgaggtcggcggggagattgacttctgctttcctgccggttcatacagcctattcttccggctacgtttgggccgaccgcacaagcggatgggccgccgatgccatggctccgagaatatccacggttgggacatcaaaccgacacggttccagctttcaacctcagatgaccagcacactacatctgagtctcacctagttaaccctggaagatggaccctttaccacgtcggtgatttcatcgtatcgagttcagacgaggtgacgggactcaagttctctatgatgcagatcgacttatttgagtttgaagctgtctgccgatatgcacgtggcatttccagcattgcttgccgcatggttcctgttcaggcttggcgaattcaggcgccacccaagcgccaagcagacaaagcgaagcgccgcctatggatagcggagcgttcgcagatacacgacagcagatattag

SEQ ID NO: 24689 - DNA, 333 bp, Zea mays
  Peptide Sequence Number=SeqID_66468
atggagatcgactttcaaaccctgactgcaataacacgctgtccgccgccgagcgatgggcattggactattgtgctgggtgaagatcatgctggcgctgaaggcaacagtgccccctggccacacactggacctcaaggctgcagctccatgcaggcagtacgagtagacagggcagtgctcatcatcagtcatcatggcatggtgttcggacgatctcagctcggtaccaatcctggccgcgtgccctctggatcgaaccttggcgagtttttattcctgtctgaatttcactggagaccaggtttcagtgaaccaactggattcacttga

SEQ ID NO: 24690 - DNA, 723 bp, Zea mays
  Peptide Sequence Number=SeqID_66469
atgggtgtggtggtggtggtgccactgtgcgctagcctgaggcctgagagggctgagggcgttattggacaaaaggagctccaaggctctggcattgttttgccttggcttggctgcatgtgtgtgggagatggggccagggggcgtggggcggctgctgccggcgcggaggcgccattggctcgccccgccgagtgtaaaaccaaggaggcagatattggcatcaaaaccaaggccgttctttttgagctgttccggaggaattttgctgggaatccgaccgagatgtatggatcaaattatgtgcccccaaaaagaaccgcttttcaggcatgggggagttggggaataatttccaccaaagagaagaagagaaagatgggagagaatatttggcactgtagtaggcaagtggccttttgtctctgtagacgctgttaccttaacagtagacggacaattgctgctaagattgagaaatctgttagccttgcccgggaatcgcagaaacgagacaagcgtgtccccgaacgtggatgcagagataagagatgcgacaaagccgatgccctggaccattttatcatgcgatctgacaaatggacggttgtaaaaatcggaatcaaataccgtcaaaagtctattgttacgcgtgcgtctggcctaagcaaggatacctaccgcagtagcaaaaaaatttacgacgaaaaactaccacattga

SEQ ID NO: 24691 - DNA, 360 bp, Zea mays
  Peptide Sequence Number=SeqID_66470
atgcagtaccgggcgcgcatgatcgggcccgggcggaagcgcatgactgccgctgccgcgcagagaggtccaggtccgagatcccagccccagcgggcggtggctcggctcggctcgcctcccgtcgcgcgtgcggccgatgccatcggcgtcggcggcaccggcacagccacagtccgcataaaaaatgactcgcccgctcaactccactccttggagccccgagaagatggacactgtttcgatgccccaaaagccaggactggcggtcttaaaatgaacggagtcatcgcatgcagatgtttcattgtcgacggttatgtcgcctactactcaaagaaaaacgttgacaagccctaa

SEQ ID NO: 24692 - DNA, 147 bp, Zea mays
  Peptide Sequence Number=SeqID_66471
atggcgggggcaacaacgtccaaatcccagacccacgcgcgctatgacttctttttgtgcacgctcggtcacgcgcaggatgacttcttttactgcaccggagggagtactccaaaaaattgtaatgcagctccaaaaattccatag

SEQ ID NO: 24693 - DNA, 261 bp, Zea mays
  Peptide Sequence Number=SeqID_66472
atgggtctggcaatccacccttccggctcctgctcctccgagacctccgagttgtggctcaaactaccaccatcgtcgtcgtcgtcttcgtcttcgtctaggtctcctccagcagccgggatgccctatggtggtgggagggctacctcccagactccacctcctgttgaggcgacggggaagagtcttgttgcttccgctcctggcgtcgacgctcctgcttctcgtgcaggcgacgatgcagtccctctaggtgactag

SEQ ID NO: 24694 - DNA, 540 bp, Zea mays
  Peptide Sequence Number=SeqID_66473
atgtatgttggagaatcagagaaaaatggtcgggatatttttgagaagttttccactgtcaatctcaggctaggtctgcacgcccatgtgtcattttctttgatgagcttgattccctcgctcctgcacgaggatcctcagcagattctggcggtgtcatggacagggttgtttcccaggcctgaccttcttgattctgcccttcttcgccttggtcggttcgacaagcttctttatgtcggtgtaaatactgaggcatcatacagggaaaggatccttaaagcacagacgcgcaagtataagctgcacaagaacgtttctctcttgtcagttgcacaagaatggtttcatgcagcaaagcgatcagttgaaacattcgaaaccgatccttcaagaagtaatgacgccagtgccgaagaagtcatcgtcgagatcgacgattttatcacagtgttaggagatatcgcaccgtcgctctctctggacgagctacaaaactacgaacagttgaggcagaaggtcgaaggaccttctagatga

SEQ ID NO: 24695 - DNA, 3873 bp, Zea mays
  Peptide Sequence Number=SeqID_66474
atggtggagatgcggcagcggaggaagccgctggtcctcgcctccacgcaggcgctcctcgactcgcttccgggggatcgcccgccgccaccgccgcaggagccggtgcgccttaaggccggcgtcctccgattcccctccggaggtggtggcgccgagttcggggagctcgcgtctttcgtcggcatccctgcccccactctccgacggctcgcggtcgtcacgggtactcctgtgcttgtcaagaatactgacaataatgttgggaggattgtcaaagcagtattgtttggtaacccgtcccttgacaagtcctgctcagaacatactgaccaagtggtctctggtcatgcaatgggcttcttaccttgtcgcacgttccctgctactggttttacatccatggatgaagatgttggttatgttagcccacttttggcattcaacttgggattgcctgtttcttgccttaaactacttattcaaagagaagggcagcctttcaagttctgttctcgagctgaagagatggatgcaactgccagttctggaagtgatctttctcttcacttagaccttcttccatgccctcaagtgcctaaatatgcgttgcatttacgagtttctgttgtgaggattcctgattgtggtgtgcttgcttctttaaagataaattcatcctttggaggaagtgagtaccaagacatggtagatcaagctttgaacgagtactttaagtttgataggttcctagcaagaggagatgtttttggtatacaaaacagttggaagtgtggctcaagctgctgcctggcatgcaataagcaggataataaactgaatccccgtaatatgatctactttaaggtgactggcatggaaccatcagatgaacctatacttcgtgttaattgcaatgaaacagcccttgtacttggtggagctgcttctgctgcaatccccccttattccttttttgcttcttctggtaattcagtaccattgcacagtgaagtagtggagcatttagcatctgtcattgcaccagcattgtgcccttcggatattttaccaaaaatcaagttttccacttttttatatggcccgccaggatgtggaaagcgcacagtggttaggcatgttgctaaccatcttggtctgcatgtggtcgagtgtagctgtcatgatctgatgacatcatcagaaagtggggcacctactgcacttgcaactacctttaaagaagctcagaagtattctccttgtataatacttcttcgccactttgatgcaattgggaatgcatcctcaaacgaaggtccacagtctgagcaatctgggattgcatcgaacattgaatctgtcattaagcagtacattggacaacgttgggttgctaaggattcgctgccaggaaaagatgtaaatgggagctcatacctcgtggagcctgaatgtgtaagctctcttcaaatcatactagttgcaactgcggacagttctgaaggaatgcaacagtcaattagaagatgcttccgctatgagatcgacatgaagactatgaatgaagaacagagaaacaaactgatatctgagacacttcaaggcattcctaaagttgctgatgagagtatttgtgacaagttcttaaaagatttagcagcgcaaacgtcaggtttcatgcccagggacatacttgcattggtcgcagatgctggtgtgtcttttgcgcataaaattgcagcagggaatgatagcaaagcaatcagtaagcatacggaggtccttccagaaagctcttctgccactcaaaatgaggaacaccatttcagcaaagaagatattatgtcttccttggaacgagccaagaaacggaatcgtgctgcactgggcacacccaaagttcctaatgtcaaatgggaggatgttggtgggctagaggatgtgaaaaaggttattctagatactattcagttgcctctgatgtacaagcacctgttttcttctaaattgcgcaagcgatcaggtgtcctgctatatggacctccaggaacagggaagactttacttgcgaaagcagtagcaacagaatgctcattgaactttcttagcgtcaaaggtccagaactgataaacatgtatgttggagaatcagagaaaaatgttcgggatatttttgagaaggctaggtctgcacgcccatgtgtcattttctttgatgagcttgattccctcgctcctgcacgaggatcctcagcagattctggcggtgtcatggacagggttgtttcccaggaccttttcattattggggctaccaataggcctgaccttcttgattctgcccttcttcgccctggtcggtttgacaagcttctttatgtcggtgtaaatactgaggcatcatacagggaaaggatccttaaagcacagacgcgcaagtataagctgcacaagaacgtttctctcttgtcagttgcgcagcgttgtccaccaaacttcactggtgctgatatttacgcgctgtgtgcggatgcatggtttcatgcagcaaagcgatcagttgaaacattcgaaaccgatccttcaagaagtaatgacgccagtgccgaagaagtcattgtcgagatcgacgattttatcacatgccagcagcgatgcctccttgttcgtgctcggcaagtcggccggtgtgagcaaaatccgtacgtcatcgtctccagtggtgccattctccgtggctctgcacacggtcggggactcggcggccttgctggatcatttgtgccgccaaacgggtttacctgctccgcctccgcccagccagcgccgccgccgctgccgctagcgctcccctcagattctagaaatcgtcgtgtcctgatcctggatctaattgttttatcggaaatgattgcttcagtgaagtccttcccgagggatgacccaaagaagccctgtcacctcaccgccttccttggctacaaggctggaatgacacacattgtggtgaggtcgagaagcctggctccaaccccccgtggcctacgaaccctcaactctgtctgggcccaacaccttagcgaagaagtgcggagaaggttctacaagaactggtgcaagagcaagaagaaggctttctccaagtatgccctcaaatacgacagcgacgcaggcaagaaagaaatccagttgcagcttgagaaaattagaaagatgaagggtttgaagcagaagaaggctcacctcatggagatccaggtcaacggtggcactatagcagacaaggtggactatggttacaagttctttgaggaggtccctgttgatgctgtgttccagaaggacgagatgatcgacatcatcggagttaccaagggcaagggttatgaaggcgtggtcactcgctggggtgttacccggcttccccgcaagacccacaggggcctccgcaaggttgcctgtatcggtgcatggcatcctgctagggtgtcgtacactgttgctcgtgctggtcagaacggataccatcaccgcactgagatgaacaagaaggtttacaagattggcaaggccggacaggaaagccatgacgcctcaactgagtttgacaggaccgagaaggacatcactcccatgggtggtttcccccactacggtatcatcaagggcgactacctgatgatcaagggttgctgcgtcggccccaagaaaagggtggtgactctccgccagtctctgctgaagcagacgtctcggttggccctggaggagatcaagctcaagttcatcgacacctcgtccaagtttggacatgggcgcttccagaccacagacgagaagcagaggttctttggcaagctcaaggcctga

SEQ ID NO: 24696 - DNA, 171 bp, Zea mays
  Peptide Sequence Number=SeqID_66475
atggccggtgatggagctgacgaccgtgacggtggagacatcttctttgaaggcaggaactttgctggtagtaggaactcggatccaagtgcatcttccttcttcgaacgcagtgacggccttgctggatcatttgtgccgccaaacgagtttgacacaggatcacggtaa

SEQ ID NO: 24697 - DNA, 309 bp, Zea mays
  Peptide Sequence Number=SeqID_66476
atgtctcacctcactgtggccagcgcagttggagcagttgcaacccaagtaaggcttgttctgaggtgcctacgtggcagtgatgctcaccgagggccacgtcgccgcagaacgcagccgtggacagctccaccgctggccgtccaatccatgttgattccgactgatcttgcgcgagcactgaaggcgtggatcatcacctgcagtagtgcaagcagctcggtcaagggctcatcaaggatcggggtgcggatatatagcggtggcgagctgtcaacgtgcgaagcggtcggaatgcatgccagttga

SEQ ID NO: 24698 - DNA, 516 bp, Zea mays
  Peptide Sequence Number=SeqID_66477
atgtatgatgaggcttgttcagttctagaagaagatgggaaggaacatatggcttttgacttgtaccgtgtcgcagcagctttgtatatcaagatggaaaacctcacattttcatctatgtgctatctcattcatgatttccttggaacattttttgttcattcttcattgttcttacatgtgaaatattcagatgttgctgctttgtttttaagacttggttcagctgctgataagtgcaatgccatcaatagccaatgcaaggcctatctgagtgcgatcatcatctatctttacgcacatgattttcagcaagctcaaaaatgctacaatgactgctcagaggttcaagccttcctcaatagcggacagaatcgatgcacaacaaagctattgtctgcttatgaggaaggtgatgctgaagaaatcaaacgcattgctcaatcaagtgccttcaatcatcttgaccatgtggtaattaggctttcatggaagctaccaacaggtgatctgtag

SEQ ID NO: 24699 - DNA, 2272 bp, Zea mays
  Peptide Sequence Number=SeqID_66478
atggccctcattatcaagagattcaagacggtgctaaagggtcgcaatggacagccgagcaagactaagaccaaagggaagcgatcatgcttcaaatgcggtaagcttggtcattttattgctaactgtcctgataatgatagtgaccaggaaaaggggaacaagagggaaaagaagaagcattacaagaaggcaaagggcgaggcgcatctaggcaaggagtgggactcggattgctcctcgtccgactccgacaatgaaggactcgccgccaccgccttcaacaaatcaaccctcttccccaacgagcgtcacacatgccttatggcaagagagaagaaggtttatgcatccgggggttcaagctggattattgatagcggatgcacaaaccatatgacgggggagaagaagatgttcacctcctacgtcaagaataaggattcccaagattcaatcatattcggtgatgggaatcaaggcaaggataagtctgaaacccaagggaccctcaagcgcttcctcaggagggctcaaaatgagtttgagctcaaagtgaagaagataaggagcgacaacgggtccgaattcaagaaccttcaagtggaggagttccttgaagaagaagggatcaagcacgagttctccgctccctacacaccacagcaaaatggtgtggtagagaggaagaacaggacgctcattgacatggcgaggacgatgctaggagaattcaagacccccgagtgcttttggacggaagccgtgaacactgcttgccatgccatcaacagggtctaccttcatcgcctcctcaagaagacgtcgtatgagcttctaaccggtaacaaacccaatgtatcttactttcgtgtatttgggagcaagtgctacattctagtgaagaaaggtagaaattctaagtttgctcccaaagctgtagaagggtttttgttaggttatgactcaaatacaaaggcgtatagagtcttcaacaaatcatcgggtttggttgaagtctctagcgacgttgtatttgatgagactaatggctctccaagagagcaagttgttgattgtgatgatgtagatgaagaagatgttccgacggccgctatacggaccatggcgattggagaagtacggccacaggaacaagatgaacgagatcaaccttcttcctcaactatggtgcatcccccaaccaaagatgacgaacaggtacctcaagtggaggcgcttgatcaagggggagcacaagataatcaagtgatggaggaagaagtgcaaccggcacctccaacccaagttcgagcgatgattcaaagggatcatcccgtcgaccaaattctgggtgacattagcaagggagtaactactcgatctcgattagttaatttttgtgagcattactcctttgtctcttctattgagcctttcagggtagaagaggccttgctagatccggactgggtgttggccatgcaagaggagttaaacaatttcaagcgcaatgaagtttggacactggtgcctcgtccgaagcaaaatgttgtgggaaccaagtgggtgttccgcaacaaacaggacgagcacggggtggtgacgagaaacaaggctcgacttgtggcaaaaggttatgcccaagtcgcaggtttggattttgaggagacttttgctcctgtggctaggctagagtcaattcgaatcttgctagcatatgccgctcaccattctttcaggttgttccaaatggatgtgaagagcgctttcctcaacgggccaatcaaggaggaggtgtacgtggagcaaccccctggcttcgaggatgaacggtaccccgaccatgtgtgtaagctctctaaggcgctctatggacttaagcaagccccaagagcatggtatgaatgccttagagactttttacttgctaatgctttcaaggttgggaaggccgatccaactcttttcactaagacatgtgatggtgatttgtttgtgtgccaaatttatgttgatgacataatatttggttctactaaccaaaagtcttgtgaagagtttagcagggtgatgacgcagaaattcgagatgtcgatgatgggcgagttgaactacttccttgggttccaagtgaagcaactcaaggacggcaccttcatctcccaaacgaagtacacgcaagatctgctaaagcggtttgggatgaaggacgccaagcccgcaaagactccgatggggaccgacggacacaccgacctcaacaaaggag

SEQ ID NO: 24700 - DNA, 573 bp, Zea mays
  Peptide Sequence Number=SeqID_66479
atggcggacgtcgatgtcgaaccggaggttgccgccggagctcccaagaagaggacgttccgcaagtacagctaccgcggcgtcgacctagatgcgcttctcgacatgtccactgacgacctcgtccagctcttccccgcgcgcgccaggagaaggttccagaggggtctgaagaggaagcccatggcgctcatcaagaaactgcgcaaggcggtagatgcggtcaatgcaagattgtgtttatcagtcatcatctgtggaactttgtttacttatacttgttacacaatttcctcacgagctatatcccactgtcctgaacagaaaaaggatgctcctgctggtgagaagcctgagccagtcaagacacatctccgtaacatgatcattgtccctgagatgattggaagcattgttggtgtctacaacggcaagaccttcaaccaggttgagatcaagcctgagatgatcggccactaccttgctgagttctccatctcctacaagccggtcaagcacggcaggcccggtatcggtgccacccactcctcgcggtttattcctctgaaatga

SEQ ID NO: 24701 - DNA, 603 bp, Zea mays
  Peptide Sequence Number=SeqID_66480
atgtcggggcgcgacaagggcgggaagggcctgggcaagggcggcgcgctgcgccaccggaaggtgctccgcgataacatcccggggatcacgaatctgacgatccggcggctggcgcgcaggggcggcgtgaagcgcatctccgggctcatctacgaggagacccgcggcgtcctcaagatcttcctggagcaatgctgctggtttaggggttcttcgcgcgcgcatccggtcaggcctccaaggtcggtggccatggctcagtgtcgccatcacctcctcctcatggttattgctgctccgaactgtcattttattcttttaggaacactatcgatagagcctaagccacaaaaaccaacagaccaacacacacaaaaaatgaacctctctgtgttggcatcacgaatactgttggaagcacactgtctagaagaacgcactgcagagtccatatcaatgctggttgtcagtacaaagcaagcagcagtcggtgatccagcagctcctctcgcgcaaggggggatgccgctgctgtatgccccagtggatcctgcagagtcattgaagttccggaggttgcagattgtctccagccagtga

SEQ ID NO: 24702 - DNA, 1575 bp, Zea mays
  Peptide Sequence Number=SeqID_66481
atgacgactgacaggccactggaactcctacacatggatctattcggcccgatagcttacataagcatcgcgcgggaaagcgacaacgggacgaagttcaagaactcacaaattgaaggcttccttgaggaggagggcatcaagcatgagttctcttctccctacacgccacaacaaaatggtgtagtggagaggaagaataaaactctattagacatggcaagaaccatgcttgatgagtacaagacttcggatcggttttgggccgaggcggtcaacaccgcctgctacgccatcaaccggttgtatctacaccaaatcctcaagaagacatcatacgaactcctaaccggtaaaaagcccaatatttcatattttagagtctttggtagcaaatgctttattcttgttaaaagaggtagaaaatctaaatttgctcctaagactgtagaaggctttttactaggatatgattcaaacacaagggcatatagagtctttaacaagtcctcaggactagttgaagtttcttgtgacgttgtgtttgatgagactaacggctctcaagtagatcaagttgatcttgatgagataggtgatgaagaggctccgtgcatcgcgctaaggaacatgtccattggggatgtgtgtcctaaggaacccgaagagccttcaaatgcacaagatcaaccatcctcctccacgcaagcatctccaccaacccaaaatgaggatgaggctcaagttgatgaaggagaagatcaacaagatgagccacctcaagatgacgacaatgatcaagggggagatgcaaatgatcaagacaaggaggatgaagaaccaagaccgccacacccaagagtccaccaagcaatccaacgagatcaccccgtcgacaccatcctcggcgacattcataatgaggtaaccactagatctcgtgttgcacatttttgtgaacattactcttttgactcctctattgagccacacagggtagaggaagcacttcaagattcggattgggtggtggcgatgcaagaggagctcaacaacttcactaggaacgagcaagatgagcatggtgtggtaacaaggaacaaagcccgacttgtggccaagggatactcccaagtcgaaggtttggatttcggtgaaacctatgcacctgtagctaggcttgagtcaattcgtatattattagcctatgctacttaccatggcttcaagctttatcaaatggacgtgaagagtgccttcctcaatggaccaatcaaggaagaggtctatgttgagcaatctcccggctttgaagatagtgagtatcctaaccatgtttataaactctctaaggcgctttatgggctcaagcaagccccacgagtatggtatgaatgccttagagatttccttatcactaatggattcaaagtcggaaaggctgatcctactttatttactaaaactctttacaatgatttgtttgtatgccaaatttatgttgatgatatcatatttgggtctactaacgaatctacatgtgaagaatttagtaggatcatgacacaaaattga

SEQ ID NO: 24703 - DNA, 966 bp, Zea mays
  Peptide Sequence Number=SeqID_66482
atggctgcacaactaggttcaactccaatggctgcattccagatctgcttgcaaacctggttggcttactcacttcttgccgatggattggcttttgctggacaggccatacttgcaagtgcatttgctcgtaaggaccatccgaaggccactgccacagcttctcgtatcttgcagctagctttggtcttgggacttctcctaagcatacttcttggtgttggtctgcgtatagggtccagattatttacatccgatcagggtgtactgcatcatatctacataggaataccgcccagcactctagacaacctcctcctgaactcaaaccaagagcttcatgtacaccggatgcgacagacaccacgatatccagcccacaatgagcccggtagagcggacgtcgatgtcgaaccggaggttgccgccggagctcccaagaagaggacgttccgcaagtacagctaccgcggcgtcgacctagatgcgcttctcgacatgtccacggacgacctcgtccagctcttccccgcgcgcgccaggagaaggttccagaggggtctgaagaggaagcccatggcgctcatcaagaagctgcgcaaggcggtagatgcggtcaatgcaagattgtgtttatcagttatcatctgtggaagtttgttttcttatacttgttactcaatttcctcacgagctatatcccactgtcctgaacagaaaaaagatgctcctgctggtgagaaaccagagccagtcaagacacatctccgtaacatgatcattgtccctgagatgattggaagcattgttggtgtctacaacggcaagaccttcaaccaggttgagatcaagcctgagatgatcggccactaccttgctgagttctccatctcctataagccggtcaagcatggcaggcccggtatcggtgccacccactcctcgcggtttattcctctgaaatga

SEQ ID NO: 24704 - DNA, 510 bp, Zea mays
  Peptide Sequence Number=SeqID_66483
atggaggagacggcgagcaccggcgagctcgccatgatggcgggaatggcgctaacgctgatgcgatggctcgggaatttggagagaaatagagaggaccgggcggtggcggcatacagtgttggggtcggcgcggaagagctgcatagaccgctccacgaaatcggcagcacgcccagctcctgctcgaaccgcgtttggaaagcgacgttcccaatgagcgggccggcgaaggagaacacgcacaccggcgccaccctgtcgtcgcccggtgacacattggcatgtgtctccacatcgtcgaaggcgcacaacatcgccagtgtgctgcccaggctatggcccttgaccgtcacgctcacctacccgccccgcatgtggtatagctccaccagcttgcgcacctcagctaatacctgctactgtgtcgagtacctgcacaagcggcagaaccctctatccgccttcatgtcggggtctgggcacgacactctcgtctcgtgcaggtga

SEQ ID NO: 24705 - DNA, 255 bp, Zea mays
  Peptide Sequence Number=SeqID_66484
atgcagccagttgaaggaagtgctcgcatccgaggccacgcgtcgttcgctagaaagttcgcagaaaacagaaatgtgtgcctgctcggctctgagctaagcgtatatcttggcacccaaaataagaaccctgaaaagcatgtgatgttgcataacttgagatgtaccttgattgcaattgggggtgggcgtttgggttacccgaaaatttcgggtgtaattcgggtatttaaaatttcgggttttgagaattga

SEQ ID NO: 24706 - DNA, 585 bp, Zea mays
  Peptide Sequence Number=SeqID_66485
atggagcgggagatagatcgagcgccggtaatgccactgccgcacccgacggacgtggcacgagcaggaggcgccgacgaaggcagtgcccttcgcggctacggcgccggttttggtcaaggagaagcggagcctccccgggacgccagccgccgttgcccgtctgcggccgcagatccggacatagaggtgattgcgttgttcgcgcagttgtcccgcatttggggcgattgctaccgcaaatttacgcgaggcgtaatctcgctgcgacaaccagagggtgcaaaccaggactccgacggtggtgtgtacctgcgaggtgatctgcgcaacttgttggcctgctttgcaaacaatgttttgtcagatgcgttttacaaagttggtgtatttactgcaacagagacaccacttgctccttccccaatttttgaaaatacgccaatgcaacgtcacttcgccatgttctgtgctacattcagtactttctttcttcagctgggaggcgatgcaccgctggaacatgtgttacattccgtagtttatgttcatagtagtatctttcttcagctggccactggatag

SEQ ID NO: 24707 - DNA, 1033 bp, Zea mays
  Peptide Sequence Number=SeqID_66486
atgtacttggccccaggtcttcgagacccacgcagctgcatcgtaaccgcccccgacagcgcggggcgccaaacctccgccgtgctagtaccagcctgcgccaacccgagcctcgctggacgtgccactgcagcaaccacccctagcacctgggcggcgggccagccccgacaaaaaccggcggccctgctcgccaattccgtcttctttcccctgccgaatagcaagatcggcgtcgtcaaggtctctgctacaactgcgatgaaccatatgtccgcagccactcgagcccagccatggcgccccagcgccgtgatcgttgtcggtcccctgcacctcaccccgcacctcacccctattccctacgccgcgttcccgattgttcctgctcctccgctgcacattctgaaaagaactaccatttctaagccccataaggctgcagaggttgaagatttcttggaccggtcgcaaaattttgcaaggtcagtgggaaaggtgcagatgcagaagatttgcaaatgccttagagaatgtgctttgaatttgttagatttcatgagagggaaaatggacacaacgaagctgaagacccttttatttgggcggcttagcccagacgaattagtcagcaaacctcgtctgaagcatgtcaagagaaaaaggaattgggaacggaccccgcaagggggaagatgtgtgctccagaagagtgcaaagcatgctggtagtgctactggcagtgattcattacccactcctaacaaggtcttgcatcatgcactccattatcgagttgctggccatcagtctagcattcatcagtttgtgcccattattcgatggccacgaatcattccttctggttttggctatggattatcgcttgggattccatcagttgctcctcaccttggcaagggaatactgggcaagccaccaatcattccttctggttttggctacggattgtcgcttgagattccatcagttgctcctcaccttggtaacggaatactgggcaagccaccaa

SEQ ID NO: 24708 - DNA, 318 bp, Zea mays
  Peptide Sequence Number=SeqID_66487
atggcagaacgacggcaggcgcggggattggctgcaacggctctgatctctctcctcacgtggcggcggcgcttcactcggctccgatcttctacacggggtataggacgagggaggaccacgacctggaaagaaaggaaggctaacgggtgggtcccacacgacagcgagacggagtcgcgcttgacaagaaatctatcgcgtgcgggtgtgaaccggggtctgactgtagggccccaggtgtcagcgggggatacaggtgcaagagcgcgaaaagaatacaggtgtgacgcgaaagtgaatgctaagtcagcgtga

SEQ ID NO: 24709 - DNA, 246 bp, Zea mays
  Peptide Sequence Number=SeqID_66488
atgtcgggtggttcacctaggctggttttcgaaggcacggggtggccaatttgcctgttcactctcgacggcgccgctcctctcctctcggtgctacgacagcgcgaggaaagatactgttgggggtcttctttcccgctgaaggtgctcaaggcaaaaacaccttcgtcaaaatactacaaaggtatacgcgacatgaagatacaatccgaagatgatgcgaatagaatccgaagctatgactga

SEQ ID NO: 24710 - DNA, 687 bp, Zea mays
  Peptide Sequence Number=SeqID_66489
atggatttatttactcctcacagtgacctggacctctctatcaattttagtgctaatactgatgagcaatatactcgcaagcaaatgatctctattatcaagaaattttccaaggttctattttcttatcagaggagtggaattttctgtggggttttacctattgtaagtgctagggtgcctatactgaaggttattgatcgtggcacaggggtcgaatgtgatatttcggttgaaaacaaagatggcatgacaaggttaagttctgggctaagacccctgcacgttttacctttgaaccttgagctggtgccgtgggtcacagtgccaagtcatctgcgcgtcgttcgcgcgtccgccgccgtctgcgcctgcctcgtctgtgcgctgtctgcgctcttcctcgtccatcgcgcgtcgtctgcgcgtctgccgcccgccgtcggtgtcacgaccatcttctacgtcgactcagcccctccagtgctgttcgcaacgccgtccgtccggctcaccagagacttgagcaccgtcgtggccttcttctccgtcgccgtccacgaagtctgtcacatctgcgaccttctatgccgaatcgctgtccgggcagccatctgcgtccacttcttcgcgcccaggatctcgccgtggtctgtcgccatccacgctgtctaccctattcgctag

SEQ ID NO: 24711 - DNA, 150 bp, Zea mays
  Peptide Sequence Number=SeqID_66490
atggagacgacgatgatggtagccacagggatggtggaggtgatgatggagcatatggtgctcgaagtagagcatatggtcctagagctagagcatatggaatatgtaaatgaaatagggccacacccagatgcttcgaaacatgcctga

SEQ ID NO: 24712 - DNA, 216 bp, Zea mays
  Peptide Sequence Number=SeqID_66491
atggcgccccctgtggtcgcggcccccctgcttttctctctctctctctcctcccatgtccacgtcaagctcctcccctggaagccgtcttcgagcacaacccatgccaagtgttcgatggaaagtctgaaccaatattcatcatcaatctgcgattatcaaattgttttggtcgtggtgcttgacaaaatgcctgagttacgaaaccctcgttga

SEQ ID NO: 24713 - DNA, 762 bp, Zea mays
  Peptide Sequence Number=SeqID_66492
atgaatattggttcagactttccatcgaacacttggcaggggttgtgctcgaagacaacttccacgggaggagctcgacgtggactgggcacgaccacaggagatgagtgcagggctatcatcggtagtactccagacggctcatcggcgttggtgcttgaagaccacgaccgacgtaggaaagatttggacacagtccgacgagcttccatgagcgacgtccacggatttgaagctgtgacggccatggcaagcagggacgcgcgcgaccaaagggagtgccgcgccatggatggaggagcagagagaaaagcagggggcgagcagggagaggactcggcgacctcaatcaccagggggtgcggccgagtgaaatccatgcagagggcacggctacacgcgccatgggaggagagagagagaaaagcaggggggcgccgtgaccataggggcgcgagcacggggggcaccatggggaagacgccatgggggaactcgatcaggggcgcggtgcttcaggaaaaatccagggcggtggagatcttggatgcttgcagcgaacagaggaagggcgcggcttggggaaatgccagggagagggatgcccctccatgggcgagcgcaggggcacgcaggccgagcagggagcgtggctatgaagaacacgactgggcacggaaaggaagcagctccacggcgcgcggagggagttcagggcgatgggacacacaggaactccagggcacgataacacggagatag

SEQ ID NO: 24714 - DNA, 171 bp, Zea mays
  Peptide Sequence Number=SeqID_66493
atgctcactaggtgcttgacaaaatgcctgagttacgaaaccctcgctgacttcgtcgttcttgcgattatcaagtcagattcagttatggtcaataattatgttctaactgttagcagggcacccactagtcctcttgttaatgctgaactatttaatgaatttcgatag

SEQ ID NO: 24715 - DNA, 306 bp, Zea mays
  Peptide Sequence Number=SeqID_66494
atgtttccctactgccgtttggggcggaatcggacctgggagctctatgccctccgtgggtggttgccggacttcttggaattcttcgttgatgctcggatggcgccgccgcagtcacctcgtccgctcgtcgccgtggggagcttcactaccgccactatatctggtatggattgcgctcccaggttcaccaattcatctgcttcgagtaggatctatcaaagccgagaatcatgcatcggggtattggcggaggtgatcaccgacgtgctgcgccgtggggcagaacggcgccgtgtccggtag

SEQ ID NO: 24716 - DNA, 606 bp, Zea mays
  Peptide Sequence Number=SeqID_66495
atggccacggcggactccctcgcaggtagcggtagcaggctaaagggccagctgagcttctcgtcacggcaggggtcattgatgtcccagatctcagagatggacagcgaggaggtcggagggagcagcccagaggctgccggcggaggcagggggtacatccctgggtacccaatgggttctggttctgggtgggaggactcatcggcgctcatgtcagacaatttgtctggcctgaaacgcccccgggactcgtcggagcctggccagtcagtgcagagccgcatcacgcaccagttcagcctgcccaagacgtcgtctgagatggcaagtattgataaattcctccagttccaggacgcggtgccttgtaagatccgtgccaagcggggatgcgccacccatccgcgcagcatcgccgagagggtgaggagaacaaagatcagtgagcgaatccgaaagctgcaagaactcgttccgaacatggacaagcaaaccaacacatctgacatgctagatttggctgtcgactacatcaaggaactccagaagcaggttaagaactcgaaagcatcttcacttgggatagaaaaagatattaattag

SEQ ID NO: 24717 - DNA, 309 bp, Zea mays
  Peptide Sequence Number=SeqID_66496
atgtcggacaacacccctgaagataaattcaagaatcggttgattcaacaagagtctgtccatgaggatggcagtattacttgcccttcgattgagctgggtggatgtggtgacgccatgctgaacctaatatattcatctccatctagccagtccgaagagctcagttcagaatgtgagctagatgctgcaggcaatcattctggagtgaaggatgctcaggctcatgggtcacctgtgggagcgcaagctgacatgttcactagcatgaagcctgaagatgtgtatgatacggtccggattcgatag

SEQ ID NO: 24718 - DNA, 435 bp, Zea mays
  Peptide Sequence Number=SeqID_66497
atggccaacgccttgcctctcatcgtcgcgctggtcgccgccgccgggtgcgcggcgctggcttcggccacgtcgtacaccgtcggcgactcgcagggctggacgacaaccggcgtcgactacagcagctgggccagccgcaacactttcgtcgtcggagacacactagcaaggcccggctacgacgcctgctccggcgccaacgcgctcagcgacgacgacaccggctccaccaccatcacgctccagaccccgggcacgcactacttcatctgcaacgtccccggccactgcgccagcggcatgaagctagcggtcgccgtctccgcctcgccctcgggcacggccccttccgccggagccctgcaggttccggcgatggcctccgtcgtcgccgcggccgcgggcgctgccatcaagctcgcgctcttctga

SEQ ID NO: 24719 - DNA, 372 bp, Zea mays
  Peptide Sequence Number=SeqID_66498
atgtcgtgctccatggtattcgaggatgccatcgtcggccaccgtcaagctctgccctttgctatagtcagggtagaacaggctgttgctttcccttcgagtctaacgttcaatgttgctcgaggggttaggtcatccatgtaccttctgtccataagcggcgacagagtgtcaccaggaaggccacagggcatggatgtcgtaggcgcagagctaatgcataggatcaacatgtctagagaaaggcgtcggaatggccccacctgcggcttcgccacctcacccaaggtgggcttgggggcctctgtcagtaccctaaatatggggtacctactcctgctgggtcaggctggctccaacaagagccgctaa

SEQ ID NO: 24720 - DNA, 579 bp, Zea mays
  Peptide Sequence Number=SeqID_66499
atggccaagaacagctatgtggtttatgtcctagtgctgctcgtcgcgggctacacggcggcgctagcctcggccacgacgacgacgttcatcgtcggtgacgaccagggctggatgaccggcgtggactacgtcgcttgggtgaaaggaaagacattcgcgatcggagacaagctaggtgagtgggttcatcgcatcgccctgcgctgcagctgcacacggactggcacgtcgtggcaaataatcgcagtgtttaactacccgagcgaggagcacacggtgacggaggtgagcaggaccgactacttcgcctgcgccggaggcaacgcgctgagcaacgaccgcagcggatcgaccaacatcacgctcacggggcccggcacgcgctacttcctctgcaacatcccaggccactgcaccatcggcatgaggctcgccgtcacggtcgccgggggcggatcgcctccgggcgccacgccggccggtggcgcggcgggcgccacggctcggccggcgatgggatccttcatcgtcaagacgaccgcgtggctggctgtgatcaagctcacgctgtcctga

SEQ ID NO: 24721 - DNA, 213 bp, Zea mays
  Peptide Sequence Number=SeqID_66500
atggggactagacttattgggaccactgccaccaggccaagggaatttgagatatgttgtggtagcagtggagtatttctcataatggatcaaaggagtttctgtttccacactgtagatgtcgaagtaaaagttgttctccaccggatgattctcagcctaggagacaacttcttcctctactacagattcttcctcgtgttctatacatga

SEQ ID NO: 24722 - DNA, 207 bp, Zea mays
  Peptide Sequence Number=SeqID_66501
atggggcagggggagagagcgggtgcgagcgatgctcaaaaggagctagggagattgggcaagcgacgtggccagtgttctcggcatgcgtgcacgcgagggttagcggcggttcgcaagaaaggcggagctgacaagggaattaaaatcaaatcgaaccacaattcaacttcaaatatttcaaacatgtgcatcaaccaaaaataa

SEQ ID NO: 24723 - DNA, 246 bp, Zea mays
  Peptide Sequence Number=SeqID_66502
atggagaacgcaagttctccaaatcgtgctgttagagcttctgatgaagatcaccatgaaaacgaagaagaagtggttgtcgaagaagaaactgccccacaagctgaaattccacgtgtcgagaatagtttctactttgatatttgtggaatagatcctgagtcccctacaacacaaggaaagccccggtgcatttaccccttccttgttattttaaaatctttatcacttgaaatgatgcattag

SEQ ID NO: 24724 - DNA, 696 bp, Zea mays
  Peptide Sequence Number=SeqID_66503
atggcgctcggagatcttctgggcgacgctggcattggatacttctatattattccctctgttttgcccctgggcccatgtgtcggggctcagcaccctttggatgcatcgagtgagtctcatgatgcgatgatgcttgcaaaactactagacaagagaactgagaagattggcagagataagatcatacgttttgtcactaacattggtgccaactacaaggttgtggggcacattttggttcagaacactcctaccttgttttggacccgttgtgctgtccacttcttagaccttatgctagtggacataggaaaatttaaggattttaagaagcctattgcacatgctcgtcatgtcaaaacattcatatgtaggcatgggaagattctaagtgacatgagggtgcatacgaaagcactctacttgaaccttggaaaattctatagcatgaagcaaagtgatgatgaaggttatgctggagagataaggagttgcttcaatgttgtacttgttaaaatggtgttagatgagaacattataaacacaattgatgctcaagctatcctttatgagaaccaaatagaagcaatttgttggggaaatgatccttgggcccctagggcccacaagtcagtgggaggacaaaggaagagtctgccccagatagttccaaggcaccgagcccaggatcag

SEQ ID NO: 24725 - DNA, 456 bp, Zea mays
  Peptide Sequence Number=SeqID_66504
atggagaagcaagcgccgcccgagaccaagcgcggaccgtccggcctcaggcacgggccgtccggtcgttgtaaaaccagaaaaaccccgaagtcgttgatacagccgttactgctgaccgttgcgatttcagccgttactactgtcctcggagaaggggaggctagaaaaacttgtgtcgaggaggaccgtgggggcctggccgtgcgttggagcgcctgcgccggggccgcccgtaccgaatacgactgggccaaggtcgcgcacggcccgggcgctgaggcgcgcgccgaggcctcccgcactggagtcactcgcgtcgatgggagaggaggcggcgcgaagagcagggccgccagatgtggccgcgcccggaggggtaagggtcgcgttgatgggagatgggacagcgcacgtcccgcacctaagcccagagggacccgcatgccccaataa

SEQ ID NO: 24726 - DNA, 885 bp, Zea mays
  Peptide Sequence Number=SeqID_66505
atgatgcagtgggtgagaagatcgaggcactgttaccatgaggaaaaggcagcgaatggatcagggcgaaagtttgttggggaccgtgtcgaaggtgttaggatagcaggaacaaccaaaggcatagagatgcgtataggatgggcgatgccgaagagggcaaaggagtggggaaggcctaaaacagggggtgcgaatgaggttggtgatgccgtgaatcatgcgctcgatcttgccgttctgaggggaggtggatgtccaaaggttacagtggacgagatcaaagggccaagcggtgtgggacatggaagatgtgagggagtgggttgcgatgacatggtgaacgaggagagagacgggaggcacccccacagagccaccgagagtggagttggggccatcagtggcgagcatgctgatggcgagcatgagtggggacgagtgggagcggcatgggggaccgcgacggagcagggtgagcccaaggagggtggagcccacgtgatcgcagtagcagcagagcttgcaaaacaacttgctcaaatggactctataaggaaaagtattctacagaaggcatttgatctcatcgatactaacggtcagggttaccttaacaaagaacagtgcatatcgttactggatgagctaaacaagtacaggtcgttgcccaaaacctcgagggaagattttgaactaatcttttccgagcttgatcggagtggtgatttcaagccttcatatctggagaagtacccatctttctaccattcaccacagtgtgaaaggttgaagtcctttgtacggagtcgcctgtttgagtatattgttgtctttgttcttctggtgaacctaattgctgtcgttattgaaacaacggcatga

SEQ ID NO: 24727 - DNA, 459 bp, Zea mays
  Peptide Sequence Number=SeqID_66506
gtgcagatcgacgtccacaccaagagcctagaatctcaattttgcagtggaactggaagagaaacctgctcccaattccatgctgaggcgtaccttcgcgagatgcggatgggggagctgaggaggtcgtcatgcggaatcgacctggatactcccgggatcccgggcaaccaaaggagccctcaaggtggagcgatgacggaagtggaggcgccgctcatcaccgaggtggagggggtggagggccgtggcttctgcggttccgcgtccaccggagggggcagctctggtctcggcagcggcgtgcggggcacgaggcagtaccaccgccgctcggacgcgctcgcctacggcgaccgctaccagaaggcggcagcactcgtcgacctcgtcggttccctctccgcctctcactgctctcccactccccgctttgcttcgttaagtgaaatgctgtga

SEQ ID NO: 24728 - DNA, 282 bp, Zea mays
  Peptide Sequence Number=SeqID_66507
atgaattatcttcttttcaacttcaatgactacccaagtggtatggttactctgttcaatttgttagtcatgggcaattggcaagtctggatggagagctatgcacacctgactggaagttcttggagcctggtttattttatcagtttttaccttatttcagtattactgctgcttaatctgattgtggcatttgtgttggaggcgttttttgctgagatggaactggagaaagctggagaagctgatacgcagtgtgaggacgaagggtactatggttga

SEQ ID NO: 24729 - DNA, 495 bp, Zea mays
  Peptide Sequence Number=SeqID_66508
atgagcgggagcaactttggagacagcatggggtggagcagtagtgggagatcgtctggtccgagaaggggcaagagaggcggcggcggcggcggcggcacggacaagcccaagcaaccgcagcgagggctcggcgtggcgcagcttgagaagattaggttacagagcgaaatggcggagtatttccatcctctcggcggccaggcccccagcttgatccacagaacgggcagcctcagcttgatgccatacggagagacagacgtacgatacagtgaattccaagctcatcccatcataagatcaccggtgagcagcagtgctgtctatggcaccccacattacgggcagcatcctaacatcacattgcctctctttgaatcgcaggtatcttcccggttgaagggacgacatcatgatcgaagtcagtcagcggactcaacaagcttgaactccgacgatccacaagacgtggaccttgagctcaagctatga

SEQ ID NO: 24730 - DNA, 204 bp, Zea mays
  Peptide Sequence Number=SeqID_66509
atggtggaagtggcatcgtcgtcgtgtgccccgctagtcataacgtggtatgggaaccccagggagagcatggtggccgagaaggtggtgacatcgatgatggggatggcgctagaggggggcgtcggggacgaagccagagtcatcgtaggagggcaggggtatgccgagcacaccggaaagagctgcggccagcacgtgtga

SEQ ID NO: 24731 - DNA, 543 bp, Zea mays
  Peptide Sequence Number=SeqID_66510
atggactccaaaggcaaggggaaggtgtccaactgcgcaaaactattctcttatgggggagaaatcttttttggtgttagggaacctatcaaaaagagtcaaaaggaagtgaaggagtttggatcaaaagatccaaacatgggccaatctggctctccagctataattcaccggacagttcggtgtgccatgtgcccaacagctactcggtcgtgcaacgatcagctcgccggccacgtcaacgcaccaacggccaggaggggtcaccgtacagtccagtatgccattgaacagtctgctgcccacccgaaaggaaggcgaccaatcacaggatatgacaagcgttgcagccgaggttgtccggtgcacccgcggatagaaaacaattttcagtttccaaacaaaggagcaatgactccttggccccttggggttataaaagaggcccctaggtgcctctaccaagataccaagcattctaagagcacactacaactccgtgactccgcaaccatgctttcgaagtgtttgagagagatttga

SEQ ID NO: 24732 - DNA, 129 bp, Zea mays
  Peptide Sequence Number=SeqID_66511
atggcagggggacaacgagtccgcccaacaaggaggaagaatatcaacgccaaccaggcacgcatccttgcccgcgagactgctcttcggcagcagcaaggagagcttgacacccatgttcgtgtataa

SEQ ID NO: 24733 - DNA, 417 bp, Zea mays
  Peptide Sequence Number=SeqID_66512
ggggccgtcaacccgatgaagcacgactcgacttcatctgcatcgagctcgagcagcgtctgcggcctctccatgatcgccccatctgctctcgtgctgcgcagaaagcccctctatctcctcccaatgccgtgcctctacctctcggcccctgcctcagatgcatgcatcgtggagtgctggcacgtacaccatctcagggcgctggcctctgctccttgctgcatctcctctcggcttcctctctgcagtagagagcgcatggacgtgctcggtgcttcatcgcccagccatggtggaagtcaccgagccatccctccccgctggacagccccaaagtttgggtcttcggctcgcccaggcagcgaatgccgctccggcactgttcctgggcactcagcgcccagccttctgtag

SEQ ID NO: 24734 - DNA, 237 bp, Zea mays
  Peptide Sequence Number=SeqID_66513
atgcaggccaagctctccgctggtggtgcccctatcaacgaccccactacctaccacagtcttgtcgacgctcttcagtatctcacctttaccatattcgacatcatggagatcgactctgaacttgccaccttcgggaatccggggagccgctccgctataattcaccggactgtccggtatgccagcggagcaacggctacttcgcgccaacggtcgtctgcagaggaacagtaa

SEQ ID NO: 24735 - DNA, 207 bp, Zea mays
  Peptide Sequence Number=SeqID_66514
atggtgaaaaggaaccaaatccttcatgtcaaactcatgctgaagagcgatgatgatccggtgcaggaggctcgaagaacagacagtgagcacaatgtcatcaacatagaggagtcttgccattctaaggagaagtatatgggcaagacattcagagttgaaccccatgagaggagttatcaaactcatgaccattgtcacacttga

SEQ ID NO: 24736 - DNA, 348 bp, Zea mays
  Peptide Sequence Number=SeqID_66515
atggaacctgaacttcgaccttacttcgagaggaagaagaaagagctcgtggacggcggcgcttcgggctcggggatcgtgacggcggcgcttgggctcggggactcggcgctcggtgaaggggacggcggacgctcgggctcggtgaaggggacggcgacgctcgggctcggtgaaggggacggcggcgctcgggcgctcggggacggtggcgctcgggctcggggacggggacggtggcgctcgggctcggggacggggacggcggcgctcgggcttgtgctcggggacggggacacggcggcagcctggcggcgcaactgtgtcagctcgggcgggaagagttag

SEQ ID NO: 24737 - DNA, 318 bp, Zea mays
  Peptide Sequence Number=SeqID_66516
atgttcgatgacataccgtatgcgtggcggaacacgttcacgtggaactcgctgctatcgatgtacacgaagtccgaccgcctccctgacactcatgtcgtggtttgcgtcgtcgcagctcatgctcatgaacgtgctttcatcgtgcgcttcgtcgtcaagctggggctgagcagctatgtgcctgtggcccgtggccaactccgtgctctacattctcacagtgtacgcaaggttaggcagcgtgccactggccagaaggcctacgtgcatgctggttttgtagacaaagggaagaggtactatgagcagatgtag

SEQ ID NO: 24738 - DNA, 438 bp, Zea mays
  Peptide Sequence Number=SeqID_66517
atggcgaactcgaccgtgggcatcacgccggcgcgggggcaccagagagtgcgaaacacggagcgcctggaggacgacggggaggcagtgaagtctcaggtcgacgacgacggacttcggctgcacaagaagtgctccgggcgagagagctcggttgagggcgcaagtgagcagggggagtgcgcgagcaaggcgcgagctctaaaggggcgagggcgtgcggtggtggccggagaacacattgacgtgggcgcgtccacgccgaggacgtgggcgagaggcatcgcggtgtctgtccagcacagggggagggctagggtctggcaacgagtggcagaggtgagcatcgcgtggcgccagcggtgtctctggcgggtggtggaagaggcgccaaggacggggacctcgcccctatggatgcctcccttagccccttaa

SEQ ID NO: 24739 - DNA, 328 bp, Zea mays
  Peptide Sequence Number=SeqID_66518
atgtaccccccttcatatcaggtaaaactcgtcgggtattcgagtttcgggtacccattgccatctctagatggggctgtcagtggcagagcgggcctacatccgatccatcgagcggaccgggctcgagggatcagacgactcggaggaggagaactccttgaggactccgaggaggagggcgacggcggcggcgacgatgggagcggctacgagggcagcgatgagggtggcggcggcggcaatggaggaaacacggacgacagcggtgtgggcggcgacgacgagagcggcgtcgacaaaggtggcggcgacgacaatgttggtg

SEQ ID NO: 24740 - DNA, 240 bp, Zea mays
  Peptide Sequence Number=SeqID_66519
atggcagtgattgacaacgaggtcctgtgcggtggcggtggcataagctattacaagaagcttcgtcttcaggatgcaagcctcttcctcatgatgaagaaatatgagatgaagacagatcaaaagatgataagagtaaacgtcgaagctatcgtcaaatggacagctttggctcatggcagagatgaagcatgccttcatgatcttcgtccgatgatcattatacccatggagagataa

SEQ ID NO: 24741 - DNA, 1488 bp, Zea mays
  Peptide Sequence Number=SeqID_66520
gataatgccaattttgagcttgaaaaactcaggattaaactagaacatatgaaaggagtgtgcaaacttgttcaggatgagtctaccagtgcttctcagcaaatgattgacctagttgaaagacgtgctcaagaggaagctcggctggcggaggtccgccagaggatcaacattaccactgaggcagcgcggaaagagagggagcagcggtacgctatagaggcgcaagctaggcatgtgagggaccttgcaaaagaggaagctttgaaaaagcagaatttgcagcttaggttatcaagggaggctgataatgtgcaaaagctggagaaacttcttgaattgggaggcaagtcatacacagtatttacatgggaggagatggaatctgctacatcatcgttttcggaggcacttaagattggatcgggagcattcgggacagtgtacaagggcaaagtccaccataagactgtggccataaaagtactcaaatctgacgacagccacattgccaaacattttgaaaaggagcttgagattttgggtaagacccgacatcgccatttgttgctgctgctaggtgcctgtctggacagagcttgcttggtatacgagtacatggagaatggcagccttgaggatcggctgcagtgcaaaggagacactgccccactcccatggtaccaccgtttccgtattgcatgggaaataacattggcacttatcttcctacacagttcaaaaccaaagccaattatccaccgtgacctcaagcctgcaaatatactccttgacagaaatttcactagcaaaatcggtgatgcaggccttgcaacatttcttccattaagggacacttcgtcaacacatacaattcgaaaatcaacagatctagttggtacactgttttatctggacccagagtatcagaggacaggtcaagtttcagcaaaatctgatgtatacgctttgggcatggtgttcttgcagcttctgactgcaaagtcaccaattgggctagcagacactgctgagagagcaatggaagaggatcaccttattgacattctggaccaacgtgcaggaaattggcctgtgcgagaagcgcatgagctaactcagcttggcctccgttgtttggaaatgcgaagcaaggatcgacctgacctgaagtctaaggttcttgtagttttagagcggctgaacaatcttgccagcactgtgtatcattcggtgcagcccatcccaactgcaccaccaagccattttatctgccctatactcaagagggtaatgcaggatccatgcattgcgtctgatgggtactcgtatgaacgggttgcgattgagatgtggcttaatgagaatgatgtgtcaccattgacgaaggcgcgacttcctgacaaaaacttggtgcccaatcttgccctgatatgcctgatcaattcttggaagggagaggtaggagctactgggcccattcgctga

SEQ ID NO: 24742 - DNA, 355 bp, Zea mays
  Peptide Sequence Number=SeqID_66521
ttctgttggcgtcagatacggggagaagggggtaactgatcgtgggggcccatccgtcagcggaaagagtaaggcacacgggcgcgccagcaccactttgcttgctgaccaagaggccccacctgccagtggaacagcatggtcgtgggcgtggagttgggctggcgagacgtttgggccatatggggtactgggccgaggtaaggtgagaaaagaggagattgcgttacagaggcaaagagatgatgggaggattatgaatatggatctaagttgtatgctagatgagaaaaagacatactacatgaggttaagggctaagattatgagccaacatttgttgcttaggtactag

SEQ ID NO: 24743 - DNA, 384 bp, Zea mays
  Peptide Sequence Number=SeqID_66522
atggactattctcaccaccaacacattgctccatcacaactcagaggccggagcaccaatttcgtcgccgtcaaggtggcgcacaccggttcctcacggcctacaagcaatgataaggtatggtcagataacagcaaggataaggataaggtaatacaacatcaagcaccattgtcaactactctacaacaacaagttattaacaaggataagattacctctgcaccggacacgaagaactcgctgccgttagtagtagatttggagcaccggttccaaaaggactggttcctcacggatcaatacaactcacggggaagactttcaaagaaaaaggatgaagggaataagcatatcatgtcacagggaagacatccacaataa

SEQ ID NO: 24744 - DNA, 456 bp, Zea mays
  Peptide Sequence Number=SeqID_66523
atggtgtgggttgcatgggtcgcaggcaccatcattcaggctatgccgacatctagccttcgtagcctggggcttgacgcggctcatcatgttgcgcctagccaccggcctgcacactcaggcctagtcgtgataggtcatgagtgcaccgtaattcccaagattgtgcttgtctcatcttcattgcgtagctgggtgatctcgattggacaaaggaaacacttcggggtgtctttctgccagggtaggatcccgatcctctcgtcgcagacctccttggatctctgggagagcttgaccgccacccatatggcgctcgaggctaccgatgttggtgaggtggtcagtctccgtgcccgcatggtggagccggaccgtcgcgtcgtggagctagagctagaggttgcgggcctccgtgagggtacagacgaagtgatcgtcttcatctgggcctag

SEQ ID NO: 24745 - DNA, 762 bp, Zea mays
  Peptide Sequence Number=SeqID_66524
atggagactgcgcctggtgagggccgggctcgcctgcatggcacaaatggcctcctagccgcaccttgggggctcgtcggagggctcagtcatggggacgtagtggtcgctcactggcgatgctcgccagagctgtgcgcagcggtggcacgccgggctggccgggagccgcgctggctacgcgccacgggccgcgagccgccacgtccgatgccgtcggccgcgcaggctggccgctggggctggccaccgcgctgggcaagccgtgggctggccacgccgagctcgcgcgcagccgcgccgggaagtcacactcggggacgtcgggcagggtattggggctcctcgccggggtttgtccagggtgtgggaggggccggtgctgggcgaatcatcggccagtgcagcggcgcgctctggctgctgggagaagatggcagggctactacggcatcgcaactcggcaagggaggccagaacacggccgaggctgctcgaccaacggaaacgcagggggcgagtgcatggggaaagggaacacacatgagagctggcgcgcgggctgctgctgccgcgagagtgcagggggtctgcgaggggcacgcggccatgcctggggagagggatgagagaagaacgcatggggagggagaggaagagggatctcgtgcgcacctggtaaccgtcgagacgagacagccctacatgatttggatttggggaacacaggaggttatgcaacggcagggtggatttatataa

SEQ ID NO: 24746 - DNA, 312 bp, Zea mays
  Peptide Sequence Number=SeqID_66525
atggaggggctctcaccttggttcacggcgacagcaggtctggccacgggtaatggcggcgcggcgatggatcctgagccacggcgacgaattccctcggctccgagttgtcgcacccccattaggttgccccaggaacctccaccgagcgccagcgaagctcccgagcacaaaccggagccccgatggcggtgtaggcgtgaattgcgtgttgcggcgctcaatcccgtcgttggaggcggccttagcaggtggtggctggtgtgcgctgagaggggagagagtcgtagggccacgaattttatagtctag

SEQ ID NO: 24747 - DNA, 330 bp, Zea mays
  Peptide Sequence Number=SeqID_66526
atggaggggctctcaccttggttcacgacgacagcaggtctggccacgggtaatggcggcgcggcgatggatcctgagccacggcgacgaattccctcggctccgagttgtcgcacccccattaggttgccccaggaacctccaccgagcgccagcgaagctcccaagcacaaaccggagccccgatggcggtgtaggcgtgaattgcgtgttgcggcgctcaatcccgtcgttggaggcggccttagcaggtggtggctgattctaaattttgaattcaactttgtgatgaatttgtcctcagttttaagtgtgccattaaagtactga

SEQ ID NO: 24748 - DNA, 1092 bp, Zea mays
  Peptide Sequence Number=SeqID_66527
gcagagagcgcgccggtcgatgcgcagaaggcggataatacccgctgtaaagagaagtcgcggcattccaagcgctgccactgccacctcgaagagatgcccgtcatccctgagcaggccatggagttcctctctcggacgtggagcccctcctccacggatctcttccaaatactctcccccagtgacccagagcaagatgaagcgagaggagacggaggcgacgacgacgacaaggagaaacatcttggcacgagacttgtagccggcggcaggcctaactgcggacagcgccggcacaagctagtccagcctgcctggctcagagttggaaacatgaaggcgatgctgcgtggtttcctgttggacagcgtgccagtcacggggagccggaggaggcggcggagggacgagctccggctgcactcggcacaggcgcacgccgccgtgtcggtggcgcagctcgctgcggcggtcgcgggcatcgtgtcggcgtgcgacctgaggcccgcggcctcggccggcgctggcggcgacaggaggctgggcacggtgctcgcgtccgccgccgcgctggtggccaccgtgtgcgccgaggccgcggagaccaccggcgccaaccgcggccgcgtcacttccgccgtgaggaccgggctcgagagccgcacctccgccgacctgctcaccctcactgctaccgctgccacatgtttgaggggagccgcggcgctgaagcaaaggacagctgacctcaggggaatcagcaccagcagcagcgacgccatggccatgagcgtcagcgccggcatccacaagggcacgactctcgcagtctgcctgccttgtggaagagtgcgggtgaggacggtgtccgtcttcccgcggcgcggcgatggcggcgcggcggtgctgcggctgggaaagaagcgtctgcgcggcgcgttcgccaccttcaacgacttgtcggtggtcacgtcagaggggtcgacggtgcagctgctgttcgagcaccagacgcactgcaaggtctggaaggccgccatcgagggcatgctggccgagcagaagctcaggcgcgggacgacgaactga

SEQ ID NO: 24749 - DNA, 180 bp, Zea mays
  Peptide Sequence Number=SeqID_66528
atggccggtacggaccacgtcagggatgatctgcgtgcgcgccgtggtcaggggcattcgcggggaagagatagaagatggagggcatttatgcaatttgtcagtggcacagaggagcactccggaaaccctaagttcttggagttccgtgaaggaaagttgtattcaagacttagataa

SEQ ID NO: 24750 - DNA, 144 bp, Zea mays
  Peptide Sequence Number=SeqID_66529
atggatcgccacttcggcaatgtgtgcgagctcgatatcatgttccatctggagaaagtgcacttcatgttggaagagatggtgatgaatggttgcattgtggagacaaataatttgaatagtatgatcaaagttaaagtataa

SEQ ID NO: 24751 - DNA, 225 bp, Zea mays
  Peptide Sequence Number=SeqID_66530
atggcccccaagagagcaacctcgaaggctgccgcatccatcgacgacacggcgaaggcagcactcctggcggagaagaaaggcaaagccctcgtggacaacgaccctaggaggccttcgaagatgacactgtcaacatcaagagacagcgccgggataaccccaccctcgacggcactatgcgcacttgcagttccgagggcgcaccgcaagcaccaccactag

SEQ ID NO: 24752 - DNA, 432 bp, Zea mays
  Peptide Sequence Number=SeqID_66531
atggaaacgaaggttgacacgaggggctcagaggacccgtgggctaggttctgcgccagcgacgagatcgcctccgctgccgctgctacgggaaatacgcgaccacctttgcaaaacggcgccaccgacaaggagtcggagctgaagagcctctgtggctactgtgagaagacggaggcccccaccggcgccggtgttgagcgggcgcacacgctgtttgtggaagcgtaccgtgagctcggcacccagactgctccttttgataagtctggggcggagatgatgaatggagaagaagttgatgacctcgccggtcttgagagctcgatgaatcagatgggtggcgcgaaggaggtgggagttgaagggcactcatcaccgcaggctggctacgatgaagaccctgcggcggcgtctgctccggcaggttga

SEQ ID NO: 24753 - DNA, 504 bp, Zea mays
  Peptide Sequence Number=SeqID_66532
atggctagggtttcatgtgtaaaacgtctacggcgaaggggtatggtggatccctggccgcaggatcggatagcgatggtccagattaaattgcacatctccgcaaatcgtagggagggccgcgatgacgagacaacaggtggcagcacggttgttgggaagggcggggagaagaaggggagggaatcgcttgagtccaaggcggtcatcggcaaggacggggacgacaaccggatggtcttctttgaggccccgtcgctggcgttcgatctggaggacctgctccgtgcctccgtcaaggtcctgggcaagggcgcattcgggacggcataccgggccgtgctggaggacaccaccacggtcgtcatcaagaggctcaaggaggtgaacgtcgggcggcacgacttcgagcagcagatggagctactcaggcggatccgttacgacaacgtcgtcgagctccgcgcctactactactccaaggatgagaagctgctcgtgtag

SEQ ID NO: 24754 - DNA, 153 bp, Zea mays
  Peptide Sequence Number=SeqID_66533
atggagaaagatcgccaggacgcgcagcggaagaagcaccgggcccctgtcaggttggtggacccaaggcaggaagtgaaggtggcgcggcccagcgcgaagtccatcgcctcaggcaccggggcagagtctggtgtcacacccgggttttag

SEQ ID NO: 24755 - DNA, 2082 bp, Zea mays
  Peptide Sequence Number=SeqID_66534
atggctcctttctcccagcccaaggtgatcctactcaaggaatccatcttccccatgtacctttctattgataacctgtctcatgctcagctcaagttacctgctggtgacatgcaccagtttttaccgcagcctagtatgacaacacctttctatacaccaaattcgtttggaaacccttattatccgaatttgcaccctggtaatgcttttccaacctcaattggaactggagggtacgctgtaagtggttccattttgccaccttttgtggctggctttgctccccaaggtcctcttgctacacctctcgacagtcctatgactccaagctttagtggtaggccatctggattttctccagcagggaatcttacagggggaacagagtttatgcagtcatataaagtatacggacaacctggggctggtatgcagccatccattcccgattcgaactttattcatttctttcagcatccctctttatttcagtatactggtggaaatcaatacaatacaatgggtccaagatttactgttgtgaatccaactgaaagctttgatccacaaaagatgatacatcaagctgcatatccatctgatcagaggcttccacttccaagaactggctttcctaattctcctacatccagaagaggagggactgttccaaattatcaaggcatatcatcctatgttggagggccgatgacttatcctacaagtccagtgtttcagggacaaaccttgcctggagtattgcctcctgataggagaaatgaccctgttggatttcagtccccctcaagaaacatcaccgatagtcctgggattcaaaggcagcgagacagacagaagtttgatgaatcaaaaacttgctctttcttagaagagttgaagtccaacagagcccgcagggttgaactatctgacatcacaggtcgtataattgaatacagtgctgaccaacatggtagccgattcattcaacagaagttggaaaattgcactgccgaagagaaggcatatgtgtttgcagaggttcttcctcatgcttcatcactaatgactgacgttttcgggaattatgtgatccagaagttttttgaacatggaactcgtgagcaaaggagggatcttgctaccaagctcgttggtcatgttttgcctctgagtcttcagatgtatggctgccgtgtaatccagaaggtcgagtgttttaggtccttggaacattttaagttgttcactccaaatgagaaacaggctcttgaagttatggaacttgaccagaaaatagatctagttcatgagcttgatggacatgttatgagatgtgttcgtgatcaaaatggaaatcacgttatacaaaagtgcattgagtgtgtccctacagaacatattggttttgtagtatctgcttttcagggacaagttgctagcctttcaatgcacccatatggctgccgtgtaattcagagagttttggagcactgcggtggtacctcacaaagccagtgcatagtagatgagatattgcagtcggcgtgcgtccttgcgcaagatcagtatggcaactatgttacacagcatgttctagaaagaggaaatgctcatgagaggagccaaattattattaaattggctgggcaggttgttaccatgagccaaaataaatttgcatcaaatgtgatagagaagtgttttcaacatggtgatatggcggagcgggatctcttgatcaggcagattgtggagcagacagagggcaatgacaatttgctggcaatgatgaaggaccagtatgcgaattacgtggtccagaagatactcgaaacatgcaatgagaaccagcgggaactcctggtcagccgtgtcaagggccacatgcaagcattgaggaagtacacatacggcaagcacattgtaagccgagttgagcagctctgcggcgacggccaggggtgtgagggtgtcttgttcttttgctcagtccatcagtggagaaagcagaacagatcaagtccacctctggtgcttccaaacagactaacaaaactgtcatcgaagattgtatag

SEQ ID NO: 24756 - DNA, 264 bp, Zea mays
  Peptide Sequence Number=SeqID_66535
atggcgatctggccaaggttgtttctcagcgaagactgggcctcgggcgagccgaagtttttgataatagccctgtcggcatttcgagaccggggggtccctaagccgacgagtgaatgtcgccgcgtgccccagcccagatgggtcgacgcgaggccgagcgcgaaggggggaagtgaggtggccggagacaggcgtgagagaggtggaaatcccgcggccttcgtgttcgtcccgcgcctaggtcgggtgcaattgcagtag

SEQ ID NO: 24757 - DNA, 976 bp, Zea mays
  Peptide Sequence Number=SeqID_66536
atgggatgtgctgcttccaggttagaagatgaggaagccatcaagatgtgccgggacagaagggacttcatcaagcaggcactggagcagcgcaaccgatttgcatcttctcacattgcttacatcgagtccctgaagcgtgtttcaatggctctccaacggtttgttgctggagatgaccaccatgagctcatcttcgatacattcatctcccctgtcaagcaacagaagccagagacgctcagcctgccttatggttcatatgagaagagaaccattcatgtctcgagatacttgaggtcagggcctaacccatcagtgtcagttgaggagcacccacgaccggtggaaacagtccgtgttgagtcacattaccctatggacaatcacagtggcatggataggttcttacaatcgcactcctcaccggtggtatcgtcttcatactacccaccaccttataccaggccaagctacccatctccatcgtcccaggaaccagttatgaatacttctacctattacatgccttatgacaggccaagatatgcacctccatcaccccaggaggcaatgaggacttcttattatgcatcttatgacaggccaagctaccgaccaccatcatcccaggagccaccgaggaattcttatcatgtgccatatgacaggccaagcttcccacctccatcaccccaggagcaggaatcatcaccatgggactccttctggaacccattctcatcgctggacagctttggatatccccgccctcggagtagctatgacaacgtgaccaatgacgatgaactcgcgaggttacagcgggtacgagaggaggaaggaatcccagaacttgaagaggaagacgatgagtgtcaagagcatgtacaaatgcatagaaaagaagaacaagaagatcatgataatgcggatgatgatgatgaagacgatgaggaagatgacgatgacgaat

SEQ ID NO: 24758 - DNA, 216 bp, Zea mays
  Peptide Sequence Number=SeqID_66537
atgcagcggcggtcgcacacagcccagcaggtcggtccgagggttttagaagccaccaccgatcggtacggccgcacgcacccattcaaccgcccgtcgcccatcgtcttctccaccgagtcgccaaaagaaaaaagggtaaaagctttcgtggcggagaggtggaggaagagcaacgaagcaaaagctcaccgagtgaagaattgttgtccgaag

SEQ ID NO: 24759 - DNA, 159 bp, Zea mays
  Peptide Sequence Number=SeqID_66538
atggaggaagggaaggggaagggaaaggtgaaggggcgggaaagtgctttttgcgctactgcctggcctgctgctagacgctacggcctttggaggaaacgtcaagccaacgcactctacgtcgctggccaagctgactgcttgcctatccacgtttga

SEQ ID NO: 24760 - DNA, 291 bp, Zea mays
  Peptide Sequence Number=SeqID_66539
atggcgctggcccctgctccctgcggtccccatggcagccaagctctagatccatggccgccggccttcaccggtcgtcttcctccctgctccctcaaacaacaacaatggtggctgagccccctccctccacttcggctgaagcatgctcagccctctgcagcacaactcctttgctcctcctcgccgccacaatcaatgtcatgcctcgtgcatcgcgtgctcgacaaaaatcccaagccagtggacagcacatgcaaatcaccgatccggccaggttgttcgctttag

SEQ ID NO: 24761 - DNA, 432 bp, Zea mays
  Peptide Sequence Number=SeqID_66540
atggccatgggggctgggaggagcctggcgagctcgaccctggtggggaaaaaatgtctgtgcctaggaatggaggagagagggattagcatgtgccatggcagagctccgagcggtgaggagaaaggagctcccgccatggggacgacgcctgctcacgctgctgggatccaagggaaaacagggaaccggcctgctagggagctcgcaggggcgccatgggaggagctcggagccgatgccccgacgggcgttgattgccgtggaggaacgaccagggacgtgtcctggccatggagagctcctgctcaagcttggaccagaggagggtcccgcgcgctggaagctggaagggagcccgagggagctggagctccgagggggaggggtggaagaatgggggcaccgtggggaaggccctgcctgccgtga

SEQ ID NO: 24762 - DNA, 543 bp, Zea mays
  Peptide Sequence Number=SeqID_66541
atggtggcgccgctcaatgccatcgatagcattccgggggtgaggtcgaggagaagcgagaggatgtggcgaacacgccgatacctttggtttggccggaggtggtcggagtcgtgctggccacgtgcgggggaggacgaggtcgtcggcggcgaggggcttggcctgtacatggcggcagagttcgactggattgttcggggagcttcacaaggcggggtagcactcagtttgagggctcaggaagtttcaccagactctggggaggctggcctagcagctggcttggacggggatggaccgaatcacttgtccgggcctgctcttgccttgaccagtgcacaaaacctcttcaccacccttcaagctactgattttgtgtggtggtcatgggattttgcctactggaaccagagatatgtcacactcaagtggggttctctggaggacatggttgctggagtgacttggccgtccatcttgccaccgggttggactgtcgagtgggaccctacctcggctgaggaggagcatgaggagtga

SEQ ID NO: 24763 - DNA, 318 bp, Zea mays
  Peptide Sequence Number=SeqID_66542
atggagatcgtcaccggcgacaaggtcgtaggctcgggacggactctatcaagggagtccagcgacaagtacaaggaggaatcctcttcctctatcaagtcacataggaagggtgacaagaagaaaaagaaaatgaagaaggtggtctactacaagactgactcttcatcaccatccacatccggcgctgagtctacaacttcgaagcgccacgagcgtgagaagtatagaacgcatatggcacggaagaggatgaggagcgtaggcaccataagtgggcgacaaggactacgactcggacgagaccgcccaaattag

SEQ ID NO: 24764 - DNA, 162 bp, Zea mays
  Peptide Sequence Number=SeqID_66543
atgagcatctcttctgaagcaaggtctagactctggaggcggagctactatcatcaagagccaactcaaaatgaccaagatgctgcagaaaaactgattgatgatgaagaagaatctggagttgctggtgatcaattcaagctggatgatgatctcatatag

SEQ ID NO: 24765 - DNA, 1308 bp, Zea mays
  Peptide Sequence Number=SeqID_66544
atgctcgacatcaacttgttccgcaccgacaagggcggcaacccggagcttattcgtgagtcccagcgcagccggttcgcctccgtcgagctcgtcgacgaggtcatcgccctcgacaaggcatggcgcgaaaggcagttcgagctggacaagatccggcaggagctcaacgctaccagcaagaagattggcaagctcaaagccagcaagcaagaagaggaagcgaagaagctcatggagagcacagacgaaattaagaaaaggttggcagccaaagaagttgaggtgcaggaggccaagagcaccctcgacgccaagctcacgacgattgggaacatcgtgcatgagtccgtgccagtcagcgaagacgaggcaaacaataaaattgtacggacatttggagagaagagagtagaggaaaatttgaagaatcacgtggacctttgcaggatgcttgacattgtcgcattggagaagggtgctgatgtggctggtggtaggggtttctatttaaaggatgaaggtgtcctccttaacctggcattgataaattttgggctagcctttctgagaaaacggggatttaaaccaatgcaaactccctttttcatgagaaaggaaactatggcaaaatgtgcccagttggcccagtttgatgaggagctttacaaagtgatagaatataccctgctgaactttccaatcaaatatgctgggtactccacatgcttccggaaggaagctggttcgcatggaagggacacagctggtatcttcagagtccaccagtttgaaaaaatcgaacaattctgcattacaagcccaaatgacaacgattcttgggagatgcatgaagagatgctaaaaaactcagaagattactataaggagattgggctaccataccaagttgtttccattgtctctggcgctcttaatgatgctgctgctaagaaatatgatttggaagcatggttccctgcatcaaagaccttccgagagttagtatcctgttcaaactgcactgactttcagtcaaggagacttggaattgggtatggccagaaaaagaatgatgagcagtccaagcagtttgttcatatgctgaactctaccttgactgccactgagaggaccctctgttgtattctggagaatttccaaaaggaggacggcgtcgaggtgccaaaggcactgcaaccttatatgggtggaatagagtttcttcctttcaagcaacctttggatgtcaaacaagcttctgactccaaatcaaacaagtccaaatcaaagggaaatgctgcttga

SEQ ID NO: 24766 - DNA, 273 bp, Zea mays
  Peptide Sequence Number=SeqID_66545
atggggcggaggagcctgcgagcggcggcggggcagcgggcaagacggtggtggcaatggcaggctgaggcggagcgtgagagccagcgggagcgccatagagaacatgacggcggtgaggcggcagcaggagcatgcggacggcgggacggggtggaacggtggagatttgacacgatcccctcagtgctctccggaagattcccgtgcactcgtggagatttggaagcggacgttgctggattttggtttcatgcgttctgtggccgttga

SEQ ID NO: 24767 - DNA, 1638 bp, Zea mays
  Peptide Sequence Number=SeqID_66546
atggcattggcttccaaccgggaggcaatgtcaaacttaacgcccctcctaagaaattgtctaattttgataagggtaaggctcccatgcctcaggataacgagggttacattttgtacccctgccggctatcctgagagcaaaaataggagaattcactctaggaagtctcactctggccctaatcatgcatttatgtataagggtgagacatctagttctaggcaaccaacttgtgctaagttgcctaaaaggaaaactcctagtgcatcaaatgatcatgatatttcatttaaaacttttgatgcatcatatgtgttgattaacaaatccggcaaggtttatgcatccgggggctcaagttggatcatcgacagcggatgcacaaaccacatgacaggggagaagaagatgttctcctcatatgagaaaaaccaagatccccaacgagctatcacattcggggatggaaaccaaggtttggtcaaaggtgtcactgtctttagaagaagtgatgattcaatagcatttaaaggagtgttagagggtcagctatacttggtagattttgatagagctgaactcgacacttgcttaattgctaagactaacatgggttggctctggcaccgccgactagcccatgttgggatgaagaatcttcacaagcttctaaagggagagcacattttaggattaacaaatgttcattttgagaaagataggatttgtagcgcatgccaggcagggaagcaagttggtgttcatcatccacacaagaacatcatgacgaccgacaggccactagagctcctacacatggatatattcggcccgattgcttacataagcatcggcgggagtaagtactgtctagttattgtggatgattattctcgcttcacttgggtattctttttgcaggaaaaatctcatacccaagaaactttaaagggattctttagacgggctcaaaacgagttcggcttaagagtcaagaaaattagaagcgacaatgggacggagttcaagaactctcaaatagaaggcttccttgaggaggaaggcatcaagcatgagttctcttctccctacaccccacaacaaaatagtgtagtggagaggaaggatcgaactctattggacatggcaagaaccatgcttgatgagtataagacttcggattggtttagggccgaggcggtcaacaccgcctgctacgccatcaaccggttatatctacaccgaatcctcaagaagacatcttatgaactcctaaccggtaaaaagcccaatatttcatattttagagtctttggtagcaaatgttttatacttgttaaaagaggtagaaaatctaagtttgctcctaagactgtagaaggctttttactaggatatgattcaaacacaagggcatatagagtctttaacaagtcctctggacaagttgaagtttcttgtgacgttgtgtttgatgagactaacgactctcaagtagagcaagttgatcttgatgagataggtgatgaagaggcttcgtgcatcgcgctaaggaacatgtccattggagatgtgtgtcctaaggaatccgaagagcctccaaatgcacaagatcaaccatcctcctccacgtaa

SEQ ID NO: 24768 - DNA, 858 bp, Zea mays
  Peptide Sequence Number=SeqID_66547
atggacaacatggtgttcctgcaaaggtggctccaaaagttcccacagtacaggggcagggacctgtacatcgccggagaaagctacgcagggcactacatcccgcagctcgccgaggccatggtggagttcaacaacaaggaggagaggatcttcaacctcaaaggcgtcgccctgggcaacccggtgctggagttcgcgacggacttcaactcccgcgccgagtacttctggtcgcacggcctcatctccgacgccacgttccgcgccttcacctccgcctgcaactactcccgctacgtcgccgagtactacggcggcgcgctgtcgccgctgtgcgccagggtgatgaaccgggtgacgcgcgagaccagccgcttcgtcgacaagtacgacgtcacgctcgacgtcttcctctcgtccgtgctctcccagtccaagaccctctcgccgcacgagcaggtcgggcagcgggtcgacgtgtgcgtggaggacgagacggtgaggtacctcaaccggcgggacgtgcaggcggcgctgcacgcgaggctcgtcggcgtcgacaagtgggcggtctgcagcagcggcgaccaggactcggtgatccctctcacggggagccggaccctggtacagagcttggcgcgtggcatggggctcaagaccaccaccccctacagagtctggttcgaagggcagcaggttggaggatggacacaggtgtacggaggcggcgcgctgtccttcgccaccgtcagaggcgcctcccacgaggcgcccttctcgcagcccggccggtcgctcgtgctcttccgagcgttcctgcagggccagcctctgcccgaaaccttctcgtga

SEQ ID NO: 24769 - DNA, 426 bp, Zea mays
  Peptide Sequence Number=SeqID_66548
atgggcaagaacaacaagcgcaagcgtgagccgactcctccatcagaggagtttggtgactcggaatactcagaggaggagttctcctctgagtccgagggatgtccggctcccatccccctgcgagagtcgtctgacgactcagacgactcccaggggcttgcggtggaggtctggacgtacatccgggccgtcgagcgctctgggctcgagggctcggatgagtctgagttctcctcggatgaggaggactcggacggcgacgaggacgaagatgatgacgacgacgacggcgacgacgacgacggtggcgacggagacggtgatggcggcaacggcggcggaggcagcggcggcaagggcagcaccagaggcggcagcagtacgggcagcaccaagggcggcggcggcaaggccagtggctaa

SEQ ID NO: 24770 - DNA, 270 bp, Zea mays
  Peptide Sequence Number=SeqID_66549
atgaccacctcgctgtccccgggacaaggcacctcaccttcactttccaacctccactctgatgcctctctcgagggaatgaaccctttcttctctagacaaaggagacgactctcccggatcagggaaacagggaatgacaccatccgtgcagtgggcaaagtggacgggcacaaggaggcaaggaggcacgacgagaaagcacaagcaactagagggcttctaggggagaaaggaagcaagggctcgagcgcaagaatatggggatag

SEQ ID NO: 24771 - DNA, 2211 bp, Zea mays
  Peptide Sequence Number=SeqID_66550
atggcgtcccaggacgacgggtggggaggcggcgaggacggcagctcgctcttcgagggcatggtcctcttcgcgccagaacccgccgccgccgaggactcggtccctacccccgcccctgtccctgagctgacatccgccgctcgccccgacgccgacgcggcttcgtccgcgccgccgccgctcgacgaggacctcttttccgacctcaccctcctcgctccgcaggagccgctctcgctcgagcagccgcccccacccccgcaaggcgaggatcggagccacgcggcgcttgctcccgcgccgccagcagccgctgcggagctctcccggcagccgtcctcctcatcgctacgcaagaagaagcgggccgtgcgcatcgggtacggccgcttgccgcagcccgcgccgccttcccctcctgcctccgcagctgctgccgcgatctccgctagcagtatttccttcctggacgcttcgccgcatgcggccgtcactcgcatcctcgaccagctccctgatcggcaagtcgatgtctatgccaacggctacgaggcacacgcggaggcggtggccgtggataccagttcaccgcgtgtagaggcggtggcaactgaggacgatggtggtgggaaagaggatgaagacgctgcagttgtagccttgggggtcgaggagaggctggctctcctcagatcccaaatctccagcaagctcgactccatccagcagacggctgctgccgtggctgccaagaggaggcttttggctggacggcggaggaaggtggcggaggaggcggcctccgtggcatccgggcataaggatttggagagggagctggaggaggcctgcgaggccgaggactttgagagggcagagaggatcagcgactccctcgccacgctcgagaaggagaaggatcggctgtcgacggcgctgcgtggtgctgagcttgactatgattcagtggattcggagttgcaggaggtgcttgagtctcgcattgctgcagaggaggaagctgctgccctcatggagcaatttgcgaaggatgccactgaacacgctaattcagcgagcgagcacgcacaagaattatcctcgaaagaaatagaagagtggcaaacttcattggagttactagaaacaaagaagttagaaatggaagttgaaacacggttggttttagaagcacgttctgggttggaagggtcaatagagcatttggttgaagaagacaaactggagaaggatatgcttagtaaaaaaggagaaatcctcactaaggagttagctgagcttctagagttggtgaggttgaaagaagcagagatagctgaaaacaatgcccggatccatgaagttcaagaaagaatcagtgcagtggtctccagattccatggttctcagtcagatattgacttgaagctcagttccttgaaggaagaccaaagtaaagtggatctagagactgaagcacttttgttgaagaagaatgaaattgataagttcattactttaacagatcaaaaggattcagagttgagggacataattggtgcttgttcctctgaagcaaaagcttgtcgacaatcagttgaaataagaagaaagcttgcatcatcgatcttgaagtcaagagaggatagaattgggttgctaaaaatggaggaggaaattttgcaagtcattcaaatgcaaaggcaaaaaattaccgatgcaagaagtactcttcaggaggtatcttcaaggcgaacaagcatacagcaagaaacggaagcactgaagcagaagttgagtttcattgacaaaagaggccctgaactagaggctgaaaagaaagttgctgccgcctcaagaaactttaaggaagcaggaaggatagctgcagaggcaaaagctcttaactccgaaaaggacgagctgtatggtaagttggagaaagccgctactgatctagagacaatagaaaaggatattgtagcaaccacgaacaagatacaggaatgcgaagggcttattgaactcaaaggaagagagtcagcgttgacaagttacagaagactacggttagactgtgctgctgctagagcagaactgactgctgcagctgaaacagatgataacgaagaagctgagatactacgtaaggaggctgaagctgcagagtctaaagcaatggaactcaaaacatgctatgacctccag

SEQ ID NO: 24772 - DNA, 285 bp, Zea mays
  Peptide Sequence Number=SeqID_66551
atggcggagacgtacggcgatctcagtggttctgtccaagctcggggagctagcgagacgaacgaggcgaccatactgcttgaggtgggcgacaacatggcgcagcttcgcgaccgcctcgagtggctgcaggccttcgtccgcgacgccgacaggaagcgccgggccggcaccgaccagctcacccgcgtgtgggtgcgccagacgcgcgacgtcgccttcgaagccgaggatgcactcgatgacttcttttacgaggctaaccgaacaaggggatttacctaa

SEQ ID NO: 24773 - DNA, 4140 bp, Zea mays
  Peptide Sequence Number=SeqID_66552
atggcctcgtcgtcctcagcggcgagggcgcacgtggagcggatccggcgggaacggttctacatcggccgggaggagcggaacccgctagcggaggacatccaccaggcggtcagctacctctctgaggagctctactccaaggacgtccatttcctcatggagctcattcagaatgctgaggacaacgaatatccgttggatgtgtcgccagcactggagtttgtcataacagaaaaggatattactggtacaggagctgactcgacacttgttgtctttaataatgaaaggggattttcggcagcaaacattgaatccatatgtaggattggcaggtccactaagaaagggaatagacatcttggctacattggtgaaaaagtttcaagtcaaccacacatattcagcaatggatatcagataaagttcagtgaaaagccttcagcagtttgtgatataggatatattgttcctgaatgggttgatgggaagccaaatattgatgacataagaacagtatatggcccttctaggagccttcctacaactgttattatcttacctttgaagactgataagattcttgctgtgaagaaagaactttctagcacgcatcctgaaattcttttgtttctttcaaagattaggcagctctctgtcaaggaaatgaacaatgatcccaaggccagtaagatcagccagatttcgatctccagtgaagtggactactggtccagcaaggacatagatgcagagtcttacacgcttcatttagctatgcaggaaaatagcaagggggaaacagaagagtgcacctattatatgtggaggcaaaagtttgctgtccaaccagactgcagaattcagaaaaggatggaagttgatcaatgggtagttacgttagcatttcctcatggacagagactaagcagaggagcaaaatcgcctggagtatatgcattccttcctacagagatggtcactaatttgccctttattattcaagcagattttcttctagcttcatcccgagagtccattttatttgacagccaatggaatcgtggtatccttgagtgtgtaccttctgcttttatcaatgcttttggagctctcttgaaatcgtcaagggatgccccacattttgcgctcccacccatttttaggtttctgccgattcaggaatcctcaatatcgctctttgatagtatcaggctgtccataaaaaccaaagttcaagctgaggatataatgccttgtgaaccatgcactgcacagaaggtcttctgcaagcccgctgaagtctctcgcctggatagtgcgttctgcagaattttgaatttggcccagaagcaagggattggtctgcagaatctatcttcgtatggtacttttgtactaagctcctaccttgacaaccttgagtatgatgatgtattagaatttttaggtgttggatatgccaatagagaatggtacagtaagtgtattgatggattaaaccttgtgaaagaggcatcagaagaagtgtaccttcagatcttatattttgttgctggaaattggaaagtgttttctggaacaagtatgatgcttatatctctcataaaatatgtggatgccagcggccaattgtcatgttccagtgtgctagcagcacaaaggtctttaagatttctgaatgagaataacaagactccacatgtcattgaacaaatgaaaaatggctgctgggttaagactcttattggcagaagatcaccattaaatgcaatcctatttaattcagaatgggagaatgcctcggccatcagtatcttgccttttatcgatacagccttctatggggttgacataactgatttcaggtcagagcttaggctatttggagttgttgttgacttcaaaagaaattatcagctggtggttgataactttcggttctctatagatacaatcactcctggtgccacaatactaatgctcaattgtattcgatatgttgaggaatgtcatgattttgtagaaagactgaaagatctcagatgggtgaagactaatgttggcttcagagctcctcacgaaacattccttattgatgatgactggaaatgtcttttggaggtcattgacaagacaccattgcttgatctggaattctatggggatgaaatcaagctgtacaaagaagagttatgtaaaactggtataatcgctggcttcaaggaagcaagtaagaaaatagtgtgtcatgtcaagaaacttgtaaacactagtattacaaaagagctggcatttgcactactaaaatgctacagtgacctaaccaccaggcatgggaggttacctgttgctcttgcgaacttcatgcaacatgagagatggctgcatacaacatttggtttcaggtctccgaaggaagcaattctttttagctcagaatgggagtctattgctttagtctcttgcctaccattcgttgatgacagcgatgcacagtatggccttgggaaggagatttactgctacagtaatgaactgaaggccttgggtgccaaaactcgactagaacagggtgcagcatttgtcatttcggggctccgtattccaactgatccatcagctgtgactccacaagctgttatttcattgctaaaatgcatcagaatttggagacaaaacggatctgatctacctaaaagtttcatgagcgcaatcaacttgaagtgggttaagacaactgcaggttaccgccatccaaacggttgtgtcctctttggttcagtgtgctcttctcatgtttacagggatgatggccctttcgtagatgaagtgttttatggacaggagctagtttcatatgagagtgagctgcaaaaaataggagttaatgtggatcccagagctggttgtgcttgtgcactgatggcacagcatctcaaaggtctctctaatgctgatgcaatctcaaggatttactcgtacttggaggtataccgctggaagcctcgattcaccagtgatgactggatttggatacctcatgcagctaatcaaggacaatgggtcaaccctgccagttgtgttctttatgatactcacggtctttttggctctcagctctatgttctggtgaaatggtacagcagcaaattgcttcgatacttcaacacggcttttggtgtgaagcatcgtccaacagtcagtgattattgcaagctctggagtatgtggcagggctcaaactctacactgacacaaaaagaatgtgttgccttctgggaattctttggcaagaactggagcactgatatggggaaattcattgctgggtgtgtcgataaggttcctgttagttccggagaccagatcttgctacttgagaaacaagatgtctttattcccgatgatctactacttgaggatcttttcaagaagcaggctcagaaacctttgtttgtttggtatccttcaactagtttgccttgcttgtctcctgctagattaaatgatatctacagtagcattggtgttcagaagatatcaaaatctgttgtcagcaatcaatacgatcacttggaaattgaatctgtcacccttgttcataagggtaccgtaattaaacttggcttgctcaaaattgtcctggctttccttacggatcctatccttgacatttctgtcgagaagaggtatgaaatggtcacaagtctcacaaatgttgctgtctacgagacaagagggcctctcaatgtgagttatcaggttggactttcctcgggaagaagcttgcatgttacatgtgcaaggtttttccgttgggagagggagagctcgaggttatttgtgacggaggctgatgaaccaggatcaatgacctatgcaatgaagatggagtatgcatcatgttttgctgaggagatctcaaaaggattgttgtcggagaataaagaacagattccagctcttgctgaactcgtgaggactgggttcttgctggaatttgatgttcctgcagttcagattttgttgaatttgaagaacctacgactgtttgagcaggatgaacaatttcttttaaagctttcacaacattgtgacgatggactaggtggtccttctccttcctatgtatga

SEQ ID NO: 24774 - DNA, 1998 bp, Zea mays
  Peptide Sequence Number=SeqID_66553
atgggtagactagattccttggtcagagtattgctacaacacttccttccacattgtctgcatgccacgcctttgaggtgggatgatgcggtgggttttgaagaggatgttgaagcacttaagaaaatgctgctgcatcgtgaagatggcaattggcaaaacttaatgttcatctccatactcggggagagtggtgtgggcaagtacacccttgtagacaagatcttctttgatctggcagaagacgacaccacaaaaaaacgagaaattttcgtgggcgaaagaaataactttgctgttaaagtctggtacatgatgcctccaggttccagcacagaacatctcctccgaattatctacgtgagagtagaaaagcaactactaaaatggcgagccaaaggagatgcggcaatagcaacagaagatatccctgacaggatccgtgacctcctggcaaataaaaggtacatattggttatcagtggcgtctcctccaaggccatgctcaaccgcctgagggcgtgcttgccggacgatgcctgtaatggcagccgggtggtcctggtgctggacatcgagagcgaagtggtggcacagcgggccaacaccatgaacgccggtggcatcagcgggatccatctgctgagacgcctggaccaagaaaggagcgggcggttgttctgcgccagggccttcgccaaacaagtgcgactgtcgcctgattatcccgacgaggagaagaaactgacgaaaatgtacagcagagctgtgcatgcgataacagggggccacccactggccatcgtgcttctggccgggctcctccgattcaaggagaggccgggacagtgggaagctgtgctgcaggtgcagcagctcatggtgtcatcgtcgtcgtcaggacctgcagcagtggaagacgaagaagcagcagcagggagcagcgaccagatgttctccaagctgcgttccttcctatgctgggccagtgacgactacagcgctactgcaggcggaagcattaatacggataagaatcttgatgatctcaagttcctgcttaggtccaagttcctccgtgtcatcgagatcaaggggctgaggatcaaggagctgccggctgagatctgcgacatgttccacctgcggtaccttggtgttcacagcccgggcctcaagaagctcccacccgccattgccaagctgatcaacctgcagacactggacataaggggcactgcagtcaagaagatcgacccgtccttctggaacataaagacgctgcgccatgtccttgcccaggacctcgagcttccagcgtcgtcgtccatcgtccaacagctggacggcctgcagacgctgcagggtgtcaggcctgccgccgaagaagaggggaggcctgccgccgaagaagagggggacggcctgcagacgctgcaagatgtcaggcctgccgccgaagaagaggggaggcctgccgccgaagaagagggggacggcctgcagacgctgcagggtgtcaggcctgccgccgaagaagggggggacggcctgcagacgctgcagggtgtcaggcctgccgccgaaaaagggtggaatcaagagaattgtccactgcacaagatgacccagctccgcacactgtgcctgcacggaatcaaaggcgacacgcacggggctgaattgggggctgctctcctcaagatgcatctcctacgccacttggagctgtatagctctgctccgcatgaccagtttcctccatgcattttcaaggaccggggccttcaaaatctggagagcgtaaagctgcttggccgtgatgcatactatttccctgatgacgctgcacccaatcttcgtgtgctccgacccaacctcgcttgggtcgatttgaagattgtggtgcctcaacccatcgaggacgagttcaaaaagctgggagtgagaggtcagtggctgaagatcaatacatcgtataattcaaggaagcagtga

SEQ ID NO: 24775 - DNA, 3792 bp, Zea mays
  Peptide Sequence Number=SeqID_66554
atgccgagatccgccacggctttaccttctgataaatttgacaatgctggtgcgggggcttgtgtaaagagatattctgatccatcttatttcaagaaagcatgggatacgatgagagcagataagaatgctaatgtacaaagagaaaagagatcacagaaaattaagagaaaaggatcacgactaagggaaccatatcatggacaagccatgcctaggcataggggcactgaatttcagcgatcacttactgctggccaacttgttaacaggtgttgctcttcccatactttaagatacaataattttgtatccgtgatcatcttctatggctgttcccttcttatatttgaatggcacatccagaacagcatttttaatagtgtattttccagcaggcagtttgcatctcccagcaacgatggtcagggtatctcagagcataagtctacacctgatgcaagatctaatcctgacaatatgagcagatcttcttctcttagttcgaagacacaactgagttcagtagaacaagctatcgatacaaaaccttctgcagtttctcatgagaatggccatgggaagtcattggatactaagttgcacaagcctggtggtctgccttcgcccgtactgcttaacagcaccactgtggatgatcatagtgaccatttgaagcaaggttccccgccagatggtatggttgctagatcaccttatgttaaatgggatgaaaagactgcaattatcatgtctacaagttctatctactgtgacgatgttgttatggatgaggttgaagatgcagaacctacttgtattagctctgtgcagaaagaaactgaccataaggtaatggatacattgcaccagcaagatgccttacttaaaaagacaaaatcactgttagtgccatcagtcttgaaccaccatgatgacattccaggagaagccgacaactacatggatgcacttaatacacttgaatctgagacagaaacagaatctgaatttcaaactaaaaatcgggtgccagcaccttccttcaaagctgaagcccctcaagtgggggcaattgacaatattgttccacagtgtcttgattcctctgctgctgactttattgacacatgtcaagaatctgatattatttgtacttctgaaagagcaattgattttcccagtttgtcaaatgcagattctcttgaggtttcacaactagaactttcagattatacgtctgtaagcccctataaagagtcatctgtcatcactaatatccacgagagtggtgcagagggtgctcgtggagatccttgtgagattatagagcctctgcaggtccattcagccatacttgccaatgatggttcccctgtttgcaatgaaataccaaagagtaagccagatgatgatcttgggtattttcaagagattcctcaaccaggtttctccacctgtatggttattccatcaaacaaagagtctgctgttgccaacaaaaaccttgaaggtgacgcaaaaagtgatgatgatcttattgatggtaccgctgataatgttgtatcgggacctaagattgccaacatggtagttgatgaggtgggtttcaagatggcacctgctaatagaagttcacctggtgacccctctgatgactcatgtgtcattcctgaaagtaggcctcaggattatgctgtaaagagctatgagggagttggtgattgtggtgtgactgaagtgtctaagttatgtagtgagcctcttaacaaaccatcagataatatatgtgcaactcaagatgttcctacaaatacctctactatgtctgctggtgccagtgaagtgtctagttcgtggagtgagcctgttaccgaactaatcgatgacagatgtgcaactcaaggtgttccagcaaatgcctctaccacgtctactgttgtaccatctgttaaactctggacaaatgctgggctctttggacttgaaccatccaaacctccagtatttggtaatggtccaagggaggatactccacctggttttaaagaagctcaaccagtccattcaactgaattcacagaagtgcactgttcaaagccaactgaatcagcagctgtagatgtcccaaatggaaacacatccattaccagcagctttgtggaaaagcttgttggtattcgtcctggttctgcaaacctcaatagctcaggggcaaatcaatcagcagccagaatacctgatccaattcatagtcatacagatgggcactcagatttttcgtcatcctttgagcacaataacatgactggcaaacatacttcaataagcgaacttctagaatttgaggggagtgctgatactggcaccaaaatatactcaactgacatgagaaataacgctgtgtctgcatcaagcttttcaagcattgcacaaaggtttcttgctaatacacttcagagaagaacttccaaatatactgatcttcctatgtcttctgagagggcaaatgctgatacaagtgcaaaatctgaatctactctaaatcctgttgtagaaccaagtgaagcggtatttgcagaggaaactaagtttgagaacaaaacagaaaatggaatggatggattgtccaaaacatcaatattttctagccgccattactctgagaaatcgtctccgccacttgagtacatgaaaatatcttttcaccctatgagcgcatttgagatgtcaaagctgaacctagatttctgtgatggaaatattcatgaaatttctgatgatatgatgttaccgacatttcagttactttcagagtcttccattccacagccaggcagtggttctgagtctgaagatgacacctttggtaggtcatatagttattcttcatatgatgatctgagtccccggctatattcaaactctgaggcatgggatcaagatgatggaactggactggaggaacatgagttatatgatgattcaaatcagataggatcctcaacagcacctttatctagctacatgggattcgagcagatgaacttatctgacatgaagtcagatatttcacttgcaaacattggggatcagaatgtaataggcactttacaatcctgtactgttgaagaacttccaaactttgatacattgatgtccagaagtgatgatcaaaatggtgaaacccccattccacataatctggggaatatgacaccagatgaagatcagttgccaccaccacctcctctccccccaatgcagtggaggatgacaagacaaacaacttcactagaagaggaaacttgcattacaactaaagatatgcttagaaaaacttctagcctaccacatatacacacctctgcccaggaagaacactgtcctccaactgcaccattggatctacaagggcatgctggggaagtgggtgtccagaaaactggtggggtacgagaaattactaatcctcctagtatcatcgatataaaatcaagtttgcttcagcagatcagggataagtcagagcagctgaagcttaatggacatgaaaggtcaaaaaaagcagtaggcggtgacattaaaagcttagacgaaagggaggagttgcttcagcaaatcaggagcaagaccttcaatttaagacgcacaaacgcatctaaggcagatggctcatcacaatctacagccagttccaacgttgcagcaattttggagaaagccaacgctatccggcaggctgtggccagtgatgagggtggcgatgatgatacatggagtgatatatga

SEQ ID NO: 24776 - DNA, 579 bp, Zea mays
  Peptide Sequence Number=SeqID_66555
atgccgacggcttcctctgcccaccgctcactcctcctctgcctctgcctggctctgctctccaacccggtcgccgcctcgccctcgccccgcggcctccgcttctccgccaaggacatcgcggcggtggaggccgcgctgccgcgacacggcagcagggcgtcgtcgtcgtccaagaccaccttcttcgaggtcgaccgcccgctccgcccgcccaggggcagctcggggccctgctccacgctgctgctctcgcactccttcgcgttcacgctcaccaagccgcccgtcaccgcggcctactcgccgccgccgtgcctgtccggctccgacgcgccgccggtctcgctcgccgtgctcgagtggcgcgccgagtgccgcggcgcgcagtacgaccgcaccttcggcgtgtggctcggcggcgccgagctcctgcgcggcagcaccgcggagccgcgccccggcgggggtggtctgaacgacaccgacgtgcagtccgcgcgcgtgtcggtgccgcgcaacgcgtaccgcgccgtcctcgaggtctacgtctcgtcccacgacgccgacgatttctga

SEQ ID NO: 24777 - DNA, 126 bp, Zea mays
  Peptide Sequence Number=SeqID_66556
atggccggcgtgatgcaccctggcggttctgcgcgcgagtgggaaatgatccgccaggccgcagccatgcatagagacgacgatgatgaagacctgattcctgattacccgacacacacctcatga

SEQ ID NO: 24778 - DNA, 192 bp, Zea mays
  Peptide Sequence Number=SeqID_66557
atggaggattgccgcgccgccgtgacccagtgcggaattgggagaaggcctcctggccgttggattggtttggggcgtctagaattagatcgggatggcgaactcctgttatatagtaaagatgtgacattcgatcctgtgccactatgcatgtggtggaactggccgaattattccaacttaagtgcctaa

SEQ ID NO: 24779 - DNA, 363 bp, Zea mays
  Peptide Sequence Number=SeqID_66558
atggagttgagtaaaaagacctcaaagtggctctatcagtcagttagaaaggggtattcagtgggaatggacgaattctacggtggagtgaaaagatcatgggggagggtgaaccaggggtctgggcaggctcatctgtcgtgcccacttgcccacatgagagaccgaagagaacaaccggctgccactcgccatctccgctttgctgacggctcaatcttggggaaggcgcttagagaatcaccgatagaccgtggaagtgtgttcaagaatcatcgcgcctggggtgtcctctcgttgtctgaaactctcgtcgaagcagggcttgtgccgtcgtccgcctcgcaccatgggtgggggtaa

SEQ ID NO: 24780 - DNA, 649 bp, Zea mays
  Peptide Sequence Number=SeqID_66559
caacgcccgccatgccgtagagcgccgctgcccgcctgcgcgtgccgcccgcccgtgcgcgcaccgccagcccgcccgccgctgcgctgctcgcccgccgagccgccgcgctgcccgccactccgagtcgccgagccctcctaccaccactccgccgtcgtcgtcgagccgccacgtcaagagtctgacagagggacagcgccgcctgcgccactccgactgcagcaccactcgacagagtgagtctaaccggcagtcaggtcttgacaaaggcgccacggcgaactccgctccgcccgaccccagggctcggactcgggctaagacccggaagacggcgaactccgctccgcccgaccccagggctcggactcgggctaagacccggaagacggcgaactccgctccgcccgaccccagggctcgggctcgggctaagacccggaagacagcgaactccgctccgcccgaccccagggctcggactcgggctaagacccggaagacggcgaactccgctccgcccgaccccagggctcggactcgggctaagacccggaagacggcgaactccgctccgcccgaccccagggctcggactcgggctaagacccggaagacgacgaaactccgcctcgcccgaccctag

SEQ ID NO: 24781 - DNA, 231 bp, Zea mays
  Peptide Sequence Number=SeqID_66560
atggcagagacgcagggacgccttgggttgactgtggtggagctccgactgcacagggagaactccggtgagtgcggactaggcgaaccagaggggttgggggcgaatcgaggggtgtccggggctactgacgacgaggcggaactcaccgaggcagcggacacggcgggggctcaacggcaaccgcagaacggacatgagaccaccgcgagcggaggcagaacttcctag

SEQ ID NO: 24782 - DNA, 4701 bp, Zea mays
  Peptide Sequence Number=SeqID_66561
atgggactgagcctccaaagtccagactgctatactttcggggactcgcgagccttccagagtccagaaagaaacgaatggatgcaaaaaaacaccatccacaaccgctgccaaacgcttcgtctctcttatttctctgtatccgctagccgctaccagaggcttccactctgccttccgccgcgtgctcttatttctctgtatccgctagccgctaccagaggcttccagacggcgaataaatcagccggctcgcgactgcaaaagctgagtaaccacgccgccgcccccagtttggccgtggccgtctccgtggccgcgcatccatcctggttctggctccccgctccaccgctgcgaccttcgagtctcgctgtcttcgcgactgaaatccttttctttggtctggaaaaaggaagggcttcattaagttctacatatctggccagggagaaaacctgcttcatcaaggtttggaagccttatctttggtttggaaaaaggaagggcttcattaacttctacatatctggccagggagaaaacctgcttcatcaagaaaatccttatctttggtttggaaaaaggaagggcttcattaacttctacatatctggtcagggaaaaaacctgcttcatcaagtatccaagaatgccacacttgcacgccaaaatcgaaagcgggcacttgaacaaaaacgtttgctaaccagaggacctaaacatagcattaacacacccatgaccagtgtttatttctcttcggaatatataaatgcccttaaagataggtcccatcttggaacaccagactatgaatgccaacattgccatgctttattttggcatgcggaacgcaattccagtaatagatatggaattgtccaatattataattgttgcaagggtggaaagctatcaattccttcttacacacctagacctgagccattagcatcattgtctaagttccacggtgattcaatatcaaaaagatttatgagaagcatacgccagtacaattgtttatttgcttttacatccatgggtgcacaaatcgataatactatgaatgatggtcgtggtcctccacttttcaaaatatgtggccaggttcatcaccgaattggttctcttttaccaagtgatggctcatctccaaaatatttacaactttacatatatgatactgcaaatgaagtgcaaaacagattaaaatgtctcaattcaaacaatatgaccactgaagttcttgatccttcgattatagaggaactcataaaaatgctagatgaatgcaatccatttgctaaaacatttagaatggccagggatcgtatggctgaatatggtgacgaaaatttcattattagaataataggtgcaaaagaaggtgactcggttcaatacaatctaccaacaactgatgaacttgcattgttagttgttagggatttctctttggatacatttaagcgagatatcatcattgaaacacatagccgagaattaaaacgtatttcctctttgcacccggcatatatggcattgcaatatccccttttattcccttttggtgaacgagggtttcaagttggtgttctatataatggagtaaatctggctaacaaaccaaaacgttgccacatgactatgcaagaatattattgctaccaatttcactatagaagaaatcagccaaacccctttttatgctatggattgctatcaagccaagcaaaggttgatgtgcgcccagctattgatgaatctcgccttcaatatattgttcaaaatcaaacaaaacttagaatggaaagtattcaaggaatatctgatgctgttagtcgtggctgtataaacggtgaagaaatgggaaaaagagtaattcttccagcttcacatgtcggaggacgacaatatatgcttcaaaattatcatgatggcttagctatttgtaaattatatggacctcctaatttttttgtcactttcacgtgtaatccaaattggatagaaatcactaaaagccttgagcctggacaggctcctaccgatagatcagacgtcattgtacgagttttcaatttaaaactcaatgaattattacaagacattagatctggatctatatttgggctatttgttgcagaaattccagacccagaaattgatccattaggatatatcttggttgcagaacatatgatacatggtccttgcggggattataataaaaatgcaccttgcatgaaagatggaagatgtaccaaaaaattcccaaaaaatttccaagaagaaactaccattgatggaaatgggtttgttctctatagacgaagaaatactggtcgatatgtcacgaaatcaggcatcagacttgataataaatatgttgtaccttcaaatttattgttgctaaaaaaatacatgggacatataaatgttgaatggtgtaacaagactattttcatcaagtatctttttaaatatgtcaccaaaggcccagatcgaagcaaagtttttcttcaacgtgttcaaaacggtgaagatacaccctataatgatgagacagaaacaagagatgaagttaaagaatatcttgatagtagatatatttgtgataaagattcatgctggcgcgtatttggatatgacatacacagacattatccatctgttgaaagaatgcctgttcacctacccaatgagaattacatcacatatagtgctggagctaacatggtcgatgtactttcacaaacataccttcgaagaactatgttaactgaatggtttgccacaaatttgcaaaattctgatgctaggaacctcacttatcctgatttcccaacaaaatggaggtgggatgacaaaagtagatcttggcttcctagaaaaagtcgagagaaaaggataggacgtttgtattatgtccatccattggctggtgataggtactaccttagaatgttgttattaatagtcaaaggagcctttagctatgaatgtctacgaacttataacaacattgtctactcttcatttaaagaagcatgcaaagcacgtggacttcttgatgatgacaaagaatggttaagtgcctttgatgaagcagcttcttgggcaagtcccaaccagctgcgacaactatttgtcactttgcttctttattgccaggtcagcaatgagtatgaattctttcaaaaagtctggaggcttctagctgatgatatagagtataactttcgcaaggcacttaattgtcctaattaccaaatgccagataatgaactaaaggaacatttgctagataaattaacaactttatttaacaagagtggtggtaatatagaggatttcaatctaccacaacgatttagtggagcacagacttggacaccaaatcgtctaattgaagaagaaatgccaaataatattgataaccttttggatgaatctgaattcctcatttcccagctcaatattcagcaaaggaatgtttttgatacaattgttcagactatcttttccaacaaatctggtttctactttgtttctggatacggaagcacaggaaaaacctttctatggaatgctatagttagtcatctaagagcaagagagaaaattgttttaacagtggcttcatctggggttgcctcgcttttgcttccaggaggatgcactgcacattcacgttttaaaattccatgtgaactacacgaaaccatcacctgcaacattaaacgaggaacaatgctagccgagttaatcaaatcaacttcattgattatttgggatgaagctttaatgactcatagatttgcttttgaggctttggacaaaactttccgtgaccttctagctccacattttgaacaagctaaaaaaacaccttttggtggaaaggtagtagttcttggaggtgatgcacgacaaatattgcctgttatagaaggtggcacacgctcccaaattattgatgcaactgtctctaactcttatttatggggttctgttactgttataagtctgactcaaaacatgaggctcctctcaagtagcacatctattgaaacaaaaaaggaaattgctgaattcagtaaatggttgcttgatattggtgaaggaaatgtaccagcaacaaaaagaaatgctgaaactgaaagttcctggatacagttgcccaaagatattttattacttcctcaaactggtaatatagaatgtattgtcgactcaacatatccagatttgcagcaaagatatacagatattgaatatcttaaggaaagagctatactaagcactacaaatgaaactgttgatgctctaaatgaatttattgtctcttctattcctggaaatacacatgaatatttcagttgtgataaaattggaaagaccccatacagccatgaatcctatgacctattatatcccattgagttcttaaattcaattaatggcaataactttccacaacatcgattatgtctgaaaaaaggtattcctatcatgctattacgaaatatgaaccagagtgaaggtctttgcaatggaacaagattaatgataacctccctaggaaacatgattgtagaagccgaaataatggttggtcaacacaaaggaaaaaattattattccatgtgttactctctgcttaaagactcaaagactgccattcatccttga

SEQ ID NO: 24783 - DNA, 249 bp, Zea mays
  Peptide Sequence Number=SeqID_66562
atgagggtggaatactttggatacttttatgatgatgcgtccactgcaccgcacgatgacagaacagttgagccacctggagaggctacagtgccacttgcacgaggagcaggaacaccgatgctaggagctggagcagcaggactcttccccctcgccacaataggaggtggagtctgggaggcagccctcccctgtgcctcagctagaggtgccccctacaccaccataggccaccctggctgctag

SEQ ID NO: 24784 - DNA, 402 bp, Zea mays
  Peptide Sequence Number=SeqID_66563
atggctgctgctcccagcctgcggtccaccgatcttgcgcttccggtcttccatatcctggcgcttcctctcagtcattatggctctatcaatcaaatgttgaaaggaattcttccttccttactatcatcaaaccttcaggcacatggtaccggtggagttgtctctgaactcctcccaggtgatagcttcaaggtcggcgtgggtggtgaggttgaggctgctgcacctattgcatggctgctagagtctggccaatcgcttggactgcctgagtttgcatcagaaacatctgctctattttcattgggggtgggggtggcaactcgtgctggggtgcctcatcctagggtgcatgttgctcttgctaggcacgccttccacctcgacgcctgttgttag

SEQ ID NO: 24785 - DNA, 408 bp, Zea mays
  Peptide Sequence Number=SeqID_66564
atggaccatgtgtgtcggtcgaaggcccgacacaacaaaggtgtcgagattgtcgtggaaatgacaaccacaagcggcgtcatgagtgatgggttgggcgatccatcccttcgactcctactccttcaaaagccccgtgttatggctcaaactgtcaccgtcgtcgtcgtctctgtcaggggggcacctctagctgaggcacaggggagggctgcctcccagactccacctcctattgtggcgagggggaagagtcctgctgctccagctcctagcatcggtgttcctgctcctcgtgcaagtggcactgtagcctctccaggtggctcaactgttctgtcatcgtgcggtgcagtggacgctgtgcaagacgagagggcaagaaagggatcaccgacttatgtgtag

SEQ ID NO: 24786 - DNA, 654 bp, Zea mays
  Peptide Sequence Number=SeqID_66565
atgcagcaccttgagccctcgtggggaacgccttccgacaaggtttctactggccgaccgcggtggccgacgccactagtcaccatcgacaaattctccaagtggatcaaggtccgacccctaaccagcatcaggtccgagcaggcggtggcgttcttcacaaacatcatacatcgctttggggtcccgaactccatcatcaccgacaatggcacgcagttcactgggaagaagttcctggacttctgtaaggaccaccacatccgtgtggactgggccgccgtagctcaccccatgacgaatgggcaggtggagcgtgccaacggtacgattttgcagggacttaaatcgaggatctacaacgacctcaacaagtttggcaagcggtggatgaaagagctaccctcggtggtcaggagtctaaggacggcgccaagccgagccacaggtttctcgccgttctttctagtctatggggccgaggccgtcctacccacagacttagaatacggttccccgaggacaaaggcgtacgacgaccgaagcaaccagaccagccgagaggattcactagaccagctcgaagaggctcgggacgtggccttactacactcggtgcggtatcagcagtctctgcgacgctaccactcctga

SEQ ID NO: 24787 - DNA, 213 bp, Zea mays
  Peptide Sequence Number=SeqID_66566
atggggcgagctcggccatggcaagagcagggaagggggtgcgcgtctgggtgtaggagagttggggaggggcgctgcgtagaagaggtcagccagaggtggaagaagggcgtcgagcacagggggctttggacgccatggctgctggaggcgcctcctccaagggagctcggccatggaagcagctcggcagagagattctttgcgccatga

SEQ ID NO: 24788 - DNA, 222 bp, Zea mays
  Peptide Sequence Number=SeqID_66567
atggtgtgcgccctgtccgccagacccacgcccacgtctgcacgccctgcccacgtcgcccgaacactaggtaaagccgcgcacaccccttcacctcgcccctacctcactttcgtgtttcccccaccctcgcactcacctagctgcgaagctgtttccccctcgtcgttgcttcactattccaccgtcaccgctggacttatgccagcgctttggccatag

SEQ ID NO: 24789 - DNA, 379 bp, Zea mays
  Peptide Sequence Number=SeqID_66568
gccattgaacagaccccgcccttggattcggtggaaaaaaactattatgcctgccgatgctgaagataccaccagagctgaagtcaataatcttgctaccacaatgtcgaaaattgacatacttatatcagatgtggttcttgagatagacgtagccgaagcgtctcctgataagggaaagagaattgaaaagacctcttcggaagataagaatttcgaccataggcacctaggtggccaacaactctccgaagaggatatagcggcattgtggagtttgccatatcctgcggctaccagcccggatccaagctctttggcagcatccacgaagagattttgggatgcactcgtgaccgtgccggagctaaaatcataa

SEQ ID NO: 24790 - DNA, 3378 bp, Zea mays
  Peptide Sequence Number=SeqID_66569
atgaagattctttctgttactggaaccagttataatgactctggcatcacactgatcaggagaaagtttgctgtaactggccctgagattttgaacaatgcttggagtttgccaaagctgcatgatgaaaagatttctaaaaaacagaacagcaaatgggctggcatttccccttcttcaacacatgatcttgtggagacaggatctagtacgcgccaggagctcctaaagagcactgaggtcttatttcatgttcaactttcttgtgtctcagtacaaattagtaaaaaggattgcgagttactaaataagttgctagatcatgtcattgaggggatatcaaatcaacaaacaagcatttctggaaattccaaggaccaatctgttctgatcaatgatatctgcattcaaacatctgtcctttttgaatgcagtatcttggaaatttgcactgaattgaatgaaacagtggaagttggtcctttattacagtcagaactaaaaggatcctggaactctctgaagttgaaagtttcaaaattttctcttttctcctgttcaaatgttggaggcatcagcagtgccagttttctttgggtgaatcatggtgaaggtgagctttggggttctgttagtgctaagaatgataaagtctctggagaaagtaaagattttcttatagtcgcttgcaaggactctgcctgcaggcggggtgacggtgaaggtactaatgcgctgtctattggcgctgctggctgttcggtgacccacatcaggaacccaaagctaaaagagaactacacttatgttgatgttcgttctggtacaattgtagcacctggtggccgtatggattggatcaatgtgatatgcctgctgttcagttcaggttcaaatggaactgaaaagtcagttgataataacacagtaaatagctaccaattgaatgatccttattcgtcatctttgtttctcgagttctctgatgttgctgttagctatgaacctcattttaaaaatttcactcttagtgctgcaccaactgaccccaagtttttctcatgccttttagctgcatcatcatttaaactccataataaatctgcatcagcctctgcagctgctgattttgatatccagttacgtgatcttggaatcctcatttctcaatcatctggctcaacaaatgccacctgcagttacagtgtaggttaccttcatcaagcaggttatactaaggttgcccagaatacattcattgaagcttctctaagattagattctaccttttggaagcttgaaatatttgattcccaatttgatattggtacatgtcatgacacgacttatggtcttattggtttgggatcccaactccagcagctatatggtccagatatgcaagatgctttagatcatctacagtctaggtggaatagtgttcagcaggcaaacaggcaaaatatggctgctgatgaatcagacacgtctgagagcagtttggagattttggcggattctgggaattatcagtcggatggactgcttgatgatattattgagaatgctttttacacagaggactgcatggacaaccatttttgggagagaaattgccatcacctatttaataacagtgaaatggatgatggatttgagctgaatgcagccacttcttcacacgaatttcttagatctattccggaaggcaatgttactcagatatcactagaacggaatgcctggcctgatcaaatcgactcatattatatgcctgaatttcatcaatcattatcaactctatgtgatgaagagcataaatgtacgtttggtgacaattctcatagaaccctggaaagtgaagatgctggatggtataaaaatgttcccttaacaatagttgagaatcatgttttgaaacaggaaaacaagcaagtacttcaacacgaagtggcttctgtttgcagtttgaatcctgatgaatatagtaatctgaaaggaaagattcatattcatgatatagatgtaaagtggcggatgtatgctggagatgagtggttattacttcagaaagattctactagcttaacattcacagatggaaaagataggagctcttcactggaatttaccttgagagggctcagtatccaagttgacatgtatccagatggggatgtttctatatccaagctatccatagctgctgaggacttaactctgtgtgatcaaagtatccatgctccgtggaaactggttcttggatgttacaactcaaaggattatccaagagagtcgtggtccagtgctttcaggttagaactggagtctgtgaggcctgagccacaggctcctttggaagactacaggctccatctcgaaattttgcctctacagttgcatcttgatcaagagcaacttaacttcctaatcaatttcttcaagaatgattcatgtaacaatgaccctcattcgcattgcgaaaatgagactgtcgacgtgaagaacacaagcaatggaagcaatacagttgtggatgaggcattacttcctttctttcagaaatttgatgtaaagccgcttgttctgcacattaattatataccccgtcagtttgatccaattgcactaggcaaaggaaattatgcagaacttctcaacattcttccatggaagggaattgatttgaagcttaagcatgtttctgcaatgggcgtttacggatggagcagcataggtgatacagtagctgcggaatggttggaagacatttctaaaaatcaggtgcacaaattgctaaaagggcttgctccaataagatcactagctgctgttggttcaggcaccagaaagttggtctctttgcccatcaaaagctacaagaaggatcggaaattgctcaagggagtgcaaagaggcacagttgcttttattagaagtgttagcattgaagcagtaggtcttggagtccatttggctgcaggagctcatgatatacttatgaagacagaacatgctcttacaactgttccaccacctttagcctcatgtgaagcgaaacgaacaaaacacaacattagagctaaccaacctgaaagtgcacaacaaggaatgaaacaggcatatgaaagtttgactgttggttttggaaggacagcctctgctctcattggcaaccctattaaagtttataaccgaggggcgggtgttggatcagttctagctactgcaatctgtggagcaccagctgctgcagtagctccagtctcggcatctgctcgcgctttacattatgcacttcttgggctaaggaacagccttgatcctgagcacaagaaagaatccatgtacaaataccagggaccctctcaagcatag

SEQ ID NO: 24791 - DNA, 354 bp, Zea mays
  Peptide Sequence Number=SeqID_66570
atgggattaaggatgagtacgaggatccccacggggataaaatcctcgctcgagttgggtacaggaaaaaacctcccatgtggctcttcgagggggcagggaatccccgccccctcgtggggacgtgtttgggggatcaaaccccaatgggtaattcctcgtagccatctctacatgtcacacgaaggagagaagatgttttacactcatccaatggagccagcacagatcaacgcacctaaaggaatgaaggcgaaattcattgtttacctccctagagcattgcacgacatcccctcgatctatgaccaacaaccaacatacatattggagggaattaagtgcaagttgtaa

SEQ ID NO: 24792 - DNA, 450 bp, Zea mays
  Peptide Sequence Number=SeqID_66571
atgcaggtacgcctcgggtcgacggtggtggagcttcggctgcactgggagaactccgagcgagagagagggcgagagtgctcggctgagggcgcaaatgagcaggggaagtgggcgagcggggtgcgcgctctaaaggggcaagggcgtgcggaggtggccggggattgcgcgtccacggcgggggcggggcgtgggcgggaggttagtgacggggggtggctgataggcggggtccgcggggcagagagagggaacgagcgcgaacgtgcggtcaacgctgacaggaaggtcccacgggacaacgagagaaagaacgcgcgggtgcggacggttcggcgccgacaggtttggcccactgggcagcgggagagagagggagggaaagagaacgcgcgtgcacggacgcaggcggtcgctggcagggttttcaattcaaattcaaactaa

SEQ ID NO: 24793 - DNA, 345 bp, Zea mays
  Peptide Sequence Number=SeqID_66572
atgggttcgaaaaccttgagtacggagtgtactttcacaagtcttacccgtcaaaataaaaagactctcaaggatatgctggcttttgggaatcaaggtcttgaatacaattttccttcatgggactccagggaaatagggttttgggagtcagaagtgcaattcatagggcagaaattctctaatcttggcagaaaaagaaaaaggaaaagaaactggcccaagccggcccagctaaggcagaatgcgcccgtgtgccaactttgcaaagaagaccccgaccttttaaaaagttcgaaagagtccgcgacactatttgtttcagtcgctgacgtttgcaaataa

SEQ ID NO: 24794 - DNA, 726 bp, Zea mays
  Peptide Sequence Number=SeqID_66573
atgcctgcacaacttctggctatattgcaagctttttcctcactacagagatctgatgaggagattgcgttgttagagtcgtatgcttcagttaagtcgaatatggttttgggtcaacagaaaaaccaatcaaggaaaagacgtttttcacgttctagtgatgataccgacaattcagatctaccatgtcctcaatgccatttagccttgtctaaatgcttcttgaaaagccttgttcatctttcctttttcattcaactgaacgacaagaatattgcaggcttggggtgtgataaagcgttttgtggggcttattggtattcgcaaggtgtgagttcaagtcattgcaatctgatctgcaaccaggatactttgaagagtattacagaaagatgtatacagcaatcaggcaaaacattgcaagttgtaatctcagagtggatatcaaaatttgacaacatggaaattgatcgttcaaggttgcaattgaataatgtggatgcaattacttccaggacatatatctgcaaccattgctacagcaagtttgttgatttcctgctctactggttccgtgtatcattgccccaaaatcttcttccacgtgatgctgcggagagggagagctgctggtacggtttcatgtgccgcacccagcaccatcggcctgaccacgccaagaagctgaaccacgtgtgtcgcccgacaagaggcaaccagccctag

SEQ ID NO: 24795 - DNA, 675 bp, Zea mays
  Peptide Sequence Number=SeqID_66574
atggacccaagtccccaaaggcgcaggatagagcacctaaggttccgaatagtggcggacgacgcgtccccggcattccgcctgatctcgcaccacgcgacctcctccccgccgcagggcggcgcaacgagggagcagaccacggagtcgtcttcggccacctccaccgtcgggcacgcggaatcggcgggcactgccaatgaatgggacaaccaaacaagagaagagaatcaagaagccgtgcagatgaaggaacccgtggagaaccgagaaggggtgggggcagctgccctacccagcctagcccatacgcgccgtggcccgtggggcccgcttgggacgtcgtggttcccaaccatttccatgggcccccagatagatatagttgcacaaactctgcttcaggaaaaaaagaaatggtacctagcacctccagaccttattgttgcaaaaacgaataacctattggcacaacaattatccagttcaactatttgttgccctcaagtatcaaccatcagaactggaattcgttccacttccctcctgcttagatcccagatggggataacaagtaaagctcttacatacctggcagtccgagaagaaattaactggccaccaggtagctttgctaataggcattccaagccattcgtgtccattgctccatga

SEQ ID NO: 24796 - DNA, 306 bp, Zea mays
  Peptide Sequence Number=SeqID_66575
atggacgaacggatctcgacgtgtcagaccaccggcggccatcatcgtcctccgcgtacaccgtcgggctcgtgcggcgtcttctggcttgggggcaggatcatcgcgggggaagagggcggtcgaaatcagggtagtcaagttctcgatccatttgcgggctgcgcaattgagtccgtgggcgcagatgcagcgattgggcgcgccggtggtgttgaacgcccctaccgggtgctcgctaggccgcggcgtgactcaaggaaggagacgcttcttagaccggtgatctggaaatggtcggtgtag

SEQ ID NO: 24797 - DNA, 1782 bp, Zea mays
  Peptide Sequence Number=SeqID_66576
atggcgtggatggtccgggtggttgaagaagacggtggagctgaccagcgggtccccgagcgcagcgagaccgagtcccacgcgacgcgagcaacccggctgaccagtctaggccatggcggtgatgacatggccacgggcagccccgacacgggcatgggcgggcagtccgcgccgaacctgctgtcgtggaccaccaggttcgacgctcgccgcggcggcgagccgcagaacagcggcggctacggggacgacgacgacaggccgctctcgtcgccctggaaagagcgttccgatagggacacatccgtgccggcgtcggagaagccgccgctctggtggcaccgcagcggcgccgcggggcaccgcggcttggggcagaagagcgggctcttggcgtcggcggctgcgaccaggccacaaaattgttttgggctcgcctcagtcaggctcccggactgggccaggcaaccaaacatatccatactggtcgagggctcgaggccacgccactacgccggccccaacggcccaagccaagcggtccaggccacgggctcgtcggtcgtcgcctcgcgggtctcaactgcgctgcctccggccctccgggtgatcacgtcgcgacgccgcaaccaagcttccgagtcccgacgacgacctgccttgtccagtgggctcgagagtgcggtgctccaattcgatcccaggggctccatacagatacagtgccccttggaggaagatggatgtagtttacggtgtgatctatgcgacactgagattgtacacagcatggcagaactcctgcttcgtggattggccacagcttcagtggacagcaccacgggcgatatattcaagagcgcatcttctgtagctgctgctgtgaagactgagctagaaaattatatgcttgtgagaactgaatcgcttatccgtgagtttgtcgatggagcccaggatcattcagatcaattgatgaaagcctccacaaggccaaccgagttcctatcagacttgattggcgacttcgtggcatccaaaaggaacttgctgagccatgtgtctgggtttttgtccagtgaaagccgcttgaacagaattaaagattttatgcagaagatggagatggagaatgtgtggacactggacgtaaggcaggctacctcagagactattcttgaaagcatagacatgaagtgcattttccactgccccgaaaaatttgttgagcaagacaagctggtagaccatagaagtcggtgcaaatttagagtcgtgggctgcgaaaatgatggatgctcagtttcactttctgccattcatagtgaggagcatgactccatctgtccatttaaggccctgccatgtgagcagctgtgcgagcaacatgttatgcgcagcgagatggataaacattgtgcaacagtttgtgctatgaagcttattaactgtcctttctaccatgttggatgtgaaacagcctttccacaaggtaatcttgagaaccactgttcgaagctacttcaaacgcatatgttgtatgttctccaagcaagtacaagacaaaatgctgctgttaatgatatgaatcaacgattacaacttcttgagaaggctcagtcacttaacgaaatctctggggctttagatgttaggtcgctcactctgataataaaggagcaagaagcaaagatcaaggatcttgagagcggtatcaaagcacaagaagcaaaggtgaagaaacttgagaacgagcttaggtcgaagaatgcacgataa

SEQ ID NO: 24798 - DNA, 1449 bp, Zea mays
  Peptide Sequence Number=SeqID_66577
atgggcccgtgcttgccgtgggcgctgggcctcctcctgccgtcgctctgggaggccaaggtcgccttctccgccacggcgctgctcatcgccgcgctcatcctcttcctcctgacaacggaccagcacgccaagtccacggccaccggcggcaacaggccagcctcgtccgcgcgttcatctgcaaccgcagcctaccaccgagtcgcgggccgccgccggacccgcgcgaggggcgaggcggcttctgatgatatcacttgcgctcagggcggcggcggctacgtcgtcaagctggagctgctctcggccaagtacctgatcggcgccaacttggacggcagctccgatcctttcgccgtcatctcctgcgccgaccagaagcgcttcagttccatggtgcccagccagagaaaccctctgtggggggaggacttcaatttcctggtcgaacaactcccggtagaggtaaccataacaatatatgactgggacactgtgtgcaaatgcaaagttattggatctgtaactatagttgttctcactgagaacgaatcgggggctagttggtacgaactggacagcaaatttggtcagatctgcctgcgtcttcgttcaactaaagcatttccagattctgatagctcctttgaagaatgcaatggagctgagtccccgagaaagatgatactgaataagcaacgtcaagcgatgattgaaggcattggccctctgcaaatcatatataaacttcctcatgatgaaattgttcaccaaagttactcctgtgctctggacaggtgtttcttgctccatggccgtatgtacatctcccaatggcatctgtgcttccactctaacgtattctccaaacaattgaatgtgattattccattgcaagacatagacgagataaaaagaagccagcattctcttatcaacccagcaattactatttttcttaatgctggtgcaggtggacatggaacacctcgtgcatgcagtcaaaatggaaggatcaggtataccttcgcatcattctggagtagaaatcgtacatttagagctctagaggctgcactacaaagttatgaagcaaccttggaagctgaaaaacagaagttcttccctggtacacctgagaagtttttcagtacaatattaggtgacagttcaatgtttttccagcaatatagggacgcaagaaaagatacaaatttgaagctaagcaggtggtgtgcctcagaagagtatggtggcaagatctatgagacaaagcaccaggcacatgatgttccttttggttcttacttcgaggtggtcgctaagaacaacctccaattcaacatgtcaagtgtaaacatgaagaaatggtgcatattgcaatccagaataaaatctggagcaactgatgaggtatgcaatgacacctgtgatacagtttcctag

SEQ ID NO: 24799 - DNA, 366 bp, Zea mays
  Peptide Sequence Number=SeqID_66578
atgacaattgaccaaatgtcacggaacggtactgctgaacaattagcagcgaccaacgagacaccgtcagcgggacacagatcagagtgcgtgcgtgggcgctcatatcactctgagcagcagatgcaagccagcgtggctttggtcagccgcatccacgtcgccaaaagcgggctgaacctgggtggaagctggaaacgattggattcgatcaaagcgttgtacggctcttttatattctctctttctcctccatttacaactagccagccttccgagaccaagatggtatcatctggagcttacatgaggcattatattctaaagcggcaacctttgatgcaatgcctagtcattctaagctag

SEQ ID NO: 24800 - DNA, 306 bp, Zea mays
  Peptide Sequence Number=SeqID_66579
atggacgaacggatctcgacgtgtcagaccaccggcggccatcatcgtcctccgcgtacaccgtcgggctcgtgcggcgtcttctggcttgggggcaggatcatcgcgggggaagagggcggtcgaaatcagggtagtcaagttctcgatccatttgcgggctgcgcaattgagtccgtgggcgcagatgcagcgatcgggcgcgccggcggtgttgaacgcccctaccgggtgctcgctaggccgcggcgtgactcaaggaaggagacgcttcttagaccggtgatctggaaatggtcggtgtag

SEQ ID NO: 24801 - DNA, 1164 bp, Zea mays
  Peptide Sequence Number=SeqID_66580
atggctaggcctcgtcggctaaaaatcactggacagtctgggcagagcgtcgaacagtccgatgtgataggcgaccaatggctagtggtgccacgttggcagagtcaactatcggatgggtcaccaaacagtccggtgcccacccgagaagaaaagtggccaatcaacgattttgtgaccattgcacaggagctatctggcgacggcggcggcggcggcgctcaggctcgggctcgggctctcagcgacggcgtcagcggcttcccctcccgcctctcgctagtcgactcgcgccctcgcatccgttcctccgcacaccggccggtgaccctgcgtgcgtgcctctttctctcttcccgcctccggtgtatcgacaacggcgcccggtcccggtggcggcgccgcgcgcggcctgagggcggtgggagccagcagccgctgctccaccaaggcggtcgcgccgctttgggagcgcttatgccccaaagcgaagcgttacccgacctcttagcgcttcaacgcgctgaagcggctggcagccggtgggtggtggtgctcgtttgtgctgtatcgaagcttgtgcaggtcaatgtttacaagtcgggcgaccagctggtcgagttggtgaacgttaatgttgctttgttccagcctttgatggaatctttgaagaaagctgtggctgatgcaaaaaagccccgttccatacaagacttactgaaggagcaggtggctaaactgagagaacaagcgtctggtggaggcagagggaatgggaatcgccgtggaggcagtggtggttctggtggcccagatgatgaatcgttcaaggaaacattggatgaagtagtgcaagttatcttagccactgttgctttcatacttgtgtacatccacataatcagaggggaggagctttaccgtcttgccagggactacaccagatatctcgtcaccggtaagaggactgcccgactgaagcgtgccatgcaaaggtggcgcaacttctcggagagcttcatgcagaaggcaggctcagaagacgaccaatatgagagaccagctgtgtcaaaacctgcatggtggcaacagcctcagaaatttgtgcattttgtggaggacctttgcaggggaaactggcgtccccatgctcaggagtcttag

SEQ ID NO: 24802 - DNA, 195 bp, Zea mays
  Peptide Sequence Number=SeqID_66581
atggccacaagaatcctcgaaaaaagtttggaccatccactgcgatggcgcaagcatgtcgaccgcaacaagaacgaagaggccgacgcgctggctaaagcagcggccaagggcgaggccctgccctttgacgtgttctaccacgtcatcggcacgccagccgtccgcaaccccgaaggcctgcaaataacctag

SEQ ID NO: 24803 - DNA, 426 bp, Zea mays
  Peptide Sequence Number=SeqID_66582
atggcgacgcactgccctaccacgacatgggttgtttggagatggtcatgtacgagcggtggttcatgttctagaagcggcggcaacatcctacacctgagagcggccgagtcatcccgaacccgcacggcacacgcggacgcgctcacgcgcctgggctggggatttatgcttctgacggaaatatttggtgcggaggataagcatgtaattagcagaccaacaacatttgcacttgtccatgctgatggcactacaaaattcctgggtaaggccttaaagttcatcaaagattatgttcatggatgggatctcgattttgctctatggaaatgtgtggtggtacacacttcaaaacatagttacaacattgaagagaatcgtgactacaatgagtggaactgcactatcactatagatctatag

SEQ ID NO: 24804 - DNA, 636 bp, Zea mays
  Peptide Sequence Number=SeqID_66583
atgccagcctatttcaggttcctcgcgctgctcgcattcaagatattttctgctgagcaggtagatgttgctattctcgaggttggcctaggagggaagttcgatgcaactaatgtggttaaagcacctgtagtttgtggcatatcttcccttggatatgatcatatggaaattcttggtgaccaaatcctgttcttggtgataaacttggtgtcgataaacgggttgttagttctcgtgaatgtcctgttgtctcgaaatacaaagcttctgttcgcacctaatcgcctaaaatggaaatgtttgactcattgtttaattcggggggaagctgaaggtggtctgatccgggacgatgttagcgaaagtcaatttaatcaggctggtctccccgagaacaaggaattgctagaatcccttaaggtcttgttcgtttgtaccggattgatggaacgattctgggtgcaatccgatagaaacgaacaaggcctaactcggaacaaaaagacagtggatgttacgtttatgaagaatgctccttttattttcttgcaaggaaacaagtttaaccgcttaaaaaggctggaagagaatgttccctgcttcgtcggcttctcggtcgggacgcgtaactga

SEQ ID NO: 24805 - DNA, 291 bp, Zea mays
  Peptide Sequence Number=SeqID_66584
atgtggggcccgcacggtcgtgataccatccgggagaggtcggaccgggcgttggagcagatggcaaatgatgaagaagtcgacgacttcggaggcctagaaagctcggtgacccgggcggaagctgtgaggacagaggctggggagcaaccggctccactaaccagcccttgcgaggaccctgcggcgcccgctgtcctggttggcgaagaccctccagcgatggctgcatcggctgccgaagaccctgctgcgccgaccgctccttcgcaggtggcgggatcgtgttag

SEQ ID NO: 24806 - DNA, 810 bp, Zea mays
  Peptide Sequence Number=SeqID_66585
atgtcttcttcttcgtctgctgcgagtgcgtcgttggtcgcgtcgtcgtccgaggataccttgagcgatttggcggtgatggaattgcagcctggccatatcgtagagttcagtacctcgaggatttcctcggtccacatgctggagatgcagcggcttgggtactttggtgacggcgtcgggtgggttccgggtgcagaggagatttccgagcctgaaggtgagttggttgtttttgaggcgttttttgtcgtcggccttcgcctttcggcgcatcgcttcgtggcggaggtgctgcgaaggttcgaagtgcaggtggcagaggattacaaggacgaaggggcccttcgatatgctgcccgcttgagtagcgggcgtgatttggttgaggaatttattggctatggagtgtggcccttggcgcacggctgggtactgggcgaaaacctggccacatttgtgcgcaaggtggaggccgaggccgtgaagattgtgggaagatatgtgccgaggatggagactctgaggagttggtatatctgtggttcgaatattcggttgaaccgtgtttttaagttgaaccatttgtcgtatgccggctacccatgggacaccaccgccgatgttgctactgtccgccaggggaaaacggtggtgacgacggtcgacgaaggcccttcgtggggagcagcgccgagcacggctgctaagaagaggaaattaggtacaacgatttattggagacatgcgcggttcccgaggagacgatgtctttgcccgagctccgggaatcttctgcgtgaatgctga

SEQ ID NO: 24807 - DNA, 318 bp, Zea mays
  Peptide Sequence Number=SeqID_66586
atggcatgcagaggagcagcgtggctggggcagggtgcactcgtgaggagaccggcacggctgggcaagcagaggatagggactggcttcatcgggcaatggtggctcgccggacagatcacacggcctggccggctacgggccgccgcgctggggaactcatcggggcgcagggacaggggcggctcggccgcgcccaggctgcaggggagctgccgaggcacgggagggggcatcgaggcgagagtagagctcgacggggagcacagcagctgttcgaccatggcgctgggaggagatatctacggactcgggtga

SEQ ID NO: 24808 - DNA, 246 bp, Zea mays
  Peptide Sequence Number=SeqID_66587
atgtgggaagaggcggtggccggtgaaaaggtcgtggcacgctggttggccaagccaggttgcagaggaggcacaatccgtggtagggcgccacagtcagacgtcttcgatcctcctggccaatggactggtcaatggggcatccctccacccatcctcctcgctttggctcaaggctgggatcaacaggctctagcagccaacttccagaccacaacacttaaacagcctccacaacaagagtag

SEQ ID NO: 24809 - DNA, 3192 bp, Zea mays
  Peptide Sequence Number=SeqID_66588
atgcagataaggatcatagatgttctgcttcataaaatttactgtacgaaagaacattttttggagagatcaagggttcttattagaaaggcaggtgcacttcgtgcatctggagtggaaaacataaaaaactgccttgagtctctacgtgatgccatatctttactgttggccattgcgtactgtttgtatgcgcagtgtgctcaggaagacaaacttggtggggaggtaatatttgatagcgctgagaaagcacttaacttgtggttggacatggaggcttttgaccattcttcttctgatatggtcttgcaacagccatcaaaaactattgtaccacttatttgtttcctggttgatttgttgtctatgaagggctgttttgagcttcagtttaagttgtgcaaggttatgataatgatatggaagcaagaaaaattacccattgagaagttgttgtccttgctgttcaccagtgggcgccttagtcatgcatgctgttatctcccactggatgagcgatttctttctattgccaaagagcatcttggtagaacgctgcctagtgccttatttattcctcaatcatgtaagcatccctttggaaggcagttcagtttcgtcacgagtgttgatgaagtcagcaaagttgcctcatctctggtatctggagatacttcaaatgagcaatctacctttctagctggatgtttatactatgacttgtcagaaaaagttttttcacgcggacaacttttccaggccttttcatatggaaacaaagccctccatttgcgcaaaaagctcctaaaaaagaagttcaaaatcaattcgggcatatctggaaatatggaaagacaacactgtgggcaggacatctctcttgaagtgtgtggccctacaatagttgagatttggccaaattccagcagttcagtcaacactaaagattttttccttaccccatggaatgtccttaggtgctatcttgagagcactttacaggttgctatgatgcacgaattgattggcaatggtgctgaagctgaagttctcttacagacaggaaaagagatatcaaatttccatggtttatcagttttctgtattgtatttacatcatttctaggtcaactatattgtaagcggcagctatgggatgaagcggaggatgtttgcatggtaatacaagttcgaaggaaaaactcagggaatgctgaagctggtccacctttagatgcaaaagcaaggaggtcatcaagaaattcatcacgtttagctaagggacagaatgtagagactcttgcaaagactagaactcgctctagtaaacgaaatgcatgtatgaaaagtgagaaggttttaactgagctaaatagtaaaaataacgtaactgggagtaaggaattggctgcagatgcttctgtttgtggtgaagcagagtgttttcctgatggcattgatcacagcaaagacgacctatgcaatatgtttggttgctggagctgccttttcattaaatccctcaattcggggtgcattcagaatattttgcagctgagattggactatgttcaccgacactaccttgtgtcacttcttttaaaaaaagctagagccttgggatctcatagcaatggggactgtgaagttcatagtgtctattggaagtgcatatcactgctgttcttcaggtcccttccacaagattgctgtaggacttatgggccttatttaattggactaatcatggataggagcattggtgattttcttcctttagagtgtgcagaaatactattcaatatgagcttcttcttgctaaaaagccccctttctgaacagtcaagggacatctgctgtatcttctctagtgtaacaatggcagacgttgtcccctggttgctcaaagcttttgttctatccagagagagcccctcacttgttcaggaggtttgcaagttacttgcatgcatattcttgctatcaactacagattcctcaattcaactgcctttgggttctcataaagaatctctttctttgaatcactgggccacatacttccatcaagtttctgtgggaactaatctcaattgtcattactttgctagcttacaagcatcgtccgaggaaaaggttccaaaggacacctataaagatttcagaaatgagacagatgacaatgtctcgaaatttctcaggttgtcatcaagggacatcaaatatattgagaaacatatgacagaattcttccaaaaacttcctgatgtaccagttctgtgcattagtatgcttggagaaatgcaatttgaagattcctgcaccaaagatttgggcaatccaacgagagttttagataagtggcaatgcccttggggctatggaattactgactatgtagccccagtttttagaaatatactcgaggagaattttatgtccctctccagcgcaacccttactattgatgatgtaaatgcagatcgtgtcaggtggtggtcccatagaatgaagctcaacaattaccttgctaacacattgaaagacattgaagattcttggtttggaccctggaaatgccttctgttgggccatcaattatctgatgaacacattgagactgcctcatcaatgattatcactggtctggatacagaattcgaatttgaagtcaatccaatgctcatcaaggctatccttggtggtgctgtgtcagtggatgaagtacaagaatgttttctccaactcattttgtataaaggttactttggaaggggaggatgctgtgggaaagatagacttaaagctttctcttcctgccaaatggatgatggatctatggagacactcaaacgtataataacggatgcatcatatgagttgcctcagccagctgatagagatccagttattttagttcttgatgtcaatgttcagatgcttccttgggagaacctgcctgtactaaggaatcaagaaatttatcgcatgccgtcaatgggtagcatctttttagcattatctcgaaccaataatgattacaaagatcacagttctccttttcctgtcatcgatcctttcaatacatattatctgttgaatcctagcggtgatctgagtagcacacaagaagaatttgttcagttattcagaaactatgagtggaagactataaattgccaaatttag

SEQ ID NO: 24810 - DNA, 408 bp, Zea mays
  Peptide Sequence Number=SeqID_66589
atggccgtgatgggttcaacatcggaaaagatgtacctcggccagacatgttcgtctcacgtgctcgacgcacgtgagacgtacccgtctggaattgtccctattatggacatcctcggagtgatcaacgtggcgcgaatttatgacaagccagtaggattcgaaaggaatttcaggggcataacttcattgttctccactacaccatatttagcgtgcagctggagcaacgagggatcgtgggttatgggccacaacacgctaccactggtgataccaacaccggtaggagcttctggagggaagggagctactacaaaagagactccaaaccagacagacaacttcgtaaacaacttcttcgcttttagaggtagtggttacaactcaaacgaccccgatatatga

SEQ ID NO: 24811 - DNA, 222 bp, Zea mays
  Peptide Sequence Number=SeqID_66590
atggtggtggcggtggaagctgaggccaggaagcttgtgaatggcttgccgaagcaacagaagctgcaggatgattgcccacatactctgggcctcagtgacgatttcattgggcaccgtgggcgcttgtgccctcagacgcaagaaccttcagacatatgcctgaaggacttcaccatgactgcggtattgcccccgtacgaagatataattgcttcatag

SEQ ID NO: 24812 - DNA, 2436 bp, Zea mays
  Peptide Sequence Number=SeqID_66591
atgcgggacttcatgaccgcatgtgactactgcctctccgactgttccgacggaagtcgcagccttgacgacgaggactgcggcccaagccgcgaatgtttccacgtcgagctaggggatccctccgaaggcaaccatcttggcatgccggaggacggtgattttcctaggccggtgcctcgcgccgacatcccgcgggagctagctgtggtccccgttccggcggggggtcacgacccacagctcgagcaagtccgcggggcgcaggccaggctcgacgagggaacaggggcgcttgagacgatccgccgggacatcgggcaggtatgggcgggccaacccccggccggagaaatacgtcacctgccccaaggtctccagcaccgcgtcgccaacgatgtcaggctcaggccgccgcccgcatccagcggggttggtcagaacctggcagccgcagcgatgctcctccgcacgatgctggagccatcaaccaccgagggtcggcgaatccagggagagctcaagaatctcctggaaggcgctacggcccgacgggccgagagcactgcctcccgaaggcagggatacccctcggagcctcacgccgcgacttcccgatttatgcgggaatcctcggtctacaccgggcccacgcgcaacaccgcgcctgcggccccgggccacctcggcaacgagcaccatcgacacgaccgtcgggcccacctcgacgaaagggccttcagtcgggccatccgacgggcgccgttcccgacccggttccgacccccgaccactatcacaaagtactcgggggaaacgaggccggaactgtggctcgcggactaccgcctggcctgccaactgggtggaacggacgacgacaacctcatcatccgcaaccttcccctgttcctctccgacactgctcgcgcctggttggagcacctgcctccgaggcagatctccaactgggacgacttggtccaagccttcgccggcaatttccagggcacgtacgtgcgtcccggaaattcctgggaccttcggagctgccggcaacagccgggagagtcgctccgggactacatccggcgattctcgaagcagcgcaccgagctgcccaacatcaccgactcggatgtcatcggcgagttccttgccggcaccacctgccgcgacctggtgagtaagttgggtcgcaagacccccaccagggcgagcgagctgatggacatcgccaccaaattcgcctctggccaggaggcggttgaggctatcttccgaaaggacaggcagccccagggccgcccatcggaagaggctcccgaggcgtctactccgcgcggcgccaagaagaagggcaagaagaagtcgcaatcgaaacgcgacgccgctgacgcggaccttgtcgccgccgccgagtacaagaaccctcgaaagccccccggaggtgctaacctcttcgacaagatgctcaaggagccgtgcccctaccatcaggggcccgttaagcacactctcgaggagtgcgtcatgcttcggcgccacttccacagggccgggccacccgcggagggtggcagggcccacgacgacgacaagaaagaagatcaccaagcaggagagttccccgaggtccgcgactgcttcatgatctacggtgggcatgcggcgaatacctcggctcggcatcgcaagcaagagcgccgggaggtctgctcggtgaaggtggcggcgccagtctacctagactggtccgacaagcccatcaccttcgaccaggctgaccaccctgaccatgtgccgagcccggggaaatacccgctcgtcgtcgaccccatcgtcggcaacgtcaggctcaccaaggtcctgatggatgggggcagctgcctcaacatcatctacgccgagaccctcaagctcctgcgcgtcgatatgtcctccgtccgagcaggcgctgcgcccttccacgggatcatccctgggaagcgcgtccagcccctcggacgactcgacctccccgtctgcttcggaacgccctccaacttccgaagggagaccttgacgttcgaggtggtcgggttccgaggaacctaccacgcggtactgggaaggccatgctacgcgaagttcatggccgtccccaactacacctacctgaagctcaagatgccgggccccaacggggtcatcaccgtcggccccacttacaaacacgcgttcgaatgcgacgtggagtgcgtggagtacgccgaggccctcgccgagtccgaggccctcatcgccgacctagagaacctctccaaagaggtgccagacgtgaagcgtcatgccggcaacttcgagccagcggagacggttaaggccgtccctctcgacccctgtggcgacacctccaagcagatccggatcggttccgggctcgaccccaaatag

SEQ ID NO: 24813 - DNA, 1620 bp, Zea mays
  Peptide Sequence Number=SeqID_66592
atgggttgtaatagaccttcttgctcagccttggtaggtgatgctggaccagttcttgacatgatgtctgtgatgctagagaacatatcacacactcctcttattgctatagcaactacttctgctgtttatcgcacagctcaaataattgcttcaataccaaatttgtcatataagaacaaggtatttccagaagcactttttcatcaattgctgttagcgatggttcaccctgatcatgaaacacgtgttggtgcacaccgcatattttctgttgtccttgtcccatcttctgtttctccttttcccaatttgaaatccctagatcagtgtagaaagcatgatgtccagaggacactctcgagggttgtatctgtcttctcatcttcagctgctttatttgataagctgagaagggacagaaactcctttagagaatatttacatgaaggaagcatgaacagaattttgcatggtattgatgatgaaattgctacccctaatgacttgccaggctcgcaaagcttgagacaaagcctcagactttcttcagtgtctcacaaacattcttatacttctttaaaggaaggtcaaagtcccttgacagagtcaatcaacgaaatggaaacaattgtgttaagactaagcagccagcaggccactcttctgctctcatctatttggcgtcaagcactttctccaaaaaatgctcctcaaaactacgaagctattgctcatacatatagtttgcttctattgtttttgggatcaaagacaccaatttttgaggttcttgctcccagctttcagattgcattttctttaatgagccattcacttggaggaacagattcattgccaccatctcgccgccggtcattatttactctggctacatctatgattgtttttgcctcaagagctttcaatgtggcacctcttctcccaatttgtaaattaatgctcaatgatggaacggctgtgaaggactatacggaagatccatcaacatcctatggctcacccgaggacaatcagaatgccttgaaatctctttcagtggtggaactaacaaatagttgctcccgagaatccatgattttaaccattatgaactccataagagatttaccagacgtaattttcgatccattcttcttggagttagagaatataaggagtcaactgctgcgtgatttctcccctgatgacgtgtgcccaagtagcgctcactttcttgaatcacctggcaagattgcaccgccatgttctgatgatgacaccgactacgactatcaagaggtcgtgaatgatgtgtcatctcagaccggagggcaatgtttggtgtcaatggccggagacatcccattccaggagatgactagccactgtgaggccttttcgatgggaaagcaccacaagatgtccctgctcatgagcttcaagcaaaacaagcaagcggccatggtcgtcgtgcctgacaatcagagcacaaacccgttcctcctgcagagcatcagtgccggcgaggcacaggttgctggcgacgtccagcagccgttcctgaggctgccaccgtcgagcccctacgacaacttcctcaaggctgctggctgctga

SEQ ID NO: 24814 - DNA, 3843 bp, Zea mays
  Peptide Sequence Number=SeqID_66593
atggactcgatcgacgcagatctcgcgcgcacgcaagaggagcggcgcaggatggaggaggcgctggcggctggcgcgcccatggccgtgtcctccgtcaccttcgacaccgacctctacggcggcgggggcgccgaccccaaccgcttcgcgggctacgacacctccatcccggcctccgaggacgacgccgcggaggacgacgcggaggccgccaaccctgcgccgcgccgcctcgcggcctacacgggccacgccatcgccgccgccgacatcccgcggtcggccgacgacgacgacgggctgcccaagaggtcccagcgcatcatcgaccgcgaggacgactaccgccgccgccgcctcaaccagatcatctcgccggagcgccatgacccgttcgccgctggggaggccaccccggacccctcggtgcggacctacgctgacgtcatgcgcgacgcggcgctgcagaagaagaaggaggacctgctgagggagattgccaagaagaagaaggaagaggaagagaaggagaaggagaggaaggctgccgctcctgagcagcctgccgccacaacaaagcggcgcaacaggtgggatcagtcgcaggacggcgacgctggtgccggtgccaagaaggtgaagacatcctcggactgggatgcccctgatgcgactcctgggattggccgttgggatgccacccccggacgtgttggagacgccacaccctccgtgagaaggaacagatgggatgagacaccgactccagggaggatggccgatgctgatgctacgcctgcagctggcggtgccacccctggggctactccttctggggcttgggacgcgactccaaagctgcctggtggtgtcacgccaacccctggtaagaagcagagatcaaggtgggatgagacaccagcaagtatggggagtgcaacccctggtagtcttggtgctgcaacacctgctggttatactcctggtccaacgccatttggtgcagagaaccttgccacaccaactcctagccagattgctcgtggaccgatcactccggagcagtaccagctcatgcggtgggagcgggacattgaggagaggaacaggcctctcactgacgaggagcttgatgccatgttcccgcaggagggctacaagattcttgagcccccggcttcctaccagcccatcaggaccccggcaaggaagctccttgcgacaccgacacctctggggacaccactttatgctattccagaggagaatcgtgggcagcattttgatgtgcccaaggagctgcctggtgggttgccactcatgaagcccgaggattaccagtactttggaactttgctgaacgaggaagaggaggagcagctatcgccagaggagcagaaggagaggaaaatcatgaaactgttactcaaagtgaagaatggcacacccccacagcgtaaaacagcacttcggcaactgacagacaaagcccgtgaatttggtgcaggaccgttgttcaacaaaatactgcccttactcatgcagccaacactggaggaccaggagaggcatcttttggtgaaggtcattgacagagtactttataagctcgatgagctggtccgtccttttgtgcacaagattcttgtggttattgaaccactgttgattgatgaggactattatgctcgtgttgaaggcagggagatcatctcaaaccttagcaaagcagctgggcttgctactatgattgctgctatgcgacccgacatcgataacattgatgagtatgtgagaaacaccactgctagggcgttcagtgtggtggcttctgctttgggtatccctgcccttttaccattcttgaaggctgtctgtcagagtaagaagtcttggcaggctaggcacactggtatcaaaatcgtccaacagattgctattctcatgggctgtgctgttttgccacacctcaagtcactagttgagatcattgagcatgggctgagcgatgaaaaccagaaagttcgtacaattactgccctttctcttgctgcacttgctgaggctgctgcaccatatggtatagaaagttttgatactgtattgaaacctctgtggaagggtatcagatctcaccgtgggaaggtccttgctgccttcctaaaggccattggtttcatcatccctcttatggatgctctgtatgctagctactacacaaaggaggtgatgcaggtcctcattagggagttccagtctccagatgaagaaatgaagaaaattgttctcaaggtggtgaaacagtgtgtcagtacagagggtgtggaggctgattatatccggaatgacatccttccagatttcttcaagcacttctgggtgaggagaatggctctagatcgcaggaactataagcagcttgtggaaactacagttgagatggcaaacaaggttggagttgctgatattgttgggagggttgttgaggatctgaaagatgaaagtgagccctacagaagaatggtgatggaaacaatcgagaaggtggtagccaacttgggtgcatcagatattgatgctcgtctggaggagctgcttattgatggtatcttgtatgctttccaagagcagactagtgatgacgcaaatgttatgctaaatggttttggagctgtggttaatgcacttggacagagagttaagccctaccttcctcagatttgtggtactatcaagtggcgattgaacaacaagagtgcaaaagttaggcagcaagctgctgatctgatctccaggatagccatagtaatgaagcagtgccaggaggagcagcttatgggtcacttgggtgttgtgctgtatgagtacttaggagaggagtatcctgaggtgcttggttcaattcttggagccttgaaggctatcgtcaatgtcattggtatgactaaaatgactccaccaatcaaggatcttcttcctcgtctgacccccattcttaagaacaggcatgagaaggtccaagagaactgcattgatcttgttggtaggattgctgatcgtggagcagaatttgtgccagcaagggaatggatgaggatttgttttgagctgctcgaaatgttgaaggctcataagaagggtattaggagagcaactgtgaacacatttggttatatcgcaaaggctatagggccacaggatgtgttggccaccctgttgaataacttgaaggtgcaagaacgacagaaccgggtctgtacaactgtagctattgctatagttgctgaaacttgctcacctttcacagttttacctgcccttatgaatgagtaccgggtcccagagctcaatgtccaaaatggtgttctgaagtcactctctttcctctttgagtatattggtgagatgggcaaagattacatatatgccgtcacccccttacttgaagatgctttaatggatagagatctggttcaccggcagactgctgcatctgctgttaagcacatggctctaggtgttgctggcttgggttgtgaggatgctcttgttcatctgcttaactatgtttggcccaacatatttgagacatctccccacgttataaatgctgtcatggaggcaattgaggggatgagggtcgcactaggtgcggctgtgattttaaattattgcctgcaaggtctcttccatccagcaaggaaagtacgagaagtgtattggaagatatacaactctttgtacatcggcgcgcaggatgcacttgttgcttcttatcctgccctggaagacgatggggataacatctttagtcgtccagagttggcaatgtttgtctga

SEQ ID NO: 24815 - DNA, 1566 bp, Zea mays
  Peptide Sequence Number=SeqID_66594
atggccgcccccgccgcccggagaatagttggcgctgaggttcccatacccggctcggacaagctgcggtggatcgacctcaccatcccctcgtcctccgccgctgcgccggcgagcccctccgatcccttcgtctgcgtgcccccgcgtgctgcctcggggtgccacatcatcccttcgggcgattctcagtattacctctcgtggaggattcacgaggaacacccaaatgtgctggaggtcattgaacttagtccctccaaggagttccctagctttggactgcgtcttgccttccaggaggcgctatctccattcgcctttctatgtgaacgagagggtcgcaggcaaggggagcttgtatatatgctatatgtgcttaccgtttctggagttgctcttttgtgccacctacgcagcccattttcctacgtatctggttcagtgctgcatcaggatgatatagctgagtttaatctccaaactcaagctcagagcgcaaaggttacagcggtaacagcgaagccaggatgtttctcgaatgaactacgagatgatgctgggattggacgtttatggactctcatgtcaagaacaaagactgtgggtcctgtgcaggacatagtagcaactgttgtaaatgaaagggacctgttatttgttcttcatttggatggacacttgcgcatatgggataatcacatgaaacttctcaactataatgtccactcaaatgacattgaaggccatccgtccaggctatgggttggtaaggctgatgatgatcaggagttgatatctttggcgattctgcatcaaaacactgtggttcaaggttgtgattatgttgctgtatatggcttcggtttttctgctgcggaaaggttcatgttctcttctgaaccttcaatttctactatacctttgctagaggggaagcttgcggacttgaaaatagccacatataagctttggatacttaaagaatttggctccatgctctatgaaatattacagtatgacattgacaccgaaactgcaaaatgttgtagtgagaaggtttgctgttatgtgctacaagaagatgctatcagtgaacagttgtttcaaagttctgacaatgcattggatgatttggtttggacagctgattcaatgttctcctccttgaaggaacaggcttttactttgatttcatccatgtttctgcggaggctacttcaaccaggagtaaaccactgttctgccctacgtgaaaccttactagagcataaaaggttcctatcagattctgagttccagtcacttacagcaaatgggctacgaaaagagatattatctattatagaacaagagggaagttcacagacagcaagtgctacagcttatcactggaaacaattctctgcacggtacctccacaattggtgctggcacaataagccctatggattgtttcttgatactacaaatgaagtgtttggtttagtaagaaagggttcattttctctattccgttgtttggagggtctggagatgcttatttatggtgtgattctttcttag

SEQ ID NO: 24816 - DNA, 1959 bp, Zea mays
  Peptide Sequence Number=SeqID_66595
atggcgggcggcgaccgggagcgagacgcggacgaggagacgaggaatcagatgatgcagaaccttttcggggaccagtcggaggacgaggacgatgcggacgacgacgacgtcgccgagatggtcgatgaggacgacggccaccagccgcagtcgcccccgcagtcgcccccgcagcgccaccaggagctggacgacgatgcctacgacgatgaggaggaggacgcccgcagccacgcgcccgcccgcgcaagcggataccactccgaggaagtggatggtgaggcagagaatggaggggaaggggaaggcgaaagtgaagggcaagttgtaatcgaagaggaaagtgaaggtgaagctcatggtgccgatcttgatcaaggagaaagtgatggggacaaagtccagagctccccagaaagagaactcgatgaccagaggatggaacctgatgcaagaggaatggacagtgaagatgaaggctaccagcagaggacagtatctggcagaagaaggggagttattgcctccgaatcggagggatctgaagatagttactatgctgctggagctcaagaagacgaggaacctcgccaaacaaggaaacaaagctctccgttggaggaagaaagagatcatgaagtagttcgtgatgtgtttggtgatagcgatgaagatgaaccagctccatatcgtgttcgccatgaaatcgatgaagattctcataggtctcacatggaggatgaaggccattatgagaaggacatgcaaccagatgacgttgtggctgacgaagatatgcgatatgaatctgatgataatcgtgaactgaaaccaaaagagaaaccagtcggtccaccactagacttggtggttccatttaagcaaccaccagctcgacctgacaaaatgaatgtgatcaaggtatcaaacattatggggattgaccctaaaccctttgatccaaaaacatatgtggaagaagatgtttttgttacagatgaatctgggactaagaaaaggatacggctagaggacaatattgtgcggtggagaaccattaggaatgcagatggcactacatcttgtgaaagcaatgcacgctttgtaaaatggaaggatgggactatgcagcttctgattggcaatgaggttcttgatatatctgtacatgaggcgcatcatgaccagtcccatctgtttttgaggcatgggaagaataagaaaactgttaagatgcaaaaatggtttgagactaaggatcctgagaaagcgaaaatggaaaaagaaaggctgcttgaactaagatccctagttcaggttttgggccaaaatattcgagcccattcaatccttcaacgcaaaagagaaaaagtgaaccgcaagtacacacagcctgcccgtccaaggcggcagctttctccagggttcttggaagacgctctagatgaggatgatgagcctggctatgattctcggcgaatgccaggccgtaggcgttttgaggatgaattggaggctgaagcactagctgagaggcgtatcattaacgcgaagaagtcaaatatgagcagaaatgttccccacaaaccaccgtaccctcctgcccgtccaccgagacgtcaagcggatgaatactcggggagtgagagggaggagtcagagtacgaaacggatggcgaggatattgaacattcactgcctcgtggaagaagggaggacgagctggatgaggaggaagaatacgaggaagatgttgaagaagaagaagcgcctctgtcggatgaagaaatggaggcaccgaaacgtaagagagaatcagggggtggtgggcaaaggcgcgaggagctggtgtctgaggaggacgacgaggaccacgacgattctccgccaaggaagcagccggctgtttcgcatcgtagaaaggctgtcgtgtttgatgacagcgacgaggactaa

SEQ ID NO: 24817 - DNA, 399 bp, Zea mays
  Peptide Sequence Number=SeqID_66596
atgggggcagcccgcatttttgctacttttgtggtttttactcatttgggtgaggtggcacatgacgcgggtcacgacccttatctgaatgcgggtgctgcaggaaaacagcgctattcaccccgttctgactattgtgccaaccaccagggtaaaactgacgacagcaggtctcgacctcccccgagttcagcctcgggcgcaacaatgagctccgcctcgcccgaccccaggcctcggcctcagcctcggccttggaagaaggtctccgcctcggcctcgggaggagtcacgacctcgcccgacctcagcctcggcctcaggagaagtctccgcctcgcccgaccccggcctcggaccgactacgctataggagatacatcattaccctaccactag

SEQ ID NO: 24818 - DNA, 1143 bp, Zea mays
  Peptide Sequence Number=SeqID_66597
atggctaccaacacagaatctggattcataaaaaacttatttgagggaggctgcacgaggttcgaggggccctgccagaatgcatgcttgggcgcttgcattggcgatcgatctctccgcctcctcggctcccggtcccgccgcttgagcttctcagctgccttccgcctgcgcttattaatttatggcttcgttcgctcaattacttcgccgctcttcatattccaacagccgagcaggatgacagggcacgaggtcgacgacgaacccgaggcgcgcgcacggatggagcgccggcaagtgctcactgctaccgccgccgctgccgaggccggtacgctgctgggcaagagtgtggccgccgatgcacgcttgtcctgcccggccagctccacggcagtggaagcaggcgagagcagcggtgtcgtcgttcaggccaagggctcagcaacagggcttccatcgccactcaccaaacagatgaagaagaagctgcttatcctggaccttaatggcctgctcgccgacatcaaccaagacaggcacaacgctcacctgtcacatggaacgatccgaggcaaactagtcttcaagaggccctactgcgacgatttcctgaggttctgcatgcaccacttcgagctggggatatggtcatcaaggctcagagcgaacgtcgacgcggctgtcgacatcctcatggaagacgacgtgaagcaacgcctgctgttttgctgggacttgtctaaatgcaccggcactggcttctacacccttgagaacaagaccaagccgctggtgttgaaggagctgaagaagctgtgggatgaccttccatggcgccagcaaggggagttctcgccctccaacactctcctcctcgacgattcaccctacaaagctctacgcaatccgccgcacaccgccattttcccttgcccctatagctacaaggacgacaaggacgacgcactgggacctggtggagatcttcgcttgtacctggagagccttgccaccactgcagacgatgtccagcgttacgtcagggaccaccctttcggtcagccacccatcacggaggctcacaagcactgggaattctacaggcggatactacgtactactactcaagtagaatga

SEQ ID NO: 24819 - DNA, 1215 bp, Zea mays
  Peptide Sequence Number=SeqID_66598
atggcaccgaagcgcccggccgccgcctcggggtcggcgtccgaggcatccgacgcggaggcggacgcgggccaccaccagccatcatccccgtctccgtccaagacgccgccgccgcccaaccctaaccctaagtccaccgccgctggccccacctcggcggcggaggactccaccgcggctggatccggctccgaggccgcctacgactctgacgcggaccaccgcaccgcgccccgtaacgcggcgtcgccctcgagcaagcccaggagcaccaggccgcgctcgcgctcccgctcccgctccccggacgccgcctcgtattccgacggcgtggcctcagacgctgacgccgacccagccgccgtagacggcgccgactccgccgacgacggcaacgcctcgccgctcgcgcccccgcgcccgtcccgcgccgaggccgccgccgtcaagcccatcagctcgcgcccaatggatccgccgcgccgctccatggtgccctctttctcggagcagcgctcgaagcgcccccgcagcgtcgccgtcccgtcatccgtggagcacctcaagaggccgacgcggctctggagcctccacgacgagatcgtcatcctgcgggggcttggccacctcggtgacaaggtacggcgtctcaagcagaagtacaacctgcttgcgtcacgtggcaagagcgggcgggatccagacttgcccagccagcacgaacagagcgtctatgagattggcaagaaggtttggggaggaagtgctaacggtggaggaagtaccggtggtgatgggtacgagattggtggtgacagcgaagaggagcatgagtttcgagagagtgacgaggatgtggagaatggccgagatgaacgtgcccgcaagaacaggagggttatgccaatcgccatggcaaacggcaacggggctgggttgggggctgtgaaagccaatagcagagggaagtttgatactgagaagggaaaggatgcttacccctacctttgggagactgtggaggatctgtcaaaggagcacccgaacggggtagcattcaagaaggccttcgagtcgatcgaaggccccaaagcgcgtgggatggaggaaaaactgcgaaagttcaggttgacagagatcagacaccagctgcgccgtatggaactgatgaaggagacggtgaagatggtgctcgatgcgctggagggttga

SEQ ID NO: 24820 - DNA, 153 bp, Zea mays
  Peptide Sequence Number=SeqID_66599
atgaggcttgtttggtttgtggctaactgtgccccactttgcctaagatggggagggactgggttactgggggtgtatcgctggttcggtactccaaccccaggaattagcttctcccaatcagcaatcgatgcagcaaatcgttgcctatga

SEQ ID NO: 24821 - DNA, 1450 bp, Zea mays
  Peptide Sequence Number=SeqID_66600
atggatcagttgatcgtcattggtagcgccacgatgatcaccaccctctcgcaaagcagccacaacctcttcaatctgcagcatagctctctgtatgtgcccatgtacgaacagccgtcttccatgcagctcctcctcttgcgattcagctgcttccgagcaggctcaaccaagacgacgctacaatgcccttcgccatcctcgccgccgctagtggacacgccggagacggagtccgacgcagggctgcctggagcgcctcgcctggtcctcgcgcccgcggaagtagcagagcccgaggtcgacggggactcgcgccgagaccgcgagcgcttcccgcgcgccactgccggccaggcacaggtcccgcgtgtcgtcgccgcccctgccctccacctggacaccgtcacaggcgagctcgtgctcgtgcaagcctccccgtcgcccgcgaccatggcttctggtgcagctcgagctgctgcccgcccgacatgtgggctaacgcacgccatgacaagcttggcggtacaagctgatgacggcggcgagagtgaaggggcaagggccagggccgcaagccgctccggcaaagtcaaacctctagcacattcagacatggcacacgaattagccaccaccatcccctcctccttctcaattcccatcactggaaaacttattcgcacgaactatatgttgtggcgtgcccaaatcatgctgtcgatccgagcggcgcaactagagggcgtcctcaccggtgcagacccagaaccaccgaccaccatcaccaacaagcccggcgacaccttgtcgaccgtaccaaatcccgagtacgctcgttggattgcgcgcgaccaagctgttttggggtacctcctgtcttcgttgacgcgtgaggttcttacaaacgtcgcaacgctctcatcttcggccgaggtctggagcacgctggtcgcgacatacgcgtcccacacacgtgctcgctccgtcaacatgcgcatagcgttggcaaccacgaagaaaggcgctgccacaacgacgaaattctacaccaagatgaaaggatatgtagatgacatgagcactgctggacagcctctcaatgatgaagattttgtatcctatctcctcactggccttgatgaagaatgttataatcctttggtttcttccattcttggtcgcgttgaacctattacgccttctgaattactctcacaaatgttgagctatgaacttcgcacgaactggcaatctggaggcacctatcagtcatctgtaaattcggcctctcggggtcggggtactccttggaaccgaaatggcaacaagggtccacagtgccaagtttgcttcaaaaccggagacatagcaaacatatgctggtaccgatttgatgaggactatgttcctgattcacgcctcgcggcgtctgcaacatactctcaag

SEQ ID NO: 24822 - DNA, 558 bp, Zea mays
  Peptide Sequence Number=SeqID_66601
atggcgaagggcattgtagcgtcgtctgcagcagcatgcgccaagggatccactaaaatagtgcacgtccccgctccccggcgtcctctaaggctatccgcaaccgttacaaaagctaagttagacgtgagatcaaaagaagcctctgaggacccagatgcaatagagcttatgtgtcccctatgccgtggcgaggtcaagggatataccttggttgagcctgctcggaagcagctgaatcgcaagaggaggagctgcatggaagacggctgttcgtacatgggcacatacagagagctctgcaagcatgtccaaaagaagcaccctactgcaaacccacgagctgtggaccccttgcatgcttacagatggaagcggcttctatttcgaagttcattgcatgatatgatttgttcaactacttcagaggctatgcgaaggttttgttctcacatgctgcagattgaagaggttgtggctgctttgcgagagggtggtgatcatcgtggcgctaccaatgacgatcaactgatccatgatctcttgacctctcgctga

SEQ ID NO: 24823 - DNA, 432 bp, Zea mays
  Peptide Sequence Number=SeqID_66602
atggccctcggcttctctagctgccggtgcttgccctctgcttgggccacgccctcccttgctcggatcccaggccgcgcgctccattcccgagctccctctaccctacccctgccgcccctctccgtggacgccgcccatggaaggtcgccggctgctctgcttccccatggcggctgcttggcctcagctccttgccgcgccctactctgcgcgtctccggtcctagctcgccgcgccggagctcccgtcaccgcgcgcaccttcttctctggtggccgcgcgcccttccagctcaccacggcgctcgatcctgctcaatgttcctttgctcgcctagattctcccttgtcatggccgtgcgttgccggctcactgctcgaccgcgttccctgcgcgtccctggatcggccagcatcgcgtgtagtgtag

SEQ ID NO: 24824 - DNA, 1545 bp, Zea mays
  Peptide Sequence Number=SeqID_66603
atggtccaacgaccacgtgagtcgcgctcgcgccaagaagagaagccactcctacgtggacgaacatcaaacgtggagatcattgataggtcttcacacgcgtccgtctcttcgcgaggacccagcccaggctttaaatctcagcaccacggcgaaacccgatggctagtcgccactcgccactgccgtttgatccctcccgctcccccgctccgccatgcgtcccgccgtcctcgctgccctccttctagtggcagcggccgcctccacggccgccgcactctactcatccggctcccccgtcctccagctcaactccaacaacttcaaatcgaaggtgctgaactcgaacccgcgtggtgctggttgagttcttcgcgccgtggtgcgggcactgcaagcagtttggcccccacctgggagaaggctgccggtgtgctcaagggcgtcgccacggtcgcagcgctcgatgctgatgcgcagcaggcgctcgcgcaggaatacggaatcaagggatttcccactattaaggtgttttcccctggtaaatctccagtcgattatcaaggagcaagagatgtaaagccaatcgtagagtttgctctgtcacaggtcaaggcccttcttagagataggttgagtggtaaggcatcagcagggtcaaatggcaagacatctggaggttcaagtgagaaaaatgaaccaagtgcatcagtagaattaaattcgcgtaacttcgatgaactcgttgtcaaaagcaaggacatttggattgtggaattctttgcgccatggtgtgggcactgcaagaaattggcacctgaatggaaaaaggctgcgaagaacttgaagggccaagtgaagctaggccatgttgattgtgatgctgaaaagtccttgatgagcaagtacaaggtggaaggttttccaactattttggtatttggtgctgataaggagagcccgttcccctaccagggggctagagttgcatctgccattgaatcctttgcattggagcagttggaagccaactctggcccagttgaagtttctgagttgactggcccggatgtcatggaagagaagtgtgcttctgctgccatttgttttgtatcattccttccagacatcctcgattcaaaggcagagggaagaaacaagtaccttgagctcctgctctcggttgctgagaagtataaaaagagtccatacaggcaagtttttgtctggacagctgctggcaagcaagctaatctcgagaaccaggttggagtgggcggctacggctatcccgccatggttgctctcaacgtgaagaaaggtgcatacgctccactccgtaatgccttccagcgcgacgaaatcatcgagtttgtgaaggaagcagggcgcggtggaaagggaaatcttcctctgaacgttgcgccgacagtagtcacttccgagccgtgggacggcaaagacggagaggtcatcgaagaggatgaattctcccttgacgagctcatgggcgacagctcctcagtaaacgatgagttgtag

SEQ ID NO: 24825 - DNA, 120 bp, Zea mays
  Peptide Sequence Number=SeqID_66604
atggcgacaaataagggcatgtacagtgggtgtcttaagttgtgtcttagagtgtgtctagggggttgtgtcttatacttggagtaccgtgcagctgtatctaggttgtacatgccctaa

SEQ ID NO: 24826 - DNA, 198 bp, Zea mays
  Peptide Sequence Number=SeqID_66605
atgggcgccagccggaagctgcagggcgagatcgaccgcgtcctgaagaaggtctacgacactgagaatgccaaccagaaggagaagttcgaggcggacctcaagaaggagatcaagaagctgcagcggtacagggaccagatcaagacgtggattcagtccagcgagatcaaggacaagaagtggagtgctaggtag

SEQ ID NO: 24827 - DNA, 318 bp, Zea mays
  Peptide Sequence Number=SeqID_66606
atggcgggagtggagcagaaaggagaagagcgctgggagaagatgatgatggcggtggagcgtctgaccgacaagatggaggcgatggaggttggtcagaagaaggttgatgaagatcgcacgttgatggctcgccaactgcaggaaaccgagaaggcggtctcgcttcttcaactggagttgctggcgaaggaattggaagttggcacggttgttgaggcgccgcctaagatcgacaacgagcatcttgaggcattgcctttccaccttttgccaaatgtcagcgaatccacctcacctgagctcatcggtggatga

SEQ ID NO: 24828 - DNA, 267 bp, Zea mays
  Peptide Sequence Number=SeqID_66607
atggcgtcgtctgctggccgttcgtcgtcgtaccccaggtatggcgtcgcgtcttatctgttcgccatacaggcgtacgcctggtatggcgtattgccccatcccttctggcgtatgggtcactatagagaccctaatgctgaggtccccgcagctggggttgagtggtcctaccggtcgacggggatactctccagaacgtattcggcgtcgtgcttgacagaggcccttcggtactgctcccatggttcggacatggcttggtaa

SEQ ID NO: 24829 - DNA, 573 bp, Zea mays
  Peptide Sequence Number=SeqID_66608
atgcgcctaaaatctgccaaaccaggcgacgacacagcagccagtctcggtttcagcagggcgcaccgcgcacggcatcatcatcatcgtcgccgtccgtttcgttgcgtcgtgctcctgcagtcctgctgttgggttgccggtggtacattctttgacttccacatgggctgggtcgtcctggcaccctgcgcaccacacggactcaccaagccgggggaaattcaaggaatcaggacaagagctgtcagtatcagctgctgtacagcgtcaaacaaaaagcaaggtatggcagtggagacgctaggtaatgcaggcgccgtcatgaagggctgcggagctgcgcacggcgctgaggcaggagcgctcacgtcgttaggtggggctgcagagctgcgcgcgaggcatgagtgctatgggtgtaggctgcagagcagcgtgagtgcaggaccatcgatggagacttgcggtgcgtctgtggcagagctgaagagtgagacagcggcgtggacggatgggaggtggagtgagttggacaggaagcaggtgcaaaccttgagcgcaaggcagtaa

SEQ ID NO: 24830 - DNA, 2943 bp, Zea mays
  Peptide Sequence Number=SeqID_66609
atgccgacggcgccagcggcggtgctgccgcgcacttgcatggactccctcatcgccttcctccaccaccacctgcgcgcgctcctcgccgaccccgccgcgctccacgccacgcgccgccgctgtctcgctctgctcacgcccccacggcggcaccattgtcgtaaaaacctctccggagcgcaggaggaggaggagaacgaagacgacgccgtcctcgccgcgctccacggctccatcgacgcgctcctcccgtcccccgtcgacggcgcggcggccgtctgcctggcgggcgtcgaggaggcgctgcaggcccccgcgctgctgccggagcacggcgagacggcggggctggacaaccgccgcgtcgccgcgtgcgcctacttctacctcgcgctcgtgcggtgcgcccagggggacgcgtggcagatgtccatggacctcctgcaggccgtcgccgtgtgcccagccgcggtggccgctggccgcgaggacggcgcccgccgcgccgggctcgcgccacgcgcgctctgggaggggctgttcgacgacggcgtgctcgccagggccggcggcgccggcgaagaggacgcggcgcggcgcgcggccaggcgttacaaggactggctcatgtactacaaggtggtggccgccgcgccggagcaaaatggcgggcatatagaaaagaaaggcacacagttgtgtgactctaagaactctgaagatatatacttccatgagcaggatagaacgaaccattcggttgatcctgaaggaattaccacggtctctgcatcagaatttggtgcccatgacggtttcaccgagctgaaggatttcctcagcatcgcagatcaagatttccaggaagataccaaggggagctctgacagcaggtgcctccatgagatgctcgaggagtcgcagtctgattcgcctgtttccttttactcgcatcttgattctagtgaacaaagtgatagcgaggcagctccatatgacaaaggaaggtcagcaaagatcatgcccatagatgcagatttcttagcagctaaactccatgaaagatcaaaccacaacaagaatctgacgtggtgcacatctcctgaaaatgcaatgatatatgctccagaatcctcaatgtaccaggtcgatgaccgtgagacgaaaccaaactgcttgcaatcaaacagatctcatggatcactgaataatctatcaaattcggtcctggagctgaagaatgctgactcatactccacatccaactattccgccaaggatgccatgtttacgcagtgctcaccgaggcatgatctcagatgcttcaatgccttctcggccaaattcatcaagaaaagttccctgtccgatctagtctccagaggaagcatgagcaggaaattcaagacttccacagccagtgatgattggagtgatgtcagctcgcgctgggcgaaggacagccaggtagattttcttgagaggttcgagaaggcagtatcaaaactgctgatttcagatggactagaaagctgcctagatgctggctctgaggtcacaactatatggcaattactgaacaacacttgtgaggcgagacacatgtcgtcagtaaggcaagatatccttgatcggctgcttgacagcatttccacatcaaaaaaggacaaagtggtcagggcatcagtctatgtactactgctcatgatatctgaagatagaaatgtcatgagaggcatcaagaggaaggacttccatttatccaacttagccgttgcattgaagagagatgtacatgaagcagccattctgatatatctgttagatcctacacctttagagatcaaaaacttggatctgttgccctcgcttctacatgttgcttgtagctcaggcacccaaaaatggccttcaatgcttccactgacaccgacatcagcatcaatagctctcatcgagatcttagtgacagcattcgactatgtaacaaacaatgtccacttggcttccctcagctcccctcctattttgtccaagcttgtggatgttgcaaagaaccacaacttggaggaaggtgtggccctggcagctattctcatcagatgtgtacgtctcaatggtaactgcaagaagttcttgtcacaggctactccagtggacccattccttcaccttctgagacgaaaagagcaccgggccaagtgtgctgcacttgaatacttccatgagattctacagattcccaggtcctcagcaaactctctgcttgaagaaataagacggcaaggtggcattgcaattatgcacacactgatggtcagcctccatcaaactggacctgaacatcgggttttaggagctagccttctcctgcaattggatatgatggagagatcagatggcaggagtgtgttccaagatgaagcgatggaagtcctgttggactctctatcatctcaagaaaacagtagagtacaggcattatcagcatgttttctttcaaacctcggagggacttattcctggtcaggagaatcgtacactgcagcatggctcacaaagaaagctggtctcacatcaacatcacaaagaaatacaatcaggaacatcgactggcttgattcttgcctgcaggatacagaaataagcacatggagcaataaatctgcacgagcgattattaaaataggagtaccgtttatcagcgctttagccaaaggaatgcaaagcaaagtgaagggaacctcacagaattgcctcttatgcactgcatggctcggaagcgagctggctgcccttggtgaaaatgccataagatattctgcttgtgagatcttgttgcatgacatagcaagtcaccttcatccaggaaatgagcttgacgaaagggttctagcatgcatgtgtctctataattacacctctggaaaaggtaaatag

SEQ ID NO: 24831 - DNA, 600 bp, Zea mays
  Peptide Sequence Number=SeqID_66610
atggcgtccgagctcacctaccgcggcggcgggacgtccacggccgccggcgccggcgccgggggatactcaccgaagccgtccaagccgctcgcgtggctgccccgcgcggcccgctacgccgtcgccgagcatcgcccgctcttcgcgctcgccgggatgctgatcgcccgccgccgtcatctccatcgcctcccccccgcccaccaccgcgacgtggccacgcggcacttcgtcggcggcaaggtgccgctgggcctcaagcggaaggcgctccgcgtcctcgtcaccggcggcgccggcttcgtcggcagccacctggtggaccgcctcctcgagcgcggcgacagcgttatcgtcgtcgataacttcttcaccggccgcaaggacaacgttcttcaccacctcaacgacccaaacttcgagatgatccgccacgatgtcgtcgagcccatcctgctcgaggtcgaccagatctaccacctcgcctgcccggcgtcccccgtccactacaaatacaaccccatcaagacaatcatatcctttctctacgaattccttcagttcagttccgttgcgttcatttcctttcctccatga

SEQ ID NO: 24832 - DNA, 870 bp, Zea mays
  Peptide Sequence Number=SeqID_66611
atgagctccttcacttcccttgttcgtttcatactacccctgttccagcaaacaaggcatgccatgctaagtaacagcaagaacagaccatcagtgcagcgtgtatcatgtgtacatacacaaattctcgaaattggtcaaccaggcaatggtgcagcaactgctatagcattcttcagagggcagctttttgctggttattctaatggcaccatcagggcatgggacataaaaggccagagggcagtaatcatcagggaggtaaaagagcacaagaaggcagtgacatgtttttcactatcagaaactggggagaacctcctgagtggatcagcagacaaatctattcgggtatgggaaatggcacagcgcaagctagagtgcgtggagatgattcagacaagagaggctgtacaaaaacttgatatttgtggtgacaaaattcttgtacttacacagaacagcgttctcaagttctcttgtgcatcaagaagcacccaaacattttacaggagcaagcatgtcaaatctctagctgtataccagggaaaagcttaccttggatgcaaagacgcaagtatacaggaactagacgtgtcagttgaatccaacagtgcgatgataaggatacctagaggaggctggatggttaggaaacaatccattagctccattgttgtatacagagattggatgtactgtgccggtgctcaggtcgaagggtcagccttaaaggattggaagaaacgatgcaaacctaatatgacaatgccaataccaaagggaacaagtgtagaggccatggcagtggttgaagacttcatctacttgaactgcagtagaagtcctagtatcattcagctacactaa

SEQ ID NO: 24833 - DNA, 960 bp, Zea mays
  Peptide Sequence Number=SeqID_66612
atggcagacgagagctacctgacgaacgggtacctggacacgcccatcgactggatcgcggggatgccgacgctgcggctcggcgacatctccagcttcgtccggacgctggacccgcagtgcttcgcgctgcgcgtggaggaggacgaggcgaacagctgcgccagggcgcggggcgtcatcctcaacacgttcgaggacctcgagcacgacgtcctcgccgcgctgagggacgagttcccgcgggtgtacaccatcggtcccctggccgccgccgccgcgggggcgctgagcctgtgggaggaggactccgagtgcgtggcgtggctggacgcgcaggcggacgggtcggtcctgtacgtcagcttcgggtccctggccgtgctgtcgctggagcaggtcgcggagctcgcgtggggcctggcggccagcgaccggccgttcctctgggcggtgcgcccggggctcgtggccggggaccgcggcgccgacgcgctgcccgagggcttcctggccgcgaccgggggccggtgcttcatcgccgagtggtgcgcgcaggagcaggtcctgcggcaccgcgccgtgggcgggttcctgacgcacagcggctggaactccacggcggagagcatctgggcgggcgtgccgatggtctgctggcccgggttcgccgaccagtacatcaactgccggtacgcgtgcgaggagtggggcatcgggctgcgcctggacgaggcgctgcgccgggagcaggtcgcggcccacgtcgaggagctgatggccggcggtaccgacagggccagggaaatgcggcgctgcgccgccaagtggaaggccgcggcctggaaggccacggcgcccggtgggtcgtcgtgcgagagcctcgacaggctggtggatgatctgcggctgtgggaggaggacgccgagctcgccaccgccacgccgttgatcaggtga

SEQ ID NO: 24834 - DNA, 249 bp, Zea mays
  Peptide Sequence Number=SeqID_66613
atgaggagagggacatccaagatccaactgggcaacgacgtatctagtagaaaatctctgcggacgatcatgctcatgcagttagccccagcagccagcaatcaaaacatcaaccaaaacaaccgcaattgctttcatccgcaatcagaacaatccgaaaacacagctgatatcaatgacaagtgcatgtcagtaatcttcaattctgcttcatacacggacaatgataattgtgagggctctacatga

SEQ ID NO: 24835 - DNA, 213 bp, Zea mays
  Peptide Sequence Number=SeqID_66614
atggggtatgtgccgacgctgagaatgactatgacaaagaagacagagaggaacgaccgctcctcaccgacttctcgcccacgcacctcgcctacgccccgccaggtgttcgacaggttcaggcagaacgggtgcgagaactacccatttttggagatggatagggagcatgacaacatcatcaactgcaccacccctaacttcactaggtag

SEQ ID NO: 24836 - DNA, 963 bp, Zea mays
  Peptide Sequence Number=SeqID_66615
atgggcgggcgcaagatgcgggcgtccatgacgacgctgctgatccgcctcgtgctcaccgtcgccctcctgggcggcgaggcggcgcggcggtgcgcggcgttcaacccacgcgtgctgttcacggtgaagcccgacccgatcgtgctgcgggaccaccgcggcgcgctgctcacggggaaccacaccgtcaacctgctcttctacgggcgcttcaccgcagcgcaacgcgcgatcgtcgtcgacttcgtccgttccctctcggacgcgagcgcgcctcgcccggagccgccgggggcgccaccgtccgtggcggcgtggtggtgcaccatccggctctaccgcggcggcggcgcgcggctgcggctcggcaggcagatcatcgacgagcgcatgtcgctgggccggggccctctctctccgggcaacgtcacggcgctggcgcgggccgcggggcaccaccggggcgccatcaccgcggtgctcacggccgccgacgtccccgtggcgtccttctgcgtgtcgcgctgcggcgcccacggccacgaccgcggcggcgcgcacagcagggcgcggtacgcctacctgtgggcggggaacccggcgcagcagtgccccggccaatgcgcgtggccgttccacctgccgacgtacggtcccccggaccccgccgctggtgccgcccaacggcgacgtcggcgtcgacggcatggtcatcagcctcgccgccctcctcgccggcacggtcaccaacccggcgacgccggcgctgggctggaggctgccacggtgtgcgccgggatcttcgggaccgggtcctaccccggctaccccgggaagctgctcacagacccggccaccggcgcgagctacaacgccgtcgggctaggcgggaggaagtacctgctcccggcattgtgggatccagcgacctcccagtgcaagacacttgtccagacgtga

SEQ ID NO: 24837 - DNA, 1416 bp, Zea mays
  Peptide Sequence Number=SeqID_66616
atggccgggtgcaccccgccgcggaagggccggagcacggccggcgacggcggccttgaggaggcgtggctggtggcggaggcgccggcgccggccaagaagctccacgcgagggctgcggcgtggggcgtcgtcaccgtcagcttcggcacccgcggccacggccacttcaactcgttcgtgctgctgctgctcgtcttgttcgtcgtcctcgccatttcggtcaccaccaccaccaccaccaccaagcagcgggagacgacgacgacgacggccgcgccgccgcctgcggatggcgcccgcgcccgcgccggcgggcaaggcgagtgcaacatgtcgtccggccggtgggtgtacgacggcgctgcgtacccgctgtacgaggagagcgcgtgcaagttcatgtcggaccagtcggcgtgcggcaagttcgggaggacgaatcgcaagtaccagcactggaggtggcagccgcacggctgcgatcttcccaggttcgacgcggtgaagctgctcgagaggctgcgcggcaagcgcctggccttcgtcggcgactcgctgaaccggaaccagtggatatccatggtctgcctcatcgacaccgccaccccgatgctgcataagtccatggccggcggcaacgacagctccctcgtttccttcaggatccatgagtacaacgcgtcggtggacttctactggtcgccgctgctagtggaatcgaactcggaccatccggttcaccaccgggtggccgaccgcgtcgtgcgcgccggctccatcgacaagcacgccaggcactggggcgacgccgacgtgctcgtcttcaactcctacctctggtggcgccgcccgagcatgaaagtcctgaggggttcgttcgaggcggcggcggcggcggcgtacgaggtgaccgacagcctgcgcgcgttcgagatgtcgatgaagacgtggtcggagtggctggagcgccacgtcgaccgcgcccgcaccgggctcttcttcacgagcatttctccgacgcacctccactccgacgagtgggaggaggcggccgggtccgggagcggcgccggcaaccaccgatgctacggcgaaatggagccgatcacggcggaggggcaccgcgggcgggacacggacccggcgttcgcgcgcgcggtggaggcgcaggtggcgcggctgggcgcgcgcggcgtcgccgtgcgggtgctcaacgtgacgcagctgtcggagcaccgcaaggacgcgcacccgtccgtgcaccggcggcagtggagcccgcccacggcggcggagctggaagcgagggcgcgcgaccccagcagcggcgccgactgcatccactggtgcctccccggcgttcccgacgtctggaaccagatgctctatgcgcacctcgtgtcgtcgtcgtag

SEQ ID NO: 24838 - DNA, 414 bp, Zea mays
  Peptide Sequence Number=SeqID_66617
atggccgaccggagcaggttccgccccgtgctcgtgcaggccatcgccggcgtcacagtcgtgtacatctgcttcggcgcctgtggttacctcgcctacggcgacgccaccaaggacatcatcacgctcaacctaccgagcacctggtccgccgccgccgtcaagcatcgcgccgtggaccgggcggccctgcacgcgagcccgcgtggtggtgctggtggcgctgtccgctgtggcgtgcttcgtgccggcgttcgggtcgttcgcgtccttcgtcgggagcacggtgtgcgcgctgctctccttcgtgctgcccgcgtgttgtttcacctccgcgtcgtggactggggcatcctcctcttcggcctcgcgttcgccgcgcacggcctgtatgccgtcctgtcgcggcactga

SEQ ID NO: 24839 - DNA, 690 bp, Zea mays
  Peptide Sequence Number=SeqID_66618
atggaggaccttaggacaagttgtaaaggtcttggttccggtcgttcctctccaagtcctgtgacgcggcgttcctcgatggaggggacgacacggaggaggggaccatggggcggtcgtggccgctggcgcagctccacgcgcagagggacttcctgcgcgcgtaaccaccttgcctcacaaccaacgcgaagaaggagaagcacgtcgatgccccccgtagaggcgaccgatgcagggaagcctgaccacttcgcatcggcgtgtctggagcgtacgctcttcggcttcaaggatccggtccctgacgccgagcccgcctccacaggcgtcgaggtcgcggtggcgccgttctggaacagggaaaagtacatgttgtctctgctcccgcacgcggagaaggacatcaaggtcgagccaaagcagaacaaggggaacgcggcgaacgagctgatccagctgccttttcttcgagataagaaaaggtgtacttcctcgccttctagaggagatattgtcaacaagaattatggtgaaacaagaattatggtcccgatgtcggtggggagtttgggccttatcgccagtcagaacggaattcacttcaagaagtatgccgagaagcttttggactctggtgcggtttaccgctgcttttgctccaatgaggaatttgagcaaatgaagtag

SEQ ID NO: 24840 - DNA, 1164 bp, Zea mays
  Peptide Sequence Number=SeqID_66619
atggggcaagatgagctcgagcttcctgatctgccggaggggaaggacaaggagcagggaggcggtgctccggtgcagagcagggtggccggtgccgggcacggcttggcgcgaggggaagcttcatccgagcaggagggcgactcgggggcgggcgatgccggttcctatgccgctgctggattggggaacgacgaggaggaggatgctaaggaagctttgacggaggagttggaaaatgtcgctcctccggcgggtgattctggccgtggcgatgcgccggagagtggccggaacgaacacatttacttcgagcgtcaagggtttcgaccggccaggccagcaatcgcgcacgcgacgccgccatcgtcctaccgccgcctgccattccgaagccgaaagcagtactacccgacacgcttcatcgtcgcgggagacacagcgtcgagcatcgccaacgctcatgatcctggcactggcagccgcacgtcagaagcagcaagcggtccacagcccaccgccagcctcggctcaccgtcggggacgtcgcgatccgccggtgactctgcagcgaccaatgctgggcatggcggaaagagcgaagcgatggtcctgacggcgggacgctctgagcgtcaagggtttcgaccggccaggccagcaatcgcgcacgcgacgccgccatcgtcctaccgccgcctgccattccgaagccgaaagcagtactacccgacccgcttcatcgccgcgggagacacagcgtcgagcatcgccaacgctcatgatcctggcactggcacccgcacgtcagaagcagcaagcggtccacagcccaccgccagcctcggctcaccgtcggggacgtcacgatccgccggtgactctgcagcgaccaatgctgggcatggcggaaagagcgaagcgatggtcctaacggcgggacgctctgactcgcccgcgccgccggagactctgcgccgccgtctgcaatccgcgcggccatctgcgacatggtgcccgcgttcccgtgtgagcaaggagctagtgcccgcgcccccgtctgaagaaagagaattgcccgagccgccctctgcatcccgcgcagccgtctggctactggtattagaaattgattggggggcaatacagattgatgatagatga

SEQ ID NO: 24841 - DNA, 828 bp, Zea mays
  Peptide Sequence Number=SeqID_66620
atggaagaagccccggagctgatcagccccaggatctccttctcgcacgacctagcagccgcgacaccgccgccagcgccagcgccagccctgcttgccggccggcggtcggacgcgtcgctgctcgggtcacgcccgcgcctcccggagccggacttcgacttcgacttcgacttcgccaacgccacggccgccgccgacgtcgccccggccgaccgcctcttcgccggcggcaagctgctgccgctgccgccgcttccgcccgctccgaagcccaacaacccgtgcaagccacaggcttgcagcagcagcagcaccagtgtcaagcaggcgcagcagcaggcgtgccaacagaggcggccggggtcgtgggcgtcctcgttctcacgcagcagcagcgccaactcggccacgacgggcgcgccgcggtccgcggggaggttcggatgcccgccgttcccgctgatgcgcagctggtcagtcggctcggcggcgagcgtggcgcggggtgctgctgctgccaccttgggtgatgatggcgcggccccggacgccgccgccgccagccatcggcctcatcatcaccagtaccacaagaaattcggcatcgtcgctggggctgctactagcaacaacggtggtagctcaagaacttactactatggaggtagcagaaaaggcggcggcggcggcggcagtagcggtagccatggtgttagggttcggccggtgctgaacgtgccgttcatcggcacaagtgtgtccaacgtgctcagctacttgctctgtgactgtagccacgggaccaagaagagtaggggcttgtag

SEQ ID NO: 24842 - DNA, 438 bp, Zea mays
  Peptide Sequence Number=SeqID_66621
atggcgctccgtctctctgctccgttcctcacctcgcgctttacgccgtcgcaagcgttggccccgcgcaggcgcacccgggcccgctctttctctccgtcagccgatgcgcgagccgcgtgcttcaagagaccctacacgtccgttctaattatccccacgggcgtcggcgcggccgtcgggggcttcgccggcgacgcccttccggttgcgcgagccgtcgccggcgtcgctgactgtgtcatatcccacccaaacgtgctgaacgctgcgatgctatactggccgatgcccaatacactttacgtggaagggtacgcccttgacaggttcgcagaaggatcctgggctctccaacctgttcaccagaacaagttgcacgctttccagatgatgacccagaagattcagattgttaccgggaaggaaaggtactga

SEQ ID NO: 24843 - DNA, 351 bp, Zea mays
  Peptide Sequence Number=SeqID_66622
atggcaaaggaaaacagcgacgttcactccactccgacaactgtgccagctgccagggaaaggctgacaacagcaagtcacgacctcccgcgagttcggcctcgggcgcaacagggagctccgcctcgcccgaccccaggcctcggcctcagcttcggcctcgggggaaggtctccgcctcgcccgaccctgggcctcggcctcaacctcggccttgggagaaggtctccgcctcgcccgaccctaggcctcggcctcagcctcggcctcggaggagtcgtcgcctcgcccgacctcggcctcgtatcagctacgctactggggatcgatcattaccctacccctagctag

SEQ ID NO: 24844 - DNA, 327 bp, Zea mays
  Peptide Sequence Number=SeqID_66623
atggggctcgaccgcggaggtggtccgtcttctatcgcgagccgggcagggcgccgttgcaggggctttgattttggtcgggtagcttcgcagcgtcgcttggttgatgtgcgcgccctcacctggcggaacctgtggctggggcaagcgaatttcctcgccgtcgtcaacactccgccgcggtcggcacttcaccgtggccagcccgcttggacctcgacgccgggcctcggtgtgggccacgcgcttcgcgccggcgacgtcgcgccgccattacccgtggccagacctgctgtcgccgtgaaccaagattggaagattgggtga

SEQ ID NO: 24845 - DNA, 276 bp, Zea mays
  Peptide Sequence Number=SeqID_66624
atggatttaaattcttacttatcagtttttaaaaagcatgggactacaactgcaggtgcccggcgcgtggctactcttctaaatgaaatgaagcgccggggcagagactgcagatttggtgttgtcaccatgtgtatcggatctagaatgggggcagcagctatgttcgagctgtgttcggcccggctggaggtatcgaccatcactcaacactgtaacccgatggtgatagacgcccctgttgatatatttgttatgttgtggaatgtggtgtaa

SEQ ID NO: 24846 - DNA, 165 bp, Zea mays
  Peptide Sequence Number=SeqID_66625
atggcggcccccttatctccagcgtccaggggcaagggtggaggacgcacaccaatgcaccgcccttccctttcctactcttctctctcctctaaagggaaggatatcagtgaggcgaatgggataaactatgcaaaaaagatattcagactactgcaaaattga

SEQ ID NO: 24847 - DNA, 201 bp, Zea mays
  Peptide Sequence Number=SeqID_66626
atggcggacagaaacaacgaggcagctcgacgtgctcaactgccgtgggagataagaccggcggcaaggcaagaaatatcccaggcggaggagataaatgaagagagagacacgaatgaagaagaagataaggaagagaactgcgctcggcggtcaaaccaaaataagttcgataaaatattggagaaggatttgatatga

SEQ ID NO: 24848 - DNA, 1690 bp, Zea mays
  Peptide Sequence Number=SeqID_66627
cggcatggaggggctgagctggagaacggtgtgttgtttatcggtgctctgtgccgtgctgttcttgcgcccggccgagggcatccgcttcgtgatcgatagggaagagtgcttctcgcataacgtggaatacgagggggatactgtccatgtatccttcgtcgtcatcaaggctgacaccccgtggcattacagcgaggagggcgtcgatcttgtggttaaggatcctaatggcgctcaagtccgtgattcccgagataagactagtgacaagtttgagttcatagttcagaagagaggcgtccatcgcttctgcttcacgaacaaatccccatatcacgaaacgatagacttcgatgttcatgttggccatttttcatatttcgagcagcatgccaaagatgagcattttgcaccactttttgagcaaataggcaagttggatgaggcactttacaatattcagttcgaacagcactggctagaggcccagactgaccgtcaagcaatattgaacgagaacatgagcaggagggcagtccataaggcgctcttcgagtcagcggcgctgatcgccgccagcgtcatccaagtctacctcctgcgccggctcttcgagcgcaagctggggacgtctcggagaataaatggctgtgcagaattgaaggcggcgaggagaatctccagcttcagctgccggctctctagatggagtgcgttcgaggctgcgggggtgagagtttacttcgcatctagactagagaacaacacaggatcgatgaaggccgggaatgggttcgtcgacgacagcaacgaaaaaactgccgacgccatccgcgaaatgccgctcgccgccctgtgcaagtgcaaggtgcaacgaatgatgggtagccatgctcagctccgagcaccgtcgtcgcccccatcttgcctcgcattcaaatcgcaggcgggcttggacttgaagcttcgcccccgctgtgtcagcggtcagcgccgcagacgcgacgggcccgccgccaccgccgcccaagacagccagccagaagcaagcagcgccaacgcgattcgcatgagcaacgggcgatgcaacaaccagagcaggagcagcagggcggcagatgtcgatggggaggcagggacacgtcgtcactgggctctgtggtggtggtggtgcctgctgctgctggcggcgtggtgctgcgccgcggccgcgcagtcgccgccggcggcggacccgctgcagagcaagtgccagggggacttcgggaagctgacggactgcatggactacgcgacggggcacgcggcgtcgccctcgtccacctgctgcggcgacgccggcgacacggagaaggcgcgccccgagtgcctctgctacatcatccagcagacgcacacggggcgcaaccaggtgcagtcgctcggactgcgcttcgaccgactcatggcgctccccgccgcctgcaacctccccaactccaacgtctcgctctgcatcaccctgctgaacctgaagccgggctctgcggactacgccctcttcgccaacgcctccaagatcacgccgtcagccggcggcaaccctgcgagcgacagcgccgcgggcagcggcgtcaagctccgggctggggtcagcggcggcgtcgcgctcgccgtggtctccgcgatcgcctcgtcactcttctga

SEQ ID NO: 24849 - DNA, 1014 bp, Zea mays
  Peptide Sequence Number=SeqID_66628
atggagaagcgacggcgaggcagcggcggcgtgccgtccttggcggtggcggtgctggcggcgctcctggcggcggcctcgatgccgtcgccgccccgcgtggcggccgcgctgtcgccggactactacaaggacagctgcccgggcctggagtcgatcgtgcggtacgaggtggcgaggaagaagaacgagacggtggtcaccatcccggcgacgctccgcctcgtcttccacgactgcatggtcgggggctgcgacgccgccgtcctgatcgcgtccaagaacaacgacgccgagaaggacgcgccggacaacgagtcgctcgccggcgacggcttcgacaccatcaaccgggtcaaggcggccgtcgagaagaggtgccccggcgtggtgtcctgcgccgacatcatcgcgctcgccgccagagacgtcgtctacctggcggatggcccctactggcgcgtcgagctcggccgtctggacgggctcgattccagggccagcgacgtcaaggggaagctgccggacccggacatgcacgtcaaggacctcacgccggtgttccagcggaacggcttcacggaggtggacatggtcgcgctctccggcgcgcacaccgtcggcttcgcgcactgcagccgcttcaccgacaggctctacagctacggcggcgcgcggacggacccgtcgttcaaccccgcctacgcgtaccagctcaagcaggcgtgccccatagacgtcggccccaccatcgccgtcaacatggaccccgtcagccccatcaggttcgacaacgcctactacgccaacctccaggacgggctggggctcttcacctccgaccaggtgctctacgccgacgaggcgaccaggcccatcgtcgacatgttcgccgccagccagaaggacttcttcgatgctttcgtcgccgccatgctcaagctggggaggctaggggtgaagacggggaaggacggagagatcagaagagtctgcactgccttcaaccattag

SEQ ID NO: 24850 - DNA, 822 bp, Zea mays
  Peptide Sequence Number=SeqID_66629
atgggggtttggagaatgcttgaggactcaatatcttcaaagataagtacatatgcaagattggagatgccagaaggaagaaaaaaaacactctggaagaaggatggcgacaagaactgtggtcgtcaaactcacggagagaaacaggaaaccgtgaggcgtgtggacgcacgcagacgcgaccccagtttcagcctcggatcccgcggggtcacgtcctcgacccgtcttcaccaccatactgctttgctgtgctgtgctgtgctgcaatttggatttggggcgttggctcagcggcagcgctacgctactgcctactgctcggggcgtcgggtgtttggcctcctggttctctggtctctggctctctgctgcgactgctctgctcgcacaagaccagctgacgtgtctgctcgagttttacgtggtctttggatggcaacggctgttccctgtcgcttgctagatcacgccaccctgacactgatacgcggtagctgtgttacttcaggcatcgccgtctatcgcggacggaactgcgtgcagtgcaagctatccgaggcaggcatcaggagccgttatgctccgcgcccgcctctctgtctatcggcggttgtgataacgcggagcagagcagttacgctcatcattgccgtgtggtggtggtcaatcggtcccatgatgatgatctcagcgcaggaactaggcagcgttggggcggcagcacatgggcctggctcagagtcacagctgctgctgctccacggccagctgccgatgcatcagcgtccacgtctcagcgggggtcagctggccaggtaa

SEQ ID NO: 24851 - DNA, 507 bp, Zea mays
  Peptide Sequence Number=SeqID_66630
atggatcccccacgcggaggtcaacgccctttgtcccctactacctccacggtttcccctcgtacttctccgcgtgaccgctggttcatcccgtgggtctccgcgcgcaggggcaaggccgattgggccgctgcggagcaggattctccgtccgcgtcccctacgcgtcgaggttccatggcgctctccgtccttcgtccccccctcccccgtgccaaggaaggtctgggtctcgggcagagacggtgccactccatggggtcctacgagtacgtcatggacgaccgcgcctcgctccgcgtggcgatcaagccgcccaagaagaagcccgcggcctccaagtcgcgccgccgcggcgccatgtcggagtgcgagttcggcgcatccacgcgcgaggagacctcgctccgcctgccattcccagcaacggccctagaccatgacgggatttgggcgcgcgggcttgcgggtcgcggcgggctgtgcaggcggttcccaagcgcgtag

SEQ ID NO: 24852 - DNA, 1281 bp, Zea mays
  Peptide Sequence Number=SeqID_66631
atggcgtgcgggtctcgaagccggaccaacgagatggttgacgagtacgagaagctggtggacagcgccaacaagtacgggaccttgctggaggtggttcaggtgctgaccgatctgaagcttaccatcaagcgggcctacatttcctccgacggcgagtggttcatggacgtctctgggagcgggatcgctcagcttccgcgggccgccggagcgggcggtggccgtggaggcggaggcggaggaggcgcaagaccaccatcgagctggtggggcgagaccgggccgggcctgctgtcggaagtgttcgcggtgctggcggacctcaggtgcaacgtcgtggcgtcggaggtgtggacgcacgacggccgcgtggcagcgctggtgcacgtgacggacgccgacaccctgggcgccatcgaggacccggcgcgcctggacacggcgaggcgcctgctccgccacgtgctgcgcgggagcagccgcgacaagaaggccgcccgcgccgccgtctcggcgcgcgtcgtggagcacgcgccgcgccggctgcaccagatgatgcgggcggaccgcagcgcccgccgcgacggtgagggcgagggcgagggcgatggcgagcgcgagcgcggcggtgccggcatgccggtggtcgcggtggaggactgcgccgagcgcgggtacacgctcgtcaacgtgcggtgccgcgaccgcgccaagctgctgttcgacacggtgtgcacgctcaccgacatgcagtacgtggtcttccacggcaccgtcatcgccgagggctcggaggcgtaccaggagtactacatccggcacctcgacgacagagccgccagctccggcgaggagcgcgagcgcctgcgccgcggcctcgaagccgccatccaacgccgatacaccgaggggctccggctggagctgtgctgcgaggaccgcgtggggctgctgtccgacgtgacgcgcgtgttccgggagcacgggctgtcggtgacgcacgcggaggtgggcacgcgcggggcgcgggcggccaacgtgttctacgtggtggacgcgtcgtcgggggagcccgtgcaggcgcaggcggtggccgccgtgcgcgccgagatcggcgagcagctcctgttcgtccgggagcaccaggacgccgccgccgccgccgccaacgggaccaggtcgaccgtggccggcgggcggcgctcgctcgggaacatgatccggtcccgctccgagaagttcctctacaacttagggctcatcaggtcgtgctcgtag

SEQ ID NO: 24853 - DNA, 237 bp, Zea mays
  Peptide Sequence Number=SeqID_66632
atgcggtcgccggagcccctctactccgcgctcctcctcctcgtcggtgctggttgcctgctgctggcgctaggtcgcttgagtatggcgtccgtggactaccttctggcgcccgagcaccgcctccccgcgacgttcgaggacgccgccgacgccgtgattaggggaagcgagacgcgcgtgatgcgggacaggggggcgacaactactgatcggcgggacagggggcgtgattag

SEQ ID NO: 24854 - DNA, 357 bp, Zea mays
  Peptide Sequence Number=SeqID_66633
atggtggagatagggagccgggtacgggggttcctgcggaaccggtggctggtgttcgtggcggcgatgtggatgcagtcctgcgccggggtcggctacctattcggcagcctctcgccggtgatcaaggcctctctcgggtacaaccagcgccaggtggccgggctcggcgtcgccaaggacctgggcgacagcgtcggcttcctcgccggcacgctctgctccgtgctcccgctctgggccgcgctcctcgtcggcgccgcgcagaacctcgtcggatacggatgggtctggctcgccgtcacgcgccgtgtccccgtgcccccgctctgggcgctgtaccttactattatctaa

SEQ ID NO: 24855 - DNA, 435 bp, Zea mays
  Peptide Sequence Number=SeqID_66634
atggagtggaaaacgccgacgacgtcgccagtgaagtgtgcggcgcgcggtgatgccccgaccgaatcctcccccgtgcgatacagaaggtcgccgagatccgccctggccctgcccgcacgggcaccaccggttgatggacgagctccaaacgctaaaggggcggcgcacacgatgcttttatacccggcgccacaccccaactgcctgtcgatccccaagcgcatccaactggtctcggcgtccgtgcaaagcgtgcagtcgttacgcgagggagaagaaagggctgtatgcgcgcgcgtgagaaagccaaggcgcggcgtggcattaactggcaagtggagcctgcttgtcacctgggcccacacggtggtgacacaaggcgcgtgcgtgaggccaagctgggccggccaaggggaaattcggcctaggcag

SEQ ID NO: 24856 - DNA, 557 bp, Zea mays
  Peptide Sequence Number=SeqID_66635
agcgttctcccgctacctccgagcctctcggccctcaggctctgaccttaaatgggatctgccgcactcctgctctctatctctctctctgcaacgactgggttaccgacgcagccgccctcagccaggatgctgatggcatgttatctgaagatttactgaagcgtcaatcagctgaagatcctgatggaagtttctacactggggatgatcctgatgtaagcttttataacggggatgatcttgatagaagcttctacaatggagatgatcctgatagaagcttttacgatagagatgatactgattatattgagggaagcgatgatggaccaccaaggaagagttctgaagatattgtacagttaagaactcaaaatggctttgcatgtagagaaatctcagttaaagagactaaaaaagtatttcgctcagaggatgaaaatggtaataagatggtcaatcaatatgtccacttgggaaagattggttctggaagctacggaaaagtggttctgtacagaaacattaaagatgggaagttgtatgccatcaag

SEQ ID NO: 24857 - DNA, 438 bp, Zea mays
  Peptide Sequence Number=SeqID_66636
atgaacagacttaacgcgagcagaacaacaaaaaacagaattcgtgaggacatgaacatcaaacaacgtactggtcaactaactcaaaccaaggagacggatgacgaagcagagaagtgccaatggtcacgcaaccaagagccacaaccattaccggccgcaaggccaagggcaactaaaagaagaacacacataagaaaccatcaagctagtagagacgatagtgcaaagatgacctcacaaccaccactacaagagcggccacatatgacaaaacacgggcatcctagcttcgcctccaacaaggtggacggcacagaagcgccatcaaaaccggggctgacagaaagtcaagaaaggctttcgcccataaccaacgtggtcgtcgctgcacggccatctgaacctttggacacaagtgttggcacagaggtctag

SEQ ID NO: 24858 - DNA, 327 bp, Zea mays
  Peptide Sequence Number=SeqID_66637
atggctgctggaggtgctcggctagggagggagcatggagatggagccggcttccatggggaagaaggggaggacgccattgctgctggccgagctccctgctggccgccgtcgggaagaagacagggagtcagctggagcagacctgcgcgagggagaaggaggaagagagtggcggctgaaaaatttagagcggtgggggtgcaaaataaccaagtgcaaagggagagggtccgtatttataggcatgaggtagggttatggtttcttagtgggcctattgggctgggctgggctggtccaaaacgccaaatcgggccgcgctaa

SEQ ID NO: 24859 - DNA, 441 bp, Zea mays
  Peptide Sequence Number=SeqID_66638
atggccatggaggaaatggagctgctgcgtcgcccatggacatggagctcgtcgaggtcggcccagggagctcgtgcgcgcaaaggaacatcaggggggaaaagaagctcaaccatagctgctggaggtgctcggctagggagggagcatggagatggagccgacttccatggggaagtaggggaggacgccatggctgctggccgagctccctgctggccgctgtcgggaagaagacagggagtcggctggagcagacctgcgcgagggagaaggaggaagagagtggcggctcaaaaatttagaggggtgggggtgcaaaataaccaagtgcaaagggagagggtccgtatttataggcatgaggtagggttatggtttcttagtgggcctattgggctgggttgggctggtccaaaacgccaaatcgggccgcgctaa

SEQ ID NO: 24860 - DNA, 333 bp, Zea mays
  Peptide Sequence Number=SeqID_66639
atgagggttgtatgggacgcccttggccaagtacgtgcatcgttcccacgacttttcctgagggcgaagggtgtaggcttggatgatgatgatgatgatgatgatggttctattaatgatgtttctaactatggattttggtatttcctctatgaggagattgtatccctgcatatctggggtctttatcgtccagccgcccaagttatcgccgagtgcatagcccttcgggcagggatcaaccttcttaacatgttcaactatattgtgacacagttgataactagaggagatatggtactaaggttgcaagattgtagtattttgatctaa

SEQ ID NO: 24861 - DNA, 228 bp, Zea mays
  Peptide Sequence Number=SeqID_66640
atggcaatcactttcaacaccatgatcaccttcaatgccggagagatcttccacttcgtatccatcccctgcatcgcagatcagggagaaaattactcagaaaaatctgaaaatataccagagacttccacaaggtgtattaacatgtttcaaacaacttttgcacttagaaacactatgcaacggaaaaagagaagaaaagtaaagaaaggagagggtaacacctaa

SEQ ID NO: 24862 - DNA, 357 bp, Zea mays
  Peptide Sequence Number=SeqID_66641
atgctcccggtgcacctgctccaggcaagattctctcctctcctctctcagaaggctagacggccgacgatgaatcgccaggcgagtcggcgaggccaccgggtgcgccatgtccggctcggctcgcttctccggctccgcgtgcggcttttcggcctccttgtccgctgcctggaggacttcaactggtaccctagggggaggtcgaggccacataataagatgatgctcagtcacgctgacactgggccagcggagagggagaactcccttcaggcagacgccattgcagattgcttagagtttatcaagagatcctacctacctgctggtgatcagcagccagattgctgctag

SEQ ID NO: 24863 - DNA, 495 bp, Zea mays
  Peptide Sequence Number=SeqID_66642
atggcatcaacatggttctgttgcgtgagaaaatgtgctgttgttggcagtcagataccttggaaattcgttctggatttgggaacctcatgctctctgaatgcagcatttgacgctgtgtcattagcatgttcttttcctttagaagaacataccacaatttctgaaggtcatcccaagattttagtcgcagttcagaagccttccagctgcgacctaacgattgatgcaacaaagaaaagggggacacaactcccaagttccaaccctaatccgttcgacagacgacagtccccacaccctagttccccgctccccacgcggccacaccagtgctcaacgcctcaacccggcggcggcagcagcactacgagcagtcgagcagagccgcagagggccaaccggcgtgacggcattgcacggcaagaggagcggtgggcgacatcagccatcggcgccaagttctccgagcagtacaacggcgcctataactga

SEQ ID NO: 24864 - DNA, 291 bp, Zea mays
  Peptide Sequence Number=SeqID_66643
atgctgtccctgtcgagggcgatcgggaggcggctcttctcgtccgccgaggccgcgtcgacggctgcggtgaggacggcgcagaacccgctcgaggagttcttcgaggtcgagcggagcaccgaggagggcaagcctcctccccactacgatggtcgacgaagccagcccattgaggctatgttcggtcaatttctcatccgaggggattggaaaggatctaaggaggttgagggggatttttacttgtatgatgttgatttaagtgcgctgttgccccctgatgtgtag

SEQ ID NO: 24865 - DNA, 984 bp, Zea mays
  Peptide Sequence Number=SeqID_66644
atgtcgggagatcacgccaagaaggagatggagaccggcgaaaagcccactacaagccacgggagcacttcatcggaagagtcccgcaccaagaggagggagaagaagaagagctcctccaacaaagggaaggagaagaaatcttcttctcacgagaagaaggaaaaatcttcttcccacaagccgcatcggagtgaggacaagccaaagaggatgaggaaagtggtctactacgagaccgacacttcatcaacatcgacctccggctccgatgcgccctccgtaacttctaaacgccaagagcgggataaagactatgatgaggatgaggtggcccaaatcgagcatttcaactctcaagcgacaacaatactccttgcctctctaagtagagaggagtataacaaagtgcaagggttgaaaagtgccaaggaggtttgggatgtgctcaaaaccgcgcacgagggagatgagctcacaaagatcaccaagcgggaaacgatcgagggggagctcggtcggttccggcttcgcaaaggagaacagccacaacacatgtacaaccgactcaagaccttggtgaaccaagtgcgcaacctcgggagcaaaaagtgggacgaccacgaagtggttaaggttattctaagatctctcattttccttaaccccactcaagttcaattaattcgtggtaatcctagatatactaaaatgacccccgaggaagttatcgggaattttgtaagttttgagtgcatgatcgaaggctcgaggaagatcaacgagcttgatgatccctccacatccgaagctcaacccgtcgcattcaaggcgacggaggaaaggaaggaggaatctacaccaagtagacaaccaatcgacgcctccaagcttgacaatgaggagatggcgctcgtcatcaagagcttccgccaaatcctcaaacaaaggagggggaaagactacaagtcccgctccaagaag

SEQ ID NO: 24866 - DNA, 1890 bp, Zea mays
  Peptide Sequence Number=SeqID_66645
atgccgttcggcttgaggaatgcgggcgcgacgtaccagcggtgcatgaaccatgtgttcggcgaacacatctgtcgcacggtcgaggcctacgtcgatgacatcgtagtcaagatgaggaaagcttccgacctcctttccgaccttggagtgacattccgatgcctcaaggcgaaaggcgtcaagctcaatcctgagaagtgtgtcttcggggtgccccgaggcatgctcttggggttcatcgtctccgagcggggcatcgaagccaacccagagaagatcacagccatcaccagcatggggcccatcaaggacttaaaaggagtacagagggtcatgggatgtctcgcggctctgagacgcttcatctcacgcctcggcgaaagaggtctgcctctgtaccgtctcttaaggaaggccgagcgcttcacttgtacccctgaggccgaggaagctcttgggaacctgaaggcgctcctcacaaaggcgcctatcttggtgcctccagctgtcggagaagccctcttggtctacgtcgccgcgaccactcaggtggttagcgccgcgattgtggtcgagaggcaagaagaggggcatgcattgcccgttcagaggccagtttacttcgtcagcgaggtactgtccgaaaccaagatccgctacccacaagttcagaagctgttgtatgcagtgatcctgacgcggcggaagttgcgacactacttcgagtctcatccggtaactgtggtgtcatccttccccctgggggagatcatccagtgccgagaggcctcgagcaggatcgcaaagtgggcggtggaaatcatgggcgagacaatctcgttcgcccctcggaaggccatcaagtcccaggtcttggcgaacttcgtagccgaatgggtcgacacccagctaccgacggctccgatccaaccggagctctgtaccatgtttttcgacgggtcgctgatgaagacgggagccggcgcgggcctactcttcatctcgcccctcgggaagcacctacgctatgtgctacgcctccatttcccggcgtccaacaatgcggctgagtacgaggctctggtcaacgggttgcggatcgccatcgagctaggggtccggcgcctcgacgctcgcggtgactcgcagctcgtcatcgaccaagtcatgaaaaactcccactgccgcgacccgaagatggaggcctactgtgatgaagttcggcgcctggaagacaagttctacgggctcgagcttaaccacatcgctcggcgctacaacgagactgcggacgagctggctaaaatagcctcggggcgaacaacggttcccccggacgtcttctcccgggatctgcatcaaccctccgtcaagatcgacgacacgcccgagcctgaggcgccctcggcccagtccgaggtaccctcggtccagcccgaggtaccctcggcacagcccgaggcaccctcagctcggcccgaggcaccctcagctcggcccgagacgccctcggttcagcccgaggtaccctcggcctccgagggtgagggcactgcgcatcgaggaggagcgaagcggggcccacgcctgatcgaaactggcagaccccgtacctgcaatatctccaccaaggagagctacccctcgaccgagccgaggctcggcgggtggcgcgacgcgccaagtcgttcatcttgctgggcgatgagaaggagctctaccaccgcagcccctcaggcatcctccagcgatgcatctccgtcaccgaagaaggcgcccgggggctacacgcacctgctggtcgccatcgacaaattttccaagtggatcgaggtccgacctctgaacagcatcaggtccgagcaggcggtggtgatagtcgcctag

SEQ ID NO: 24867 - DNA, 276 bp, Zea mays
  Peptide Sequence Number=SeqID_66646
atggcgcgtggtacgcggcggctgcagggcgcggcatcggtcgagctcgggcgctcgctcggcgcggacgtcgagccgggggcgttgcgcctggcgcgcagaagcagaggccggggcggctcgctcggcggctgcgtagacgcgcagggcgcgcggtccgccgcggggcatcgggcgcggcttggccgggcggctgcgcgcggctgcgcgctcggctggggcacgctcggctggggtcgcgggcagtacctctttttaaaatggattgatatttaa

SEQ ID NO: 24868 - DNA, 1131 bp, Zea mays
  Peptide Sequence Number=SeqID_66647
atgcctttcgtatgttctggtattgactcatccacatgtgttgagatcgctgcgttgctgctggagaacggagcggacgtgaacggcaggaacatctacggccaggcgtgccggttcggccactgggaggtggttcagacgctgctgctgttcagatgcaactgcaagtgcaaccgaccgacgggcgatggtggttatctgtttcgattcaaggtgtccaaggcggacagcctgagcggcaggacggcgctgcacgtggcggcggcgggcggccacgtcaggtgcgcgcgcctgctgctcgcgggcgccggcagcggcaggagcaagctcgtgaaccgggcggccagcggcggcggcggcggcgtgacggcgctgcacctggcggcgctgcacgggcacgccgactgcgtgcacctgctggtggacgagcgcgccgacgtcgccgcgcgcacgctgccctgcgccgcgccgcccatggcgtccgtcggcgccgggagcgcgccgctgcactacgcggccgccggcggcgaggtcaagtgctgccagatcctcgtgtcgcgcggggcggacagggccgccgtcaactgcaacgggtggctcccggtggacgtggccaggacgtgggggtgccactggctggagcacgtcctgtcgcccaagtctctgctgcccatccccaggttcccgccctccgcatacctctcgtcgccgctcgccagcgtcatcaccctcgcgagggattgcggcctggctctgaacatgtcgtcgctgccaatggacaccatggacggcggcgccgacgacggcgacgcatgcgcagtctgcctcgaaagaccctgcaacgtcgctgccgaagtgtgcgggcacgagctgtgcgtcaagtgcgcgctggacctgtgctcggtgatcaggtcctacgacgcgccggggatcgccggcaccatcccgtgcccgctctgccggagcggcatcgcctcgttcaggagacgggccgcggcggccgaggccgagcctggcgccaatgccggcgaccggcaggcgtcgtccagcccacacaagaagcggagcacggagtccgaccaggacggcctccccctcgtctgcgctcctcccgccgtcatgtcgtcctga

SEQ ID NO: 24869 - DNA, 2139 bp, Zea mays
  Peptide Sequence Number=SeqID_66648
atgccgttcggcttgaggaatgcaggtgcaacgtaccagcgatgcatgaaccatgtgttcggcgaacacattggccgaacggtcgaggcctacgtcgatgacatcgtagtcaagacaaggaaagcctccgacctcctttccgacctggaagtgacattccgatgtctcaaggcgaaaggcgtgaagctcaatcccgaaaagtgtgtcttcggggtcccccgaggcatgctcttggggttcatcgtctccgagcggggcatcgaagccaaccctgagaagatcgcagccatcaccagcatggggcccatcaaggacttgaaaggcgtacagagggtcatggggtgcctcgcggctctgagccgtttcatctcgcgcctcggcgaaagaggcctgcctctgtaccgcctcttaaggaaggccgagtgcttcgcttggacccccgaggctgaggaagccctcgggaacctgaaggcgctcctcacgaacgtgcccatcttggtgccccccgctgccggagaagccctcttgatctacgtcgccgcgaccactcaggtggttagcgccgcgattgtggttgagagacgagaagaggggcatgcattgcccgtccagaggccagtctacttcatcagtgaggtactgtccgagaccaagatccgctacccacaaattcagaagctgctgtatgcggtgatcctgacgcggcagaagttgcgacaatactttgagtctcatccgatcatccagtcccgagaggcctcgggtagaattgcaaagtgggcggtggagatcatgggcgagacgatctcgttcgcccctcggaaggccatcaagtcccaggtcttggcggacttcgtggctgaatgggtcgacacccagctcccaacaactccgatccaaccggagctctggaccatgtttttcgacgggttgctgatgaagacgggggccggcgcgggcctgctcttcatctcgcccctcagaaagcacctacgctacgtgctacgcctccacttcccggcgtccaacaacgtggctgagtacgaggctctgcttgtcatcgaccaagtcatgaagaactcccactgccgcgacccgaagatggaagcctattgcgatgaggttcggcgcctagaagacaagttctacgggctcgagctcaaccacatcgcccgacgctacaacgagactgcggacgagctggctaaaatagcctcgaggcgaacaacggttcccctggacgtattctcccgcgacctgcatcaaccctccgtcaagaccgacgacacgcccgagcccgaggcaccctcggctcagtccgagaaggcacccgggggctacacgcacctgctggtcaccatcgacaaattctccaagtggatcgaggtccgacccctgaacagcatcaggtccgaacaggcggtggcattcttcaccaacatcatccatcgcttcagggtcccgaactccatcatcaccgacaatggcacccagttcaccggcagaaagttcctggacttctgcgaggatcaccacatccgggtggactgggccgccgtggctcaccccatgacgaatgggcaggtagaacgtgccaatggcatgattctgcaaggactcaagccgcagatctacaacgacctcaacaagttcggcaagtggtggatgaaggaactcccctcggtggtctggagtctgaggacaacgccaaaccgagccacgggcttcacaccgttctttctagtctatggggccgaggccatcttgcccacagacttcgaatacggttccccgaggacgagggcctacgccgaccaaagcaatcgggccaatcgagaagactcactggaccagctggaagaggctcgggacatggccttactacactcggcgcggtaccagcagtccctgcgacgctaccacgcccgaggggttcggtctcgagacctccaggtgggcgacctggtgcttcggctgcgacaagacgcccgagggcggcataagctcacgcctccctgggaagggccgttcgtcatcgccaaaattctgaagcccggaacatacaagctggccaacagtcaaggcgaggtctacagcaacgcttggaacatccaacagctacgtcgcttctacccttaa

SEQ ID NO: 24870 - DNA, 174 bp, Zea mays
  Peptide Sequence Number=SeqID_66649
atggtcagtggagcattgtatgccaaggcgatgagccctggccgcgaacggggaatcgatggggacggtacgcttcaagatatggttgatggtgtgacttggcctaccaccttgccaccgggttggacggtcgagtgggatgctgctccaacaggagaggagcaagaggagtag

SEQ ID NO: 24871 - DNA, 405 bp, Zea mays
  Peptide Sequence Number=SeqID_66650
atgggcactctttgcatgttgggcacagaagtcgcagagcccatcatccgccggatgccccctccctgctcttctgggttagcaaaaatcgatctcctccctcttctcctctggttcgagcaaacaacacccgaactcaccctcttctacaatcgtgatggggaggacattgacaagattcgtttaccaattgccataccttttgactgtttggagagcaacattgaggggcatctgactggtgatttgggcggaaatggggagtttatgtggccttcgagtttagggatggaggatctcatttatcttggcaaggatgttcttaaggagcttcgtcataagaaaaacttcgtcatgaatatctttttccccgccgaaggtcctcgatacgaagacattgtttga

SEQ ID NO: 24872 - DNA, 351 bp, Zea mays
  Peptide Sequence Number=SeqID_66651
atggctgaccacgcggctcctatgcgccgctgttctctacgccgggcatggagcttcctcgtccgcaagctcctccctgctagccgtggagctcctctgcatcacgcgctcctcctccctatcccagatctcgcccgcgccctggccctggtcggttcctgcacatcccaggcatggatgccctcagatctcgtcagccgccgttctctaacccgtgtgtcggtcggtgtcgtggagttttggtttgatcggctcgtcgttgacctcgccggtgtcgtcgagcctgtcgaacctcgttcttccctgctcgacctcgtcgaaccccgaatcccggacgttgggcaaatataa

SEQ ID NO: 24873 - DNA, 708 bp, Zea mays
  Peptide Sequence Number=SeqID_66652
atgcaggtggcatgcaaccgcaccaagggggcgcaccctttcgacttcgacgcgtccagcatggaggcccaggcccacacgtcatggaccgggaaaggggatactccaaaagggatccttctccgcgaaggaagcgggcctcgagcccccctactgatcagaggttcgaaggctggcccctcggaaggattcaacagccgccttagagcactcgggctccgcgcccactactggtcagaggttcgaaggctggcccatcggaagggttcaacggccgcctcaggccactcgggctccacgcccactactgatcaggggttcgtaggctggcccccgaagggttctgacagccgcctcagagcacgcagagcgagggatgaccctgggtacgttcgatacataaccaaggctcaggctacgctcccgagagtgaggctgacagcagctaagtccagcctcgggcgccataggaagctccgcctcgcccaacccctgggctcggcccccatctcggcctcggaagatggacttcgcctcgcccgaccccagggctcggactcagccatgactcagaagacgacggactccgcctcgcccgaccacagggctcggacacagcctcggcctcagaagacggtctccgcctcgcccgacctagggctcgaaccgaccgcgtcacaaggggggccatcattaccctacccctag

SEQ ID NO: 24874 - DNA, 144 bp, Zea mays
  Peptide Sequence Number=SeqID_66653
atgaatcgactgtcaagcttcggcgaccaagagatcaaactcttcgagttctacgaggctgaagattctgagcatctgtttggtaaagaaggtgtcgaggcggatctccaggagttccaggactttgacgagttcgaggattag

SEQ ID NO: 24875 - DNA, 360 bp, Zea mays
  Peptide Sequence Number=SeqID_66654
atggatcttgcaatcctcagcggacaccatgtcttctctacacctctgagtctgtctgcacaagggcagcttgcttctcttcccgtagtgacatacgcagacgtgggagtcgcaggccacgctggaggcccgcatctccgcggagaggcagaatgcgtcgtgctgtcggccggccctcgccagagaatcgacgagcatggtctacgagaactcggtcctgcggggcgtttcgtcgagcacctgcagcaccagctcgacgcggtcggccttggcttaggcattcgagagcgccatggagacaaacacggaccaacgttggaggaggacgccaccacaggaagatgcgaagggtttggctga

SEQ ID NO: 24876 - DNA, 1356 bp, Zea mays
  Peptide Sequence Number=SeqID_66655
atggagaaactgcgatttatattgtccaagttcagtagtaatccatctgatctgaagctgatggataagtatgaagcatccgagttcaacactctatttgatccgaatacgatggagaagacggcggaggacctgtcgttcgatgttctgtggcttatctttgctaatctggagttacctgaccttgtgcgtgctggatcagtctgttccatatggcgtgacatatacacgagtctatgcaacagtggatcttacaatcctcagcacacaccatgccttctctacacctctgagtctgctggcacaaaggcagcttgcctgtacagccttgcagagaagaagacctacacgttaactctgccggaccctcctctctgtagcaggtacatctttggctcgtcatatggttggattgtcaccgctgatgagaggtctgagttgcacattgtaaaccccatcaccggcgaccagattgccttgccatctgtcaccaccattgatcaggtgaagccgatctttagtgatattggagtcgtttgcggatatgagcactcagggtactctggggtgtgggaagtttcggacataccgtccatatttgacctcagtgagctacgtgaccacctcttccacaaggtcttcctctcttcagatccatccgcgggagactactttatggtgctcatccataacccacactgtcagctttcctttgcaagggcaggggatgataaatggacttggttgccacaaggtgattcctatgatgattgcttatttaatggtcaattgttgtatgcctgcactcaactaggagaaatccatgaattcgatcttggtaccccaacaatcacgcacaagatatttttgggtcgtgttaaagatctctatgacgagaagatttacatggttcaagcttcatgtggtcagatgctgcaaatatggaggtccgacgacactatagaagaaggggataacgaagatgaatatgatccagattttggacctgacttgccttggcatagtacctccatgatcaaagtttataaactggaaccaacttcaaaaaaacttgttgagataagtagtctgggtgcgaatgtgttgtttcttgggcacaacctatcactttgcctccatgcagaagaacacccacagctgaaagcaaatcatatctacttcgctgatgacgaaccatatacatatttcaagagtaaacgacgtgatattggtgtatttgacttggaacgtaattgcagcgagaaaatagtatctcctcagctttggtccaactggccagccccagtgtggttagttccaaatccaaggcgaataggcctatcattgtgcaagtag

SEQ ID NO: 24877 - DNA, 162 bp, Zea mays
  Peptide Sequence Number=SeqID_66656
atggagaagcctcgtcaatggtactacctcgcagacctgcaaagagagagtagagggatcgtccaggtgcgcgtcgacgtccacgggtccgtggagaaccaccgcgtgtgcggtcgcaccgtccccaacaacaggagaaggaaaggcgaggtgcgcgtgtga

SEQ ID NO: 24878 - DNA, 714 bp, Zea mays
  Peptide Sequence Number=SeqID_66657
atggacaagttgactaagctcgtcctgaggccccaatacttggttcagacagtggctgacaggcagttcccctcacagaccttatcgcagttgctggtgtcaagaaggcatacaggaaggcaaccctttgtgtccatccagataaagtgcaacaaagaggtgctacaatcagacagaaatacatttgtgagaaggtgtttgatcttcttaaggtttgagaagtactttaggcagatggctgatggtgccttttgtgttacaaaagcaatgcaacatgaacttgatcaaaattggggaatcaggctagggaattccatctgtagtgctatgggcaatgccaaatgcatattagtggaggaagtatgggaagacatgaacattactgtcttcgccagtaagattgaaggtgaagttttcttgaagtctaatagaccgtcacttgtgagcagcacaagcaggacgccagatgaagatttcagcatacttctggaagcagtattgatgtacgacagacgtgtcgctgcagctttaggtgaagatgattcaacggatgaggagcaactttggattgatatcaagaatgcgaagcaatttgtctacccaagattactgtttattgttacaggtaaaggacctgataggaagaaatacgaggatcagattaaaaggttgaagttgagacgtgttgccttgcggacgatgtggcttgcatga

SEQ ID NO: 24879 - DNA, 222 bp, Zea mays
  Peptide Sequence Number=SeqID_66658
atggcgcaccggacagtctggtgcgccaccggacagtgtccgggaaggatactcatggagatgaactatatgcttgcttatggttcaactgaagcttctttgaggttgttgtggaggtttgtccaccttgaacatttgttgccctttcaggttattgccttagacattaatttacctatgaagcaatcattccatattctccatgaacagtctttacagtga

SEQ ID NO: 24880 - DNA, 177 bp, Zea mays
  Peptide Sequence Number=SeqID_66659
atggtggaagctcaccgtcaatttcgggtgcgcgcgtacccgttcatgctagtagacctggatcgcaggatagagatcgtgcgggcgaggggtaatcagggccattttgaatctgggacgcaggtagtcgatccagcggtcgtgatcgcgtaccgattcgcgatgtcacggatctaa

SEQ ID NO: 24881 - DNA, 1257 bp, Zea mays
  Peptide Sequence Number=SeqID_66660
atggagaagacggcggaggacctgtcgttcgatgttctgtggcttatctttgctaatctggagttacctgaccttgtgcgtgctggatcagtctgttccatatggcgtgacatatacacgagcctatgcaacagtggatcttacaatcctcagcacacaccatgccttctctacacctctgagtctgctagcgcaagggcagcttgcctgtacagccttgcagagaagaagacctacacgttaactctgccggaccctcctctccgtagcaggtacatatttggctcgtcatatggttggattgccactgctgatgagaggtctgagttacacattgtgaaccccatcactggcgaccagattgccttgccatcggtcatcaccattgagtgggtgaagccaatctttagtgatactggagccatttgcggatatgagcactcaggatactttggagtgtggataacttcaggcataccgtccatatttgacctcagtgaactacgtgactatctcttttacaaggtctttctgtcttcagatccatctgcgggagaatattttgtggtgctcatccataacccacactgtcagctttcatttgcaagagcaggggatgataggtggactttgttgccacatggcgattcctatgaagattgcctatttaatggccggttgttgtatgcctgcactcgatttggagaaatccatgaatttgatcttggtaccccggcaatgacacacaagatattattggatcgtgttaaagatatatatgacgagaagatttacattgttcaagcttcatgtggtgagctgctgcaaatatggaggtatgacgacactttagaagaaggggatggcgaagaagaatatcattcggattctgaacttgccttggatcgtgagttaccttggtacagtacctccatgatcaaagttcataaagtggaaccagcatcaaaaaaacttgttgaaataagtagcttgggtgccaatgcgctatttcttgggcacaaccaatcgctttgcctccatgcagaagaacatccgcaactaaaggcaaatcatgtctacttcgctgatgacgaaccatatatagctttcaagaataaacgacgtgatattggtgtatttgacttggagcataatcgcagcgagaaaatagtatctcctcaactttggtctaactggccagccccagtgtggttagttccaaatctaaagcgaataagtttgtcattgtgcaagtag

SEQ ID NO: 24882 - DNA, 183 bp, Zea mays
  Peptide Sequence Number=SeqID_66661
atggattttgtggcagaggtgtttggcggggaagggagttacaagcacgttgtggtcaagagagggagagaaacccccgagcttataggctcattgaggtggagtatgcacgggtgcatcgccgcggtcttcgtgaggaactaccagaatgttcgctaccagcagaacacccaaggcaattag

SEQ ID NO: 24883 - DNA, 111 bp, Zea mays
  Peptide Sequence Number=SeqID_66662
atggctgccgtcgacgacatggccgtaggaatgacaaggtcgatcgggggaagatctcgggatgtcaactgtaatgtaatcgagaccaatgagacattgacaatgttataa

SEQ ID NO: 24884 - DNA, 318 bp, Zea mays
  Peptide Sequence Number=SeqID_66663
atgggggagctagtctttggaagaaacccctgcgcacagatcagaggggggcgagctagagctgggcgacgccatggagagggtcagggagctgggaacaggaagcagggggacagatccgaccatggccaggagagtacgccggtgaggcttggtggaggagcatcgggcgctcaaggaagaagaggcggggcgagcatgagtctaaccactcgaagtgatgtcgggagatcacgccaagaaggagatcgtgaccggcggcgacaagtccgcaagctcgggaagaacccattcgagggattccggccacaagcataa

SEQ ID NO: 24885 - DNA, 222 bp, Zea mays
  Peptide Sequence Number=SeqID_66664
atgttcggattacatgtggtgatgagaatgatggttttggtattgactctggtgatggttgtccgcattgcaaccactgctcaggagaagatgaagctgtggaaggagacttgcaggagttccaagattacgacgagttctaggcgtgggttagcggcaacccccagtcggctgcctatgaaggccgcgtgtatctacatttcttttccgcactttgattaa

SEQ ID NO: 24886 - DNA, 408 bp, Zea mays
  Peptide Sequence Number=SeqID_66665
atggactacaaggccattctagggcaatgttgcgagatgactgtccgagacatgctgttgccggtcggcggggtcgccggatcgcttctccttgatgagaaattgtttttgcttgtctgggacgacaaacacgccaccatgatgtcatggtgggaggaggaggagcaggatagggagaagcaagacccacaggcgctggctttgacgagagctaggcataaccatggatgtcacatcgcttgtgcaggttgtttttacctttcttattcttcatttctttctaatgtgcggataattaagtttgttgagcttcatgctcatttaaatggtggtgccgagtgtttcttaaatgttaaagaaagtccaatcggtaatggttcttgcaaagaattgcatgttcccaattag

SEQ ID NO: 24887 - DNA, 222 bp, Zea mays
  Peptide Sequence Number=SeqID_66666
atgtcccaccccgtgggctcccacagcaccaccagcctcggtgcgctcaccgtcaccgagacattgtactcgatcgagaaggtgttcagcttcttgcccttcttctacttcggctccttaggcttcttgccgccggcgtcggtggctccgttcgttgttacgcagcagttgcccatccctagccgccgcggagatccggcagccccagagaaggcgaattga

SEQ ID NO: 24888 - DNA, 300 bp, Zea mays
  Peptide Sequence Number=SeqID_66667
atggggcggcgacaagtttgtatagtgcgcacgcacggaccaggaaggcagtgcgtctcctccccgatctacggactgtcaaacgagggaaccagtgaaccaccaagcacgacgatggggccggagcggagagatccagtaggcctgcgcgaccgctccgggacgccggagccacacgccagcggcggaaaagggggaaacccgctcaccttggcgtccgcggggccgtgtgcggccgcagcggggagcggttggtccacctgcatctggtccgatggatgggctggaggcgctagctga

SEQ ID NO: 24889 - DNA, 1176 bp, Zea mays
  Peptide Sequence Number=SeqID_66668
atggaggcgggatggcgcgaatcgcgtgcggtgtataggtgtgcgggcggggttttcggcgacctttgcggcgggggtgggcggagggcgagcgtaggcgtgcggcgcaacgcggccgcgacgaagacggaggtcgggtggggccgcgacgaaaacggttgccggggggatggaggcgggatggcgcgaattgcgggcgttcggggcgtgcgggtgtggttgtcggcgagctttgcggagggggcggggcgaggcgagggttcatcagcagaagctgcttgcaccgccgccgccgccctcttcctgttctactgcttaatcttagattttgcttcgggttcggctaaatttcgtcggatggatatcgatgccagcgccagcgtcatgtgccagctgctgagccccgagggagaccctctaggctctgcgctctatctgccccagaacgtcgggcccccgcagctccaggagattgtcaatcagctcctccacaatgaggagaagttgccctatgcattctacgttggagacgaggagctctctgtccacctgggtgcttacatgcggcagaagaacgccaatgttgaggttactctgcgcatagtatgccaaccacaagcacttttccggatcaggccggtcaaccgatgctctgccacgattgctggccacacggaagctgtaattgctgtttcttttagccctgatggaaagagtttggcgagcggttcaggtgacaccactgttcgcttttgggacctgagtacacagactccactgttcacatgcaaaggttcaaacctatccctcgcaatgaacattgaacacactattagggatgaaagacacaaaaattgggttctctgtattgcatggtcacctgatggaaaacatcttgttagtggtagcaagtcgggagaacttatattatgggacccaaaaactgggaaccaattgggcactccacttatgggacacaggaaatggattactgctgtatcatgggagccagttcatttgcagtctccgtgccgccgctttgtaagtgcaagcaaggacggtgatgctcgcatttgggacatcaccacaaggaaatgtgttatttcccttacaggtcacactagttcagtgacctgtgtcaagtggggtggagatggtttgatttatactgggtaa

SEQ ID NO: 24890 - DNA, 354 bp, Zea mays
  Peptide Sequence Number=SeqID_66669
atggccttaactctgcagaggaattttgttaagtactttgatagacaaattatgccaaccatacaatggggaaggcgcacaagaactgtcttggatgttggatgtggtgttgccagctttggtggatacctgcttgacaggaatgccattactatgtcatttgccccaaaagacgagcatgaggctcagatacagtttgccctagagcgtggaattccagcatttatagcagtaattggaacacaaaagcttctgtttcctgataatgtgttcgatgttgtacactgtgcaaggtgcagggtccattggtggaaaaccattgtacgaatcaagcttgattcatcagacatttaa

SEQ ID NO: 24891 - DNA, 276 bp, Zea mays
  Peptide Sequence Number=SeqID_66670
atggcgggttcaaaatatagctctgacggttccaccagcaatatcatagagacttgggaaaccttgtcggctgaagaacaactcaagttcgaggagcatcaggagcagctgatcaaggaagcgaagacgaaattcctggccaactttaaagtggacaggaacaataaagtcgttcaacaacaggcgacaaatctggcttcgctccgacctactacggctaccccaaggaaatgcattcgcatggtatgtgaaagtcgcctagaggagggtgaatag

SEQ ID NO: 24892 - DNA, 285 bp, Zea mays
  Peptide Sequence Number=SeqID_66671
atgccagtgcccgtcctcgggtggggtctccccggggctgccaccgcctacgacgccacgtcctgggccatcgcggtcgagcaggtggcgtatgtgacgcgccactgcagcgacccgtcgtgggacgcactccaggggctttggcccttcgccaaactctccatccgctcgaggaggagcgccgcaagattgaggagctcaagaacaagtccgcggactggcagctcggtctcctccagtttggctccaacaactctgagcttgataaacaccataataagttga

SEQ ID NO: 24893 - DNA, 492 bp, Zea mays
  Peptide Sequence Number=SeqID_66672
atgaatccatcttcgaatgccccccacccccatgccctgagccctaagcttcaagcccccggagacaccatcgtctacctctcgcccgcctacctcctatcctcgcgtctggacatccaagccgccatcgccaaggacaccgagctgcgcgcactccatggctcgctcctccagagcggcagtgccaccgcatacaatgtcggggcctacgccagcgctagcaggagcccccgtcgtcatttgcctaccgtcgaccgtgttgtcgacgtcagcgctcgccaggccgggcctcctggccacgacgaccaaggagtaccccgtgtttgcccccgatacaacatatacgacaatggcgatgaaatgatggaagcaaatgtgcaaaccaagctggtgctgtgtgaatttgtgatgagcaatccaagtgatacaacacaacctctatccaatactttgccttcgtccttcaagacttccgcaagaggagcaacttag

SEQ ID NO: 24894 - DNA, 516 bp, Zea mays
  Peptide Sequence Number=SeqID_66673
atgtccacgagtcgagaagtagacacagaactacagaagaatgaactagatgcttcgaacttcacaaaccaactaattaacttaggcaacaatggatatgaagatttactgttgagtgtcagggctactgcaggcaccgcatccagctacaagctatgttgccctgatacggggacacggatacgcgatacgccgataccccgatacaccatttctcaaaaaaatacggatacggcgatacgcaatgaatttccaatacgcctcggaaacatatccagaaagtattcgtatctgatacgatatccaacaccgaatgcaaaaatcagggttccaaaaagcgacactaagcgcaggtttcagcgcgctgaagcgctaagcagacgggtaatgcttcgctttggggcatacataacgctcccaaagctgcgggaccgcattggtggagcagcagcagttggctcccgctgcccgaaggccgcgcgcggcgcaaccgctggggccgcgcgccgtcgatga

SEQ ID NO: 24895 - DNA, 1512 bp, Zea mays
  Peptide Sequence Number=SeqID_66674
atgctcttggggttcatcgtctccgagcggggcatcgaggccaacccggagaaaatcgcggccatcaccagcatggggcccatcaaggacttgaaaggcatacagagagtcacgggatgcctcgcggctctgagccgcttcatctcgcgcctcggcgaaagaggcctgcctctgtaccgcctcttaaggaaggccgagtgcttcacttggacccctgaggccgaggaagccctcgggaacctgaaggcgctccttacaaacgcgcccatcttggtgccccccgctgccgaagaagccctcttgatctacgtcgccgcgaccactcaggtggttagcgccgcgattgtggttgagagacgagaagagaggcatgcattgcccgtccagaggccagtctacttcatcagcgaggtactgtccgagaccaagatccgctacccacaaattcagaagctgctatacgcggtgatcctgacgcgacggaagttgcgacactacttcgagtctcatccgctcgtcatcaaccaagtcatgaagaactcccactgccgcgacccgaagatggaagcctactgcgatgaggttcggcgcctggaagacaagttctacgggctcgagctcaaccacatcgcccgacgctacaacgagactgcggacgagctggctaaaatagcctcggggcgaacaacggttccccggacgtcttcttctgagacctgcatcaaccctccgtcaagaccgacgacacgcccgagcccgagaaggcctcggcacagcccgagacaccctcggctcagttcgaggtaccctcggctcagtccgaagcaccctcggcacagtccgaggtaccctcggcttggcccgaggcacccttggctcaacccgaggcaccctcagctcagcccgaggtaccctcggcccccgaggaaggcacccgggggctacacgcacctgttggtcgccatcgacaaattctccaagtggatcgaggtccgacccctaaacaacatcaggtccgaacaggcggtggcgtccttcaccaacgtcatccatcgctttggtgtcccgaactccatcatcaccgacaatggcacccagttcaccggcagaaagttcctggacttctgcgaggatcaccacatccgggtggactgggccgccgtggctcaccccatgacgaatgggcaagtggagcgtgccaacggcatgattctacaaggactcaagcctcggatctacaacaacctcaacaagttcggcaagcgatggatgaaggaactcccctcggtggtctggagtctgaggacaacaccgagccgagccacgggcttcacgacgttctttctagtctatggggccgaggccatcttgcccacagacttagaatacagttccccgaggacgagggcctacgccgaccaaagcaatcaagttaatcgagaagactcactggaccagctggaggaggaggctcgggacatggccttactacactcggcgcggtaccagtag

SEQ ID NO: 24896 - DNA, 588 bp, Zea mays
  Peptide Sequence Number=SeqID_66675
atgccggtgacctggagacgccagaagtgggtgcggagccggtgcgggttgattggagcagccgccggtgactacactggacgaccgatggcgtctgagtgcagacaacggatggcacctgaggatataagatgggatggcgaggagcctgatttaaaccttataggtcgtggtgctcccgtccatggtatgaagtcaagcagtcgtggtggccccatgtcaggtaccggaagagacagaggtccccaaaagaactcattcaagaaagattatccatcacaaaacggtattgggaagaagagtgttgactacatagaaattctccatacagagacactcataaaggaggtggagcgggttttcagttcagccaaccctgacccccttgagatggagagggctaagaaagcgctaaaggagcacgaacaatcattaattgatgcgattgcaaggcttgctgaggcgtctgatgatgatcgtgtgcgatctttggagtataaccgtggatggaggaaccaacatggaggaagatatgcggatgatatgaccatggacggccacatggctggagatgcagatgccatgtaa

SEQ ID NO: 24897 - DNA, 222 bp, Zea mays
  Peptide Sequence Number=SeqID_66676
atggcggctggcctgggggagctcgccatggaagaaacccctgcgtgtagatcagaggggggcgagctggagctgggcgacgccatggagaggggtagggagctgggaataggaagcagggggacagatccgaccacggccaggagagtacgccggcgaggcttggtggaggagcaccgggcacggctcaaggaagaagaggcagggcgagcagggagatag

SEQ ID NO: 24898 - DNA, 252 bp, Zea mays
  Peptide Sequence Number=SeqID_66677
atggcctacccctcctgcctctctgccccgatggagccctggttccggagcaaaaatcaagacgagacgcggcaaaccctggcgagatctaggcggaccgagggagaggggaacgtaggaggggacgacgcggcggaagagggcagggcagcagggactggcgtgcgggaggcgagggaaggcgacaacggtgaaattctcattgtaaaggagcctaaaagatttatacttttagtaaactttagcacttaa

SEQ ID NO: 24899 - DNA, 294 bp, Zea mays
  Peptide Sequence Number=SeqID_66678
atgccgatggatgcggctcggtctgtgatggtgcgcggcacggcgtcctccggcgagcaattcgtcgagggtcagccaccgattatgcttggcaagctcccgtacaccaccagtggacttgagggagccacccggaccacccaattaggccccaacagcggcctgcatgcggcaccacggcaacgccccaattggatcttcctcccctcgccaaatgaacgggtgtgccacggcgcaggttccctggtatctggatttgggtttattaggggcgaaggtcaccgcccgaagtga

SEQ ID NO: 24900 - DNA, 282 bp, Zea mays
  Peptide Sequence Number=SeqID_66679
atggctttccttatcactgtacagggtcatctgcacaccaatagggtctgcgacaatgtctggacattcattctaacagatgcaaccttcaagagcgctgagattcaagaaacaccgagcaagatgggtctcaatgcggtggtagccgcctgctacgtcttttccagtacttgtctctgtgctcgcagtccgcttcttctacgtactgtggcacagtggccaaccagagtcaaggttgtgcgccaccagattgcgttgtctcattgtccttggctccggtga

SEQ ID NO: 24901 - DNA, 612 bp, Zea mays
  Peptide Sequence Number=SeqID_66680
atgatgaacatagtaacaacacttcagaaggataggttcacaccaaggtactatgtggctgcacttacagacaacatgagtcttcagaaggcacaggtctatgaacaatcacttattcaggtggagagcaacggaacgaaggctggcgagagcgctcatttcatgcagatatatcgtagtcgtgaagtgggccagtcttatgttacatccatcgcaacaacattgctagccacgctgcatgctatgtggctggtgataagaatcagaccacaagtggtgcttggcttgggatggtcatccattttctacattgaaagcatcgcaagagtgaagaaactgtcattgagtggtttactgctgtacaagctacggatcgctgaccagttcttcgtgcagtggccccagctgcagcatgagtatcctcgagcgtgctatgcagtgttttccatctcagagattcagaatacggtggcaatctatgcacactttgacaaatgcaagttacttaagagcggtggtgcttgctgtagaactggcgatgtcagcgtcatgaacaagtgcatgagggctgtaactgcttatggcctcaagatctacctaattaatttttga

SEQ ID NO: 24902 - DNA, 177 bp, Zea mays
  Peptide Sequence Number=SeqID_66681
atggacactcgtctcctggggtggtccggagccgagcagccgcttagcctagtcctgtaccgtacgctggtatccaacctcgacacatcgagcctgcatcccaagggggccaagtaccagggaggagtcgacaacatcacacacagcagggacaggtggtacacagataagtgctaa

SEQ ID NO: 24903 - DNA, 1583 bp, Zea mays
  Peptide Sequence Number=SeqID_66682
atggtgcgcgagctccgcgtcgactccttctacgcccggctccgcgccgctgcgggctcctcgtcctcgtccccgctcctgatcctcccgtccgccgccgacgccgactcgctgtgcgcggtcaggggcgctcctcgcctccttcgccgccccggccccgccctgcctcgtcctcgtcaactgggggcgcgcaccgggacctgcgcgcgctgctgcccgccgcctccaccgccttcgtcgtcgactcccaccgccccgtccacctccacaacctctgcgcgcgcaacgaccgcgtcgtcgtcctattcaccgccgacgacgagcgcaccgcggatctctcctacgacttcgacctctccgcgctcgccgacgcctccgacctcgccgccgacgccggcgacgacgaccacctccgcgggcggccccggctccgacgcctccgactcggaggattccgatgacgacgaggatgacgccggcggtggcaggaggaagaggcgccgcctctccgacgacgacggcgacgaccccgcccccaacaccgaccccggcaagccgtcggggtgcctcatgtacgacctcgcgcacgcgatgcgcaagaacaccaacgagctcctctggctcgcctgcgtcgccctcaccgaccagttcgtccacgaccgcatcaccaacgagcgctaccaggccgccgtcatggagctcgagcagcacatcaacggctccggcaacctcgacccgtccggcgccggctccgtcgtcacgctcaaggacggcaccaagatccgggcgccggaggcctcgcgcatcgcctacgaggacgagcccaggctcatgctgctgcgggagtggagcctgttcgactccatgctctgctcctcctacgtcgccaccaagctcaagacctggagcgacaacgggctcaagaagctcaagctgctgctggccaggatgggcttcccgctcgcagactgccagaagaacttccagtacatgagcatggaggtcaagcgcaagatgcgggatgagttcgaccgcttcctgcccgagtacggcctcaccgagttctactaccggagcttcttgagagtgcacggctacaggtccaaagtttctgcggcagatgttgtgtacggtgtcacggcgttgcttgaatcactggattcccagtctaaggacacaaaggagtcttcagcggctgagcagttttgggttgcttactctgcactatcactgagcaacgctgaccagttgcgaaaagggatgctgtctgcaattgagatacagagggcaatattgagacaaggaagctcagcgattactaagacagggtttatacggagtgccaagaagttccggtgggtgaagcttgatgaccctgtcgacactaacaagctttgccacccgcaagcacttaccaagttctgcttctttctgctggatgctctcaaggaaaggggtgcaaggatgaagccactgatctgtgcttgcttagcaaaggagccagagaaggtgctagttgtcggggtatgtgggaagccaaggcttggggctgtccaggggaatgcgtttggtaatgctttcag

SEQ ID NO: 24904 - DNA, 190 bp, Zea mays
  Peptide Sequence Number=SeqID_66683
atggagcggcgggagctttttgtgagggcgcgcggggatcggcggatttggaatttgggtttgggtttgggagggaagccgaagaccgccaggcaaaaatttggatttggggacggaaggaaacagacacgagagttctccgtctcccgcttctgggctggatttccacctttgatgggtccttcgcctt

SEQ ID NO: 24905 - DNA, 459 bp, Zea mays
  Peptide Sequence Number=SeqID_66684
atgcaggcggcatgcaaccgaaacaagggggcgcacccttttgacttcgacgcgtccagcatggggcccaggcccacgcgtcatgtaaccggcgcgccggttactatgtgcgagaaactgcacttccacttacgccagtaccgcgccttctcgactgcggaaccagtgccgcgactcgaggcaaccctgcgcatggcccaacagtgccaaccgagcacattggtcatgggtcaggaccgggaaaggggatgctccgaaagggatccttctccgcgaaggaagcgggccccgagccctcctactgatcagaggttcgaaggctggcccctcggaagggttcgacagccgcctcagagcactcgggctccgcgcccactactggtcagagattcgaaggctggcccctcggaagggttcgacagccgcctcaggccgctcgggctccgcgcccactactag

SEQ ID NO: 24906 - DNA, 144 bp, Zea mays
  Peptide Sequence Number=SeqID_66685
atggagctcgcccaggtctccccgcagcgctcaacgcccaacgtcatcaccagagccacctcgccagtgacggcagggctggccgtccttgcttcctcggcgccctctctgctcctctcggccagctgcttgcccgttctttga

SEQ ID NO: 24907 - DNA, 776 bp, Zea mays
  Peptide Sequence Number=SeqID_66686
cctcggccccgtccgcctcagctcacggccatggcgcgcggccacgacgcgcggcccgcggcctcggccccgtcctggcgcggcaccctcccctgcggcagctcggccccgactccccctccctcagccccgtcccggcgcggccggccatggcgcgtgcgcccaccccggccccaccctgcgcgcggtggcgctcggtccggcgcgaccccggcggccccctccctcccccggccatggcgcccgcccgacgcggcccggccatggcgctcgcccatcccgacgcgctcggccccgccccggtgctcggccccgtcccggcgtgtgcccctgccccggcgcgctcgccccgcccagccccggctcgcccgcccctccccgcgcacgtccgcggcggcgtggccctactgctcgcgcggtcctgcgcgtccgcggcttggcgcggtcggcccccggcgcagccccgctgcctgctcgcggcgcgcagcgcgtcgcgtgcgcggctcgggccccgacgtgtgcgcgacttgttcacggcacgtcagcgtggacttgcgcgcacgcgtgctcgcgtgttgcgcgcggtgctttggcgcggctcgccatgtcctcggttgaggagtccgaagaactcacaggagaagcccctgagcaacagctatttggtggaggcaagtgacaatgagaatgatggttttggtattgactctggtaatggagaagatgaagccgtggaaggagacttccaggagttccaagattacgacgagttctag

SEQ ID NO: 24908 - DNA, 1230 bp, Zea mays
  Peptide Sequence Number=SeqID_66687
atggagagctgggtccgcgcggtggtggaggccatccactcctctcgctcccagacagtcatctacctcgccggcggtgcatcccaggcgctcggttggctcctctccgtgcccggcgcttcgggcaccgtcctcgaggtcgtcgtgccctactctagggcctccatggcgcagctccttggcaagatgcccctgcaattcactagcaagcaggctgcagaggacatggcactggccgcatacaatcgagcactcaagctttctggaccaggtctgcaagttatgggtgttggatttactgggtcactggcgagctcacgtccaaaacatggtgaccacaggttttacgtgtcaacatggacacataattgtctcaggacatcacatgttaccttgtcgaagggtttacggagtagggaggaagaagacaaggtttcaagctactttttgcttaaggcaatagcagatacctgcagagtttctgcaaccattcagtcagacattcacaaatctgaaattccagaagaaatcatggaacaatttgatgaagatcaagaactccagcaagttattaatgggcaagtttgcatgaaagtatataattttgctgctccggcggaaagtaacttgaacagaaaaataattctgcctggttcgttcaaccccttgcacgatggtcaccttagattgctagaagctgcagtaagcatgtgtgatgatgggcttccattctttgagatatcagcaattaatgctgataaacctccactatctattgcagaaattaagaggcgtgttgagcaatttagaaaagcagggaagaatgtgattatatctaaccagccatacttctataagaaagcagaacttttcccaggaagcgcttttataattggtgcagacactgcagcaaggcttgttaacgtacaagatatccatggaaatctctctctggctggtatcgagcaatatctgcagctgtggaaagttcttgacaattttcagttacgaaattctaatgacaagcatgtgtggagacttagcagtaatggcttgtttagctccaaatcggcctacagggctttcttcattggagttgaaaccttcgagcctttgaaaaggatctggaagagctgggcagcccctaagtgtaaggtctttatttggcttgctatcaacaataaatgttggacaacagacaggttgcaaaagaggtttggattatcctga

SEQ ID NO: 24909 - DNA, 318 bp, Zea mays
  Peptide Sequence Number=SeqID_66688
atgcacatgtcatccgaggcggtgaaggtgacaatgctagaatcgatgttccgcagacggaagcgtgaggagcagtgggctgtcaagaagaagaaggccatgcccgagaagaagaagtccatcgagagacgcaagctcatattcagtcgtgcaaagcggtgggtagtagggcttcttctgcgtttgaagcagacaattggtcaagcaaaggatgggtgcaagaagagcttcgaggtaccaagtgcatggagaaggtcaaggaggctgaggaacctaaagccaggggtgaagaagaagacttgcaaaatcaaggattga

SEQ ID NO: 24910 - DNA, 363 bp, Zea mays
  Peptide Sequence Number=SeqID_66689
atggcgttcactgcgccctacaccattccaaaataccccaaacactgcatctcctccacgcggctgagtagatccctagacatcccaaattccacagtatgcccccgacaacaactccactaccagtctaccaccgtcgaatcactaactgtcttctccgatgacgatgcgttcgacgacgcagacggagcagacgatgacgaggaagagggcgacataacatacagtatgcagcgacggacaatttgcttcacatgggacatttcaccagtgacaagaaatggaaaacatgtaatagtttgctcacgcaaagaagtcaaggtttctgtgagccagagtgtaaagttttttccccatggctag

SEQ ID NO: 24911 - DNA, 1942 bp, Zea mays
  Peptide Sequence Number=SeqID_66690
atggctgctcacctaccacgcctccccgtcctcctcctcgtcctcctcgctgcccatgtcgtctccacctccacccgtgccgagcctcttcttcccagcacttacaacgtctccatgtgctcggaatcgttctggtgcggcggcgtcgagatccgctacccgttctatcttgccaacgcaaccgccgactacagcgggagctactactcctgcggctacaccgacttgagcgtttcctgcgaactcgaggtcgaggggccgccgacgacctggacccctaccatccgtctcggcggcgacaactacaccgtcaagaacatcttgtacgactatcataccatctcactggcggacagcgatgtgctcggaggcggcgagtgccccgtcgtccgccacaacgtcagcttcgacgagacgtggctgcacaacgccagcgccttcaacaacctcaccttcttcttcggatgccactgggggccacgcgatacactgcctgaatttgccggctataacatcagctgcgacgggttcagtactccaactatcagcggtggaggctccttcgtgttcaagactgaagatcttgacgaacaagaggagcaggatttcgcttcacactgcgacgaggttttctccgtgccagtgggaagcgaggctctgcgggcgaccgacaccttcagcctctcaaggtacgggtacggcgagctgcttaggcaggggttcgagttggaatggaatcggacatcggaggatcagtgtggccagtgcgagggatcgagctccggcggacggtgcgcctacaaccagaagagagaattcctgggctgcttgtgcagcggagggaaggcgggcaacccgttctgcaaaccctcaatgtcccctgtgtgcgagtaccgcgctgctccagcttgcctcctgctaacgcctaacggtgctgttgttgccgttgcattcctgtgtctagtcattctcacatgcttcttggcttgtagacatggttcgctgcccttcaaatcgaagaacaaaccagggacaaggattgagtccttcctacagaagaacgagagtagtatacatccgaaaagatacacctacgcggacgtgaaaagaatgacaaaatccttcgctgtgaagctaggccaaggtgggtttggtgctgtatacaaaggcagcctccacggccgacaggtagcagtcaagatgctgaaggacacccaaggtgacggcgaggaattcatgaacgaggtggctagcatcagcaggacttctcatgtcaacgtcgtgacacttctagggttttgcttgcaagggtcgaaaagagcactgatctacgagtacatgcccaatggttcgctcgaaaggtatgccttcaccggtgacatgaacagtgagaatttgctaagctgggaaagactatttgacatagcgattggcacggccagagggctcgaatacctacaccggggatgcaacactcggatcgtgcattttgacatcaagccacacaacatcctgttagaccaggatttctgccctaagatctctgactttggactggccaagctatgtctgaacaaagagagcgctatctccattgttggcgcaagagggacgatagggtatatcgccccggaggtctactcaaagcaatttggaacgataagcagcaagtctgatgtctatagctatgggatgatggtccttgagatggttggagcaagggacaggaatacaagcgcagatagtgaccatagcagccaatatttccctcagtggctttatgaacatttggacgactattgtgttggtgcttccgagattaatggtgagaccacagagctcgtgaggaagatgatagttgtaggtctgtggtgcatacaagtgattccgactgatcggccaacaatgacgagagtcgtcgagatgttggaagggagcacaa

SEQ ID NO: 24912 - DNA, 423 bp, Zea mays
  Peptide Sequence Number=SeqID_66691
atgaggctttgcgcggtgcagcttctgctccttttggctgtgttcgccacgatggtgtgcggggtgttgaggacagcgctgccgagcgacccgctggcgctacgcacacgtgtgttccgggcttccggcgttcatccaaggcgtgggcgcgcggccccgtcaggctccgtcggcagaagacgtgccggtgcaggtgcacaaagaaccctgggctgcgtcggtacatcagcactcgggatggcaagaggattgcacacgcttgtcacgttcgtctccagggattcaggtgctaggtttgtggcccctctttcgtttgcaacaaatgccatgagatgcgatgcgagtatgcgacgtagcccagtgctgtgtggcttggtgcacgagcaagaggctcggctcggcctttctatgagctcgaggtag

SEQ ID NO: 24913 - DNA, 992 bp, Zea mays
  Peptide Sequence Number=SeqID_66692
gtgctgttgccgttgcattcctgtgtctagtcattctcacatccttcttggcttgtagatatggtttgcttcccttcaaatcgaagaacaaaccagggacaaggattgagtccttcctacagaagaacgagagcatacatccgaaaagatacacctacgcggacgtgaaaagaatgacaaaatccttcgctgtgaagctaggccaaggtgggtttggtgctgtatacaaaggcagcctccacgatggccgacaggtagcagtcaagatgctcaaggacacccaaggtgacggcgaggaattcatgaacgaggtggctagcatcagcaggacttctcatgtcaacgtcgtgacacttctagggttttgcttgcaagggtcgaaaagagcactgatctacgagtacatgcccaatggttcgctcgaaaggtatgccttcaccggtgacatgaacagtgagaatttgctaacctgggaaagactatttgacatagcaattggcacggccagagggctcgaatacctacaccggggatgcaacactcggatcgtgcattttgacatcaagccacacaacatcctgttagaccaggatttctgccctaagatctctgactttggactggccaagctatgtctgaacaaagagagcgctatctccattgttggcgcaagagggacgatagggtatatcgccccggaggtctactcaaagcaatttggaacaataagcagcaagtctgatgtctatagctatgggatgatggtccttgagatggttggagcaagggacaggaatacaagcgcagatagtgaccatagcagccaatatttccctcagtggctttatgagcatttggacgactattgtgttggtgcttccgagattaatggtgaaaccacagagctcgtgaggaagatgatagttgtcacacaaatgcaaaatatttgtggagacgagtgcccattaacctcatacaatgtatctgtatga

SEQ ID NO: 24914 - DNA, 867 bp, Zea mays
  Peptide Sequence Number=SeqID_66693
atggcaacggacgaggggtgggcggcggcggcggccatagcaggcgcaagccgattcatcagcttctcggtggagggcgaggcgacgccatctgcgtgcgtcatggcccggtttactcatggacccccgttgttatctgtgcctctcgcagccgcggacatcttgctgtggaaggacaggaatttgtctgcaggcctgctcgctggggccacgttggtatggtacctgttcgaggtagttgagtacagcattgtaccgctcgtttgccagatagccatcctggccatgctcgtcgtcttcatctggtcgaatgctgcgcccctcttgaacataatgatatgtgagagccacagccacgtatcatcctctctacttttccgggaagagccgatggaggataggagggaggagaccaccgcagactggggggaagagcccacgggggacgggagaaagccgtcagcaccatctgacccctcagacccagagatggtcgtggaggaacgggatagggagagaagcccggggtacggcactgtcggagagggccacacaccagggagggccacgcacaagggagggggctacgcgccggggagaggagtcacagtcaccccatggaacttagctcctccaaggatcccagaagtgatcatctctgagcatgccttccgacaaatagcacagatcatccattacaaactggcacacaccgtgtctgctctttatgacattgcatgcgggaaggatctgaagaaattcctcctggtcatgggttcaaagcagcctctccgcatttgcaggagaaggcttgtctcggtttatcccttccctagacctcacccatgtggaagcctgtggcactag

SEQ ID NO: 24915 - DNA, 312 bp, Zea mays
  Peptide Sequence Number=SeqID_66694
atggctttgactgccgtcggaaccagcaacctgaacggaactcacgccgtgaatgctggagtcaaaccatgcatcgcccctctccactctccagtcacttccaatgaccgcagcagtcaagatgcgaatgctgaaggcgttttacagggttcaaatgaagtcgtcaccaagttcaagttgatccatgatgctaaatgcatcttcctccctaacccgcacgatgcgtccatccgccgcgcatgtgccggcgaggggcgtcggatgacgacgcctgcgcggggctggcgtgctgcgctgcatatccgcatgtga

SEQ ID NO: 24916 - DNA, 255 bp, Zea mays
  Peptide Sequence Number=SeqID_66695
atgagcaagaagttcaacaccttaaaacaagatattagaagacttattgaagacctatcaaaattgacattgttggaggccttcctctttcgaaggtcctcaaaaacgccattacagagagcttcgtcttcaggatggaagtcattcccctatgatgacgacatacgagatgaagagtaccagcttcggcttataatggtgatcaagactgatgatgatgctagccgaaaggggaaaagaatacttagtccttaa

SEQ ID NO: 24917 - DNA, 519 bp, Zea mays
  Peptide Sequence Number=SeqID_66696
atgccgggcacgagccgtcgagcgaaagcgcgcgcgaggcgagagctcggcacggtggaactccaggcacaggttcctgtccatctgctgctgcgtatggggaaagaggaggagaggcgggtggaactgcgtagaggagtggggacgtggagcgaagcggtcccagctctaggggaagatgaacagggcaatcggcggccgttggctgctcccgagacgtgggcgtgcgcggctggaggcagcgcggctacgcgagtctgggcgcacgacgcgcgcgcgggacgcagcgcagagaggtggggactgcgccctggcggctgggcgacctgctctcgcggggacgtgcgtgacgtgctgggcgagcgtgccgtacaggcatggcagcgctggacagtggataggggcgctcgtggctggggcgcggggctgcgttgggctgccgcgcggctgggccgagcaggtgggggaatgcgcatgggccgagctggcctgggcggggggagcggtctggtcgagtag

SEQ ID NO: 24918 - DNA, 402 bp, Zea mays
  Peptide Sequence Number=SeqID_66697
atgaatttaaatttagtttggaatttgaaaataggacaaaggagaatagaaaataaaatgggaagaaaatgtgaaaggaaaactaagatgtgtgaatatgtgcatgcttatgcgatacatcatgaaaggctaattgaccaccaccatgcaattcaagacgtcttgtgcatgtgcttgcctgctaggcgctggtactacatcgtgttgctgcttctgtccatgcgttgtgtgtggaaaagaagaaatagagacagcagcagcagcgttgggcacgacatggacagaacatgcatccatgttgatgctgatgcaagggaagctcatcgcaggagcagttcgcaaacgcgcgcaaatgctgtccagaacgagtccatcacaaggcttcggatgaacggcaactga

SEQ ID NO: 24919 - DNA, 333 bp, Zea mays
  Peptide Sequence Number=SeqID_66698
atggcgtcctcctccttctccaaggtgctcgcacttggtgcgctcatcttctccctccttgtcacgtatggctcgtgcgctagaccggccaacttcaccgcctccgacttcaccgccgatcccaactgggaggctgccagagccacctggtacggcgcgcccaccggcgctggccctgacgacgacggtggtgcctgcgggttcaagaacgtgaacctgccgcccttctccgcgatgacgtcgtgcggcaaccagcccctgttcaaagacggcaagggatgcggctcctgctaccaggtagctagatcaattggtcagacgaagaccctttga

SEQ ID NO: 24920 - DNA, 555 bp, Zea mays
  Peptide Sequence Number=SeqID_66699
atggccaagtgcctcaccgcatccgccgccacccttcatgccttagccactgcatctcgttccctcgcatgggagatagactccatggatctcctctgctacatggcgttggtggtcatcccgttgctggtgcggacggcactagctatggagtgggacacgttcgacgtggtggctgacatcgcgtgggaggtggagtccttacgatcaccaatggtgtctgtgcccgatagggccgagcataattttgtggcgggagcgacacatgcaaggagtgttggctcggctaatgacacgacgcttgttgcacataaaggtgggcaaatggaggccaccagcgacgaggctcgtctagagattgtttgtgttgtacccttcgccgagaatggccacctggtctccatgattgagcttggcaagatccttcacgcaagggtactgaccgtcataattgccatcttcaagcctccctacaacacgagcgtcacaaggcctttcctcgtcggcttcttcgtagccaagtgttgcacccttcgccgaggatgggtcccctag

SEQ ID NO: 24921 - DNA, 564 bp, Zea mays
  Peptide Sequence Number=SeqID_66700
atgggtgtaggcaagggacgacttgcgttcttgcttctccggcattttcacatttcttgctgctgcttgctgtttgatctcctcttcttccttccactccaccatgggcaagagcaagaaaggtggtggttcttcgcatcattccggcgacaagcgcaagcgcgagccgactccccctcggaggacttcagcgactctgagtactcggaggaggagttctcctccgagtccgagggctctccggctcctgcctctcccccggcgtcgtctgatgattcagatgactcccagaggatcgccgcagaggtatggacttatatccgggccatcgagcgtgtcaggttcgagggctcggatgagtcggagtactcctcggacgaggagaattcctccaacccgtccgaggagggcagcgggggcgacggcggtgacggcgacgacgacggaggcgacggtgacggcggtggcgacagcggcaagggcggtgacgacagtggcaatggtggcaacggcggcggcggcagcaagggcagcagcaagggcagcaacaaggccagtggctaa

SEQ ID NO: 24922 - DNA, 594 bp, Zea mays
  Peptide Sequence Number=SeqID_66701
atggctgcgaaggggagaagggccactggcgcaagcctagtggtcacgagcaggtcggcgacgacagagggagagccggcggggaggggccaccatgacgaggccgaggaaggggaggccgcgcttccggcacagcagaggcaagtgtggggcctcgaccgcgtgtggtgccacgtcgtggcgggccgcgggcgtgtcggcctggcgtgggtgcggggcggatccggcgacaggtcaaggtggccggtgcggcccagacggcgggtgcagggcggatccggaggcgtgacccggagcagaggaggcttcgccccgccgtcacctccggcagcgcacggacgagggaggcgtgaccctggtggctgttctcctgctgagatcgaccaagcactcaagatcaccggcgagtttacacccttagtaaccaagttcccggatcgatgggatcgaggaacaggaacgtggtgtttggtcgctctactccaccactccacaaaagataattcagacagatcaggagttctagttgttagtcccaaacctgagaagatcctgtaccagaaatccctagcaaacacacagctggatacctga

SEQ ID NO: 24923 - DNA, 471 bp, Zea mays
  Peptide Sequence Number=SeqID_66702
atgaaccactgcatgttcgacgacatcggcgccatggagttcgtcaactcgtggaccaagacggcgcgcggcgtcactgagctcaccgtctcgccgctcccgcggggcgacttcggcaacggtatcgtgctgaccaacgccctggccacgacccgcgggctgttgtctgctcccatgtcacgcgcaactgggctggtgcaggaggccgtgcggatggtgactgacgactacatgcggtcggcgatggactacttcgaggcgacgtgggcccgaccgtcgctggcgtgcacgctgctcatcaccacgtggtcgcacctcgagttccacgacgccgactttcgggtggggcgagcccgtcgtgttgggcccagtcacgccgccagagaaggaggtcatcctcttccatgttccgcgcgagagcaggtgaagcgtcccaatcctttgggactcaaatgtgatacaatttactag

SEQ ID NO: 24924 - DNA, 582 bp, Zea mays
  Peptide Sequence Number=SeqID_66703
atgcggtgcggaaaccctagtgggtgcggtggtggagatggccgccagtcacgtgcgaggcacgatgcctgcaaaatcgcgaccgcgtcgtgtggggtccccacccacttccgctctgctcacgtgccgtgcccgtgtgcatcgggtaaaaaacagcagcaggggccgaatcggagctccgccgccggcagatctgcgccggccggtctgctactattgactattctgctcaaagacggccgcccggggtggctaccgtcgctgggcttcgccttcctcagcttcaactgcgggatggccgtctaccgctcctgggacgacccctacgccgtcgccttcgtcctcgccgcgtacgccgccctcgtcctcctcttccgctgcctccaccttctggagcgccgccgggaccagcgcctcaagctcgccgtctggggcctctccacgctcctcacactcatgttctcgtacaagatcgccgccgtgatgccgccctgggcccagctgctcgtctggggcatggggatcctcaccgtcgttgcgggattctacgccttcttcgtcgcccgcccggaggagccctga

SEQ ID NO: 24925 - DNA, 198 bp, Zea mays
  Peptide Sequence Number=SeqID_66704
atgtcgtcgaacatgcagtggttcatgttgaggcatataattgacctaaaaagtcacttcaagcgggcaggagaatccaaggcccttcccaagtacttccaaataagtagcctaatcgccatcaggcatacttattcagcatttttattatcacatcctaatttgtggaaagctttatatgtggctgatgtgtactga

SEQ ID NO: 24926 - DNA, 678 bp, Zea mays
  Peptide Sequence Number=SeqID_66705
atggaggtggtgaacaggtacgtcgccacccggcaccacatcgagggtgccccgacggaggccgattttgaggtgaaggaggagacggcgaggtgggcgccggactccggcgaggtgctcgtcaggaacctgtacctgtccatcgacccgtaccagctcaaccgcatgaagcggagcagcgcgtcgcacctcgccgtcgacggcatcctgcccggccaggtcgccgacgccgacgccgcgggcttccccctgtcccaccacatcagcgtgctgggcaccagcggcatgaccgcttacggtggcctcttcgaggtgggcaagccggtgaagggggagaaggtgttcgtgtcggcggcgtcgggctccgtcggcagcctcgtcggccagttcgccaagctcgccggctgctacgtcgtcgggtgcgccgggactacagccaagccaaatgttttagacagacacacaaatggaaatggcccagtggcccaggttttccaaaagcaggagccatcgttacatcttatcatctcagacgctagaattgctccaaaactgaatcagctggttatgaatccacaggttgatctgctcaaagacaagctgggattcgacgatgctttcaactacaaagaggaacctgacctgaaatcggcgctgaagaggtcgtcactcacctga

SEQ ID NO: 24927 - DNA, 132 bp, Zea mays
  Peptide Sequence Number=SeqID_66706
atggccggctttggccacccgacgacccggctatgctttggagttccttggactgacatcgaggccatcacggtgaccaggacgcgggtcgacggcgcggagcggctccgcgtgctgggaaggcggcggcag

SEQ ID NO: 24928 - DNA, 1072 bp, Zea mays
  Peptide Sequence Number=SeqID_66707
gtggacccacaaaccccaacaggccccgcacgccggcgtaagagttatcccgcgggggcacgcggggtctgcggcgagggcgtcgaagctgcggtacccgctgcggtcggcgagcaaggggaaggcggcggtcgtttccccggcggctgatgctcctcccaccatctctgctccgcgacgggcaaaaccatcttcagatgtcagcaagagcatgtgtttagacctttctgtgaaggataattctgccaaacccccacggaggcactcaatacaaaccaagccaggagctagcccaaggccaacaccttctggaactgtgactccggtgtctggggttcggtcaaagaggtcggaaagccaggggaggtttgataccccgacatcagaagtgtccatgtccatctcaaggcgcaagttcagcacgctttcttcaatctcgtactggatgacacagatcaggctggcagaggctgcttccaagcactcggtttctctgggcttctttaagcttgctcttgaatcagaatgtgagcctttggaccggatgagggaagaactcaagtcctacgtagcacggcatggcctggcgacagaattggaggacccagttaaggacattctccaggtttatgatattttggatgattttgagaagctgaagatctctgcagagccctcacagcaaccaaaaaagtctgacaaggctgctcgtactgccacaaatgcgtcaccgaatggtaacctgaagccaaggtcactgaactctgatgctactgaaagcaaggaagctgtaaagaaagagagcattcagaaagtaaatcctggtgcaaggatcagaggctcctgtaacaggaatccagtcaaaaacaccaccgcaaaggaagcagttgccaagaacaccggtaaggaaaccaagaaaggggccaagggtcagcaggaagttagcgaggctccgtcagcccttccaaatcaggaatctgctgatgttgtgaaggagatcacccatgaagataaagagaacatgggcgatattgaaatggcagtggatgttgccgtagcccaagatatctag

SEQ ID NO: 24929 - DNA, 204 bp, Zea mays
  Peptide Sequence Number=SeqID_66708
atggccacggatcctcgagtggtggcccgtgaatttgagatggtgcggtggcggtcggagaaagaaaagagcactatcgcaagagattggtggctttcaccgtggcgggctcaccggagatcaccagaaatgtgtaatatgagctactgcgacgtgaactacagagctccaaagtcagccctgttcaatggttttcagacttag

SEQ ID NO: 24930 - DNA, 342 bp, Zea mays
  Peptide Sequence Number=SeqID_66709
atgggtcagccagttcctccgcgtcgcctcactggggtctctgctgtgtgggtcctcgttggcgctcctgtagatcttcaccaccgtgccgcctttgtcgcgttgactggcaacgaaccagccatggcggaagacccggctggcggagctggccactcctggcggctacaaattgaagccctcctcgaacgccttgagtctcgcccgctcaccaaaaccctagtgctccggacatcaaggaccaccaccattaccgcctacgagcaagccactgtggaaactaaggttcaacaagtagagatagctgagcaggagctcattgaaggcaagttgtgcccttga

SEQ ID NO: 24931 - DNA, 720 bp, Zea mays
  Peptide Sequence Number=SeqID_66710
atggcgcttcctgttgacgtggctggcctgcgccctaggttgggcgacgtggaggctcctccgaagccgaggtcgagtctgtcttccatggccgaggtcgagtccgagcccctgggtcgggcgaggcggaggtcgtcggcagaggccaggacggtgtccgagccctggggtcgggcgaagcggagttcgtcgtcttctggggctgagcccgagtccgagccctggctcgagtccaagccctgggtcgggcggagcggagttcgccgtcttccggggctgagcccgagtccgagccctgggtcgggcggagcggagttcgccgtcttccgggtcttagcccgagtccgagccctgggtcgggcggagcggagttcgccgtcttccggggctgagcccgagtccgagccctgggtcgggcggagcggagttcgccgtcttccggggctgagcccgagtccgagccctgggtcgggcggagcggagttcgccgtcttccgggtcttagcccaagtccgagccctgggtcaggcggagcggagttcgccgtcttccggggctgagcccgagtccgagccctgggtcgggcggagcggagttcgccgtcttccggggctgagcccgagtccgagccctgggtcgggcggaacttcctatggtgcctttggcagggcctttgcgttaaatgctcctgcgacttggtcggtcggtgcggcgatttag

SEQ ID NO: 24932 - DNA, 2385 bp, Zea mays
  Peptide Sequence Number=SeqID_66711
atgccgccgaagtctaagaggggtggcgctgccgccgcgaggaaggcgccggtgacgaggggccggatggggagggcgcaggctgcggcggaagcggcgccggttgtggaggagatggaggcgcctgctgaggaggtgaaggccgccgaggaggtcccgaaggtggtggaggcaccgaaggtggtggaggactcgaaggtggtggaggagccgaaaccctcgcctctgctgccgcaacagccggtggtggtggtggagaaagactccgatatcgcagccaacggtgccaaccagggtgaagatgacagagctgcaaaagaaatctctgaagaagaggacaaaggtgaacggctggagtttgaggatgaaccagaatatgaagaggaggctgctgtagactatgatgagaaagatttggagcagtatgaagagcaatatgaggatggtgatgaagaggtggagtatactgaagacgtggttgaagtggagacagatatggtggatgaggaacttgatgaaggtggtgatgatgtggagggggagggatacgaaaatgctgacgaagaccatcatgtggatggagatgatgaggagcataatgaaatggttaaagagcaccgtaagcggaaggagtttgaaatttttgttggtggactagataaagatgcaacagaaaatgaccttatgaaggtttttggtgaagttggtgagatcactgaagttcgtctgatgatgaaccctgtcacaaagaagaataaaggctttgccttcctgcgatatgcaactgtagagcaagcaaggcgtgctgtttcagagctaaagaatccactggtgcggggtaaacaatgtggcgttgctccaagtcatgacaatgatacactctttgttggcaatatctgtaaaacatggacaaaagaacatttgaaggataaactgaagagttatggtgtcgaaagttttgacgacttactacttgctgaggacactaacaatcctgggatgaatcgtggctatgccttgcttgagttttctactcgacctgaggcaatggatgctttcaggacattacaaaagagggatgtagtatttggagttgatcgtagcgcaaaggtttcctttgctgattcctaccctcaagtcgatgatgaaataatggcacaggtcagaactgtatttcttgatggccttcctccctcatgggatgaagaccgtgttaagaaatatctcaaaaagtatggagctattgagaaagtcgaacttgcacgaaacatgccagctgccaagagaaaggattttgggtttgttacatttgatacacatgataatgctgttgcatgtactgaagggatgagtaactctgagatcggtgaaggtgaacacaaggcaaaagtaagggctagactgtcgagaccattgcagagaccacctagaatgaaacatggattgagaggaaattttagagttgggcatggtgccccgcgaggtggccgtttaccatattctcgtgctcctccacctcgcaggcctccgccacgtcttattcggcctgctgttagccgcttaccatccatcaggagtcatccgttgaagcggcccatagatattagagataggcgtcctgctatgtcaatgccagatagagctaggcgtttccctccagagagatcttatgacaggaggcccccagctccagtttacctgaagagaagtccaaggagagaatacgggaggcgtgatgaacttcctcctccaaggagcagagctacaactgattacattaccagagttccggttgatagacgtccctctttgagggatgattattcaccccggggatcaggttattcagacctcggtcctcgtagtgctccccgtctttctgataggcgagcttatgctgatgatagttatggggagaagtttgaccggcctttagtggcctatagggagggtcgcggccgtgattatgacaccatttctggatcaaagcgtccgtatgcagatatggatgatgtgcctcggtaccaagaaatcggtgtccgtcagtctaaggcacgtttagactacgacattggtggcagcagtgctcggtatggagatacatatagtgagaggtctggacgaccacatgcgggatatagtagcagccgatctatccctgttcatgattcagcatatggcagcagccgtcatggaatgagttatggaggttctgctagcagtgctgatgctggtggtatgtacccaccgagttacagtggtagctatgggtctcgtggatctgatgttggtgggagttcatattcttcactttactcgggtcgcaatttgggtaccagcagtggtggctactatggaggtagcggttccagttcatattactaa

SEQ ID NO: 24933 - DNA, 438 bp, Zea mays
  Peptide Sequence Number=SeqID_66712
atgcgtcatgcaaccggcgcgccgaatgcttcgtgcatgcaactgcaccgccacttgcgccaccaccgcgcctcctcgattgcggaaccaataccgcgactcgaggcgacccagcgcacgacccagcagcgccagcctggcgcggcgggaccgagaaagggggataccccaaaaaggatccttccccgtgaaggaaccaggctccgagcctccctactgatcagaggttcgaaggctggccccccggaagggttcgacagccgcctcagatcgcgtgggccctacacccactactggtcagaggttcgaaggccggcccctcagaagggttccacggccgcctcaggctactcgggctccgcgcccattactgatcaggggttcaaaggctggcccccgaagggttcacagccgcctcagacgccgagcgagggatga

SEQ ID NO: 24934 - DNA, 420 bp, Zea mays
  Peptide Sequence Number=SeqID_66713
atggagaaagctaatgaactgagtagacggctgatgaatgacctgtttttgatggagtgccccctaggccttatatatccgaccgtggggcactacataggaggagttttcctccgagtcaaagggatcgccggtctatgcttccccccggcgtcgtccgacgactcggacgactcccaagggatagctgccgaggtgtggacgtacatctggtccgtcgagcatgccgggctcgagggctcgaatgagtcggaggtctcctcggacgaggagaactcttccagatcgtccgaggaagggagcggcggcgacagcgacgatgaatgcgacagcggcggtggtggtggcgacgacggcagcaagggcggcggtggaggcagcggcggcagcaggagtgaaagttgcctagagggggggtga

SEQ ID NO: 24935 - DNA, 248 bp, Zea mays
  Peptide Sequence Number=SeqID_66714
atggggttcgtgctggtggtctctctgcccttcatcttcctctccatcctcctcggcttcggctgctacttcctcggcaagcacaggggccgggaggagatgcagaccggcgtcggcgcgcagatctacagcacgccgctaccgccgcccagtgtcgtcggagcctcctcgccgccgcctcagccgttccatagcaagaaagaagtgtacgagtgtgatacccggtttgcaaagaagggaagttggag

SEQ ID NO: 24936 - DNA, 636 bp, Zea mays
  Peptide Sequence Number=SeqID_66715
atggctgactctggcgccctcgtcgtgacggaggcgcgacagcaacacccgttgagccagatcgcggcgagcgagacgcaccggctgctgctcaagcagtgggtcaaggaggaggacctgctggcgcgtcgcgtggtgctatgggaggcctgcctcaacggcgcccgcaaggagatcgccttcctctactgcgccttcttcgccttccactccgcttccgtgttgctcctcttcctctcctcctcctcctcctcctccgctggcttggcggcagcgacaacagcgtgcagacgatcatggatcctctgccttgtctcgctgctctcctcgctcgccatgatctgggcgctgtggtacaagtctgacacggaggccatcctggagcgcgtcctcgcgcgagagcgcgaggatgcgctgcacctagctaggtgcgtctctgagctcaagcgcaagggcctccgcttcgacctgctcaaggaggtggacactgtgcgcagggccaagaacctccgcgctgaggccaagggcgcagcagacaggcccaggaggtggcagaccagggacctggccgtcttcgcgttcttcgccgtcgcctgcggggtgctcatgctcaccaggttcctgctctgcaattag

SEQ ID NO: 24937 - DNA, 522 bp, Zea mays
  Peptide Sequence Number=SeqID_66716
atgtggcggactctatgcgtttgctacacatcggccgctggtgaatcctgcaccgacgcggaggtttccctcttcattcgtatggcaaccatttcccctgcgccgccggaccgctcgcggcacagctacctcaacgacctcgtcgcccgctcgggcgccatcggcatgtccgtctactaccgcctcgcgccggagcacaagctgcccgccgcgtacgacgacgcgtgggcggcgctgcggtgggcggtgacgctcggcgaggacccgtggctgctggagcacgccgacctgtcccgcgtgttcctggcgggctgcaacgccgacgccaacatcgcgcacgacacggccgtgcgagtctccgccgccggcgtggccatccgcgtgtgctgctgcaagatacctcctcatccagacagcaggaaaaagctcttcgtctctaaagcttctcctgaaggttccaagcctgaaacctccaagaaactcgatgtctatgcaatggctgctgaagggtcaagaaaatga

SEQ ID NO: 24938 - DNA, 807 bp, Zea mays
  Peptide Sequence Number=SeqID_66717
atgttggttttgtgtttcagaggcacccctccttctccaagacggtacaaacttgtctctccctggaactccaagtttattgtgctatctttgactactaaattttatcgttggaaattacagatggaatggtcaagacccaaacaacaaggcccgactccaagtccaagagctggccatgcaggtggaactgtcggcgagaactggtacatagttgggggtggcaataataaaagtggtgtttctgaaacacttgtgcttaacatgtcaactctgacgtggtcggttgttagcactgtggaaggacgagtcccccttgctagtgagggcatgactttagtgcatagcaattatggtggttatgattatctcatctcttttggaggatacaatggacgatacaacaatgaggtttacactcttaaacttagcctcaaatcagattcacagtcaactttaaaagaagaaactctctcagatactacatctagggtcatagaacctgaggctgaaatttatcaagatgggaagatacgggagatttctgtggacaacgctgattcagacctggaacttcaagctgtccgtggccaacttgcttctgagcagtcaagatgtttcaaacttgaggttgatgttgcggaacttcgacaaaagcttcagagtatggatgcattggaaaaggaggtcgagctgcttcggcgacagagagccgcttcggagcaagcagcaatggacgctaagcagaggcaaagttcgggtggcatgtggggttggctcgctggaagcccgacaccagcagtttag

SEQ ID NO: 24939 - DNA, 192 bp, Zea mays
  Peptide Sequence Number=SeqID_66718
atgaaaccccctcagctgccggccggggagcgctcctgggctcacgaggtcaagcaggccctccgtgagaaactccggcgctcctacggcgccgcctccgccacaccggcggccgaaagcgatggttcaacttccaatcctggcaagttgccagagtgtgcagttttcagctacctcgttcttgaatcataa

SEQ ID NO: 24940 - DNA, 3309 bp, Zea mays
  Peptide Sequence Number=SeqID_66719
atggcgctgctggtgcgcgcgcggctgtccccgctggacgacgacgacgacgcgtccacggcgtcctcgctctcctcggcggcctcctccccgccgctctcgcccgcggccgcctccacgccgctaccgctgtacgcgcgcgccgcggtgctcgtcgccccgcggatcgccgcgcagctctcgtccacggaggaggacgtcagcgagtccttcgatgacaccaccagctccggcgaggacgtcgacctgccggaggaggtgtccaacggcttcttcttcagcgtcgccagggtgccgccgacgccgacgtccgaggacccgatcctggtccccggcggcggggtggcggggatcgccgctgcggaggcgcccgaggccgagggcggggacggcttgggcgccgcggaggagccgctggaggggggcatcttcgtgagcgccaagaatgggttggatggcgtcgagggttcgctgggtggcagcttcctcaaatctgggagctgcattggcgcgcacaacggcggggaggctgctgcgtcaggtgattcggtgatcgtttcagatggcaccgtgctgaatgaggaggatgataagcagggggagcaggctgtcaatgacgcggcgtctgggcctttactgatgcctgttgctggggtagatggcctcgtcattgtggatgctttggaggggatgcttgatcgtgaggctgctgaatcgcttcctattcccagtgctactgctactggtacagaaggagaggaggctgctgccgagcttcgcagcgatgcagtaggtagtgcagccaagcttgatgctagtcctgaatatgctgccacaggagatgtcatatctgatgccatgcaagttcttgatagtgtagatgatgaagctgatggtgatcatgaaggttccgacgatcttacatccatgccaatctcttcaagtgactatgctgtggaacttgcaaaagaactggagaacaacgtgcctacttccataggcgcacgctttgttgcggatgattcagatgatgcagagatcaacggtgatgatgaatatgaagaagagatgaatggaaaggagaacgagctttttgatcatacagctttaattgagcttctaagagctgcaagcagctcgcctgaacaaggcaaggccaaggttttcccagttgaatcttctgaacctagggatctgcctcccactttagccagcaatgctaggatgaacgtggcttctgctcctgtgccacaagcaatcgctgaccctgagaaacagatgaccgatgaggaaaagaagatttacggaaaggtggacatggcacgaatcaaatacatgcgtcttgttcatagattggggtatgatactaaccatcagcgtgaggcagagggaactgagaaccttgaattctcctgcaatgttttggtccttgggaagactggagttgggaaaagtgcaacaataaattccatcttcggggaagataaatccaaaacaaatgcttttctaccggcaacatcatctgtgaaggagattaatggagttgttaatggtgttaagtttcatgtcgtcgacacccctgggcttgggacttcagccgaggatgaaaaatcaaataggaaaatgctcaatgctgtgaagaagtatatgaagagatgccctccagatattattctgtatgttgataggcttgatacaccgcgggaggaggcaaatagcctatccctcttgcgatgcattaccagtgtgctaggcctgtcaatatggcccagaacaattattactctcactcactcaggagcagcttcccctgaaggccctaatggtttggaagtgaactatgatatggttgtgtctcgtcgaactcatgccattcagcaaagcatccggcagataactaatgatcctcaaattcagaatcctgtggctcttgtggagaaccatcatctgtgtcggaggaacgcagaaggtgaaaagatgcttcctgatggccttatctggaggcggctcctcctcctcctatgcttctcactaaagatgattgctgagattgacagtctctcaacccgccgtgcttcttctgcaagtttcttaggccgccttctccaagtgcctccaattccttacttcttatcatctttgttgaaatctagagagcaccctaagcgttccaatgaccataatgttgtgagtgtggactcagatttttacctagatgaattgttgaatggggaccaagaggatgaagatgactatgatcaacttcctcccttcaagccactaagtaaatcccaggttgcaaaactctccaaggagcaacagattttgtattttgatgaatctgattaccgaactaagctgcttcagaagaagcagctgaaggaacagctcaaaggatttaaggaaatgaagaagaaagagggtgatgataatgatatactttctgatgatgatcatcccgatgatggatatgatacagatagatatcctatgccagaatggaccttgccatcttcatttgattctgatgatcctgtgtaccgctatcgttgccctgtgtctacaccaaaccttctggtgcgtgctgtttacaatcctgatggatgggatcatgattttggatttgatggtgtgagtgtccaacacagccatgatgttgctaacaaatatccagcatctctgtgggttcaagttaacaaggacaagagagagtttaccatccatttggattcctcaatgtcagttaagcatggagattatgcctcgagcctggcaggctttgacatccaaacaattatgaaccagctttcttacaccctcagaggggagaccaaatttaaaaacttcaagaaaaacatcactactggtggtttatccatgacctttttgggaaattccatggtggctggagcaaagcttgaagacaagcttttagttggtaacaggttaacactatcaggcaacactggtgctgtgtccatgagaggtgatgctgcatatggagtgattatggaagcaactcttcgtgaaaaaagctatcctgtaggtcaaggcgttgccactttgggtgcatccttagtgaaatggcataaagagtggaccatggccgcaaatttggattcccatgtctctgttggaaggtcttcaaacatgtcagttcatgttgatgtaaacaacaaactaactggacgggtcagcatcaaggccaacacttcagaacagttgaacattgcccttttaggtacatgttcagtgataatgtatgtgtggaacaagatgcaccctagtgcagatcctaatgctgagtag

SEQ ID NO: 24941 - DNA, 444 bp, Zea mays
  Peptide Sequence Number=SeqID_66720
atgcccgccgccgtcgctgctgctgcggccgctgcgtcggccggtgcggtcctgctctgcctgctcctcaactgccgcccacagccggcgctggacgcccagagggagagtgaaaggggggaggacgaggcgtcgccgctcctgtcgggctcggggccggggagcgaccgcgaggaggaggagccgtggccggacagggcacccgtgacctgctgcgaggcggccgcggtagccgcgcgcacggcgcggcgcacgtgggagctcaccgtcgggcggtggggcctccacgggctcgccttcggtatcaagcgccacatgaagcgccaggtggtgcttgactcacttcagagttcagacttcgtacggtcactgtactacgacactgcgcttgcggtgcccctggcgtacccagtacttgagcctgagtcaagatcggctgtatga

SEQ ID NO: 24942 - DNA, 2733 bp, Zea mays
  Peptide Sequence Number=SeqID_66721
atggatgtggagaaacctgcttccaaggggcatggtttctttgcgctcttcgattggggaaagaagtctaagaagcgcctgttcgtcgggagcacgggcagttctccaaatctgaagaatgctgcagatgggaaggatattgatgatagtacaccaagcacacggtcaaatttgatccttgaagacaccccaagcttgaaggaaagcactgaacatagctgctcatcttcagtaattgatgaagaggctcattcaagaaggagcccgactgttgtggctaggcttatgggcttggattctatgcctgcggcaagctcaaccgaatccaatcccatgccattaaccgtgcaaccacctttccaaaccaacagccatgaagattttattggcagaagttatgttggtagtccccttaagacgccgggtagtcctattgatcggtttaaagtggaagcactgcctcctagacttgccaagaggacagtatctgttgcacagtataagttgctgtctcccatgaaaaatcctaacaatatatcaagcaggaatgcagctgatataatggaagcagcatcgaggatcatcagacctggagtagaaaatatcagtccctacagagttcatgatgttgggagtgcaattgctgcacgtgcctacaacccaggagagctcataggagcccaacaaaggtcacagaaacttaatgaagcactgagaaaatgtgatggccctgcatcttttaggccgccaagtggaaaaccttcagatggaaggttgagaggttcggagggcacctcgacgtccaggatctcacaggcaaatgtatgtgttccagttggtccaaaggtaaaatccggcgatagattagatactgctcgagctatgcatgcccaggaaaaaagaggcatgagaaaaggtggtagaaagcttgaaactctcaagaaccctgaaaataacatggctaaaagaagtgggttgaaccgacaaaaggatagtaaccaaatcggcacaacaagttcatccagtgtgctcatgccaaacagcagaaaacagaatgctacagccaccaaacataaggtgaactcgaacccagcaacccccagtagacaacggagcaatatccaccagataaatgcccatccaagaaaggtgagggtggccagcacatttgctggaaacagtagtcaaggtagcagaaaagtggacttgcagccaaatgctcatgctaacgtaagaaataattctgtacccaaagcaatcccgaagccaagaagattacaagacaggagagcgtactctgatacaagccagtcaagtgatagtattaattctgagagaagccagaggcggattcggcacaatattgtgattgatgagcagtcatctttttcaacaaacaaaaagaaagtcagcactgagattgtttcattcacatttacctcaccagttgataagtcactacatggcatccacttccccaatcattcagtatttacctcaccagttgataagtcactacatggcatccacttccccaatcattcagtggaaaaacagtttttagggaatctgaacactgtgtcaacttcaagcaatacatcaaacactaaacttgatgtcattgatggtgattttttgggactcctgttggagcagaaattgagagagttgacatctggtgtgagatcgccctacactaagacaaccaaaggtgttcaagcgcatcacacttcaacagcttgggaagatatggcatcagcatgtgaaacatctagcattgcttctactgattatgatagggagtcgttacaatctttcaatgatggaaaagctactctcccccagaccgatcttgcttctagaagtctccagtcatctcagcctgtgaagaagtacgatcacgatgtcacggatcaagcagagccgcctgagcgtctcggccgaggtccactcttcacatgggaggcttctatttcaaccgaaacctgtagctcatcagagagctggaggagtgcaaagggtaaacagagtagcttggaatttgctgtaacaggaacaagattgtttggttcagccgaaggaggcagaacctgtgactcgacgcgctcgagcaagttcctagaagcggacgcctcgtcagagtattccgacacagcctcatcgatcacggtggctacgacagagatccctcgatcagaaagcaacagttcatgtcatatggatggtagacaggatctgcagtttataagagagatactgaaagccagctctcctgcccggcacatcttctcttatctggagcggttcggcgattcaggtgttctggatgcgcacgtattggaggaactaaacggggatattaggctgttgggtggtgaagagcgcaagggttacaggctgaggcggaggctgctcttcgactgtgtcaatgaatcgttgagcgcgagatgcgcttactacttcaacggtggctacggcctgtggttcacgggaacggcggtcctgcagagcttgtcggcagaagggatccaccgagagatgaccggcctgcaggtcggcgaggagtggatggtggacgagctcgtgtacagggagatgagtggtcctctggggagctgggtcgacttcaaggtggagtcgtaccaaggcggcggagacatggcggcagagctgctaggctccttgatcgacgaagtggtcgctgatcttctgaccaccggctcgttctcgtag

SEQ ID NO: 24943 - DNA, 378 bp, Zea mays
  Peptide Sequence Number=SeqID_66722
atgtatttctcaatttggagactggagagagaacaacagagagaaactgatgttgaggagaaccatagaagtaattggttaggcttgagattaggaatttggcaaacaggttgtgtttctacgaagatccaaaattccttggaccaaaagcttcagcttccaatagtcggtgctgaagaactgactgaattatgtacaaaggttgcagacctgggcactgtgcatcttcttaagggccttgtactgcgaactctggacaaagtttcatgctgctacaaagggagttgccgagctttctcaacaatagcgatcgtggaaggcgtcaaccagattgtggatgttgaaactattctatctacttttggatctaagttatag

SEQ ID NO: 24944 - DNA, 2640 bp, Zea mays
  Peptide Sequence Number=SeqID_66723
atacaggcagctcctttcaaatctcctatgtccagggatttggactgtcctgttcagacacagatggctgtggcagtcctggaccggagctttagcagcgaatatcctggaggtagcagaattgaggggaggcaactgagctggaagagagtatttgtccaaactgacaatggttctgtccttggcatcgagctggagagaggagaaaacgtacaaactgtgaaaaagaagctccagatagccctcaatgtgcccactgatgagagctcattgacctttggtgacctagttctgaataatgatcttagcagcattcgcaatgactcacccttgtttctcaaaaggaatcagattcaccggagcaattccacaccttgcctctcacctacaggtaagaatgttttgcaaagagaccggagtggacccattgaaatccttggctgttcaagtccttcatctcggatgaagcagcttgctaaggatgtcattaaagccataatgaatgatgttgacccagtcgctgttaacagtgggatgggtggtgcctactacttcaagaacatttggggagagcgtgtggcaattgtcaagccaactgatgaggaaccatttgctccaaataatccaaaaggttttgtggggaaagctctgggacagccgggcctgaaaaggtctgtacgggttggggagacaggcttcagagaggttgctgcttacctcctcgactatggtcactttgcaaatgttcctcccaccatgctggtcaagataacacacacaatcttcaatgtgaacgactgtgttggctgcaaaagtaaagtgttctgcaacaaatcagaggctgtgagcaagattgcatcgctgcaggagttcattcctcatgatttcgatgccagtgaccatgggacctcaagcttccctgtatctgcagtgcataggattggcatccttgacattagaatcttcaacactgacaggcatgctggaaatcttctggtcaagaagcttggtcctggcgccgacaattttggagagcagacagaactcattcctattgaccatggtctctgtcttccagaatgcctagaagacccatacttcgagtggatccactggccgcaggcatctgttcctttctccgaggaggagcttgagtacattgcaagacttgatcctgtaaaagatgcagaaatgctacgcatggagctacccatgatacgagacgcatgtctcagggtgctggtgctatcaacagtatttctcaaggaagctgcagcgtctggcctctgcctctcggagattggagacatgatgagcaggcagttcactgcgaaggaggaggaaccgagtcagcttgagctgctctgcatggaggcaaggaagtgggttgaggaaagagagtcctttcttcccaacgaagccggagttgaagatgacgatgatgacttcacccagttccttatcgacggcgaggatgattatccggatgccttggaaccatcagctttctgcaagtttggtagcatgaaggcaagttctaggaatccactgtccaagctagatgagcgtgacgaggaagacggagacgggaccgaggaggacgacgacgacgacatcttgaccggtgcattgcctcagaggatctcgtctatctccaagctgtcgtcatccatgaaggggcttggcttcattgggaaacccaagccctaccgcacgtgccttcggaagggtaaagcgacaggcagaactaagtacaccggcaaagccagcgagcatcagtccggcagcaggagcgccaacgagctgctcccgcccagcgccagtttcgtgaagctgtcggacatgagccctaaacagtggagcgcattcctcgacaagttccaggagctgctcccagaagagaagccaccgaacccaaggtatgacgaacgcgcttctgttcgagctctggtgtgcagcagccaagcagttaagtactcctactgctactgcatcgcagcaccgggcacgggctgggatctcggccgttgttatctgaacgatggtgcatggaccgtggggctccgggatggtgccgctgcacgtctcgtctcgtgtcgtcaccgtggtgatatctacaagcagcaccttatcccggcgccaacgtgggccccaaagtgcaaaaagggtcgcgtggtcactccgccactgggcgctacaggatcaatgatcacaactgcggcagagggcgatgccgtggcgctgtgctggctgtcgagggccgccgtgatcgcagagcagaccaccggatctcgcgatcagcgctacagtttttcagactgcccggccggccaggctgcgaagcttccttctggagccaaaatatctaataaagcctttatctctagccatctgtccagcctcaggggggtcctagggtgtcccggcggcgagctcaaccagcggagcgccgttgttgatcgggcggtggcgacgagcatccagcctgtagttgtagtccatgccggcgaggatctcaggcgccgatgtatccgtgccgccgccgccgccgccggcatgccttggtgcttggaacgtggcatgggttaccgggccctcgctccttttacactggaaggaaattgcggcctggcagtataa

SEQ ID NO: 24945 - DNA, 483 bp, Zea mays
  Peptide Sequence Number=SeqID_66724
atgaggtgcgcaggtgttctcctgccgctccttctgctctccctgtcggccgcctccactgccgaagcacacaaggaacgactgggcgacgctgctgctgcactgtcgactggtcggagatggttgacaggacgcaagacactggcagcacccgggcgtgatgaggtggtggaaggagccaagaagagcacaggagcgaaccaggaagcggatgcacctgacctgcggaagctgtacatggcccgtgttatttgcttatactgccaggccgcaatttccttccagtgtaaaaggagcgagggcccggtaacccatgccacgttccaagcaccaaggcatgccggcggcggcggcggcggcacggatacatcggcgcctgagatcctcgccggcatggactacaactacaggctggatgctcgtcgccaccgcccgatcaacaacggcgctccgctggttgagctcgccgccgggacaccctag

SEQ ID NO: 24946 - DNA, 297 bp, Zea mays
  Peptide Sequence Number=SeqID_66725
atggcggaggctgagcggaggcggcggaggatggtctccaaccgggagtcggccaggaggtcacgcatgcgcaagcagcggcagctcaccgagctgtgcgcgcaggtcgtccacctccgcggtgccaaccgccgccgcctcgacgagctgaaccgcgcactgaggggctgcagtgacatgtgctgcgagaacgccccggctccagaaagagaagaccgatctcagtaccaagctcgagcgcctcacccaggcgcagaacgccgccacgccaagctcctcctcggagccgcaacatga

SEQ ID NO: 24947 - DNA, 450 bp, Zea mays
  Peptide Sequence Number=SeqID_66726
atgccttctcttctaacggagggcgctttcactttcaccgcaacgatcggcatcaccagctgcaccaccttttccaagtcgtcgtcgtttgctttggtcttgcacgcactgaactacgcgtgttcctcctcctcctctcccccgcggccgtcgtgttcctcctccccgacgcgtgcatggcttgcttcctctgcgcgaccacagatcagctccttgccccttccgtgccgcctggtagagcgcgtgagaaccaaggctgcgtgcgcgaacgcgaacaaggactgcatcgaggtcgaccgcgccgaggcgtcttgcggcttgggcgatggcggcgcttcctctgccgaagaggagcatcgggagcaagaacagggccggtctttcagcttcagttcctttgacgaagagttcattggttctcgccttctcggggatgatgatgatgagtag

SEQ ID NO: 24948 - DNA, 310 bp, Zea mays
  Peptide Sequence Number=SeqID_66727
atggcggagtatcaacgtcggcgaggaaattcgcacgccatagccgctgattccgccaggtgggggcacacacatcatccccgcatcacggcgatgctccaggtcttctttccacgacaagagacgcagccccgaccgatgcacaaagcggcggcaatcttcttctctctcccttccgcctacggttcacttggtgactgggtgttcgtcgagatggttaagggagttagagcggtcgggttttataggggcagggcgagtccgagcggagcagcagcgagatcaacggcggagttcgcgggttccgatg

SEQ ID NO: 24949 - DNA, 1407 bp, Zea mays
  Peptide Sequence Number=SeqID_66728
atggacatgaacgagagcggcgagacagggatggagcagggcaacgcgtcctccggcgccccggtggattggcagactcaattcaacgccgccgcgttctcgtgcgcgccgcagcaggttcccatgatggactccgccttcgcgtccgccggcctgtgggcgtccacctcccaagccatggcgctctccgacgtcgtcggcgccatgtcggccgcgcggggaggcgggttcttggcgccggtgcccggtttcctcccgcagggcctcggccatttcgccgtcgactccggcttcatcgagcgcgccgcgcggacgtcctgcttcagcggcggcggcggcggggtgatgggcgctagcgcagctgccttcggtgcggctggtcagaccgtgaacaacgcgttcagtggttcgtcagaggcgctgctgctggatcaccagaagaaggacgtcgtcggcgagaagggcgagccggagctcggccgcgacgacggggtgctgagcccggaggctgctggtggtggggactgctcgtccaaggggacgtcggactccaagaagagggagaaggcccaacgaggtgagcgctcttcttgcttcgccgactcggcgaacgagagcgtgcacagcatggacaaaggcgaggagagcagcccggcaacaaccaccgccggcgccgggcctggcaagtcgagagggaagggagagaaagaggtccccgagtctcagaaggaggactacatccatatccgagcccgccgcggacaggcaacgaacagccacagcctagcagaacggttgaggagggagaagattagcgagaggatgaagcttctgcaggaccttgttcctggttgcagcaaagtcactggcaaggcggtgatgcttgacgagatcatcaactacgttcagtccctgcaaagacaagttgagttcttgtcaatgaagctcgccacggtgaacccaaggcttgacctcaacatagaagggcttctatcgaaagaccttctccgcttccctggtgctccttcgtcctccctcgggtttcccccagaaatgatgcacccgcagctactacagctgtcgcagccaggccgcctggtccagggagccgccgccgccgccgccggcatggccaatccggacgtgttcaggagaatcatgcaggcgcagctgagcgcgaaagacgacagcggcggcgcctctcagatgctgccccacgggtcgttcggtggcgttgcgcgggcggcgtacccgtcgtcgtcgtcggccctggcgctggggtcccacgactacttgaggagcatgagcagggcgtcgcaacaggacgcgcgcagggccggcgtaagtgatgctgctactgttgtgctgtgctgtgctgtgctgggagcagcagcgctgcagttctag

SEQ ID NO: 24950 - DNA, 387 bp, Zea mays
  Peptide Sequence Number=SeqID_66729
atggcgtctgcttcgtacgccgcaacgcatgcggctccacccgcacctcgctctccgcctgttcgaccacctgctccgctcgggcgcgccgacccggacctcccggcctacgagctcgctttcgcgtcctgcgcgcgcggaaggggccttggcacgggcgctgcaggggcctttgaacaggtggagaaaaggacacgttggatgcaaatgcacgcttatgaggcatttgcaagcacatatgctttcaagcagagagccataaaatttgaatctaataaaccctgttctattgaaaacaagatatctgtaaactacttaggcaagaccaagcaaactggtaggtctatgcgagttatcatggacaacggcacttgttcagttggatga

SEQ ID NO: 24951 - DNA, 591 bp, Zea mays
  Peptide Sequence Number=SeqID_66730
atggacgacgtgagggcgagccgaggcaccgaacggggcgagcgtgagatagaagggcacgcgaccaaggacccaggtgtacgagaccgcccaacattgcctagggtgcggttgagtggaggcagaaaacagtggctagatccgaccgctggaggaggtagaggggaggatgccctgcgcaccagggggaacgagcagggagatggagaaagtcgggccgacaacgcgacatccatggccgagcagggtcacgcgcccggcaaggatgtccgacgccgagggcaaggcgctgggcatggcggagcgacggccatgagcgagctgcatgggaggaagaagctagggaagagccgcaccgctgggagctctgggcaggcacagacgccagggcgcgctatgatagaacctcctaagtcattaggcccacctacagttatccttgtccagcagaccacggacaaccctgtcgatgcacctaatcactcgacaagtttggtatatgtatcttttacctttcccaagagcgtttcacccgtcacgcagatattacgatacatcggaggaatgaataagcgaaagccattacagtaa

SEQ ID NO: 24952 - DNA, 474 bp, Zea mays
  Peptide Sequence Number=SeqID_66731
atggcggcggaaacagaattgggggaaacgggaaattggagagttgtggtggctaatcggtggcaggatcaggtgctcgggcttggtgttgacccaacgcagcagaccgtgccatcaatttatagtggcgcgaagcggtggccagtgaatttagtggagacgcacggcggccggaaagaagggatgagtcactggcgcgttttaccgtggcactcaccagctgaggggctacggtggttatcgaggagctgcaaacttgtagtcctttatatcaactacaattctgccatagcaattaccctcaatcgagctatgaatcaaactcaaaatcgagctctaagttcatacaacttcactgcttgtgtggattcagaattagagtggcctgacagcccaactttggatctaattatctcaaaatatttcatggcaccaaggcttaatccctatagcaaagttgtcctcctttcatag

SEQ ID NO: 24953 - DNA, 554 bp, Zea mays
  Peptide Sequence Number=SeqID_66732
atgaaccagatgattgaggcgtggaaggagatcccgggtgctgaagaggacgagtgctcctccgctctgccaccagcgtcccagtcacaacgaagatgttctcttacagggagtgcaagtgatgggcgatatctagctgcttcgctgggctcaaactcagttccttcagcaacaaggaagagcatattatctgtaagcagatcatctccacctgatgtgtctaccagtgtcaccataacaaatagtccttcatccatcaggaacaagaaactctcactgccttcatatcacaaagtgtgccaagcaaataattgtgattacaaggtcgacattgttgtttctctggatgctaccccaatgaaagtggtgacggaggagaagctgctgaaaggacgcggtgtgagagacagactggagtctaggaggacactcttcaaaggcagcaaggataggtcggccaagctggctgcccacaaagcagggtcacaagttgttccgtacgaaggtggtggtaatttggaagagatttcagaagttgaaggtggatcggaaag

SEQ ID NO: 24954 - DNA, 690 bp, Zea mays
  Peptide Sequence Number=SeqID_66733
gacgcaacgagggcgtccaccacggctccgcctccgtccgcgactcctctgcgacccgtccgtgtccgcaaccccaccgcctcctcgctgtaccacatctacgtcgcctccctcgctgccacggtgcccgccgccgtcgtctctgttgactactgcctagcgcccgagcaccacatccccgccgcctacgacgatgcattcgcagccctgaaggcggtcatcgtcgcgtgccgcgcggatggcgccgaggcggaggctgagccctggctcgccgctcacggcgacgccttccgcatcgtccttgtgggggacagcgccgacggtaacatggcacacaacgtggcgataaggccgcgcaaggaaggcagcatcgagggttacgacgacatggtcagcgacgtcatcctcttgtacccttatttctgggggaaggagccgctgggcgtggagcccacggatctcggctaccgcacaatgttcgatcccacttgggaattcatctgcggcggaaagttcggccttgaccacccctacgtcaacccaatggcatcctcggaggagttgaggcagctcggttcccgccgcgtgctggtgaccacgacggaccagtgttggttcgtggagagggcaagggcgtacatagagggaatcaagaagtgcgactgggagggggagctcgagttctactag

SEQ ID NO: 24955 - DNA, 591 bp, Zea mays
  Peptide Sequence Number=SeqID_66734
atgatggaaaatttcggcagcaaaacagtgcaaatagcaatgaatgctgtggactcctccgtctgcgccgcgctcgtcgacaccgcacgtgtcgcggcggcggcctcggcctcgacgtccgccgtgctccggcccctcacggacgcgcacctccacgagcaggaccagtgcacgcggttggctgccgcgctcgccacggccgccgccgtcgaggcgtccaccgtcaccgtcgaccttgcttcctacctccacaggctccaaccgcgcctcctcaagttacttcgcagcaatgccttcaaggcgaagcccgcgctcatcaccctcattggcgcctgcgcagccatgggcaccgatgccaaagtcaccgcctccatcccgtgcctccgcgatgcaatcgctagcgatgactgcgcagcgaggaaggccgcggcggaggcactttctgcattggccctagagcacacagatcttctcacgacctacaaatcctcttgcatcaccttcttcgaggccagaatgtttgactatacatggccaaatgggcggcccggcccggcacggcccgggcacgaccaggcacggcacagttag

SEQ ID NO: 24956 - DNA, 459 bp, Zea mays
  Peptide Sequence Number=SeqID_66735
atggcgccaaccaagccacgcacgcgtacttataaccgaggtcagggtgcggtgtttggtcacagtcgcccaacggttgacgatatacgcggcagcaagtccgcgggagccgcccggcgagcatcgcggagaagaaatcgcggtctgttgaagtccgatcttccgcggatccagcgatttgttgctacccgcgagcgcccacgtgcggggtggaagacggctgacaaggcgggtccccgggaagtgaccgacgcggagacccagggcgggatttgctgtgccgagcgcgatttcagcggggccgttgcggtgatcttcagctgtttacgcgaggaagaagctactggatgttggggtccacacgccagggtaacagggacgcggaagcggcaagctgtgactgacgcgcgggtccgacttgtcagcgcggcgtggacgcggagatgggctgcgcggtga

SEQ ID NO: 24957 - DNA, 990 bp, Zea mays
  Peptide Sequence Number=SeqID_66736
atgcagtggtttggccactttgctgttactggggaatccacacatagaaagggagctaaggcactttcgcagtttgcgtttgtaaatcgtgacaggtgctgggaagaacttgagtggaaaggcaagcatgggcaatctccggctgtagttgctaccaagcctcactattttcgtgatcttgatgttctcgagacagtggagaatttcttagagtatgtcccagatttctggtcttctgatgagcttgctaattctatcaaagatggcaagctcatcaatcctactatgcagtgcaaggaattgacattcccgtgttgttggcttgaagttcttttatcaggacattatgatcacatatctcttgatgatcttgtctttttgaactgtgtcattgccaagggtagacaactttggcggctcatgaacgatgaagaacaacacgaagaatgggggcaaatggaagaacttttgaagggcggaaaccatttgactgatgctgatcattttgctctcatgaaggaacttgtggagacagaattacctggtgtgcttaagtgggtaggcattcagtcctggataattttctgtgaattgtcgaaagaatgcaaatcaggagattcttgtgaatcttttttctctcataacaaaatagaatttcacaaggctgatgattactcattggttcggaattatgggttctcaatttcacatatgcctgatattgatgttgaagatctaactagaagcagccataaaaggagaaagaggaataggagaaagcgccataggtacgagtctgatgaggacaagtttgatgaactgcttgaacttggatcatctgatggaaagaatggtgttgagtcacagcgtggaagctggcgcctttcaactgatggtttctctgcttcttgggacattatgcattctgggattgctgaacgctgcatgagatccaggacaactctctttagttgggatgctgaaggttga

SEQ ID NO: 24958 - DNA, 321 bp, Zea mays
  Peptide Sequence Number=SeqID_66737
atggcggactctggtgttccgacccctaagagcggtggtcagtcgtggggtgggaaaggcggcaatggggcacaggtttcataccatagcgaatcacaacaacctagcgacagacccaggccggtagcgcgcccagcgctcggtttgttgagattttccagtccgtcgcggtcgctgcatcagttggggaagaaccggtcagagctcgcgtgggaggcaatgctgacaattgggtcccacacggtttggatgtcatgggcacattattacattgctattgatgcttttatttttatcatccacaaatgcacaatcaaataa

SEQ ID NO: 24959 - DNA, 210 bp, Zea mays
  Peptide Sequence Number=SeqID_66738
atggctgttgtctctagggatgacaatgagtcagattcagattggatggtgcaaaaacttgcccgcggtcgtacccgtgaagtctacttaaacccgtccgcgatcgcacccgcgggtgcaattccaaacctgcagttgaacccatcgggttttactcattgtacagttttaaacaataattcaactataagcaatatcaagaataaatga

SEQ ID NO: 24960 - DNA, 240 bp, Zea mays
  Peptide Sequence Number=SeqID_66739
atggcctctaagtctctgatctcctggtctagctcctcctcttgtggtgttgggctgatggccttcctttttggttttgggcttctctcagagggagaccttcttggtgatgacgtgagagcaattacaatccagcgtgaacagtacaggggtactgttcatctatttataggcaaccgtaaaggtgaagagctggtgcccccagaggaggactattacgacgagttcgacgaggtctag

SEQ ID NO: 24961 - DNA, 372 bp, Zea mays
  Peptide Sequence Number=SeqID_66740
atggagagcaaatgggagaggaagaagaaacgatcgcgtgaagagctccttaatgccatggacgagcggacgacggggcaggcgcgcgaaaatgtgagagtccaaggaactaacactaattgctccctcttgggaaaaggcacagatgtgaacggggaacaacgagccgagccaggggactgtttgcataccttgctggagtctgttgaactcacggcgatggcgcattggttcctgggaaggccgggattcggtacctgtagcaattcaggattagggtttcgagcaaataagggatttaaacgggtcttaacgaagcatataagggattcgaccatggaggcgaggaatgttgtagtccctaactcgtag

SEQ ID NO: 24962 - DNA, 1500 bp, Zea mays
  Peptide Sequence Number=SeqID_66741
atggcgttcgagaagatcaaggtctccaacccaatcgtcgagatggacggtgatgagatgaccagagtattctggcagtctatcaaggacaagcttatctttccatttctggacctggacatcaagtactatgacttggggatactgcaccgtgacgcaactgatgacaaggtcacagtggaggctgcagaggctactctcaagtacaatgtggccattaagtgtgcgaccattactccagatgaaactagggttaaggagttcaatttgaagcacatgtggaagagcccaaatggcacaattaggaacattataaatggtactgtgttcagagaaccaattatatgcaaaaacgttccaaggcttgttccaggatggacgaagcccatctgcattggaaggcatgccttcggtgatcagtaccgagctactgatgcagttctgaaggggcctgggaagctgaagctagtttttgagggaaaagaagaacagattgatctggaggtgttcaacttcactggtgctggaggagttgccttgtctatgtacaacactgatgagtcaattcgagcttttgccgcagcttctatgacaactgcatatgagaagaaatggccgctctaccttagcaccaaaaacacaatcctgaagaaatatgatggcaggtttaaggacattttccaggaggtctatgaagctgactggaaatccaaatttgaggctgctggaatatggtatgagcatcgtcttattgatgacatggttgcatatgcacttaagagtgaaggaggctacgtgtgggcttgcaagaattacgatggagatgtgcagagtgatttcttagcacaaggttttggctctttgggtttgatgacatcagtgttggtgtgccctgatgggaaaaccattgaagctgaagcagcccatggcacggttacccgccatttccgtgttcaccagaaaggaggtgaaaccagtacgaacagcattgcttcaatctttgcatggacaagggggcttgcacatagggcaaagctcgacgacaatgcgaggctcctcgacttcgctctcaaactcgaggccgcttgcgttggagctgtggagtctgggaagatgactaaagatctcgcacttcttgttcatggatcttccaacgcaagcgaaatcgccgaaggaaaggagaccccgagacgagcaaggcggcgagggagggcaaagaccacgtaccagcgcgcacgcacaatgtcgggagcacagggcgcgcacccggtcggccagacgacgccgacgacgtacgagtcggtgggcggcggggagaaccgcacgcgcacggacctgcggtcgcgggaggaccagggcgccatccagatcgagaaggtgcaggacaaggtcgacgatgccgcggggcgtggggtagaccacagcaccttcggcgccaacaaggagggccgcgacgacaaggccgatgccggggcaaccggcaccggcacaggcgcgtga

SEQ ID NO: 24963 - DNA, 591 bp, Zea mays
  Peptide Sequence Number=SeqID_66742
atgacgactcccgctgccgtcaccgcgttcccggcgttccactaccccgcgctggaggaattcgacatcgacgctgctgccgccgttagactcggcctaaaggatcggcgagcccacagggtacacaagtggccagccgacctctgctggatggcgcagcgcctcggtagcctcaggctcgacgctgtcaaattagttgacgaggatggcttcggcggcttcgcgacagcgcacgacgaggcacaacatcaccgcgaggtcgtacgtcctaaactggtcggccatgaacccgatgaggcgggtggtgtcgcggagctctgcgagcaggcccacgagcgcgggagcgagcgtgcgcactcctcggtcatgagatccacgactcctcaccttcctcaagcttcacggtgccctcgccctcacgagctaccaatgccctcctccctgtcgtccatgttcatctccaagacgctcatggatgcgtacaccaagaccagccgcctcaagctagtgctgcaggtgctcggcgaaatgaccagcaggaacgtggtctcaaggaccatgctcgtcgcctctctagtgagggctggctag

SEQ ID NO: 24964 - DNA, 852 bp, Zea mays
  Peptide Sequence Number=SeqID_66743
atggcgggtttgggtttgggaggtataaacctgaaccccattacctatggggaagaagaaatagatccttgcactccatgccgctatgatcagcgctggccgcagcaggcggcgggggcgggcaccggcgtccctgcccacgaccacgaccgctgcttcccgccggaccgagcactccatctcctgctgatatatgagagcatggttttctgtaggtgtttatctatctctcattgctttagtcagtatatccttgtgggtttagcaggtcccatatcttcggatgtaatgtggatgaagttaagctttggttatattttcccccctaggagtggattccttagtgcctggttacagaacctactgacttcaggtctcaacatatctattgtagacaccacaatcattataatgtcaacaatcctgtctattgtttttcatgagtttggacatgccattgcagctgcaagactatacatacctctaatacctgcccacagtcacaactgtagggaactgaatgagactggacctgaagacattgaactactgtgtaagcagtctcttagtcataatacaatggtcgccaaaccgagtgatagtctgaaattgaccatcgactatgttaaagctatcgtgagggaggctacacttgaggcttcgtcgggcaaacgggagcccttgcccccatcggttgcggcaagtccagagcagcaaccttcttcagcgatggaggcggaaaagaacgccgctgaggaactatcttttctaaagcacgcaactttgggaaaatattgtctgattgtggcgaagaagaaagatgaaggctctttggcgcgacctgttgactag

SEQ ID NO: 24965 - DNA, 858 bp, Zea mays
  Peptide Sequence Number=SeqID_66744
atggcctcatgtctgtcagaacaggtcatggaagtccctgaaatatctcctatgtcagaatacttgtccactcatgatgttattctttctgtggatggtctgaaaataaccagaactgatgattggatcaagattctgaaccaaggtactacagcgaaatctagggatcctgaattccttgaaggctctcatagatatgttgccactagttctaccaagggttattgcgtgcccgattcatggatagatgcaagcaaaaatctctggcagataagagacaagctgccttgcccagatgaactgatagccttcgaaaaagttatctgtaacgtctcaaccattttgacagagaagactagcataggtagtgaccagaaggaagttgagggaaaatattgtttgattgcgaaagatgtagtaaagcttagaagatgtggaaacggatggcacatgactgaagatgatgaaagtagctgtgcatgttttgaggatgagcactgtttggtacctgttctgaacccaggcttttcatggattgaggtctcctatgccaggccatactctttgagatgtttacaaaaaggaggaaatttgttatcatcacatactgcaaatagtaactttggacagagtccttgtgaaggatcttttgtttatgtgggtgatctgtcatcagcagcacgttcggttaggttatcccgctaccgacctcgatgggcacttctacttttcattgcagacatcccatatatcttggaaaatggtttaagtagcttgcttcatgcatctgcagcattggctgtaatcaattgcctaccgaagaggatagctctagaagaatttggtgtcaatctctag

SEQ ID NO: 24966 - DNA, 255 bp, Zea mays
  Peptide Sequence Number=SeqID_66745
atggaccttagaaatcaaaatgatgacaaagggaatggagccgctaatattcacaatccaatccttattgctaatgatagggaccgagccataagatatggtaagactttagaacccaaagaagttgtggttgaagatgaacctattgagaaggaggaaagtcaaccaacaattgaaattcttccaccagaagagctagaagttacaaattcttatgagattttgaaacaattaagaaagtttcgatcatcttag

SEQ ID NO: 24967 - DNA, 791 bp, Zea mays
  Peptide Sequence Number=SeqID_66746
atggcgggggctcggcgtcttgtcagctcccgccgccgaaccgaggcacctcgacggcgtccgtcgccttccacgccaccgaagaagctgagaccaatgtctgagataatggcgcgtgcgaaatacgctgtggtggagcgagctgactacagtgacatcatctgcgaacaatgcggctccggtgaacgtcccggagagctcctcctttgtgataaatgcgataaaggcttccacatgagatgccttagaccaatcgtggttcgtattcctattggatcctggctttgccccaaatgctctggccataggcgaaaaaggataattgatttcttcaagattcagaagagtggtgatgggaaaaagaaatgcaatttgagtcaagcaatgcagatggaattcagtgatgatctaacctactcttctgatatggcccctagatctgccaatcaggccaagtttgaaaatggtggcatgcaggttctttcgagggaagatatggagaccttggaactctgcagatctatgagtaggagaggcgaatgtcctccctttatagtagtttttgattcatgtgaaggttatacggtagaagcagatgcacagataaaggacatgactttcattgcagaatacacaggggatgtcgattacattaagaaccgtgaaaatgatgactgtgatagcatgatgacccttcttttagcaacaaacccatctgaaagtcttgtaatctgccctgataaatgtggaaacattgctcgctttatcaatggcattaataatcatacacc

SEQ ID NO: 24968 - DNA, 393 bp, Zea mays
  Peptide Sequence Number=SeqID_66747
atggagcatgactcggaggagagcgtggttgaaaggggtgatgagaaaaagagactaagaagagagggtgacaaatttgttgatagggataaattgggatctcttgttgttaggagtaggaaggtgttgggaagtagctatattacatcagtagataccaaggggaggtgtgattttttgaatgggattgatgttgcagctgatggttctcgagggggtttaagtctagtttggagaagaaattccacgatcactttgaggagtttctcgaaataccatattgatattgaatttaaggagggtgatagggtaataagtggagatttacgagtttctatagggcttcagattcgcgtcatagagatgacacatggaacttgcttaggactttag

SEQ ID NO: 24969 - DNA, 252 bp, Zea mays
  Peptide Sequence Number=SeqID_66748
atgccaaaatttcctactttcccaactactttgctctcgtctaatgagtacgaagaagagccagttccatccgctgccaaaactgactctgtgactaaaagagccactatagataaaagaaaagttattgaagagaagttagaaaagtcaacctctgccgaactagagaatgatgtagaaggaaaagaaaaaacaaatgtccccaccattgcaccagctactatgactaaaaaggaaaaactcttgtattga

SEQ ID NO: 24970 - DNA, 420 bp, Zea mays
  Peptide Sequence Number=SeqID_66749
atgccgatactgaaggagacggagactggcaagacaagaaaaggaaaagccaaagctgacagcaaaagaactaacctgaatggagagacatctttatggtgcaaattgaagggtgtcgaaaaaatggatggtatttttgctgatcaagaggacactatttttgacaaggaagttgatattgcagaagcagaagttattgctgaagaagaggaagttgctgaaaatgagaaagaaaaagaaaaagaagattttgttgaaaaagttgtcaccgcacccgagtctgctggtgcaaatattgataatttagggcgaactggagcgggactagcggaagttgctaaagtcaccagtcagaagcaatgcaatacatgggcaatagtggtctgcactggaccactccaactggactctcctacataa

SEQ ID NO: 24971 - DNA, 966 bp, Zea mays
  Peptide Sequence Number=SeqID_66750
atgactaaccaacaaaatgtggtggttcttgatgtgatatcgcggggtgttagcaatgtgttgcctcgatcatctctgccagtgcccaagtccttttcaccgcaagaccttaagatgttattgatgaagagattcgaagctgaaaatgggggcgctaaaatcagtgcctgggtggattccatgagagcttcttcaccaacccgtatcaagtcctctaccactgcttccttacctgaaactgacgacactagttcctggatcgttcaccatccctcggctttgagcatgtttgagcaaatagtagccgcttctaaaggaaaacaaattgtgatgtttctggattacgacggcacactctctccgattgttgaagacccggatcaagctttcatgcccaaagagatgagagcaactgtaagagatgttgcaagatattttccaacagcaatcgtgaccggaaggtgcagagacaaggtttacagctttgtgaaactggctggactttattatgctggtagccatggtatggacatcaagggaccatctaaaagttgcaaatacaagaaaggtaaccagggagttcttttccaggctgcaagtgaattcttgcccatgattgatgaggtttacaaagacttggtggagaaaacaaaatccattccaggaacgaaagtggaaaacaacaagttttgtgtctccgtacattttcgttgtgttgatgaaaagagttgggctgcactagcggagcaagttagatcggtgctcaaccactaccctaagcttaaactaactcaagggaggaaggttttacgtgagagagggcaagggtttgggattcttgtgtccaagctacctaaagaaacaaatgcttcatattctctccaagaaccatctgaggttaaggagtttttgaagcgtttggtggactggaaaaaaatgtcacaaagagcagctaaatgtgcttag

SEQ ID NO: 24972 - DNA, 1044 bp, Zea mays
  Peptide Sequence Number=SeqID_66751
atgagaaaaagaaatgtaaagaaaattatagaattgatggaaggattaatgaataagctaaggcatttagatgcatatccaaagtttgatgtcacattccctgctatcgcatgctcaattctcagccttgatgcaattgacataagtggagagcaacaccttgatgttaaacatgacatagtaaaggaaaggttaggtgtaaatggcaatgttatagaagtgagaccggatggggttggttctcgcaagatggaaaagcctttacagaggcaaggtggcaggctcgagcacaatgagacgtattgtggttcatgttatggtgcagaatctattgatggtgagtgttgcaactcctgtgaggaagttcgtgatgcatacagaaagaaaggttgggctatgtcaaatctggatttgattgaacagtgcaagagagagggcttttttcagaagattaaggatgaagaaggtgaggggtgtaatatttatggctccttagaagttaaaaaggtggcagggaattttcattttgcacctgggaaaagctttgaccaatcaaatattcatgtacatgacttgcaagcatttcgaaagaacaggtttaatttaagtcacacgatcaatcggttagcttttggagatcatttccctggtgtggtgaatcctcttgatggtgtccaatggatgcaaaaacaaccaattgggatgtaccagtactttatcaaggttgttcctaccatgtacaaagatgagaacggacacactatccagtcaaatcagttttctgtaacagagcattttaaaggtgcagaaagaggccttctcgataacctcgcaggagttttcttcatttatgacctttctcctatcaaggtgactttcgcagagggacatgtctcattcttgcacttcctaacgaacgtttgtgctatagttggaggcgttttcgcagtttcgggaataatagactcgtgtatataccatggtcaaaaagcaatggaaaagaagatggagatagattgcgtttacactttgataaatatttga

SEQ ID NO: 24973 - DNA, 1581 bp, Zea mays
  Peptide Sequence Number=SeqID_66752
atggtggagatacacgaatctgatcgagtgatgcggcaattcgggtggaggcaaaaaatttcatcgttattacgaaatatggaagcactgcacaagctggatctacaagggaagaccaacgaaaattggcgagattaccataagaatataatggaacgatttgaagacgacgatcttcagtacgttgtcgatgactactacgacgtcaatgatttcaataacgacggtgccgtagtcgaacccgagcctcagagagacgccgctggacttgaatcctttgactccgactttgaagacgatattgaatcagtaatgagtaagccaaaaactgacacatcagctgaggaagcaagaaatggaaaagatatacaaggaattccttgggagaggcttaatttcactagagaaaggtaccgccagacgagagtaagagagtacaagaactacgagaacctctatggttctcgtgaagagatggaaaaggaatgcttgcaagtagagaagggaaaggccttttatgactttcagtttaacacaaggcttgtcaaatcgacaattgttcactttcagttatcctttgcaaatggtttgaacttcaactatccgcatatcactactcatagttctcgagttttagttaggctgagaaatctattgtgggctacatcaaagcacgatgtctacctcatggaaaattactcagtaatgcattggtcatcactgcttcacaaaggcgaagaagtactgaatgtggctaaaccaattgttcccaacctgaagcatcctggactgctatctcagcaactctctagagtgcagattagcactatggtagttaaagaaaatttaatggtagcaggtggttttcaaggagagcttatttgcaaggtgaggaatactgtttctctttggcattttggacgatttgatgatattttgactggcaatgaactgaaagcttattatatcctcagcggtgcattgagagttatggctgcaaataatgatgctaaaatccgaatatttgatgctgaaacttttgctagtattaaccgctactcgttcaactggtctgtaaataatacctctgtaagtccagatgggaagttgcttgcggtactcggagatagtgtggagtgcttgattgttgatgcccaatctggcaaagttaccaacagcctaaaagggcatttggactattcttttgcttcagcttggcaccctgatgggcacattctggcaactgggaatcaggacactagctgtaggttgtgggacataagaaacctgtcgaagtccctagctatattgaagggaagaatgggagcaataagaggagtgaagttcacatcggatggtcggttcctggccatagctgagcctgcagatttcgttcacatctttgatacgaagttggggtatgttaattgccaagaaattgatattttcggtgaaatagctggagtatcgtttagcccggatacagaaacgctctttgttggggttgctgatcgcacttacggcagcttgttagcgtataaccgcagacgatataaccaatatctggactccatgttgtag

SEQ ID NO: 24974 - DNA, 2502 bp, Zea mays
  Peptide Sequence Number=SeqID_66753
atgaagctgctgaacctctctctacttattcacttgtgttcactgctgctcgtctcaactcagcccaccaatcagcctccattctcctgcgactcaactgacccactaaccaaatcctacaaattttgcaaaactacactccccatcaaccgaagagttgaagacctcgtctccaggctgacgttagatgagaaaatatctcaactcgttaacacagctgccgccattccacgactcggtatccctggctatgagtggtggtctgaagccttgcatggggtggccttcgtggccaacataagccaaggtatccgcttcaatgggacaattcgatctgccaccagtttccctcaagtcatcctcactgctgcttcatttgatccctatctatggtaccgcattggccaggcaagtcctataactttgtattcatctgtctgctttaatgtcaactccaaaagtattcaaagagaaagagcaattggaatagaagctagaggagtgtataacgctggacaagcaagaggcatgaccttttggacaccaaatattaatatattcagggacccaaggtggggaagaggccaagaaacacctggcgaggatccattggttacagggaagtacgcagtctcatttgtgagaggaatacaaggggactctttcgaaggcggtaagcttggtgagagtctccaagtttcagcttgttgtaagcatttcacagcttatgatttggataactggaaaggaattaaccggttcgtctttgatgcaaatgtcacgctacaggatttagcagatacatatcagcctcctttccagagttgcatagagaaagggaaagccagtggggtaatgtgtgcttacaatcgtattaatggagttccaaactgtgcagattacaatctcttgtcaaaaacagcccgaggacagtggggtttcaatgggtacatcacctcagactgtgatgctgtctcaatcatatatgatgaacaaggatatgttaaagaaccagaggacgctgttgccgatgttcttacagccggaatggacttggactgtggtgaatatttgaagaactacaccggatcagctatcgaaaagaaaaaagtagctgtgtctgatatagatagagcactccacaaccttttctcaatcaggatgaggttgggacttttcaatggcaacccggctaaacagccttttggaaacatcggttctgaccaggtctgctcccaagaacacctgaaccttgctctcgaggctgctcgcaatggcattgtccttctgaaaaacgataacagactccttccacttgcaaaaactgaaattacttcccttgctgtgataggtcctaatgccaattctagcgaaacacttgttggaaattatgcaggtcctccttgtaatcctgttacaccattgcaaggattgcaaagctatgtcaagaacatcaactaccatccaggttgtagtacggttaactgttcgtctgatttggctgatgaagcaatgaagatagttaaagggacagaccaggtggtgttagtaatgggattggatcaaactcaggagagggaagctcatgatcgtgtcgacttggttcttcctggacatcaacagaaactcgttacccgcatcgcaagcgctgcaaataagcctgtcattcttgtgcttctttgtggaggtccagtagacataacatttgccaagaatgatcagaacattggaagcattatatgggctggctatcccggtgaagctggaggacgtgcattagccgaaattatatttggtgatcataatccaggagggagattaccaattacatggtatccacaaaatttgactaaaataccgatgacagacatgagaatgcggcctgaaccatcttcaggttatcctggacgtacttacagattctaccaagggctgaaggtattcgaattcggctacggtctcagctacaccaattattcctatgaatttctccctcttacaaaagataaggtctacttaaacaatcaatcaagtgataaaatagctctgggatacaagtcggtttcagagatgggaactgaactttgtgaaaagagcaagctcccagtcacagtaagggttcaaaacaacggtgagatggatggtaagcatgcagtgctgctctttgtgaggcaagcaaagactggtaatgaaaggccaataaaacaattggtgggattcaacaatgttgatctaaaggcaggggaaaaagctgaaatcaaattggagttgagcccttgtgagcatcttagcagtgcggagggagatggtcaaatggtggtagatgaaggatcttatttcttgagcattggagacaaagaatcagagattacagtggttttctcggaagacactagcgatgctgccacatcaaagctcatgatccttccaagaatcctgatattcttttacatctattcattcattcattcattcattcctatgcatattgttctgaaatga

SEQ ID NO: 24975 - DNA, 1071 bp, Zea mays
  Peptide Sequence Number=SeqID_66754
atggtgagcacggtgggcagcgtgagcaacctgggcggcgcggtcgcgggctcctccttgggcatcatcatcccgttcaccggcggcacgtccttggcgagcccgttcacggccgagtcccgcctcttcctggcccccgcccccgcatcagatcccatcccctcgccgccggaatgcggcggcgcgcacagcccccgcgccgacgcggccgccgacggccaccggaaccggcgggctgcggctgcgagagcggccgccgtgttcggcaggcggcggccggcgggcgggggaggaggagtggggagtcggatggctactggtgggctggctgacggctggatcccactaagcagcgagcatctggccacctgggtggtggtgcaggtttctcgtggggccgccggggatctggatctgggttgctgttcctgcttgacgtccggggttagtatcttgtgtagtgggccacgtcgtgcagttgggcagacgtcgataaagagaggcgcctgtcgtaccatgcccccgcacgtcccccacccatccgcgaccgctgtcgtcaccatcaatcatgcaaggattcgttgtcgtccaagacaacaacgagttagcgaagaaggagcagggctgatggctcgatgtcgagcagttggccgactgtgcggggagaggcgcccggtcaagatacaggaggagcggcgaccccgcgagtacgaccgggagcacagctattccggatgggccaaggtgttggagaacaccttaagggatgaggaggagctccgtgccattcttggtgatagcatcggcaacatggagctcatgaggaaacggtggcgacaccagttggccgaccgcgcggggagaggcgcccggtcaagatacaggaggagcggcgaccccgcgagtacgaccgggagcacaactatcctggatgggccaaccttattcctgtcgaaatccaaatgcacggtgttggagaacaccttaagggatgaggaggagctacgtgccattcttggtgatagcaccggcaacatggagctcatgaggaaacggtggcgacacgtctga

SEQ ID NO: 24976 - DNA, 1185 bp, Zea mays
  Peptide Sequence Number=SeqID_66755
atggatagggggattaagggaggagatggacagaggcaggacaacgggcgtgccaccatcagacaccaaatgcagcatcagttaaatgccgccctcaacatcggatcggagggtgagcggtggggatggcggtggcggtggcatgaggacggtggagtgcctgagagggaggcttctcgcagagagggtggcgtccaaggctgcaaaggaggaggccgaccaactggccaaaaggcaagcagcagtccgcgtactaatccccgccatcttttaattcctattggctcccatcccatcccatatactgatccaactctcttctcttctgtcgattctgacggtcggttgggggcttggggccggctgcatcagctggacgagctagagaggaagctcgccgacgaggtcaaggtgaggaacagggcggagcggaggctcaggagggccatcaggaagctggagtccctcaaggttctggacgtcgggctctcggacggctccaccgggtcgctgtactccaacggacgctccggtcaccaggcgccggaggcggaggtgggggcggaggcggaggagaggaacggccctggctcgttgaccaccgatggctctgcgccatccgctccttccggagacgccgacagggtcgtgtcgtcggagggatcgtgcacccagctcaactcgtcctcccaggacgggagctggtgctccgttgcgtcagagcaatcccagcctggtccttgcatggatcctgccggacacaccaccaactgccgttcggcggggagcggcggctgtgaccgtgattcagagaggcaacacctcgatgcatcatcccgtggctgtggcccagctaaacccgaagaagccgtcaacgagagcgacgacacgctagcgctggtgctggtagatccccagctcgttgcagccgcggcaggcggcggtccaagaacgcaggcaggagaggtccgccgtggcaggagtcacgaggaggaagaagaagaggagagcgacaggctcgcgatcgttctagctgagccgcagcgacaggccgccgctgggcgcggcgacgtggagtccgttctcctggcgctgcggcgggtgaaggagcagctgcgctacaccatcgagcggcggtcgcgggcgcggctcgtcgtcgcccaccaggaactctacggccactag

SEQ ID NO: 24977 - DNA, 228 bp, Zea mays
  Peptide Sequence Number=SeqID_66756
atggagactctacttgtcgctcctccactgggaacggagaccaacgacgccaccgccgccctcctcgccaaccacgcccgctaccacgccctgagcgggcgtgtcacatgcacaaggccgggtgtcatgagtgtcagcaggcagaagcagaacaccacccccgatccatttcaaaaacaccttgatgcatggatccagacacaggaacggacaattggacatgtttag

SEQ ID NO: 24978 - DNA, 372 bp, Zea mays
  Peptide Sequence Number=SeqID_66757
atggcgattggtggcgcagcgcagaagcaatgtggaggcctggagaggcaagctgcggaaagttcttggagcggccgggcggccaggacagaggacacgcagccggcaccgttccggcacgtacggcgtggtacagtacaggataacagattaacaggagaagaaactccgaatcgtgtccgctgtccgcacttgggcttggcgggtcccgtggcccgcgacctgccaggcagaaccgcacatgcaacggccacagatggcaagcagtgcgcacggaccgggaaaaagaagggcgcacggcgctctggcatagtggcatccatctcacatccaccccctcctccgtgtatgcgtatagcgacagtggaatga

SEQ ID NO: 24979 - DNA, 1059 bp, Zea mays
  Peptide Sequence Number=SeqID_66758
atggacaacatggtgttcctgcaaaggtggctccaaaagttcccacagtacaagggcagagacctctacatcgctggagagagctacgcagggcactacatcccgcagctcgcggaggccatggtggagttcaacaagaaggacaggatcttcaacctcagaggcgtcgccctgggcaacccggtgctggagttcgcgacggacttcaacgcccgcgccgagtacttctggtcgcacggcctcatctccgacgccacctaccgcgtgttcacctccgcctgcaactactcccgctacgtcaccgagtactacggcggctcgctgtcgccgctgtgcgcccgggtgatgaaccaggtgacgcgcgagaccagccgcttcgtcgacaagtacgacgtcacgctcgacgtctgcctctcgtcggtgctctcccagtccaagatcctctcgccgcacgagcaggtcgggcagcggatcgacgtgtgcgtggaggacgagacggtgaggtacctcaaccgccgggacgtgcaggcggcgctgcacgcgaggctcgtcggcgtcgacaagtgggcggtctgcagcagcgttctcgagtacgagctgctcaacctgcagatcccgaccatcagcgtcgtcggatcgctcgtgaaatccggcatccgagtgctagtttacagcggcgaccaggactcggtgatccctctgacgggcagccggacgctggtgcagaacctggcgcgcgacatgggcctcaagaccaccaccccgtaccgggtgtggttcgaagggcagcaggtcggaggatggacgcaggtgtacggaggcggcgcgctgtccttcgccaccatcaggggcgcctcccacgaggcgcccttctcgcagcccggacgctcgctcgttctcttcagggcgttcctgcagggccagcctctgcctgaaaccttctcaccagcggctgcagcgaaggctcggagcgaagggtggcgtctttgccttcgccccaacatttgccctccgagggaccagttcgacaaagtcatctggtgccgaagacgtcgctag

SEQ ID NO: 24980 - DNA, 186 bp, Zea mays
  Peptide Sequence Number=SeqID_66759
atgaccgtatgggagctcatccttgctataatcacaccagttgaagagcagctgacgaacttgaagatggaaaaacactcgtcaccgaggcttgcctatctatatattgttgaggaagccacaaaggcttgggtttctcaaaccctatcatcattatcaaatcaagagagtgaactcttgagatga

SEQ ID NO: 24981 - DNA, 126 bp, Zea mays
  Peptide Sequence Number=SeqID_66760
atgggcaggggcgctccccagctcggctctgttggagggatgacggacgccctactgttggtctggacatttgcagaagagcccttctcgttttcagattcaacccgccgtccatctgtgggttag

SEQ ID NO: 24982 - DNA, 165 bp, Zea mays
  Peptide Sequence Number=SeqID_66761
atggcgcgagtgcggcgacgttctgttgtgcccgcacgcgagttccgcggagaagaagacctcagccggaggggtccaccagtcattggccagcggcgcacgcacgggaggaagccctggcgagtgggccccgcgtatatggatgagatagactacatgatgtag

SEQ ID NO: 24983 - DNA, 142 bp, Zea mays
  Peptide Sequence Number=SeqID_66762
ccctgcacccagccggcaatgctcccaggcgcgcgagatatggatgaggaagcgacggagttcggcgatggggtttggctgcagcagcgggattcgtggaggatcccaacctcccgccgaagccgcggtctccgatccgtaa

SEQ ID NO: 24984 - DNA, 654 bp, Zea mays
  Peptide Sequence Number=SeqID_66763
atggccgatctgtacgacgaggataagggcccatcgctaaagagccagcagtcgtgccctggcctccgcctcaagcccgtcattgagatctttaattattgggtttgcatgcttattttcattttacactaccttggcaaaaatgtatactgcaagggtggcattagtggtgaactggtgattacatgcaggcaaaggtcaccaaggagatgcaagggttacaaaaatgatttagtagccttgaatttgaccttgtggatctctgtgaaattgactggttctcctaccactgatctagaccttcttgaaagtattgctggcaaggaagaaggaggaggtggtgcatcaggtcgcggtcgaggcaggagtgcaaacgcgagtgaagtatccgagtcagactcggatctaggatctacggtagaggctagagctggtgctgactcggacgctggctgcggtgcaggatctgctagagctggagtagtcacggaaatagccacaacagcagtggtgacaacaaatgctggaggcactagtggcggagtgctaactggtccaacgacctgggtcgagaagtccagggttactggcctgagtggagagatggatggaccaaaagagtggagctgggtccagactgaatggctggcatga

SEQ ID NO: 24985 - DNA, 387 bp, Zea mays
  Peptide Sequence Number=SeqID_66764
atggccacgaagcaacttgccagtcgtcctcggtggccacgtccgcaagaagcctgctgcttcctcgagctatttacacttgtgcccctctcgttcctcattcacttgccgggtttcgcctgctcggttccctatccgcactgccgtcgccggtcatggtccggcacacgctatggcggttggtcgcggcgcactgcctgggccacatccctgtcggcgaggctagcgtgtttgtggtcgcagcgcactgctggagggaatatgggttctaggaggttgacgttgaaaaagaagaacgtggcaggagctggtgaagggcgcgaatgcgagctgtgggacacggaggggatcaacgtcaagtacgagacgcgcaaggacagggcctag

SEQ ID NO: 24986 - DNA, 288 bp, Zea mays
  Peptide Sequence Number=SeqID_66765
atgactcggacgattcccaggggatcgctgccgaggtgtggacgtacatctgggccgtcgagcgctccgggctcgagggctcggatgagtaagaactcctccgactcgtccgaggaggggagcggtggtgacggtgatgatgaaggcgaaggcggcgatggaggtgacggcggcggtggaggcgatggcgacggcaagggcgacggcgacggcggcaagggcgacggcgacgacggcaagggtgtcagcggcagcagcaaggctagtggcaaagcaccagtggcttaa

SEQ ID NO: 24987 - DNA, 1353 bp, Zea mays
  Peptide Sequence Number=SeqID_66766
atgcatgtggcacacttgctccttggacgaccttggcaatttgatcgtgatgttacacaccaaggtaagaaattcacttttgctcctttaaatcccactgatgtatacaaagatcaacagaggatgatgaaattttgtgagggggtaagggagaaagggcaagtacaaaagacagagagaaaagaggctaatagtgaaaaaagtcacaattttaaaagcccaaaggattatgaggatgtttttagtgaggcccctaaagcctatagatgcaatcccgaagagacaaaagaattgcaaaggcaagctgaggagttactagacaaagggtacattcgtgaaagcctaagcccttgtgctgttcctgtcttattggtaccaaagaaagatggtttcatagttagtgctcaaggtattcatgtcgacgaggacaaagtcaaggcaattaaggagtggccgactcctaaatcggtaactgaggataagcaacccatcgcttattttagtgagaaattaaatggtgcacagttaaactactcgacttatgacaaagaactattagcattagttcgtgcacttcaagtatggcaacattatttgctgcccaataaatttgtcatacatacagatcatgaatcccttaaatggttaaagggacaaggaaaagataatgtagttgcagatgctttgtctcgacgatatgctttaatgactacattgaatgctaaagtcttagggttatgcataccaaagtgttccatgagagacttattgattcatgaggcccatagtgggggtttaatgggacattttggagtggccaaaacactagatatcttgcaagaacactttcattggccacatatgaagaaggatgtggaaaagatgtcaaattccttagccacttttggaagatattgtgggaaagctgagttggtgaaatccctacatgagaaggctaggcaacgaatagccaaaacaaatgatgtaaacaccaacaaagcaaacaaggggcgcaaacgggttgtcctagaacccggagattgggtttgggtccatttgaggaaagaacgatttcctacaaaaaggaagactaaattggacccaagggacgatgggcctttccaagtactcgagcagatcaacgataatgcctataaaattgatctacctggtgagtacaatgaaatggagatgctcattcagatagctaatgtggaggaggaggatgaaacaactatggttcgatttattgatggtttgaacaagctgatagctaatacattgaggctacaaacttacattgatttggaagaagcagttcataaagccattgagattgagcaacaattatag

SEQ ID NO: 24988 - DNA, 240 bp, Zea mays
  Peptide Sequence Number=SeqID_66767
atggagcttggaagcttgaaaaccctaactatggcttcttctgataagggattgcgcgcggaccaagatcgagttgtcaagtcacgggaaactcctatgaagaacgctaaacacttggatctaaaacgaagtacattcatcttttggacggcaaggtgcatggataaattcaattgtgagctgattgttggtgttttccaagtgatttttcagccaagctttccatctctccaagaatga

SEQ ID NO: 24989 - DNA, 228 bp, Zea mays
  Peptide Sequence Number=SeqID_66768
atgagcaaaggttggccgaatgtgtgggatcatttaacaaggaatcctacccgtaacctaacatcaatcccttgtttaccacctttacgtgggatagaacacttccattggccacatatgaagaaggatgtcgaaaagtttctgtggttgtacatgaagtttgagttccatttgacaaaggttaactcaacaacggagcttcgactacactatgcccccgatgagtga

SEQ ID NO: 24990 - DNA, 240 bp, Zea mays
  Peptide Sequence Number=SeqID_66769
atggtggaaaagctttgcttaaccactaccaagcatccacggccttatcaactacaagggcttagcaacgaaggccaatttaaggtcactgaacaagtgcgcatcgccttttctatcggtttgcaacattccacccatggacaagttccagcttcattacccttctaccgagagacttttcaattgatggaacaagatttcattgttcttgttcgtttaaaccaatttccaaagttctag

SEQ ID NO: 24991 - DNA, 210 bp, Zea mays
  Peptide Sequence Number=SeqID_66770
atgagcttaaatgagctcattaagatgcaactcttggctaaagaaataccagcattaaaggaggacgtgaatggccaaaataagtgtgaaaagtcagccttgaagagtcctttaggtgtgaacatgcccaaccgaatagtcattggtgtgaactccaagtgtgaacagcattatgctattttgttgagaaatgaatcagctgaacattaa

SEQ ID NO: 24992 - DNA, 471 bp, Zea mays
  Peptide Sequence Number=SeqID_66771
atgcggaagctttcaaatggttttaaagataccagcattaaaggtgaacgtgaacagccttcaaggtgtgaaaaaggagttggaaaagtctttggaagtgtgaacaatgatcagccaaatggtccttgtgcttggatatcaaccgaaacgaactattcttatttgttcggagctagggatgttgtaaagcacttctttgcaatgacaggatcagaagatcgtagtcgtggtggagatcaaccaccagatttgcaaatgcaagctattactcgcaccttgcaacgtctattagaaaatgcatttgagcctatacactctcgtttggacaagattgaagggggtggttcacaatctgtccataatgaacataatgatgaaaatgacattgaacattcaccaaggggacgttcagcaaggttgaacacgtttttgagtgttataactactcagaacagaaaaaagttcgactag

SEQ ID NO: 24993 - DNA, 858 bp, Zea mays
  Peptide Sequence Number=SeqID_66772
atgaaagaaaaggaacaagaaatcaaaaaagtgagagaaaaagaaaatgaagagaaagaatttgaaaaagaaattgagattgaacaagagtgcaagcgagaaagagaaatcgaaagaaaagaagaaaagattgaaaaagaaaaagaaatccaaaaagggagtgaggtcgaaaataaaattgaaaatgagagaggaaatgaaaagagaaaaaaagaagttgagattagaaaagaaacgagagaaaaagagataaacgaaccagaaaaagtgcccgagatatcaaacgattattttcaacttcactaccttttcgatgaaagacattttcatatggtcagtataggtaaggttgaagatgaaaacgtgccccaagagttcaaagccacagagattcgattagactacatttccgaggagagaagatttattatgatcaacaaaggtaaaaatgatccttgcttttccatccctcgaggtaaacaagctttatttaaaaatgaatcatctgttttgcttgatgctgatgatgcgattttggaagaaccaatcgttcaatttccattgcaaggttttactatacattcatctgtttgtgataaaaattggtgttcaataagttgtggtgaggagtttatttgcttgatcgatgaacggattaagttgattatgtccacatgtctcttgaaaatttttggtaagattctccttgatgacaagtttgttgaaaatgtgaaagatcaatggccactgttaagcttaactatgcaagatttaagccggttaagtggtaaaatcataacttgcaaaaagctttgttcaatcgattgtgggtatgaaatttggaaaataccttcttga

SEQ ID NO: 24994 - DNA, 321 bp, Zea mays
  Peptide Sequence Number=SeqID_66773
atgaggatagtgaagaattcaaatttaaaagaagatgatagtgacatccgaccatcaaagccaagccatgtttgcttcaggaaatcaatgataaagaaaggacaagttgaggtgatgaaaatgttggagtatattgataacattgatatgattatgctcggggaggaagacactattcctaagccgcagaacaatgaacttgtggcgtttcaaagcttctttaagacgaaggcaacagggaaagagataatacacaacaacttcgactattacaatttccagtattggaaggatgttcatttctctaccctgggctattga

SEQ ID NO: 24995 - DNA, 441 bp, Zea mays
  Peptide Sequence Number=SeqID_66774
atggatcaaatagttcgtcgccggaggacgatcccgaggccgctagatcaaaggacagcgccgaagccaccagatcagaggagttggtcgttgaaggacgctagagccacccacgccacgcgtggccgccatcgccagagacgaccgcacctcgcgcgaccgtcggagcgacccgcgtccctcgtggccaccgccgccgttgccgacgcctacagcgcctcgcacaatcgccgttgccaccgggcctggggtgcgccgccgccgctcgtccgcttcgggagcaccgtcaccgcttgcctactcgcctcgggagcgtcgccgtctcttgttcctggtggagcgccgccgtcggtcgcccgcctcggggcggcaccgccgccgctcgcacggccgagggaaccgccgtcgcgatcgcacgcccgatgccgccgccgccactaa

SEQ ID NO: 24996 - DNA, 108 bp, Zea mays
  Peptide Sequence Number=SeqID_66775
atgggtttggtttatgccacgacagagggtagtcgttgtggtatctatggtgctaattatcctgaatggattatcacaatgaaggagagctgcgtatcattatattaa

SEQ ID NO: 24997 - DNA, 453 bp, Zea mays
  Peptide Sequence Number=SeqID_66776
atggcgaagcagggcggcatccggcagggagagcgcgctggaagggaagccgggggcgggggagatgactgcgacggccggagcaggggcaggatgagatccgtgggggcccaaggaaacagcaggagccaccagggggcgaatggggtcggcgctggcgcggccctggcggacagagggtgggacggcgtgggtggtcggatggggggaaggaaggccggatcggccggaggcgcaagcggagaaacgtcaagccgaggaggagcagcggcaggccgaggtgagctgttgcatgccggcgcagcctgctggttgcccacaggatccagtgggggcggcgcggtggcggcgaaggcgcgcgtcgatgtgggcggcgcggcggcggcgacgacgacgaaggcgtgcgcagtgccgggcgcgtccgccaggggcgcggtgagcgccgcccggtag

SEQ ID NO: 24998 - DNA, 459 bp, Zea mays
  Peptide Sequence Number=SeqID_66777
atgggcaagagcaagaaaggtggttgttcttcgcatcactccggcgataagcggaagcgtgagccgactcctccctcggaggacttcggcgactcggagtactcggaggaggagttctcctccgagtcagagggctctctggtccatgcctctctcccggcgtcatctgatgaatcagacgactcccaggggatcaccgcagaggtgtggacctacatccgtgccgtcgagcgcgccgggctcgagggctcggatgagtcggagtactcctcggatgaggagaactcctcggactcgtccgaggagggcggcggcgacagtgatggcggtgacaacgacgacgacagaggcgatggtgacggcggcgaaggcgacgacaagggcggcgatggcggcgacaaaggtggcagcggcgccggcggcgatggcagcaacggcagcaacaaggccagtggctag

SEQ ID NO: 24999 - DNA, 234 bp, Zea mays
  Peptide Sequence Number=SeqID_66778
atggggaagaagaccggatgcaggtgcccccagatttcgttggttctgttggtggagctgaccaagatggcccgcatgaaagcgatactaaattgcaggcggcgcgtcctctccgcaataaatgcagaggctacacggttgtatgagccttacgtcaggctcggcccgttggtttatgtcacgggccacaagccacgcggcagcagcgggtctctgcctgagcgagaagcgtag

SEQ ID NO: 25000 - DNA, 472 bp, Zea mays
  Peptide Sequence Number=SeqID_66779
atgggtttagtgtcggacacagatgcatctaacaagaggaggttttatcttggatatgggagtgcattttattgctggcttgaggatgaattttatcttagaactgaaaggcttaagacttggattgctttcctcagtaagctggagaatggatgctctggagtctttgtgatggttgtatcctctagttcacctaagataatttggcgagttgttgggtcaaaaggaaccgtacaagttgagcgtggaaaagtagatggaaagcatggttacttggtttcactatacagtgcagatgggcaatgcaaaagcactttccatccattctgtggagtgcacgaagaattaaaaatttttatacatgacattgtgcaagcaaacctgaagaacagttctgatactatttttgggcttggggaagcaaagcagggaaatggctatgaagctgaaccacgcagctctttcgtggaag

SEQ ID NO: 25001 - DNA, 105 bp, Zea mays
  Peptide Sequence Number=SeqID_66780
atgactacagatctcgttcgtgcatatgtttcgcatcaaatcagtgttcagtttaagtctaaaggaggaatctcgggttttgcaagtagtgctacggttgtgtga

SEQ ID NO: 25002 - DNA, 444 bp, Zea mays
  Peptide Sequence Number=SeqID_66781
atgaatggtgaaatgattgaaagtgccataaggagcggaaagattgatgctggaggaaataacagaaggcaagcctcaaaagaaaaggaaaatgaggtgaacaacgtgaatacatacggcaagttgattgctaatcaacagagttcatcaagacaagaattaggtgtgaagccaggtactgaaaagctccagttcacgccaattccaatggcatacaaagaactgtatcaaagcttatttaatgtgcatgttgtttctactttacatgtgaagcctccacagcccccgtatcccaaatggtccctggataacgacatgaatgacgctgctacagactcagaatctccttttgagcaagacatgtgtttagagggatctcatgactttgaagatgacatagattatttgaattctggccctcattgccaatgccatgaccaataa

SEQ ID NO: 25003 - DNA, 2319 bp, Zea mays
  Peptide Sequence Number=SeqID_66782
atgcagaagccgccgccacaatcagtagactttgccctaaagcagacctcacccaacatcggggccggggcagtcaccggtgataagctttcgtgcacctatgaccttgtggagcaaatgcaatacctgtacgttcgagttgtgaaggctaaggatttacctggaaaagatgtcactggtagctgtgatccttatgtggaggttaaacttgggaactacaagggagtaactaagcatttcgagaagaagagcaatcctgaatggaaccaagtatttggattctcaaaagaaagaattcaagcttctattttggaagtgtttgtgaaggacaaggatgttgttgtagatgatttaatcggcagggttgtgttcgatgtcaatgaaattccgaagagggttcctcccgacagcccattggcgccacagtggtatagattggaagatcgaaagggtaataaagcaaagggagagctcatgctggctgtttggatgggaactcaagcagatgaggcatttccggatgcgtggcattcagatgctgcatcagttggcccagatggtgttacaaacattcgatcaaaagtgtatctttcccccaagctttggtatgtgagggtgaatgtcattgaagctcaagacttggtacctagtgataaaggcaggttccctgaagtatttgtgaaagctgttctcggaaatcaggctttgagaactagaatatctccgagtaagaccatcaatccaatgtggaatgaggacttgatgtttgtagttgctgaacctttcgaggagccattgtttctatcagtggaagatagggtgggatcgaacaaggatgaaaccttggggaagtgtgtgattccattacaggtggttcaaagaaggttagaccataaacctgtaaatagtcggtggcacaatctcgagaaacatgtgattgttgatggagagaaaaaagaaatgaaattcgccagccggattcacttaaggatctgtttagaaggagggtatcatgttttggatgaatctacacactgcagcagtgatcttaggccgactgcaaaacagctatggagaccgaacattggaattcttgaactgggtattctaagtgcccacggcctgatgccaatgaaaacaaaagatggacgaggaaccacagatgcttattgtgtggccaagtatgggcagaaatggatccggacaaggacaatcgttgacaatttcatgccaaggtggaatgagcagtacacttgggaggttttcgatccttgtactgtcatcactataggggtttttgataatggtcatatacacgggggagctggaggggcaaaggatgcaagaattgggaaggtaagggttcggttatcgacactcgaagccgacagggtctatacgcattcatatcctctactggtgctacattcttcaggggttaaaaaaactggtgaagttcaattggctgtgaggttcacctgctcaactttgattaacatgctgcatatgtattcgcatccactgttgcctaagatgcactacatccacccattgtctgtgattcagctcgatagcttgaggcaccaagctatgcagattgtctcggtgagactgagccgggctgagccaccattgaggaaggaagttgtggagtacatgctggatgttgattcacatatgtggagcatgaggagaagtaaagcaaactttttccgaattatgggagttctaagtgggttgattgcagttggaaaatggtttgatcaactctgcaattggagaaaccctattacaaccattttgattcatatccttttcattatattggttctttatcctgagctaatacttcccacggtttttctctaccttttcctaatcggaatctggaactaccgttggcggccactgcaccctcctcacatggatacgcgtctgtctcatgccgatgcagcccatccagatgaactagatgaagagtttgataccttccccacttcccgcccatctgatatcgtcaggatgagatatgatcgtctcagaagtataggagggagagttcagactgtgattggtgatctggcaacacaaggggaaaggttacagtctctactaagctggagggacccgagagcaaccaccttattcgtgacattctgtttgatcgccgccatagttctttatgttacaccattccaagttgtggctcttctcataggactgtatgccttaaggcatcctaggttccgccacaaacttccgtcagtacctcttaacttctttagacggttgcctgcgagatcggacagcatgttatga

SEQ ID NO: 25004 - DNA, 450 bp, Zea mays
  Peptide Sequence Number=SeqID_66783
atggatgatgacatttgtatttgcaaccagatagtggggatgtgcctttcaccacccataagccttgtcgatgagggtgggcttgtctcggttatctttgtcgccgtgctcctggtacttgtcgcgtaccctgtcgccgtcgaaatcgtgggtggagacctgcaaggttgcgaacgccaacctcgacgaggcagactcctctcatggcaacggcaacagagacaaatgaggaggagcacaatagacattccaaatttccaatacgaaacgcgaattccccgcaatccaaagagaattgggaaacaaagtcctctggagtacgtctggagatgtagaaccgcagttgggttagtgctcgtgggctcgcacgcgacccgcgtgtccgcacccgcccccacgcgcagcgactccggggagcttacgtcccacgaagttggggcagagcgttga

SEQ ID NO: 25005 - DNA, 249 bp, Zea mays
  Peptide Sequence Number=SeqID_66784
atggctcgcggcggcgctctctgcaccctggcgctccccgctggtagttctctctccgattggctcgtggttccttcgatgatggtcaagggagcgggcatggggcgtggtttttatatcccactggagcgaggctggcatccccatccagcaggacaagtggacctcagagggaatcccaacaaaacggagcgcatgcgggggagaagtccacgcggctggttcggcgatgggtggttgcaggagtag

SEQ ID NO: 25006 - DNA, 165 bp, Zea mays
  Peptide Sequence Number=SeqID_66785
atggcggaggtccggcatgagaatcctggaaggcggaggcagaggcgcggtgcgaaaatcctgggaggcggaggcacgactggacggggagggggcgggggcattggtgtagccgtggacgcccacattaggattttaggtgttacagtactgaaagtcgcctag

SEQ ID NO: 25007 - DNA, 2160 bp, Zea mays
  Peptide Sequence Number=SeqID_66786
atggcccaggcggcgaggaaagctgcttgcgccgtactgctctcgccgcagactttcatatttcattcctccgctcggctcctcccggaggccggggcctgcgcggctaaaaaggccatacatcgacagagcgtgcgcggttgtgttccgtcctcctcggtaatagcccgtggcttacacaacgcgcacagggtgttcgacggaacgcccacgcggagcttgccggcatggacatcgatcatctccggctgcgcgcgtgaaggcaggcacgcggacggcatgcgcgcgttcgcggagatgctggacgaatgcggcgcgaccgcgccgaacgccttcgtgctcgcaggcgtcctccggtgctgcgcggggctcggcgacgtcgagtctggcaggcgcatccacgggtggatcctgcggagcggcgtgtgtccggacgtggtgctctgcaatgcagtcctcgacatgtacgccaagtgcggcgaccatgggcgcgctaggagggcgttcggggcgatggcccagaaggacgccacatcctggaacattgtgatcagggcgtgtcttcaggatggcgaccttgtgggggcgacgcagctgttcgatgaatcgtctttgagggatgtttcgagctggaacacgatcgtcagcgggcttatgcggcatgggcacaccactgaggcgttgggtcgcctgcagcaaatggtgcgagctggagttacatttagtaactacacttactccatggtgtttgctttggctggcttgctttcatcgcgggacctaggccggcagctccatggtcgtgtggtggtggctgtattggaggaggatgcgtttgtcggctgctctctcatggacatgtactgcaagtgtggggaaatggagtctgctctgtcaatctttgatcgctggtcagacttcacagaggacagacaatttgcgtggagcacgatggtcgctgggtatgtccagaatggcagggaggaggaagctcttgagttcttccgcaggatgctgcgtgaaggagttcctgctggccagttcatcctcactagcgtagcttcagcctgtgcaaatgcagggatggttgagcaaggcaggcaagtgcatggatttgttgagaagttgggtcacagatttgatgcaccattggcgtctgccattgttgacatgtattcaaagtctggcagccttgaagatgcttgcaggatattcagaagtgctcagaccaagaatgttgctctctggactacaatgctgtgctcctatgcatctcacgggcaaggaagaatggcactagagatcttcagcagaatgaaggccgaaaagatcatgccaaatgagataacccttgtcgctgttctatctgcttgtagccattctggtttggtcagcgacggataccactacttcaaccttatgcaggaagagtatggaattgttccaaacaccgagcactacaattgcatggttgatctttatggacgagctgggctactcgacaaagcaaaaaatttcattgaggaaaacaagatcagccatgaagctgttgtttggaagactttgctgtcagcttgtcgacttcacaagcacatcgagtatgcacaattggcttctgaaaagttggttcaactagaacaatatgatgctggatcatatgttctgatgtcaaacatgtatgccaccaacaacaaatggcttgacactttcaagctcagaagttcaatgaaggaaaggagagtccggaagcagccaggtcaatcatggatccatctgaaaaacgttgtgcatagatttgttgcactggacacatctcacccaagatcggctgaaatttatgcttacttggagaagctgatggagaggctgaaggagatggggtacacaagtagaactgatcttgttgtacacgatatcgaggaggaacagagagaaacatctctgaagttccacagcgagaaacttgctattgcattcgggatcatcagcacgcctgttgggacggcacttcggatcttcaagaatctgcgtgtttgtgaggactgccacgaggcaatcaagtttataacccgagccacagatcgggagattgttgttcgagatttgtatcggttccatcatttcaaggatggccaatgttcctgtgaggatttctggtga

SEQ ID NO: 25008 - DNA, 336 bp, Zea mays
  Peptide Sequence Number=SeqID_66787
atggcggccgagctagcagggatgcagccgcgtagcgcggcgcgccctgcaacctcgggtgtcagcacctcggcgacaggctattgcctgctggccgcctgggggctgggctgctgggggtggagagccgggaacgcgagaattgagaaaggtggatcttcgcctctttatatgaagagtggttggcaacgaaaccggtccaaagatcacctaccggtcagaagggtctccacccacgatttcgacggcgacagggtacgcgacaagtaccaggagcacggcgacaaagataaccgagacaagcccaccctcatcgacaaggcttatgggtggtga

SEQ ID NO: 25009 - DNA, 1185 bp, Zea mays
  Peptide Sequence Number=SeqID_66788
atgagtaaagcttatgaccgtgttgaatgggacttcttagagaaaatgatgatccgtatgaggttttctgcagcttgggttactttggttatgcaaggagttgagatccttaaggatattctccactatttcgaggcgatctctagggaaaagataaatccttccaaatccattatctattttagccctaatactccgaaagatcagagggagcagttgagtggtatcttgggggatggtaggatagctaggtatggctttgatagatggggctttgagggtcttgatggtaacttgttgaggacttcttttagtggcaaccaggatggtcggttcttcacaagttcaaccgggttttgccataggtgtgggactggggatgagaatattatccatgctcttcgggactgtcctaaagactgtgcggttctttcttttggtgggttggatggtcgtttacttgatcccgcttttgagaggtgtattgattggcttgaggatgctacttgcttgttggaccttaaggcatttgagaacttcattacggtcctttgcaatatttgtaatagcctcaacaatgctttgtttcgcgggaaagaggaggatgcttggttgatttgggagcatgcacgggctttgggtaatgattttaggatttttaacttgtcgcatgttgcgatgaaccctagacctcgtagatctcataagtgggttaagctcttgatcgatgtcattagaataaatgttgattcaacgattcatgacacagtggttggtatcaggattattatgtgtgacagtgatggttttgtcttaggtggtcatgtggtttacctggattataaattggatattcagtgggctgaggcggaggccttgagagaaggtattgtttgggcgcgtaacaataatgttgcaagggccatcttcgagactgactatgcagtgttggttaatcggtttaaattttgtatagaagatatctcgatttatggttttcgattgaaaaatattttcgatttgttggattcttccagcaagtctatggttgagtgggtcgcttgctccagtaatagggtggtcgatggcctttgtaaactttctattgatgaatgttgtaccttttcttttaacatggagtattcgagcgatatccatggacttgtactcgctgatgcttgttaa

SEQ ID NO: 25010 - DNA, 402 bp, Zea mays
  Peptide Sequence Number=SeqID_66789
atgaagggatatgccccagagttttgtaaattgagaacctatcaagtgtatgaggaaactgtagaagacgtaattatctttaaaagcacaccttataaggttaccacaaaaggtatgggtaattggtggatgtttcaacctcctgaagttgttcctgctggttcgagaaggatggtcagatttggaacctcgagctacagtaaaggtgagcttcagggcagcatttatgacgtatactgtgatgcctatgtggtgtattctgtaatgcctttgaggcaatatttggataatcacctttgtggtgaaatcaggaatagtatctgtaagtaccccatcttgggggaggtattcaacatccaactaagtgagaattcgccgaagtttcacaaggttatttcgtga

SEQ ID NO: 25011 - DNA, 180 bp, Zea mays
  Peptide Sequence Number=SeqID_66790
atgtgttacagatactccacagctcgtgtgagcagcatcatgaagctaggttttgacccacagctcatgctttggccaagctattggatggattttattatgcttacttataagttatgcattgaaatgcatatgaaacaggtgtggaatggtaatgaaatattaagctttagaaagtaa

SEQ ID NO: 25012 - DNA, 672 bp, Zea mays
  Peptide Sequence Number=SeqID_66791
atgtctcgcaaaagaacgagatcttcaaagactactcttgaaaacccaattttgatcaaagaagaagtgaaagagagatttgattcaatctttaagcatcaacctatgatgctggaaaaaagacccgttaaaacagaagcaagtctgaaggggcgatatgttcaaggatgcattacaaattataatcttgaaagattagtagaaagggtgcatgaactaaatcaaggcgagcaagaagagccaactaagccggatacagaggagtcaacagatggaactgaaactgaagctaattcaatcacagacactgaagaggaagaatctgataaggaaccgaacattcttgaaccaaaggttgagccagaagaagaactagtcaagctaattgttgaacctgaatatacaactcccatgccgacttctgcaagtacttcaaggaaatcggagttgtcaattttgattgatatgtacaagttcatgcagaatcaagaacaaaattaccagaaatatgcaaaaattagagatgactcaattcgaaatacctttaagaatatctctaatacttttgttcctgagttctcagattctatctttgagacatggacgaaagatactgacgatgcaagcagaggtggagctacacaagacaaggggaataagtcagaaaaataa

SEQ ID NO: 25013 - DNA, 2160 bp, Zea mays
  Peptide Sequence Number=SeqID_66792
atgaagaaaagaaacatggagaaactcgagcttgttgatggtaaggtgaattggaagggggaaacagctgtgaagcacaagcatggaggactgagagctgctttgttcgttctactggcgtttgcatttgagaacttggcaaatcttcatttggccgtcaacctgacgacttacttcaatgggattttgcacttcgaagtatctgatgcagctaatgctctaaccaacttcatggggactggttatatcctttccattatctttgctgtcttcgcagacacttatattggcagatttaaaagtattctcatttctggatccgttgagttcctgggactagcattgctcacagcgcaagctcactattcgagcctcaggccaccgccttgtaacgtcttcgatccgacttctcgttgcgagaaacttgaaagtagtgatactgtgttcctctacgttgctctatacttggttgctgcgggaatggcggggattaaagcctcgataccatcccatggagctgatcaattcgatgagaaagaccctcgagaagctaagacaatgtccagtttcttcaacggtttattgttcgccttgtgcattggtggtgcagttagtttaacgctctatgtctggcttgatgatcataaaggatgggatgttggattcggagtctctgccatcgccatgttcttggctctcatcgttgctgtattgggatggccattgtataggatacatgtggttcaaggaagtagtgtccttctggaactcattcaggtttttgctgcagcaatccgcaatagaaatcttaaactccctgagaaccctctggagctttatgagattgacaaagacaaggaagctgctttggaagatgatttcctgcctcacagagacgtttacaggttcctggataaagcagccattaaaacagcatctgagaaaccaaatccatggaagctctgcagggtaacccaagtagaaaacgcaaagatcttacttggaatgaccccagttttcgcttgtaccataatcatgaccctttgcttagctcaactccaaaccttttcagtccaacaaggccttacgatggatacaacaatcgttggctctttccacatcccacctgcttctctaccaatcattcctgttgttttcttgatcttcataatccccttctatgaccaaattgctgttccccttctccgtaaggtcactggccatgtcaccgggatctctcaccttcaacgtataggagttggcctcatcctctcctccatatccatggctaccgcttcaatcatggaagtgaagcgcaaatccgtggctcgagaccacaatatgctggatgctttaccagtgctccaaccattgcccatcagcgtcttctggctctcattccagtacttcatttttggaattgcagacattgacaagtccccggctccaacaccggctaaaggtgcggaggcagcgccaccagggcaacccatgacgatgggtcagcatgtggtggacaagggagcatcaatgctgcaggcattgaccccagtgaagcaaatcagccaacatgtctgcacctttgccttgtatagccatgatatgtgccgtcaaatcgagactcaccactatgttagcaggctgaaccaggactttctccagtgtcctgtttatgattccgatgattccaacgccagcctcattggaattgaatatataatatccgatagattgtttgaagctctgcctcaagaagagcaaaaactttggcattcccatgcttatgagataaaatcagggctctgggttaatcccagaataccagaaatgatagggaaacctgaattggaaaatctggcaaaaacctatggcaagttttggtgcacatggcaagttgacagaggtgacagacttccacttggagcaccagcattgatgatgtcaccacagggggtgaacctggggaaaatcgacccagagctggtgaagaagagggatgacaattacagcatctcaaccgaagcaattatggagtcaagggtggaaattgaagaacctgaatggatcaatccacaggctgattactggaaacagcatgccaagggtttcgccattgacatcgagaaaactgaaatgaagttgagagctcccttcccttag

SEQ ID NO: 25014 - DNA, 1326 bp, Zea mays
  Peptide Sequence Number=SeqID_66793
atggcgccggagagagacagaggcgaagcggatgggaaagagaacgaggaaggagaggagatagatgaaggagttaggttgatgtacttggccaacgaaggtgatttggacggcattcgcgagctcttggactcggggatcaatgttaatttccgcgacatcgatgatcggacggctctccatattgcagcttgtcaaggacagaccgatgtcgtttccttgctccttcagcgcggcgctgacgtcgaatctacagatcgatggggaagcactcctttggcggatgctgtatattataagaatcatgatgtgattaaacttctggagaaacatggagctaagccttttatggctccaatgcatgtaaatcacgcgcgtgaagttccagaatatgagattgatccaaaagaacttgattttactaacagcgtcaacattacaaagggaaccttctgtattgcattatggcgtggaacacaagttgctgtgaaaagggttggggatgaagtttttaccgatgaggataaagtgagggcatttcgagatgagcttgcattatttcagaaaattcgacatccaaatgtagttcaatttcttggtgcagtaactcaaagtagtcctatgatgattgtgacagaatatttacccaagggagatttacgagccttcttgaagagaaaaggagccttgaaaccaatgacagctctgagatttgcacttgatattgcaaggggaatgaattatttacatgagaacaaaccggcaccaataattcaccgtgatcttgagccttcaaacattttgagggatgattctggacatctgaaagttgcagattttggagttagcaagctgctaaccgttaaagaagataaacctctaacttgtctagacacatcttgccgatatgttgctccagaggtgttcaagaatgatgattatgataccaaagtagacgtgttttcatttgctctgatcttacaggagatgattgaaggctacccaccattttctgctaagcaagacaatgaagttcccaaggtatatgcagcaagggagcgtccacctttcaaagctccagctaagcattatgcccatgggctcaaagagttaattgaggagtgttggaatgagaaacctgccaagcgacctacattcagacggattataaccagacttgaatctattcacaacagtttcagtcatagaaagcgttggaaggttagaccactaaaatgctttcagaatctggaggcaatgctgaagaaagatcattctagtccaagcagccgtagcaattcatctcgatctactaacagcatttga

SEQ ID NO: 25015 - DNA, 1410 bp, Zea mays
  Peptide Sequence Number=SeqID_66794
atgacgaagaacggacagttggaccaaaaggcccaagcaaaagcgacccatcccagtataaaaacggggcacgcgctgccaccaccaaccgcagggggcacagcacgacacgagcactctgcactccactaccgcggtaccgcctgcctgcaggctgcagcccagccgtcagcagtccgcatcagatcctgcgctgccctgccctgccctgccccgaccatgccgccgccgccaccgtcggccccggcctcgcaccacctgcgcctgtggtggaggcgccggggccgggccggcgcggtcggggccaccttcgccgtcgcgctgctcgcgaccgctttgctcctcgcgctctccagctacgcctccatagtattccctgcgtccagtggccgccgcggccccgccctcgtcggactcaccctcgtccgccgcgccagcgagaagggcgcgctgtgcttggatgggagcgcgcccgggtaccatctgcagggagggtctgggagtggatcgcggagctggctaatccacttggagggtggaggctggtgtcgtaatctcaaatcatgtgcctcacgtcagagatcaatgttgggatcatcccggtacatggaaggccaggttgagtttacagggatcttgagcgatgacaaatctcagaatcccgatttttacaattggaataaagtgaagataagatattgcgacggggcatcattctctggggatgtaaaagatgaattgcagaatggtacacgattcttcttcagaggccagcgtatctgggaagcagttatgaacgaacttgtagttaaggggctcaggaatgctaaacaggggttcgggggttttctcgacctgtgtgagaagggtctaagggaaaggttttcgcattgtaactcaaacatggacgcaggccagtgtttctttccacgtgaagttgtgaagcacattgtcaacccagttttcgttcttaatccagcatatgatgcctggcaggtacaacatgcgttggctccagaagcatctgaccctcaacattcatggctggactgcagattggatattagcaagtgcagccctaaacaacttggaattctccaaggtttcaggaaagaactgcatgacgctataagtgaagctaagcagaaaaggggctggggattttatatcaactcgtgctttgttcattgtcagtcgctgaactcgttgacttggcactctccaacttcccccagagtcaacaataagagcattgcagaagcagttggagactggttctttgacagaagagaggtgaaggagatagattgcgaatacccctgcaacccgacgtgccacaacttggtcttcgcaaggccctttcaagatatgaaattttatctctcttcttccgctatgattttgttgtaa

SEQ ID NO: 25016 - DNA, 1599 bp, Zea mays
  Peptide Sequence Number=SeqID_66795
atgggcaacagcgtggcgaggctggccacgccctgcttcgcgccgcccgacgacgcgcaccacgacacggcaggggcggcggatgacgatggcactaccggcgtctgccacgttcttagcttcgatggccgcatccacggcgtgctgctgccgtcgaaccagtccacggcgggcggctccgtgctcctgaccgaccgggcgtccttctccggctcctcgtccttcgacagctccaactccttctcgttccggacgctccagccgcaccagtactcgggcccgctggacggcggcagcagcagcagcagcgcgtcgacgtccgccacgaactcgggcgtgtcgtcggtgccgcgtcgcaccgacgaccagatcctcgcggacctctacgccacgcggcaccggcggcagcagcaggcgtccagcccgctgccgctcctcggcggcatccgcagggccgtcgcgtcgctgctgcgcgcgggcccctgcgtgcccccgtcccccaagcaggagcacgccgcggcgaaggtgcagtgggcacgcgggaaggccggagaggacagggtgcacgtggtggtgtcggaggagcacggctggatgttcgtcggcatctacgacggcttcaacgggcccgacgccacccgactacctcgtcgcgcacctcctgcggaggcggggcgcaacggcggcggccgtgccctcgcgggggagcaggggcgccaccacgacgtgctggacgcgctggcgcgcgccctgaggagcacggaggccgggtacttcgcggaggcggaggcgcgcgcggccgagtgcccggagctggccatggtcgggtcgtgcgtgctggtggcgttggtcaagggcgccgacgtgtacgtgatgaacgtcggcgacagccgcgccgtgctggcgcagcgggccgagcccgagcccgacctgtcgcgggcgctcgtcgcgccgcgccagggcggcggcggggtggacctcgcgggcgtcaaggacgagatcaggcggcagttcaacgcgtgcgagacgggggacctcgccgcgctgcagctcaccatggaccacagcaccagcgtctacaaggaggcgagaaggatcaggagcgagcacctggacgaccctgcctgcatcgtgaacggaagggtgaagggctcgctgaaggtgacgagagcattcggagccggctacctcaaagagccgaggtggaacgaggctctgctggaggtattccgggtgaggtacgtgggggcgtcgccgtacatcagctgccggccgtacctccggcaccaccgcgtgggcccgcgggacaagttcgtggtcctcgcctccgacggcctgtacgactacatgagcaacgaggaggtggtggcgcgggtggaggccttcaccgccagctaccccgacgacgaggaccccgccaggttcctcagccacgagatcctcctccgcgccgccaaccaagccggaatggggttccatgagctgctccaggttcagcaaggcgaccggaggcggtaccatgacgacgtctccatcatcatcatcccactgggggcttgttcggttataccccaatccatatggattgaagggggttga

SEQ ID NO: 25017 - DNA, 444 bp, Zea mays
  Peptide Sequence Number=SeqID_66796
atgactgaaactccacttgaaaccaactgcaagtgcagggacaacatacactgcagtgcaagagctaatccattttcttttagtttgtgctgtgttcaagttgctgcaattggattaaggcaacctcaagtcaatcgatccacgtgctggagtacttctaatcagatgaaaacacagtttgttacttctattcctaaattagagggaattgtgtctctttaccgtgattcacgctccaagctgatcggataccttgacggtaccctcgtcgcaccggcgtcacaaatcgtggcatccacacagactggcgctgagttggttccgaatcctgtctataagcaatggtacaataccgatcaacatctcctgagcgggctcctctcgtcgatgactgaagagatgcttcgcggcgtcctgtatgccaagacgtcaaaggaagtctga

SEQ ID NO: 25018 - DNA, 129 bp, Zea mays
  Peptide Sequence Number=SeqID_66797
atggcaagacgatccagatcgctagtgatgtggtcggtggcgctggtgtcgatgtcggtgtaccagtcggtatcaactttggaggatgcagtggcgacatgtgcagaaggagaggactattataagtga

SEQ ID NO: 25019 - DNA, 345 bp, Zea mays
  Peptide Sequence Number=SeqID_66798
atggaggacttgaacacaatgaccccaacaattgtgatcagaaatattgcggcatttgaaatgtcgcaaaagatgggtcaacaggagccaacttctttaaggccatatgcttttgcatgtgatgaaattaagaagaggaagaagaggaaagtgatgatgatgaagatgatcaaccctcaacatcatccttcatggatgaagaaacaatctgacgcgtcaaaaaggcgcccgggtagggggaagggaggaggggtggcgagcgccgatgagctcgccatgacggtggtgatggcgcatactggcgacgggacggctcgggcaggcgggatgggggtggggggttga

SEQ ID NO: 25020 - DNA, 597 bp, Zea mays
  Peptide Sequence Number=SeqID_66799
atgtgcactgatgatattctgatgtacccagacaactcactggtgagagacataagccgaatgcagcagcgcaactacgggagggaaggattctcgcatataactgtcacaggtgctcttgctcacgggacgaaggagataggtactgcccagggccgtctcctaaaatatggggacccggagcgaactcaaccaggttctgaggctgtcttcggtgtggatcgtgtggaagtgtggctacaaacatttggtccaggtcaaaggaccccaatccacaggcattcttgtgaagaggttttcattgtcctcaaggggaaaggcacgctcttactcgggtcgagctcgctgaagtacccaggacagccgcaggaagttcctgtctttcagaataccacattttcgatccctgtaaatgatccacatcaggtctggaattctaatgagcacgaagatttgcaagttcttgtgatcatatcgcgcccaccggtcaagatatttatatacgatgattggagtatgcctcatacagctgcaaagctgaaattcccctacttctgggatgaggactgcttgccagcaccaaaagatgaactctag

SEQ ID NO: 25021 - DNA, 693 bp, Zea mays
  Peptide Sequence Number=SeqID_66800
atgccgtcgatggaaacttctcacccgcactctccatggaaggttagtggattgaaggggggtgggtgtcgccgatggtggggcaaggccggtcggtggcaagggagatatagggcgaggttagaggggggaggattccccttctctggagagcgagaacgcggatcgagaggactccccttccatggagggctggagcgtctgattctccttccatggacagcacagacgtggatcgagagggattgcgacgaaacgagacagattcggatgggattgcggacgcggagtctgatcgagaggactccccttccatggaggctggggcgtgatccgagcggagggcggaggactcgccatggagtgcgcggacgcggatgggattttggggagtggatgggattctggagagcgcgaacacggatgggattctggggcagcgatccgggcgagagagagcagggattgcggcgagagaggaaagtggggcgaggacagccggatttgcacgccgaggaggagatctgtgctgcgacacgggaggggatcgcgccgatgggtgagggagtggacagcgacacgggagtggatcgcgccgatggagagcagatgggtgggggagtggatcgtgccgatctaaaccgcaccgaggagatctgcgccacgccgaggagaactagatcgcggtggata

SEQ ID NO: 25022 - DNA, 309 bp, Zea mays
  Peptide Sequence Number=SeqID_66801
atggagagtgcgggtgagaagtttccatcgacggcatcatcggcgcctggggcgggcggcggggccgcggccgaggaggaggcccccgttgagaagacggagttcgacgtagtaattgaagaggtgcccagcagcgcgcgtatcgccactatcaaggtggtgcgcgtgctcaccagcctcgcgctcaaggaggccaaggaccttatcgagggccttcccaagaagcttaaggaggccgtcagcaaggacgaggccgaggatgccaagaagcagctcgaggaggtcggcgccaaggtgtctatcgtgtga

SEQ ID NO: 25023 - DNA, 417 bp, Zea mays
  Peptide Sequence Number=SeqID_66802
atgtccttctacattgtggaagtcgacaagcgcactttcctatttgggaaggagcttggccccaatgtgtatcattcgctcgttggcatgcttgggatccaaggggccctgggtcgggcacgctccactcatttctgcctaacctcgggcgccgataaggctgaggtcaagaagaccctaaatcttgcggtggatccttcattcgcatggagtctcagcctcggggagcttgtcaaggagcgttgcgacaaccacgacattctggctcacctaggcgagttgcgatggcctactcccttcacggattatgtgacagcgaacgttgagccaaggcggagtggacactgtgggggacagatatcccccgggtccactggaaggctaaaagacctcgcgaaaggcctgcgggcccagtaa

SEQ ID NO: 25024 - DNA, 1101 bp, Zea mays
  Peptide Sequence Number=SeqID_66803
atgcagacccccgcgcgcctctccgctccatcctcgccgctcgtctcctccgcgccaccgatacctgtacggccacaacgcgtcgctttcccctccctccgccgccgtgatctcctcctcctgccggcggcgctgaccctcccgacggcgcccgccccgttgcctgcctcggcgcgagggctgttccgcatgcccccgccgcggctggtgaaccgttactttctggtgcgcgcgggcgagtccgtgtacgaggggcagggcctcctccgcaccaacccggtcgccaagacctccgtcgacagcggcctctcccccgtggggctccgccagacggcgcgcgccgcgctcgagctccagcgcctcggcgcctgcgaggacgactgctggatatggccgtccatcactcagagagcttaccaggcggccgagatcattgccgcggccaacggcgtcaaccgcaggcgccagaaggctaggggtatacctttctctcagaaaaagttaggatccatgaggattctgaattatattgcctttgattgcagtcgcatcgtgccggagtacagcttcttggatgcacgcggattgggtgcatttgagtggaagagcttagacaccttacccgaggtgtacgcgtcagataatatttctccagacttgaagcctcctcctatcagggatggtactccaaatgagagcgttgcagatgtatttgtgcgggtgacacagctcatgtcaatactagagacccagtactcaggggaaactgtcgtcattgtttcgccggattctgacaacttgtcaattcttcaagctggattgatcgggcttgaccttcggaggcatagcagcttgttttttcagcctgggtgcggtctgtttctgaggtttttggttacggattttgggggagtttgcttggttttagttcatggatcaacttctgtcgagctcgggagattggatgaaattgacgccaagtggaatttaacgcagcaatgtcagaagggtggtggaggattcggtctgaatcagaggggtaaagtttctctgtcaaggaacttcatgaaattgaagggcgaccttgcagtgaacaagtga

SEQ ID NO: 25025 - DNA, 546 bp, Zea mays
  Peptide Sequence Number=SeqID_66804
atgggagaaatttctcctgcaatggagtcgacgagaacggcgccttttcctctcgtcgacagctacttggtaagcactttcatggtggaaggagtgtggtaccatctaggcgaccagtgctgggaagctgcggctgttgaaacgaacaagtattggattgagaactcccataagaggtatataccttatgtagaagatacagttcttggtactgtcatactgtggttggaaccaaacctaggggtgaactttttggtagacataaagggtcctaatttgcccttcctaccggtgcttgcatttgaaggtggtacaaggagaaacataccaaagtttgaggttgttaagtacgccaacatgtccagttctggaggcccttgggaaaaaaaactgtcgtttgagattgctgttggaatcaatggtcgagtctgggtgaatgctcctgcggcaagtactgtcattcttgtatcaaatgcaattatgaggtcagaatctttgagtggcataaaacaaagagctatggtagaaaatctcttggagagatag

SEQ ID NO: 25026 - DNA, 543 bp, Zea mays
  Peptide Sequence Number=SeqID_66805
atgggtagtaggagatatgacattgatacgaggagatgtgggatccactcaagaccaaccaaatcaatgtatctggatgctcaacaaatcgtcagctgccaaactagagtgggagaccacgatgttggttcctgtgctgtgaagcatcacttcccgtctccaatcgtatcttggatagaagatctttccagctttggcaatgcttcttttaatcctgtctctgaatatgtggatgagcaagccagagcttcagtgggacagtcttcagcatcaagtaatttgcatgacatgcaaatatcagtgagattgacagccgaattcatggagcttgcaaaggagaatacaagcaataatctagagacttgtggaattcttggtgcttcatttagggatggaacttattttgtcacgatgttgattataccaaagcaagaaggaactgctcactcattgagagccgagcctttttttcattttgtcttgctgcaattctttttttttgtgaatgaagcaggagagctgcgtgtcatttcattaagatag

SEQ ID NO: 25027 - DNA, 447 bp, Zea mays
  Peptide Sequence Number=SeqID_66806
atgctgcgcgcgggagctaggcagctccttgccccggggctccggcggctcggtctgggcaccggcgccgccggtcaggtgggcccggccgccgcggcggcggggatgagggcgtaccacgagcgggtggtggaccactacaacaacccgcggaacgtcggttccttcgacaaggaggaccccaacgtcggtactgggctggtcggcgcgccggcctgcggcgacgtcatgaagttgcagatccgcgtcgacgaggactccggtaaaatcgtcgacgcctgcttcaagacctttggctgcggctccgccatagcgtcctcgtccgtcgggatgtggcaagcagcgttgtcagcaacgcttgcaagctacagcagtggtgtgcacgcggcgggttgcagcgcgatcaagtatcatgctgacaatgctcgcgagctgtggcagtggtga

SEQ ID NO: 25028 - DNA, 516 bp, Zea mays
  Peptide Sequence Number=SeqID_66807
atgaattgggaggcgaaaaagaaaaggaaagaaaaaggacctgaattcaataatggagagcaacggaaaaagaaggggaagtatttggaaaaagaaattgaggttgaaccaaagactccaagcgagaaaagagaaatcggaaaggaaaagaagaaaagatttgaaaaagaaaaaagaaaatccaaaaaagagaaggaggtgcccgagatatcaaacgataattttcaacttcactaccttttcgatgaaagacattttcatatggtcagtataggtaaggttgaagatgaaaacgtgccccaagagttcaaagccacagagattcgattagactacatttccgaggagagaagatttatgatgatcgacaaaggtaaaaatgatccttgcttttccatccctcgaggtaaacaagctttatttaaaaatgaatcatttgttttgcttgatgctgatgatgcgattttggaagaaccaatcattcaatttccattgcaaggattgctaaatgcatga

SEQ ID NO: 25029 - DNA, 249 bp, Zea mays
  Peptide Sequence Number=SeqID_66808
atggtggacaggcttgccttgccgactatcaagcatcccagcccctacaaattgcaatggctcaacgaaggggtcgaactaaaggtcatattttacttggaaggccatggcagtatgatcgacgagtcaaacatgatggatttgctaaccaatactcatttcagcataagggattgctccaataagcaggtcgatttggaatcacggctcctagcacaagatctatttgatgctcaattccgtgaatag

SEQ ID NO: 25030 - DNA, 567 bp, Zea mays
  Peptide Sequence Number=SeqID_66809
atggtttccaaggaatcaattgacaagtttaaactacaatattttcctgatgagaagcagttcaagttgatcaagaaaggtaagatcatagacgaccctagtccaccagcacttaaagatgatatggctaactgccattctttgtttaatgttgatgcaccacttttaaaatatggcaagacgagtttctctaatgaaaattatcgcattcacaagtgtattggtgaaaatactttgtctttgaccccggtgcacatcattcgatatctttgtctaagggaatcgaaccttggaaagtttattttcaaaaccatagttatcgaatgccttgtgatttatgtttgtttccatcaaagaaaaaggatcttgggagcaactgtccaattcatcaacaaaggggttcgtgacaaacaaaaatttttcgcgagcaagtggcccgatttgaggacaaatcgctttaaagagggagggatgatacggccatgcctcgagtacactcttggaccaactctcaaagcgttgcttgcaatcctttgcaagctgaattgttcgattctagctagttga

SEQ ID NO: 25031 - DNA, 597 bp, Zea mays
  Peptide Sequence Number=SeqID_66810
atgaagaaaagaaaattgaaaaagaaattgagattgagaaaaaaattgaaaaagaaaaagatgttgaagaagaaacgagagaaaatgaagatagttccgacaaatctctgtgacgaatatcaacttcaatatcttcctaacgagcgacgtttttgcatgatcgaaaaaggtaaggatgaagttgaaatcaaaccacacgagcttgaagactctgtttataatttaaacttgttctttgatcattttatgtggctgtacatgaaattcatttttcattttgaaagggtttctcaaggattgtgtaatgagcttcgacttcaataccttctcaaggaggaaaggttcactttgattgaaaaaggtaaaattgattctcaattttccactcctaaaggtgaatcagatttaaatttcttgttccattactcgcattccatttacttgaacaatgacttgtggaagcaaattgaaaagttcgaatgcttaaaaacatatttgtctttgtctcgaccatttgatgagttatggatatggaatgagttttgtccatatgattgtacatccacatgtgggaacacaattaatgaggattcatga

SEQ ID NO: 25032 - DNA, 726 bp, Zea mays
  Peptide Sequence Number=SeqID_66811
atggaatgcaatggacaaacttcaaaagtcatactcatcctacagctgataatggatgaatgtgataggatggtagagctaataaaatcaagagttagagattctactcctgaaacccatgagtatggaaagcaagaagaaatcccaagtaggaatgcaggcattgcacatgacttcacaggaacatgccgctccttgagccgtgataggaatttcactgaatcggtcccattctctagtatgagaatgagacctggtcattcttctccaggctttccactccaagcatcacctcagctatgcactgcagcagttagggaagcaaaaaaatggttggaagagaaaaggcagggactgggcgtaaaacctgaagacaatggatcatgcacattaaatacagatatatttagttctcgtgatgactctgacaagggttctccagttgatttggcgaaatcatacatgcggtcattacctccttggcaatccccattcttaggccatcaaaagtttgacacatcaccctccaaatactctatctcgtcaacaaaggtaactacaaaggaggactacctttccagcttttggacaaaattggaggaatcacgaatagctcgcattggatcatctggagattctgctgttgcttctaaattatggaattatggttcccattccagattatttgagaatgacactttccatattctcattgggcaccgatga

SEQ ID NO: 25033 - DNA, 671 bp, Zea mays
  Peptide Sequence Number=SeqID_66812
cggagcagagtggccatcgccatgccgaagctgcagaggttcaggggagtgaggcagaggcactggggctcctgggtctccgagatccgccacccactcctgaacttttgcgcgagctagctatagcagcagcagtaggctatactccctggtggtgccagcagtttgaagccggcctgaacgcgcttttgtgctatttgctgcgttgtctgtgggcgggcgacggtgcaggaagacgaggatctggctgggcacgtacgagacggcggaggacgcggcgcggggcgtacgacgaggcggcgcggctgatgagcgggccctcggcgcgcaccaacttccccctgagcctgagcggcggcggcggcaccctctccccgacgctgcgcgcgaagctggagaaatgctgcacggcgctggcgcaagagccgcagcacggcgcggacgtgtcgcgggcgggtgggggtcgggacgacgacagtagtagccgcggcgccccacgcccggacgccggcgccgtgaaagtcgaccccgacgccgacggcgaggatcagtacatcgaggagatgatcagggagctcacctactacggccccgtggagatacagcaccacccgtccgcgtcctccggcgccgccgccgccgccgcctgctcgagctcagcgattagctga

SEQ ID NO: 25034 - DNA, 285 bp, Zea mays
  Peptide Sequence Number=SeqID_66813
atggatgtgctgcagtctttgtgcggtggctgtgccgcaccaccctcgccctccatctccctcgacgggcagaagcatggacgggctcaagaggagcgtgatcctggtggccaaaacatgtgtgacgacccttcgtttgccttcctgaagaaacaactgcatggtgccacattgatggtacctacattgatcatctatattcgacaacaaggtgggctatcctcttttgatgtatcaaatgcgttgagggaagtttccttggcgttggatcatgtgatgttttag

SEQ ID NO: 25035 - DNA, 249 bp, Zea mays
  Peptide Sequence Number=SeqID_66814
atggaaattatcagccaatggttagaaggaaatcattctcatgggcgtacacctatccacacttcaatcctttcggggaaaaacatgtcgaagaacttctacaaggacataatgtatcttcagactcgtatcagagagggagaagctcaaaagatacgaaggttgacacagcgccgaagctgtgaagcaggaaagcttcggcatgttcgcagaaaagggaaccgactcgaaaatgaaaaggccatttag

SEQ ID NO: 25036 - DNA, 315 bp, Zea mays
  Peptide Sequence Number=SeqID_66815
atgatttggcttggaataagggatatgataaatgagttcagaaagaaaaagctgaagctgcgtccagtaacatatctaagtggttctcagggttctggcaatgacattccgcatggatacatttggagtcctcatcttgttccgaaaccaaaagattggggcccaaagatcgatgttgttggattttgcttccttgatcttgcttccaattacgtacctcctgaaccacttgtggaatggcttgaagccggtgacaagcccatatatgttggttttggtagtcttttttgcacttcaaatttcctgatgaaatag

SEQ ID NO: 25037 - DNA, 429 bp, Zea mays
  Peptide Sequence Number=SeqID_66816
atgggcaagagcaacaaacgcaagcgcgagccgactcctccatcggaggacttcggcgactcgaaatactcggaggaggagttctcctccgagtccgaggggtctccggctcccgtctctcccccggtgtcgtcagacgattcagacgactcccaggggcttgccgcggaggtctggacttatatccaggtcgtcgagcgctctaggctcaagggctcggatgagtcggagtactcctcggacgaggaggactcgtacgaggagggcggtggcggcgatggcggagacaacgacgatgacgacgacggaggcgagggtgacgacggcgacgatgacggtgacggcggcagcaagggcggcaacggcggtagcagcaggggcagcaacggcggcggcagcagcaagggcagcaacaaggccagtggctag

SEQ ID NO: 25038 - DNA, 771 bp, Zea mays
  Peptide Sequence Number=SeqID_66817
atgggtccccatgaggaatgtgccagagaactgcagcactgctgcagtcagcagtcagcactgtatgctctcaagatcacatcacagaatcatagaatcacacaatgttcacaaatcacatattcacagctcagctcacaccagtgcacactccacagcggcacagtccacactacacaatcatcggagtcttcaattgtacagaaaaacccgaagcctgaacccgaaatgtgcaatctaactcttctgtgccctggcatcacgcgacgcgaggggttcgaaacacagtgcgagttcctctgggttagggctgggcagaaaaacccgaatgtgcaatttaactgtttttatattggtgagctggagcaatttgagagggaggtgaatgctgctgcattctctgacaagtcaaagtcaagagaaaatgcaatcttaaaattcaggcaattcattagagcaattgcagaccagatttctcaggtggaagaaagtttggagagtcttaggctaggttctagcagaactcaaaaacatttatactcaagtgaacatgatggtgatgggctggcatccttcctttctggtcccagcagcaaggatgaccatgcatatcattccactggtacagatgaaattgtggagcttaagctcgacaatgttactttagtaaatggttatcattccacccaagaacatacaacatatgaacacaggaattcagataaagatttggaagggcagctgattagccggtggtcgggtcgcacctga

SEQ ID NO: 25039 - DNA, 945 bp, Zea mays
  Peptide Sequence Number=SeqID_66818
atggccaacgcggggctgcgtgcataccgcgaggtgctgcgcctggtgcggcggctgccggcggagacgcagccctactacgccaagtacgcccgccagaacttcgtcaactatcgcgacctcgccgccgacgacgatctcggcgccctcctccgccgcgcctacacccactccacatgggtcctctccaagtactcgatcgacgcggggaaagtggcggtgcggctcaaggacttgacagacggccacgctgtgatatcccagtataagacgagtgggcccttaatgtctgctctatcccccagctcgggttgttgcgacagatccgcggagacccggctgaagcctgctgtcgaccgagattctttctcctcctttcccctttttccgcttaggccttgccttgcccatattctcgggcataagtattgcctggatggcccctttgttcctttgtgcatgcgtcgggggcgacttgcgctacgccttacaccggaagcagtggtgttccgtgggcggatgattccaaccactaccgcgggatcctcggcgttcgactcgggagtccatgacttcgtagttaaaagttgcgccgtgctccttcctccactcgcgaccccctcatcctcgctcgcgccatccctattctctggaatccctgctgccgcgcgcccctctctggccactcgccgccgccgtgggccaacttcgatcctccgccgacttgcctcggtgggtgcccgtgtgccgtcaccagggaaccttggaagcttgcacggggatcgccagcaatcggggtcgtctctgagttcggagctcgttgacgtagaatcggcctgcaccggccatggcgccgctggggcgcggtggccaccgctgtggctgggcgtcgtaaaaggtgattaccgcaccaccgttgatctagccgggtgcggtcgagattag

SEQ ID NO: 25040 - DNA, 285 bp, Zea mays
  Peptide Sequence Number=SeqID_66819
atggccccgccgtggcgtcggcgcggtgcgcagccccgccctggctgcttgcgtgcggccgtggccccgccgcggcttcggcgcgagaacgatctggttgaggaacccgaagaactcgcaggagaagcccctgtgcagcagtcggtggcaatgagattgatggttcttggtattggctctggtaatggttgtccgcattgcaaccactgctcaggcgaagatgaagccgtggaaggagacttcgaggagttccaagactacgatgtgacggaacctcccaagtaa

SEQ ID NO: 25041 - DNA, 630 bp, Zea mays
  Peptide Sequence Number=SeqID_66820
atggctgagtcgcggccatccggccgaaccgcgccggggccaaccgcgggcggggggctgcacaggacgccggggggccgcgctgggctggtgcaggacgaggggacgcgggcgccggaccgagccgggcgcggacgagccgcgtcgcagcgccatggccgcgcgcaaggccacgccatggctgggacgtacgccgcgccgagcatgacgaggtcgggaacggagaggaaaagggacggggagaagggagcgggacgggctcacctcgaggagcgacggcggcacggccaggtgcagggcagcagttctcctgcggccgggcgatgggggaagagagaggcgtcgggggagcgatttgcgcgagggagagtgaagaacgcgagttcgtgggagagagaagatgaacagggggcgacttgcctgaggcttacaggtagggttttagcaaaaagaaatggggaaagagagggcaccttcggatccgtcctgcacatcggtgactgccgcctgacgcttgactgcctcagcgccctgatgccccacctcgcccgctgcatcgactacctcttcctcgcgcggttgaaagggaaatgtgcctttgcgccatttctaagtattttggtgatttag

SEQ ID NO: 25042 - DNA, 411 bp, Zea mays
  Peptide Sequence Number=SeqID_66821
atgtgcaaacagatgcaaggggaactcaaactagagacagacacttgtaatatgattgatgaggcatctccaattatggtacaaggaacagagacacccaatcatgatagtggtttgatagcctcagttgattttgttaccctatcctgctccaaaaatgattatgaagttccacttacatcttcatctgttcctgttgcttccatggaagaatgtgacatggaacagattaatgaatccatacttgtccttgaagaagctatttctgattttcaagaacttaaatccagagcagagcattttgatagtgccaaaaaatatcctagtgtaccaaaggagggcatgccaatggctcttaaagctgaccataggagacctcaggccttgtcttgggagttgttcatagattag

SEQ ID NO: 25043 - DNA, 321 bp, Zea mays
  Peptide Sequence Number=SeqID_66822
atgggtgtgcctaaggggtgtcttggaggtggactctccgactcctctaaggagtggagcggcgacgatggtgagggcaatggcagcatcggcgacgatgacggcggggatgacgacagcaagggcgacgacggcaagggcgacgatgacggcagcagcgatgacggtgacgaccgggcgacggcagcaggggtgacgacatcaagggcgacgttagcggcggcgacggcaagggcgatgatggcagtggcgacggcgccaggggcgacggcggcagtagcggcaagggcgacgacggtcgtggcaaggccagtggcgtaa

SEQ ID NO: 25044 - DNA, 246 bp, Zea mays
  Peptide Sequence Number=SeqID_66823
atgggcaagaaggtggccgtgcccagcgcgctcgccgccagcggcctcgtcgcgtccgacagattcttcatgtgcttcggtcgcaacggcgtcggccgtctcaactttggtgacgccggcggccgctaccaggccgagacgccgttcatcgccaggagctcacgcggccctaacctgttcccggtcaccagggccgtacttatcttcgccgacgaggcaagcggggttccattcttcaagaaatga

SEQ ID NO: 25045 - DNA, 300 bp, Zea mays
  Peptide Sequence Number=SeqID_66824
atgaagagggacgcgtccgacttggactcgatgaagccacttgacggtgaccacgttggtgcctggtggacgcggcaccgggtcccagggctaagtggcggatctagaaaagagtctgagccgtcaagaactattttagggggcagacccgagtgctctattggagattttgcgtactcctgctccatagcgcgacgtcagtggaggtgccaaaggttcatctacaactattctaaatcgactgtctggaataccgtagattattccggacaggagaagctttttggaaaaacagactaa

SEQ ID NO: 25046 - DNA, 219 bp, Zea mays
  Peptide Sequence Number=SeqID_66825
atgaggctttcacaaaatacccttagtacaaagctacccgctaaggtttccatgtcagtatttatggccctctgggtgagattttccactttgaattatcgtaggtggaagatatattggcatgtgactaagaagaatgagaagataatcgagaatgtttttaatactacatcacaaaattacagaatcgtgacaacttatgcatttttcaaattataa

SEQ ID NO: 25047 - DNA, 195 bp, Zea mays
  Peptide Sequence Number=SeqID_66826
atggcgcggcccaggacagttccccgcgtggccgtgtgtgtgtctccggcgcggcctctcgctcgcgtccggcacggcctgcgcagccccgactcggcctttgtgcgaccccgacgcagcagcagcatcgccatcctcgtgcttcgccgcgagctcgtccggccgtccgccgtcgtcgcaggacttttcaattaa

SEQ ID NO: 25048 - DNA, 1713 bp, Zea mays
  Peptide Sequence Number=SeqID_66827
atgggatgtctcgcggctctgagtcgcttcatctcgcgccttggcgaaagaggtctgcctctgtaccgcctcttaaggaaggccgagtgcttcacttggacccctgaggccgaggaagctctcgggaacttgaaggcgctcctcacaaaggcgcctatcttggtgcccccagctgccggagaagccctcttggtctacgtcgccgcgaccactcaggtggtcagcgccgcgattgtggtcgagaggcaagaagaggggcatgcattgcccgttcagaggccagtttacttcgtcagcgaagtactgtccgaaaccaagatccgctacccacaagttcagaagctgttgtatgcagtgatcctgacgcggcggaagttgcgacactacttcgagtctcatccggtaactgtggtgtcatccttccccctgggggagatcatccagtgccgagaggcctcgggtaggattgcaaagtgggcggtggaaatcatgggcgagacaatctcgttcgcccctcggaaggccatcaagtcccaggtcttggcggacttcgtggccgaatgggtcgatacccagctactgacggctccgatccaaccggagctctggaccatgtttttcgatgggtcgctgatgaagacgggagccggcgcaggcctactcttcatctcgcccctcaggaaacacctacgctatgtgctgcgcctccatttcccggcgtccaacaatgtggctgagtatgaggctctggtcaacgggttgcggatcgccatcgagctaggggtccggcgcctcgacgcccgcggtgactcgcagctcgttatcgaccaagtcatgaagaactcccactgccgcgacccgaagatggaggcctactgcgatgaggttcggcgcctggaagacaagttctacgggctcgagctcaaccacatcgctcggcgctacaacgagactgcggacgagctggctaaaatagcctcgaggcgaacgacggttcccccggacgtcttctcccgggatctgcatcaaccctccgtcaagatcaacgacacgcccgagcctggggtgccctcggcccagtccgaggtaccctcggcccagcccgaggcaccctcagctcggcccgaggcgccctcggttcagtccgaggtacccttggcctctgagggtgaggcactgcgcatcgaggagaagcgaagcggggccacgcctgatcgaaactggcagacctcgtacctgcaatatctccaccaaggagagctacccctcgaccgagccgaggctcggcgggtggcgcggcgcgccaagtcgttcgtcttgctgggcgatgagaaggagctctaccaccgcagcccctcaagcatcctccagcgatgcatcaccgtcaccgaaggtcaggaactcctgcgagagatacactcgggggcttgcggccatcacgcagcgcctcgggcctttgttgggaacgctttccaacaaggcttctactggccaacgggcgggtggctgacgccactagaattgtccgcgccctgcgaagggtgtcaattctatgcgaagcagacccacctgcccgctcaggctctgcagacgatacccatcacctggccctttgctgtgtggggtctggacctcgtcgaccccttgcagaaaggcgcccgggggctatacgcacctgctggtagccatcgacaattctccaagtggatcgag

SEQ ID NO: 25049 - DNA, 744 bp, Zea mays
  Peptide Sequence Number=SeqID_66828
ctggtgtccctcggcacgccgcgcgcgcaggagctggcgctggcctgcctccagagcctcaccacgggagacggcggcgacgaggcgcagcggctcagagtggaggcgttccaggagggcgcgctcgggtgcgtcagcgacttcctcgacggccgccgcggcgacgagccgggcctggcgcccgcgctgggcctcctccgcaacatggcgtccttccgctacatcgccgagatcgcggcgtccggcggcctggcagcgcacgcggccgccgcgctgggcagcgaccggtccgccacccgcgcggaggccgccctggcgctcgcggagctctgcggcaacgcgggcaaggccggcctacggcaggaggccgtggtcgcggacgccgtcccgcggctggtgtggatgctggaggccaagcccgcgggcgagcgcgacgccgcggcgcgcgcgctggctgcggtcctggacgcgtcgagtgggtgccgcaaggcgttccggaaggacgagcgcggcgtggtgaacgcggtgcagctgctggacccgtccgcgcccggcgtggagacgcggttccccgtgtcggtgctgctggccgtggcgcagtcccggcggtgccggaagcagatggtggccgccggcgcgtgcgggttcctgcagggactggtggcctccgaggttgtgggcgccaagcggctcgccgagcggctcggcaaggggaagatgcttggcgtgttcccgcggacatga

SEQ ID NO: 25050 - DNA, 162 bp, Zea mays
  Peptide Sequence Number=SeqID_66829
atgttgggccattttctgtacctactgtacaaaggtgacccccggcacatctggcaacaggagcccaggctgcggggacatccgccgccgcctctactggctacagcacgtggtactgtggtagaaatcgtcacggctaccggctacagtcctccgagctaa

SEQ ID NO: 25051 - DNA, 393 bp, Zea mays
  Peptide Sequence Number=SeqID_66830
atgggcaagagcaagaaaggcggaagctcatcgcaccattccggcgacaagcggaagcgcgagccgactcctccctcgaaggactttggcgattccgagtactcggaggaggagttctcctccgagtccgaggggtcgccagtccacgcctctcccccagcatcgtccgaggtgtggacatacatctgggccgtcgagcactccgggctcgagggctcggatgagtcggaggtctcctcggacgaggataactcctcttactcgtccgaggaggggagcggcggtgacgacgacggtgagggcgacggcgacgacagaggcgacggcgatggtgacggcgacggcggcaagggcagcagcggcaaggccagtggcaaagcgtcgttggcttag

SEQ ID NO: 25052 - DNA, 666 bp, Zea mays
  Peptide Sequence Number=SeqID_66831
atggtccagcgggatatcgaaattgctgtgacattgtacaacggccaggaaatatcggatgtgctcggagttatcactcaagtgagtgcattaaaatcagttcggacacagacccaggaaagctcaaatgtcataaaagagatcatcataaaagatatcaatgatgtcacaatgagactaaccctatgggcacaacaggctaaagcttttaaattagatgatgtttacaatcctctagagcaaaagccaatcggcatactctttgtaggttgtttagccaaaaatttccaaggtgcatacttaaatggtggaacaacatgtagatggtatttcaatcctgatattaaggaagccgctccttattatcaaagtcgagcatgtagaccacaagatggtggttactattgctcctactgtaaatcagaagcgtacacactaaggtctcaagtcttggatgtaacacaaggaactaatgcagataagggaatccccaccgataaaggcaaagagatcgaacctcatcttcaatctcctccaaaaaggtggttggggttgtacctagcgtcatggtttactgctgtggatctcataggagggtatcatcaaatactgctacaacctgaagactctcacaagacaacctttcatacacactcaggccactaa

SEQ ID NO: 25053 - DNA, 250 bp, Zea mays
  Peptide Sequence Number=SeqID_66832
atggcgaacctcaccgacatggaacaatgtctatccgacaagtttgaggtcgtcctcaaactactggaggacacttcactcaagaacatctcagtgaagatgtggcgattggacaaggtatccaacaagctggtaggaattgagcgcaaacagaaagaccatggcaagtgtgtggagtatcttcaagccaaagtcgatctatccatgaagtcgctggcccaggtgcaacaggagcaacttcgtctttcag

SEQ ID NO: 25054 - DNA, 950 bp, Zea mays
  Peptide Sequence Number=SeqID_66833
atggctcggtggataaatgtggagctcgcccacgacttctcctcctccagttcctcgatcgtcttctcctggggaagctgccggtgccctcaattcgagttaaactccaccgagacacgagtaattgctcgctggacttctccattcgccgcggagccgcacctcgccgtcgccgggaaccttcgtgccctaatcgccgcctaccccgttttccccttttttcctccccgcgacccagcatctccccccggcccaccccgcagcgcgcggcccagcgcccctgcggccaccagcgtgccccccgtcgtggcccagctcgcgcgcgagcagccgcgcggcccattcgcgcgcctggcccaacgtcgccccctccccttggactgccggcgtggtcggcccagctcgcgccacttccccccacccagcctgctcggcccagcattgcccccagcgcggcccactcagcctagcggagctgcgcgtcgcgcacgctcgcggctcgcccagtcgccgtacgtcccctggctgcctgggcaattggcttcttctccaaccgtccgagcacttcgcgtctacggaagaaaaaccacccacgacttcttccattcaatgcctctctccctcccttgcgctcgcagccagcgcatcggcctggcgaggctcgcccgcggcagagcgacggctcgcccgcaacggcggcctggagcagttcgcccagcgcagcgcgcagcgcgggcgtgcggccccgactcggcgcgtctcgccgcgagtttcgccgtcgcgctattgtcgtcgccgcgcagcagggtctacgtcgctctcgtcgtcgccgaggtgagcttcgtctaccccggtttactctccgtctacttcatgcgcaagtcgccgaacccagtcccaaaccgcatcgtcgcagctacgcgctttgttgtcgtgctcgtgtcgcggac

SEQ ID NO: 25055 - DNA, 333 bp, Zea mays
  Peptide Sequence Number=SeqID_66834
atgcagaccattgtcaacatgaaaacatgtgcaaactctgcacgccagcgccgagggggaagccaggtctggacagcaaaggaaaccgaaagggttaaattcttcaaaactcaccacgatagagatggaagtggacctgcgcggccgcctattctcgagcgtgtggctgaccggtggtggtatctggtgtgggcgtctggcgtggacgagcgccgggcgggacgcgaccgtaggtgggggcagcgagcagggaaggagggacaggcgaaggccatgaaggagagcggcggcggcgcgcaggctttggatggagagaggggggagacggactga

SEQ ID NO: 25056 - DNA, 369 bp, Zea mays
  Peptide Sequence Number=SeqID_66835
atgtactctcttgggtatgctggaattaaatctagcactaggaaagggtatacccatgttgtctgtctctctctcgaagctttggggaataaggaaaattgtgacaaggataaagatttcattaagcgtcaatgcgaaaagtgcattggagttggtcgtaaattccctacgacacaactatgttgcaatgctataaaaagagctgatatggcttgcgtctgtcgtagcataacactagaagagcagctcacaataagtgtcgtgaaggttgtggatgttgcaaaggaatgtggcaacccggtgccgcctggaaataaatgtggaacttggactgttccaccacaactgctgggatgggtgcatccgtaa

SEQ ID NO: 25057 - DNA, 396 bp, Zea mays
  Peptide Sequence Number=SeqID_66836
atgtactcccttgggtatgctggaattaaatctagcactaggaaagggtatacccatgttgtatgtctatctctcgaagtctttactatgctttcgacacatcaagctttgggaaataaggaaaattgtgacaaggataaagatttcattaagcgccaatgcgaaaggtgcattggagttggccgtaaattccctacgaccaaactatgttgcaatgctataaaaagagctgatatggcttgcgtttgtcgtagcataacactagaagagcagctcacaataagcgtcatgaaggttgtggatgttgcaaaggaatgtggcaacccggtgccacctgggaataaatgtggaacttggactgttccaccacaactgctagcaagggtgcatccgtaa

SEQ ID NO: 25058 - DNA, 500 bp, Zea mays
  Peptide Sequence Number=SeqID_66837
aggctgcaccacaacttgctagaggagcaggagcgtcaacgataggagatggagcagtaggattcttcgtccccgccatagcaggaggtggtgtctacgaggcgtctctcccatgtacccccactggaggcgccccctataccacccagggcgtcccggctgcaggaggacctgatggtggagatcccgacggcgacgacgacgatggtggaagatcgagccacaacaccaagctttttgaggacatagtcgcgggacatacctgggtcgttgggaagctaccttcctggtgcgtcgaccgaaggataacctctggggtgcagagagaggtggctgacggtcttaacctcaagtattacccctgccgctcgactggcagtactggaaggctcgtgctgagatcgcagagttacgggctgagcgcacggagcaccgtcattagaagtatggttctcccgccccactgggactcagcaccagtaccgctcaccgccaagagg

SEQ ID NO: 25059 - DNA, 393 bp, Zea mays
  Peptide Sequence Number=SeqID_66838
atggctactgaagaagaatgggatcaagataactgcccactgctcaagatgtccaaactccggtcgctggagctgcacggactcattggcgctagacacactgtagagttggatggaactgtgcaatggccggctgtcgctgagtttaatgatcttcgctttgtccgttcaaaccttgtccagctcagcctgacaaatacaaatgatgcgccggaagacatccaacatgaactgagaaatgcaggctttgtccgctcctaccagcagctccaacctgtttatcggctttcatacagacaaggaagggcgcttgcgacaaaaccggagcagcagggtgaagcagggtccaacaaaatggagcagcagcaccaaggcgaggaagctgaagcgtga

SEQ ID NO: 25060 - DNA, 147 bp, Zea mays
  Peptide Sequence Number=SeqID_66839
atgtcttcgagcagcagcagaggtcgagagttgttgagtgcggtacatggagatgaggatgagcagcacgatgatgagctactcattgaggaggagcttcacattgaggctgatcaacatattgtggaggtgcagcaagctacatga

SEQ ID NO: 25061 - DNA, 240 bp, Zea mays
  Peptide Sequence Number=SeqID_66840
atggggaagcctatcccatcactcctcatgctcctcctctgccgagcaatcaacaatttttgccaagtcttcacatttccacttgttactcaatgtagcagcatggatcaagcagacgattcgaatcgagtttttatccttgcaagctggggcaggcagatcctcgatggcaggctctggtactggatcctgggctacctcctgagcagctctgtgctctggaatgaggagatgtcataa

SEQ ID NO: 25062 - DNA, 288 bp, Zea mays
  Peptide Sequence Number=SeqID_66841
atgtacgagggaatttcttctggtggttgtggtgactctgatggagtggaccccagcgcgctgcgagggaaaaggaaggaagatgcacagtggatggcactggaggtgaggctggttctctgggtctgcacgtcggagactcgtgagtcgcagtgggcgccgccgtccgcagcgcaggcccacccgacggtcatagggagaatcacgcgcgcggaggctgacacgggcgacccacctgccggcgccagggttcgcgcgcaagggcacatccgggccacatgggtgtga

SEQ ID NO: 25063 - DNA, 312 bp, Zea mays
  Peptide Sequence Number=SeqID_66842
atggcccacgcccgcgcctataaagcacctagggacctggaccatacccctccgcacgcgctcgacctcatcagagcccaaaaccaccagcgtttgcccgtgcacgcctctatgtcaccagtgaagctcaccgcctgcgcgtgtggaccgggcgataccggccacccccgccgtcaagccgtacatcgttgtgaccgccaggacctcccggagccaacccagtccctcgtcggacctctctcaccgccgacagcaacctcgctgacggagagtacgtcctcgtgccagagcaaggagctgctcaggaggtag

SEQ ID NO: 25064 - DNA, 321 bp, Zea mays
  Peptide Sequence Number=SeqID_66843
atgggcaagaacaacaagcgcaagcatgagccgactcctccatcggaggagtttggtgactcggaatactcagaggaggagttatcctctgagttcgaggggtctccggctcccatccccctgcgtgagtcgtctgacggcggaggtctggacgaggactcggacggcggcgaggacgaagatgacgacgacgacgacggtgacgacgatgacggtggagacggcgacggtgacggcggcaacggcggcggaggcagcggcggcaagggcagcaccagaggcggcagcagcacgggcagcatcggcaaggccagtggctaa

SEQ ID NO: 25065 - DNA, 156 bp, Zea mays
  Peptide Sequence Number=SeqID_66844
atgaaggggctactgttgggggtatgcttcgtagccgaagatcctaaagaaagagaataccttcggcagatcctctcaggagcagcgccgaagtcgattgtaaagggcataaatgtaattttacacaggctgcgccctgtgcctataaataggtga

SEQ ID NO: 25066 - DNA, 231 bp, Zea mays
  Peptide Sequence Number=SeqID_66845
atgggcgctcttgggctgtggcaccgaactgtccgaaaaacaaagcagggggaaagaacggtggcgagtctcaccggcggcgaggatggtccgacagggggtcgaggatgtgcagcggtcgccggtagacacaatggtgcttttgattggtgtggaggcaacccaaaggagactggccacaggcatgatggcttggcgtgcttagtgacagtgtcagggctcctccagtga

SEQ ID NO: 25067 - DNA, 1674 bp, Zea mays
  Peptide Sequence Number=SeqID_66846
atgctggccgcacacaccgctggtagatgtgggtgggatgggaagacgattgaggaggtaggtggccgtgttcagggcctcaacctagtagcgggcgggaagagaagcctgaaagaggaggcaacacaacatgttggtggtggtgtgaatcatgcgctcggcacgaccattctgaggggagcatgcaactgcggtctgcggatgtcgtgccctcacaaacttgccccttgctcttctccttgtattttcctcggaatatatgattcatgcatgtgtgcaaatgctcccatttttactggcattgagcaattgccacaattttcacatctacaagaattaattggtctaacagctactgattctgttgaacttggagatatcgtggaccctcctgttatccgaactgctacttctatccttcctcttggatggactggactccctggtggtaaaaatgctgagccactgaaagttgatataattgggcatgacctacaaatgtgcactcttttccaggcacaaataaatggaaactggtattccacagtaatagagactctaccatcagctacttcatactcaccaaatggagaactgcaacccacattacagaaaatgcggattcttgttggacaaccactaaagcagcctccaaattacattagtggggatttcatgattcctgtgatggcaggtgctgattcaacacccgactttggatttgaatcattttttgaagataaagattgctgcaagggtttgagtggatttctaatatatgggacaagtgattttgtaactggggctggcaaaacatccctgcttaaagcaatgttaggacaagttaaagaaagaaatagcactgttcttgaatgcatacatgtcgatttgcatggcaagggaatatcaaatggattgtgctacatagattcgacaacggtaaacttgcaggagctacctttggaggttgggcggttcaaagaagaactgttgttaggactccatgatatcagcaggaagactgaccttgttattgcggtgcataacctagcacaccgaattccacagtatcaacggtccaatacttctcagcctcagcctgctctttcacttctcttggatgaagctaaggcgctaagcattccttggattcttgcaataaccaacaaattctctgttagtgcgcatgagcagaacagattgatcagctcagctatggaagcatatcaagtttctcctgagatgacaaaagttgttaactcttccccatttctgatgccaagtgctagaaacagtttgcagcagatcagatcagctactgggaagttgaagaaggatccagcaaatagatctggttatcttcctgtaaactttggattgtcatcatttcagaggaaggacattgttatgcatgtggagggtgttagttcccttcgtcaacttgtacatcaagtagtcctcaacaatgaagaaacagcatttgaggaacttgctcgtgagagattgttgaaggagctagcgtcagagaaagcagcgtccctgcaagtgaagcagaagccccggaaaagagatggctctgttacagctgctgctgtaggtgcatctctgggcgcgggcctgggaattgtaatggctgtgataatgggggcagcatcagcccttcgaaagccgtga

SEQ ID NO: 25068 - DNA, 678 bp, Zea mays
  Peptide Sequence Number=SeqID_66847
atggtgaattctcttaattcagaaatatcttctttggaaagctgttggccacccaggtgccataaatcaaagcgtctttctcagtatttttctcctttggctaataagctagtcaagtttgaccctagaggacttagcatagcaaagggcaaaggttcagtcattacctccaggatctctgtcacgacgatagaagaagtcgaaggggtttcaaggacctgcttcgatggagcaggcatcttcttctcaacacagcttgcttctgaagatttccgtttcttaaggcctgaagattttggccccaacttagaaacttcaacctcccttaaaacctttcgttttttggcagcgactgttggtcacttgttcttaaatgttgtaaatcaagaacaagacaacacaattgttaaaggtcgaggaccttcatcctccgaagcattatctcctcttggatataatgatcttcagacgaaggtcatgaaggacatgccttcatcattcataatgataaaagaagaaactattgtcgaaggtgttgctgatgccgaagctaaacaaaccgtggctgaagttgatagcgaaaacaaagatgaagatgatgacatcatcctatgttcgaataagcccaaccacattgaattcgggagatccacagttaaggcagaggatttagtttaa

SEQ ID NO: 25069 - DNA, 294 bp, Zea mays
  Peptide Sequence Number=SeqID_66848
atgggcgggccgctctgggcgagccgcgtggagagttgggtgcgggaccaggcggcgcggctgcagccctgggcggcggcgctgccgcaggcgccgcggtggccctggcccccgccgcggcccgcctggccgtggcccggggaccgcagacgccagcgggaacgcatgttccgggaggagtacgaacgtcgtagcagacagctccgcgagctctgccgcgctgtccgcgtcgacaccgtagccgagctccaggagttgctctgcgccatggtactcgccgagtgcgtctacaag

SEQ ID NO: 25070 - DNA, 1179 bp, Zea mays
  Peptide Sequence Number=SeqID_66849
agacctgtttctgagatgatgagatatatcaacaagtttaagtctgattttggtggaaatgttgtgtccctggagcgtgttcaaccatccttggatcatgtaccacatcggtatctgttagcagaggctggtgacaccctatttgctacatttattggcacaaagcagtacaaagatattattgctgatgtgaacatattccaagggaccttatttcatgaagatactgctcatgatttagctcctgatgttgaccctgaacaaaatgatacccaaaagggtgaggaaagccatgggaaatcttaccgagaaacatcaaagaagctaagaaaaccaaaacctgcagtgcaccgaggtttcttggctcgtgctaatggaattccagcactggacctatacaatcttgcacagaaaagaaacaggaaacttgttctttgtggacactcacttggtggggcggttgctgcattggctactcttgcaattttgagagttattgctaccacttcatctgaagaggataacaggcttcatgtgaagtgcatcacctcctctcagccacctgttgggaatgctgctttaagagattatgttcacaaaagaggatggcaggactacttcaaatcctattgtattccagaagacttggtaccacgcattctatctccagcttattttcaccactacaatgcccagacacctgaagcatcttttacaaataaaactgatgtgaaatctgaagaagttatggaggcaagtggggaaaggcccagaggaaacaacagggaacacctcgttctcggtgttggtccagtgcaaaagtcattttggaggctttcaaaacttgttcccttggaaggggtgcggaaaagcttaagtgcaattcaaaaacaaacaaatgtttttgggaaggcaccatcacaattggatagctatttgcaatcaaaggttgatgaatcagaagaaccacctcaatctcttgagattcaagaaagttcacaaggaattgctcttacccctttatcggataaagatggagggaacactgaagataataataggactgagaaaataaatgcatctgaagcaggggggtctaaacgctggagcagggtaccttctttgccttcatatgtgccatttggtgagaaagagggaaagggtccatcccttgagtag

SEQ ID NO: 25071 - DNA, 291 bp, Zea mays
  Peptide Sequence Number=SeqID_66850
atgggcgggtacgagctcgtcaggagcgacgacgcggcgggcgccgcgggagccgacctcgagtccggctccggcgccagcaaggtctccggcgccccgccgccctcgccggccccgtcggcgtcgcccgccgcgcggcagcagcgcctcgcctcgctcgacgtcttccgcggcataaccgtcctgattccccagaacagtaaattcaacattcttctccatcagactcagattagcgacgttaaaagaaatcaagcactactgccgctcactttatcagcgctcaactag

SEQ ID NO: 25072 - DNA, 450 bp, Zea mays
  Peptide Sequence Number=SeqID_66851
atggcgaaccctcgcgtcttcttcgacatgaccgtcggcggcgccccggcgggccggatcgtgatggagctgtacgccaacgaggtgcccaagaccgcggagaacttccgcgcgctgtgcacgggcgagaagggcgtgggcaagtccgggaagccgctccactacaagggctccaccttccaccgcgtcatccccgagttcatgtgccagggcggcgacttcacccgcggcaacggcaccggcggcgagtccatctacggcgagaagttccccgacgagaagttcttcttcatctgcaccgtcgcgaccccttggctcgacggcaagcacgtcgtcttcggccaggtcgtcgagggcatggacgtcgtcaaggccatcgagaaggtgggcacccgcaacggctccacctccaaggtggtcaaggtcgctgactgcggacagctctcctag

SEQ ID NO: 25073 - DNA, 330 bp, Zea mays
  Peptide Sequence Number=SeqID_66852
atgggtgtgaccaaggggcgtcttggaagtggatggcaactccaggcctctataaatagccttcttgcacaattgttctcttcactcatccttcgatcatctgctactttcttctccctttatcctcttctccatcagaccatggggaaaggcaagagaggtcgaggctctccgcgtcgtgctggcgacaagagaaagcacgatctgagtccgccctcagaggacttcggcgattcggagtactcggtggaggaggtttcctccgagtccgagggatcactggctctcgcctctcccccgatgtcgtccgatgactcggacgactcctag

SEQ ID NO: 25074 - DNA, 246 bp, Zea mays
  Peptide Sequence Number=SeqID_66853
atggggaagcctgtcccatcactcctcatgatcctcctcagccgagtgaccgcacttgtacccaccataaccggaatgggagaccacgtcttaggtcacgtgaggggtaaagtctgtgggcaggttcactcagcaccacacctgaatccttattccaatttccgtctcggagacgacgcatccccatggaccatcgtcaacataccatcatcattccgatataaaatggatacaatcaattcctga

SEQ ID NO: 25075 - DNA, 417 bp, Zea mays
  Peptide Sequence Number=SeqID_66854
atgaggatgagccccgactgcgtgccaacagctggagaggcgcacacagagggagggggcgcggccagcgctgcccgccctcaattcccttcaattcctttgctcccaggccctcaatccccttacaaacaagccataagagagctgttccaacacattaggcaactcgccctcaagaaaaggctgccaatatctctcaacatattgtggcgaatgttccgggaagctgcaatgtccaaggatgatacggaattgctaagggtcatggccaactacggggaggatgtagttgaagctctgggatatgaagtggatcggctggagtctgagatccaaaagcttgtgcctgggattaaacatgttgacatcgaggcacacaatcccgaaggacttgctcttagagcagaagttttgtag

SEQ ID NO: 25076 - DNA, 216 bp, Zea mays
  Peptide Sequence Number=SeqID_66855
atgacgctggccccgcccacctcggtctctgactgggtgactgactccggcgcctcctaccacaccaccccggacgtagaaagggattttatctctcctcaatcccctccaatccccttgatcccaaacaagcccttagtgttctttgacaaagaaatagtggaagaagggtacaggatcacaagctcaaactaccagacagctataataagatga

SEQ ID NO: 25077 - DNA, 1231 bp, Zea mays
  Peptide Sequence Number=SeqID_66856
gatggggggtgggcccatccaagagggagttaaacaacttcaaagcgcaaatgaagttgggacactgggtgcctcgtcggaagcaaaatgttgtggaaccaaagtgggtgttccgcaacaaccaggacgagcacggggtggtgacgaggacaaaggctcgacttgggcaaaaggttatgcccaagtcgcaggtttggatttcgaggagacttttgctcctgtggctaggctagaatcaattcgtatcttgctagcatatgccgctcaccattctttcaggttgtttcaaatggatgtgaagagcgccttcctcaacgggccaatcaaggaggaggtgtacgtggagcaaccccctggcttcgaggatgaacggtaccccgaccatgtgtgtaagctctctaaggcgctctatggacttaagcaagccccaagagcatggtatgaatgccttagagactttttaattgctaatgctttcaaggttgggaaagccgatccaactctttttacaaagacatgtgatggtgatttgtttgtgtgccaaatttatgtcgatgacataatatttggttctactaaccaaaagtcttgtgaagagtttagcagggtgatgacgcagaaattcgagatgtcgatgatgggcgagttgaactacttccttgggttccaagtgaagcaactcaaggacggcaccttcatctcccaaacgaagtacacgcaagatctgctaaagcggtttgggatgaaggacgccaagcccgcaaagactccgatggggaccgacggacacaccgacctcaacaaaggagactccgactatgctggatgtaaggtagataggaagagtacatcggggacgtgccaattcttaggaaggtccctggtgtcatggaactctaagaaacaaacttccgttgccctatccaccgctgaggccgagtatgttgccgcaggacagtgttgcgcgcaactactttggatgaggcaaaccctcagggactttggctacaatctgagcaaagtcccactcctatgtgataatgagagtgctatccgcatggcggaaaatcctgttgaacacagccgcacaaagcacatagacatccggcatcactttttgagagaccaccagcaaaagggagatatcgaagtgtttcattctcgaaggaggattgaaagggaaaaggtggacttggaccatgaaagacttccactgcactccgatgagagg

SEQ ID NO: 25078 - DNA, 1578 bp, Zea mays
  Peptide Sequence Number=SeqID_66857
atggagctcgtaggcggctttgcctccaacacatcgacgaccccgctcctctgctgctgcatcgccttcttcgtctcgcttattttcttgtttcaccgccgcggcaagtcaactaagagcaagagcgccctccctcctggaccaccggcgctggtgttcctggccaaattcttggccctgcggcgatcgatcttcgacctgaccccgctgctccgggacctgcacgcgcgccatggccccgtcatctccgtccacctcttcaccacgctcgtcttcgtcgccgaccgccgcctcgcgcaccgcgtcctcgtgcgggacggcgccaccttcgccgaccgtccgccgctctccgagccggacccgctcttcagcgccggcgacatcaacaccgcgtcctacgggccctactggcgcctcgtccgccgcaacctcgccgccgacgcgctgcaccgcgcccgcgtcggcctcttcgcgcccgccaggcgttgggcgtgcgaggcgctcgtcacaagcctgctcacgcgcagccaagaacgtggttcctccttcgaggaggcggagcccgtcacggtgaggccgttcctgcggcgcgccatgttcgagctgctcgtgtacatgtgcttcggcgctcggctcagccagggcacggtcgacgagatcgaggcgctggagcgccacgtgctcgcttccttcaccgcctttccggtattcgccttcttcccgccgctcaccaagaggatcttccgcaagcggtgggaggcgcacgtggccgtgcgccggaggctggacgagctgtttgccccgctgatccacgccgcgcgccggcatggcgaggacggccgcccgccgtgctacgccgagtccctcctcgcgctgcgggtgcccggcgagggcggccggccgctcacggacgccgagatcgtcagcctctgctccgagttcctcaacgccgggacggacacgacggtgaccctggtggagtggatcatggccgagctcgcgaacaatcccggcgtccaggccaaggtgtacgaggaggtgaccagagtgaagcccgacgccctcgacgactcggccggcaacctacagtcgctcccgtacctgaaagccgtcgtgctcgagggcctgcggctgcacccgccggcccacttcctcatccctcacggcgtgaggagcgacggcgacgcggcggagatcggcggctacacggtgcctgaaggcgcggaggtgaacttcttggtggcggagatcgggcgcgacgaggcggtgtggactgccgcgcgcgagttccggccggagaggttcctggacggcggcgaggggtgcgacgtggatatcacggggagtagggagatcaagatgatgcccttcggtgccggccggaggatgtgccccgggtacgcgctgggcatgcaccacgccgagtacttcgtgggaagcctcgtgagggagctggagtggctgccggcggcggagggagaggccgtcaacatggaagaaaccgtggatttcaccaccgtcatgaagcacccgttccgagcgcgcatcgtaccgaggaacaaatccttgctcacctag

SEQ ID NO: 25079 - DNA, 411 bp, Zea mays
  Peptide Sequence Number=SeqID_66858
atgggcaagaaacgcaagcgcgagccgactcctccgtctgaggactttggcgactcggaatactcagaggaggagttctcctctgagtccgaggggtctccagcttctgtccctcccccagcgttgtccgatgactcggacgactctcaggggatcgccgcggaggtctggacttacatccgggtcgtcgagcgctccgggctcgcgggttcggatgagtcggagtactcctcggacgaggaggactcgtccgaggaggacggtggcggtggtggtgaaggcgacgacgacgacgacggaggcgatgacggcgacgacggcagcaggggcggcaacggcggcagcaggggcggcagcggcaggggcggcaacggcggcagcagcaggggcagcaacaaggccagtggctag

SEQ ID NO: 25080 - DNA, 423 bp, Zea mays
  Peptide Sequence Number=SeqID_66859
atgggcaagaacaacaagcgcaagcgtgagccgactcctccatcagaggagtttggtgactcggaatactcagaggaggagttctcctctgagtccgaggggtctccggctcccatccccctgcgtgagtcgtctgatgactcagacgactcccaggggcttgcggcggaggtctggacgtacatccgggccgtcgagcgctccgggctcgaaggctcggatgagtctgagttctcctcggacgaggaggactcagacggcggcgaggacgaggatgacgacgacgacggtggcgacggcgacggtgatggcggcaacggcggcggaggcagcggcggcaagggcggcaccaagggcggcagcagcgtgggcagcaccggaggcggcggcggcaagggcagcggcggcagggccagtggctaa

SEQ ID NO: 25081 - DNA, 144 bp, Zea mays
  Peptide Sequence Number=SeqID_66860
atggaggacaagcagctgcagcaggaagatagcagcgagcgaccaaagcggctaaggcgcttgaacacgcatgtcactgggccggatcggatccaacaaattcccttctccttattcctcgaccttctccccttcctcggctga

SEQ ID NO: 25082 - DNA, 231 bp, Zea mays
  Peptide Sequence Number=SeqID_66861
atgggtatgctcccgtctctcgcccctactactggtggagatgccgtcggtcgaccggcttcaggcacgcctagtcatgtcaagcgtgtagttgccgaggccgcatttcatggtagcagcattgctctagggcggatggtctcgcacttcgacgaggttgacgtcgtcgtgatcgtggaaggcttcgccaccggtcgacacggtgaggagatggacgtcattaaagattag

SEQ ID NO: 25083 - DNA, 660 bp, Zea mays
  Peptide Sequence Number=SeqID_66862
atggcgcctcctgttgacgtggtcagtccgtgccctgggttgggcgaggtggaggctcctccgaggtcaaggtcgagtctgtcttccaaggtcgaggtcgagtctgagcccccgggtcggacgaggcggagaccgtcggctgatgccagggctgagtccgagccctggggtcgtgcgaagcggagttcgtcgtccttcggagctgagcccaagtccgagccttggggtcgggcgaagcggagttcgtcgtcttccggggatgagcccgagtccgagccctggggtcaggcgaagcggagttcgtcgtcttcctgggctgagcccgagtccgagccctggggtcgggcgaagcggagttcgtcgtcttccggggctgagcccgagtccgagccctggggtcgggcgaagcggagttcgttgtcttccggggctgagcccgagtccgagccctggggttgggcgaagcggagttcgtcgtcttccggggctgagcccgagtccgagccctgggtcgggcgaagtggacctcactcggtcgagtggcacagcagtcggagcggcgcaggcggcgctgtcctcttgtcagaccggtcagtggagcggcgaagtgactacggtcacttcggctctgtcgactggagggcatgcgtcaggataaag

SEQ ID NO: 25084 - DNA, 207 bp, Zea mays
  Peptide Sequence Number=SeqID_66863
atggaggccaagtcacaccatcaaccaaatcaaggaggtacctgcaaaaattatgccaccgctcaagcacactataaattgagcacaccgacggaaaatgaggaggaaatagaagttgaagaagcgaggactacaccaccaccacctgaagaacctcaggcaggaaactggttttactttgatatctgtggaacagagcctgattaa

SEQ ID NO: 25085 - DNA, 714 bp, Zea mays
  Peptide Sequence Number=SeqID_66864
atgggctggagtggcctggccacagtggctgagtgctcgggtggcttggcgggcggcgcagagctcgccggagctaaggacagagtcaagacagtgggggcaggcgtggaacgaagtgtggcgcgtccgagggtggtctttaagggcgcggctctagcttctgcgccgctgttctctctgccgctcagctctctttctctgctgcgcgcgtcggcctcctacgtgcgtcttcctcctgaccgcgcttactccctctgcttctctctcgcagcgctcagccttgccgcggttcttccaccgcggctcttccacagctcgagtctgcctagctttgcgcccatctccctgcttccctgtcgtgcttctctctcccatcccttcccctgctcaccgccgagaacctcctacaggcctaggctgaccaaacaccgcccgcgcctagccctcaagctcgcccagccagccgaggtccttctcacagcgccggcctctgttctgctccactgcgccgagctcctccctcgccatggtcgcgcgctatcccttcagctcgctcggctgcttctactccctctccggttcgcccgtgggagtcgcgtcctagccaagctctctgctcggcgtccctgctcgccggcgatgcccctgctccagctcgccgtgcccttggtccaaattccctgcttccctgctgcgccgtcgagccttcgctag

SEQ ID NO: 25086 - DNA, 291 bp, Zea mays
  Peptide Sequence Number=SeqID_66865
atgtgcggccctgtcgcccacgcctacaccacgcgcggccccgtcgatcctgcctatgccgcgtgcagctacgtcgacccttctcgcgccatgtgcggccccgtcgaccccgtctgcaccccgtgcggccccgacgacctcggcctcgtcaacaagcgagacccatttcatcgaccccgccatcgtctaccaccgccgcgggagcgcccctccctcggcgcccacggatccgggcccctcgacgagcgcgacccaattcgccaatccagccgtcgtctatcacagctgtag

SEQ ID NO: 25087 - DNA, 495 bp, Zea mays
  Peptide Sequence Number=SeqID_66866
atggcggggatggtcggagattggcggggatgtccggagattggcgaggtcgagggcgggattggcggggagatggccggagcggcggtggttggcggaaatggcgcgacagggagatggcgtggcagggcagggtgtctgacactcgacaaagacatctttgccaagtgtcctgggtccgacactcggcaaagacatctttgccgagtgtcctttgccaagcactcggcaaagactgtatttagggttttcaaaaaaacttcgccgagtgtcccacgtgtggcactcggcaaagaattctttgccgagtgtcgttcttggacactcggcaaagtatatttttatttttttccttaccaaactttttgtgattcgaactgcaagtcactcgaaacatgtaaaaccgtgcatgcacaattgaaaaccatggtaggtaacacaagttacgaccgatttcgggaacataccggaatcttcgagcaccatgttcactaa

SEQ ID NO: 25088 - DNA, 408 bp, Zea mays
  Peptide Sequence Number=SeqID_66867
atgatacaaagggtggaaggcaaaaggctcaggagtgcgagagaaggcaagggcttgagcgttggtaacctccacacaattgtcgtgacaaatgcatttatgcatcgacggttgttggagaacacactgacatgcaaccatttgtttgtctcccacacagtgcaaattttgatacacatcaccataccacattcccgagactttcgggacgtacgcctcgacctcgacgtatacgaccctctgacagttaggacatgctcgcagcctcccaaatatcctatagcagcatggaaggtgaacattcccaccgaccacatctccaagtacaggtacagattgtacgagttgcaccagccggctccaacatctctagccccatctgcaggagttttgagtgacgtcaaataa

SEQ ID NO: 25089 - DNA, 459 bp, Zea mays
  Peptide Sequence Number=SeqID_66868
atgacggacgagcttgggcgtgtgtccagtcgaaggctcggaaagaaacggtcgcgggtggctcggcatcgggttcggggcttggttaggtcgcctggtagcggctgctcgggcgtcgggtcttgccgtgatgggactgggcacgcggggcttgcggcgtggcggctcggggtcggtgctagcgtcgcgggcggtcctgacactcggcgagcggctgggcaggggcacgcacagggcggcaggggtcctggcgtgcggcggctcgatcaggggagagcaggggagagcgttgggcggctcggtttcctggcgacacgtcagctgggaggaaaggcagggagagggagaagggaaagaagagagatggggctgggtgggtcccacgcacaagagagagaagggggggtgaaggtgagtgtggcggcggttggggaggagctagagggcggcggcgactag

SEQ ID NO: 25090 - DNA, 252 bp, Zea mays
  Peptide Sequence Number=SeqID_66869
atggggctggagaacttgttggagaggtgtagcttgcggaggccgcgcttgggtccgaacgtgccctcggggatggaaggaccgaatgagcagggggccggcgtcgtgggcgagctgggcggccagcagcggctcccagacctggatgacggcagttccgtgacctggagtttggagaagggcggctacaacagggttcggggcatacattgccctagttacggctcaacccgccacattttggccaaataa

SEQ ID NO: 25091 - DNA, 237 bp, Zea mays
  Peptide Sequence Number=SeqID_66870
atggcggggatggtcggagattggcggggatgtccggagattggcgaggtcgagggcgggattggcggggagatggccggagcggcggtggttggcggaaatggcgcgacagggagatggcgtggcagggcagggtgtctgacactcgacaaagacatctttgccaagtgtcctgggtccgacactcggcaaagacatctttgccgagtgccaacactcgacgctcggcaaaaataa

SEQ ID NO: 25092 - DNA, 579 bp, Zea mays
  Peptide Sequence Number=SeqID_66871
atggccagcgagaacgaaacctccctccagcgcaaggaaccaaggagaaccccaacacagaggtttgtttggatctccggccaagcagttcctggacaggctaactgggaagtggtagagcttcggtcggaggagtctggtctgctcgacctctggaggagaagcgagctgaaatctcaggagctcgcttgcttgcaagctcgtgctggctgggaaagaaggctaaataatgtgccagttcccagcaatgcccctgggaggaatctgttctccgcgcttttccgaaagcccagctggaaaccaactaacccgaccccggggcgaagctacctctgcgaatgggtggtcatggcaattggggttggggttggaagcgtgggatataaaaagcgatgtaggttcattagacatcatcccttaccaacgctttataaaaagcggtgtagtgtaggttcattgtatcttgaaggcacttggactgttatcagtacccgcctaccctaccattggacggagagctccaagccaacaacttgtaggaatatacacttaaacaagtgcttaacttttgctcggtaa

SEQ ID NO: 25093 - DNA, 454 bp, Zea mays
  Peptide Sequence Number=SeqID_66872
cggcgccgccccggaccacgacgaaggtctaccggagcacaacgctccggcccccgatgcccctaaactacacagagataggagctacacgatgctacaaactcgacgaaccagtgggaacaggtcttatcgagaatgatggcgaggaggctccgttccacgatgctcctatgatctgcggtggtgttttaacgccgatgagaaatcgctatcggaccgctgatacagcggccgcgacgaccaccgactacccaccttgtgctctgcgtttcatcatggatcggaagaagctcagggtgggcgctggttggggcaggcgcgagatgcccgacgaagagctcgcaacagacacggctgaagatgatctggaccacctggtcccacctggcagcgagggacatgggcgtgggcgtggcaaggatgctgtcctagcggccccactaggcagcggcag

SEQ ID NO: 25094 - DNA, 420 bp, Zea mays
  Peptide Sequence Number=SeqID_66873
atggccatggaagttcagggcaccaggcggccgcaggatgccggcgtgaaggtcaagttcatcgagacgcagttcattagctccgacgccgccagcttcaaggccgtcgtgcagcgcctcaccggcaagtccccagccgcctcgtcgcagacgactcagccgccggcgcatcctcagccacaaagcctgcgcccgtgccggccgaccttcattggcgctgggcagcagcagaccactggatggacagatctacaggctgccggcggctacctggcgacgatgccggcgccgaagcaagagcacctcgcggcggcgcctcggctggaggacatgaacgagctctgcgactttgcagacctgttctacaccaccgccgcgagcaatcggcccgacggcggcgccagcgtctttccttactga

SEQ ID NO: 25095 - DNA, 696 bp, Zea mays
  Peptide Sequence Number=SeqID_66874
atggaggtcgaccgcgcggctccaaagcacggcggacgaggaacacaacagtgctttaaggcggattcccgtgacagtgacttggcatgctggcgtaggggaggattgagacgctatggggcgagttcggcgagcccatggcgagctgagagcagtgttcgacgacccggcagctgcacggcgacaggggtgagcagagacagcgataccgcgcagcgaggtcgaggaaccgaggggcgctggacgaggagacgagcgccagggaggctggtgttgttacttggacagagttgccgaagagccgacaatgagacacgacgaggtggtcgcagagcgagcgtggctggtgagtgtagccggaggccggagctcggtccgagcgaacgccgaccaccagggaaacatggacaagcactggtgcggtccggtgatgcaaagaaccacagaccgagcgcagacagaggagggcagaaggaacaaggacgatggttgaacctagatgagctggaggaacgctggagaagcgaccatggaagatgcagggagctgggtggatgctacggactgggagaaagtgacgtgaggctgattcccaggcatccaatagaaaaaaggcggctggagattgaagccagggagagagacgcgtgggaattggacattgccgacctagggatttttgtcacgcagcagtag

SEQ ID NO: 25096 - DNA, 489 bp, Zea mays
  Peptide Sequence Number=SeqID_66875
atggcgaggcacgagttaacgtcgttgaggcttcggctgcacggggagaacgccggtgagcgcggatcagtggaaccagaggggttgggggcaaaccggaggatgtcccacactgctggcgaagaggcggagcttattaaggcaacagacatggcgaggggtcgatggcagctacagaacgagcggcggaccacagtgagcggcggcagagctccctgggcgtgcgcgcagaacgagagagagggcgagggtgctcggctgagggcgcaactgagcgggggatggtgggtgagtgtggatggggtccagaaaaggcttgggcgcgtaggggtgtggctgaaaaatgcgcggccatgggtgcgtccacggtggagagcgcaggtgattcggggggacggttccaagaggtggggcccacggaacagagagggagcgggcgagcgaacgagcctctacactgatgagctgggcccgcggatcagcgagtga

SEQ ID NO: 25097 - DNA, 273 bp, Zea mays
  Peptide Sequence Number=SeqID_66876
atgggcagaggcaagggatggccccgccacgctgactggaagcgcaagcgtcctccgagtccaccctcggaggacttcagggattcggagtactcggaggaggtttcctctgagtatgatcggtcacctgctctagcgtccctcgtggcatcatccgaggactcggacgactccatggggttgtccattgcggcgcgggcgtactgcgacaacggcgacgatggcaggtacgacgacgatgacaaggtcggtggcatattgctgctggcataa

SEQ ID NO: 25098 - DNA, 1107 bp, Zea mays
  Peptide Sequence Number=SeqID_66877
atggcaaggaccatgcttgatgagtacaagactctggaccggttttgggctaaggcaattaacaccgcctgctactccatcaaccggctctaccttcaccgaatcctcaagaagacatcatatgaactcctcactggtaaaaagcccaatgtctcaaattttagagtctttggtagcaaatgctttattcttgttaaaagaggtagaaaatctaaatttgctcctaaggctgtagaaggctttttacttggttatgactcaaacacaagggcatatagagtcttcaacaaatccactggattggttgaggtttcttgtgacattgtgtttgatgagactaacggctctcaagtagagcaagttgatcttgatgagctagatgatgaagaggctccatgcgtcgcactaaggaacatgtacattggggatgtgtatcctaaggaatccgaagagcctacacaagcacaagatcaaccatcatcctcaaatcaatcatctccaccaacccaaaatgaggatcaggctcaagacaatggagaagaagatcaagaaaatgagccacctcaagagaaggacaatgatcaagggggagatgacaatgatcaagacaaggaagatgatcaagaagaacagggtcaaagaccgccacacccaagagtccaagcgatacaaatagatcaccccgtgaactccatcctcggcgatattcataagggggtaacaactcgatctcgtgtcgcacatttttgtgaacattactcttttgtgtcttctattgagccatacagggtagaagatgccttaagagattcggattgggtgttggcaatgcaagagaaactgaacaacttcacgaggaatgaggtatggcatcttgttccacgtcctaaccaaaatgttgtaggaaccaagtgggtattccgcaacaagcaagatgagcatggtgtggtgacaaggaacaaagcccgacttgtggccaagggttattcacaagtcgaaggtttggattttggtgaaacctatgcacccgtagctaggcttgagtcaattcgcatattacttgcctatgctacttacatggctttaagctctatcaaatggacgtga

SEQ ID NO: 25099 - DNA, 489 bp, Zea mays
  Peptide Sequence Number=SeqID_66878
atgggaagtctgtacagaagcactgacaatctgcacacaggggatgtccaaaggtcaaaggcgttctccagcggccgggcgcggactgtccggctccagggccggaccgtccgctggctctttttggtgccaaacaacacgaaaaatggagttctgaacctagcctttaccgttggtggaataccgaaaccccaaacaaacacaaacctaacatggacgcctcgcatcgccctctttgtcgagccgtcgcctttcacctacgtctccgtctacaagaaccgcttcgagaacgtctccagctacaagaggcgggatctaccttccttcctcgccaccataccggtctcgccttccataggagctgcccccaaatctgcgcccccaatcagcgctctacattccccctcatcctctccctcacgccgtgctcattcaatcttcaccagcacactgcgtttactattaaagagtgggaaaggggcaccatag

SEQ ID NO: 25100 - DNA, 249 bp, Zea mays
  Peptide Sequence Number=SeqID_66879
atgagtgtttcgccgccctcatgcgagttcttgagcgagagaacggtgccttgcttcgtttcacttggtggatctgatctgtcatggttggtctttgatttatcaaggatctgtttaatatctacacagttaggccttgcatacaagttggatgttccggaaaccaactcggagcacatcgacgccctcctaatcgggtataggtctggtgacatgccaggcaaacctcgaagccaggtcgtgtgctag

SEQ ID NO: 25101 - DNA, 294 bp, Zea mays
  Peptide Sequence Number=SeqID_66880
atgccccttataaaaacttacaacattgactcagacatttatggactaaaaggtcattctatctttaagtcgggcctacaaggcaccgtgacacgcagaagaataaggccagtccaggtgaccgaccccaaagagataaaaaggaatacatcactgaagagtaggttcggcatgtgcagcatcagtggccagcatacgaacacctactcaagaattatgagtaccagtacaggcaacatcgccaacatgaacctgagtatgaagattatgaacatcatactgggaagcgcttga

SEQ ID NO: 25102 - DNA, 237 bp, Zea mays
  Peptide Sequence Number=SeqID_66881
atggagcctgggactggcgcctgcgtggtgccgtggagcctgggactggcgctggccgactgcgcgcgcgcggtgcctgcgtggtgcctgtgcggttgctgcttgctggcctactgggagcctgggaggaggaggatgccatcggccgcgctgggagctagggtttcgacttgcctgggactgggaggaccggaggaggacgccctcggccgcctgggaggctgggacagggagtag

SEQ ID NO: 25103 - DNA, 507 bp, Zea mays
  Peptide Sequence Number=SeqID_66882
atgccgccacaaccaaaccgtgcaaatatggtttttggagaatggaccaagtcttatgaggtccctacgccaaaaaagagtgtaaagaatgcagttttgctttgggaaccaaaaccagacaagcgtaggcctggggaggggagtgttgatgttcttcagaagtacccggtgccaaagtgttcattatggtttatgaaattttcatgtgatttttactccaaccagatggcaataggcaacaataaaggcgagatctatgtctgggaagtgcagtccagcccgcccgtcttaattgaccggctgtgcaaccaggaatgcaagtcgccgataaggcagaccgcagtgtcattcgacggaagcacgatccttggagccgccgacgacggcgcgatctggcggtgggacgaagtggaccctgctgcttccagctccaaacctgatcaagctgctgcgcccgccgccggtgtcggtgccggtgccggtgccgacgccgacgccgacgcctga

SEQ ID NO: 25104 - DNA, 109 bp, Zea mays
  Peptide Sequence Number=SeqID_66883
atggatcaaccaatgggcgcagatcgacggggtgatcaagatatggcggcgacggggctctccttcacagagagatctagccctcagcccgagcggtcccagggagacg

SEQ ID NO: 25105 - DNA, 453 bp, Zea mays
  Peptide Sequence Number=SeqID_66884
atgtcccacattccgggtgtctcccatgtgagtggagcggtcaggacagtcgtcggtgatctaggtcgactcagtcgggtaggtgacatggatagaggagtccgtcatgataagggtgcagcctcagtcggtcgggccacgagtgttgctatggtcttgggcccacccaacacgggcgcaatcctgcgcgggcggaagttggttgaagtcttcgcgccttcgagtttgttggagcagttctcactgaggtcagctaggggttccccatgtgatgtttttgagcaggacgacattgttgactacgactcgatgtcttcgtcattctggatcaagctcatccggcctagttgtgaccgagggcatgtcttgataggaaaaccatcgggagtcccatcaggtggcccatggggtgtttctgtgctcccacctgaggttggcctcggcaccgaataa

SEQ ID NO: 25106 - DNA, 255 bp, Zea mays
  Peptide Sequence Number=SeqID_66885
atgaaggtgtcagaattcatgaggttaactcagggcacgcaatcaatgacagagtatctacatgctttgaacaatctgtcacggccaatgatacctggagcaagatttcgccctcctccaaagaagaagaatcagcaacagggattcatgggtcagaaagcatttaaggtggccctaccatgtgcaaaggctggaccaggaagttcaacgagtggtacagctcaagtgaagggaccatgctacaactgtggatag

SEQ ID NO: 25107 - DNA, 795 bp, Zea mays
  Peptide Sequence Number=SeqID_66886
atggcggcgcggaacatccttcgcggtgcggcatgcggccaccgcttcctcgtgcccgtcccctcaggcgctcttgctggttctggaagccggagcatcggcgctgtcgctcagggccttcgtcattacgcagcagacgaagcagtgggaaacttggaactgcatgcacccaaggcaaaacgtcggtcatatatcccaacgaaaaatggaacagccatgatgcttccgctccatattcattacgaagatgtactacgtcaggatctgttgctcaaacagaatcatgccaatatcatgcaagttccagggttgtttgaggtcaaattagcaccaaaagctggctctgatctcaagatcccaattgggaaaatggccatggaggttttgagtggtcagagattcaaagaggcaaaaattgaccctttcgccaaagcaagaaagtcttctcgaaccaatccatttattggggccgacaaggacggtagcactgtcttcgcgcaaccaaccgttcttcgagggcatgcaatgtacaactttttggtgaggatgctgacagtgatgtccatgttaaattctcgggccgacattcgggagaacactgtgaagttcttcatggaaacggagttctgtgagttctctccagaattggaagaccatttcgagatatttgagcacatccgagttgctgcccaactgaaccttcagttggctgttgatgtcaaaaatgattttggaaatttggtgcttcgtgctctaggagtgcgcaatgtcgcagccttctgttttgtagactga

SEQ ID NO: 25108 - DNA, 242 bp, Zea mays
  Peptide Sequence Number=SeqID_66887
atggcgccaccgctgccgctgccgctgctgcggtggctgctcctggcggcagcggtcgccgcgaccgtggcgcagccgcagccgcagccgctggcgtcgcggacggacctggcggcgctgtacagcctgcgcgcctcgctggggctgcgcgcgcgggactggccgctcaggcccttcccttcgcgcgctgggcgggcgtggactgcgcggcgggccgaacgaattcaagctgattcatcaga

SEQ ID NO: 25109 - DNA, 1062 bp, Zea mays
  Peptide Sequence Number=SeqID_66888
atggagacgccatcgagcgcggctactccacggcgctgggcgcttaccggctcttcgccggccaggtccgcccggggtccggacggcgcgccaggggtgctgctcaacgaccacggcgcccgcctcgtggaggcgtccgtggacgcgcgcctcgccgacatcgcccccacgaagccgccccccgccgtgctgcggctgcacccggacctcgacatcgtggaggtggtgcaggtgcagctcacgcggttcgcgtgcggctcgctcgccgtgggcttcaccgccaaccccgccgtggcggacggccacgccaccagcgacttcctcgtcgcctgggaccgcgccgcgcgcgggctccccgtcggcccgtcgccgccggtccacttcccgccgcgccacgacccgccgcgcgccgggttcgagcaccgcggcgtggagtactacaggcccgcgccgtcgttggcccacggccacgtccacggcgacactacccagcacagcatcgtggtccacaaggctcacttcaccaaggacttcgtggcggggctccgcgccagggcgtccgaaggccgtggccgtcccttcagccggttcgagacgatcctcgcccacgtctggcgcaccatgacgcgcgcgcgcgggctgggcagcaacccgctccagatctccaccatccgcatctccgtggacggccggccgcgcctcgcggcggcgccggcaggctacttcgggaacctggtcctctgggcgttcccgcgcgccacggtggggagcctcctcggccggccgctgaagcacgcggcgcaggcgatccacgacgccgtggcgcgggtggacggggcctacgacttccagtcgttcgtcgacttcgcgggctccggcacggtggagaaggaagggctggagacgacggcccctgctcaaggaggaagggcctacttccccacggagggcatgctgttactggtgccgtcctacatcggcgacggcagcatcgacgccatcgtgccggtgttcgagcacaacctggatgcgttcaagcagtgctgctactccatggagtag

SEQ ID NO: 25110 - DNA, 1179 bp, Zea mays
  Peptide Sequence Number=SeqID_66889
atggaggagaaagtgctgagctccaagctcgtgaaaccgtcctacccggcgggcgcgccgcggccggacaccacggagcacgtgccgtcgtcggtgttcgacaaggccacgtaccacatgcagatggccatcatctacgccttctctccgccggtcccgtccccagacgccatcgagcgcggcctcgccgcggtgctgggcgcctaccggctcttcgccggccaggtccgcccgggcccggacggcgcgccaggggtgctgctcaacgaccacggcgcccgcctcgtggaggcgtccgtggacgcgcgcctcgccgacatcgcccccacgaagccgtcccccgccgtgctgcggctgcacccggacctagacggcagcgacatcgaggagccagtggtgcaggtgcagctcacgcggttcgcgtgcggctcgctcgccgtgggcttcaccgccaaccacgccgtggcggacggccacgccaccagcgacttcctcgtcgcctggggccgcgccgcgcgcgggctccccgtcggcccgtcgccgccggctcacttcaccaaggacttcgtggcggggctccgcgccagggcgtccgaaggccgtggccgtcccttcagccggttcgagacgatcctcgcccacgtctggcgcaccatgacgcgcgcgcgcgggctgggcagcaacccgctccagacctccaccatccgcatctccgtggacgggaggccgcgcctcgcggcggcgccggcagactacttcgggaacctggtcctctgggcgttcccgcgcgccacggtggggagcctcctcggccggccgctgaagcacgcggcgcaggtgatccacgacgccgtggcgcgggtggacggcgcctacttccagtcgttcgtcgacttcgcgggctccggcgcggtggagaaggaagggctggagacgacagccctgctcaaggacgtgctgtgcccggacctggaggtggacagctggctcaccttcccgttctacgagctggacttgggcgccggcaacccgagctacttcatgccgtcctacttccccacggagggcatgctgttcctggtgccttcgtacctgggcgacggcagcgtcgacgccttcgtgccgatgttcgagcaaaacctggaggcgttcaagcagtgctgctactccatggagtag

SEQ ID NO: 25111 - DNA, 1209 bp, Zea mays
  Peptide Sequence Number=SeqID_66890
atgttcttcgacgggtcactgatgaagacaggagcgggcgcaggcctgctcttcatctcgcccctcataaagcatctacgctacgtgctacgcctccacttcccggcgtccaacaatgtggttgagtacaaggccctggtcaacgggttgcgcatcgccatcgagttaggggtccgacgcctcgacgctcgcggtgactcgcagctcgtcatcgaccaagtcatgaagaactcccactaccgcgacccgaagatggaggcctactgcgatgaggttcggcgcctggaagacaagttctacgggctcgagctcaaccacatcgcccggcgctacaacgagactgcggacgagctggctaaaaatagcctcgaggcgaacaacggtttctactggccgacggcggtggctgacgccactagaatcgtccgcacctgcgaagggtgtcagttctacgcaaggcagacccacctgcctgctcaggccctgcagaccatacccatcacctggccttttgctgtgtggggtctggacctcgtcggccccttgcagaaggcacccgtgggctacacgcacctattggtcgccatcgacaaattctccaagtggatcgaggtccgacccctaaacagcatcaggtccgagcaggcggtggcgttcttcaccaacatcatccatcacttcggggtcccgaactccatcatcaccgacaacggcacccagtttaccgacaggaagttcctggacttctgcgaggatcaccacatccgggtggactgggccgccgtggctcaccccatgacgaatgggcaagtagagcgcgccaacggcatgattctacaaggactcaagcctcggatctacaacgacctcaacaagttcagcaagcgatggatgaaggaactcccctcggtggtatggagtctgaggacgacaccgagccgagccacgggcttcacgccgttctttctagtctatggggccgaggccatcttgcccacagacttagaatacggttccccgaggacgagggcctatgctaaccaaagcaaccaagctaatcgagaagactcgctggaccagctggaagaggctcgggacaaggccttactacactcggcgcggtaccagcagtccctgcgacgctaccacgcccgaggggtccggtcccgagacctccaggtgggcgacctggtgcttcggctacgatag

SEQ ID NO: 25112 - DNA, 729 bp, Zea mays
  Peptide Sequence Number=SeqID_66891
atggcgcagctgccgcccaagatccccaccgtggcgccggcgtggccggagttcgggggcgggcaccagcagcagcgcagcccctccgtgggcacgttcctcgccgccgcgcccatgcagccgtcgtgggtggacgagttcctcgacttctccgccgccaagcgcggcgcgcaccgccgctccccgcagacgcaggccgcgcccgcgccggtggcgagctcgtcgtcgccgtccgaccacaacagcatcaacgacgagaagacggataggggcgacgccgaggaggcacagagcaagtgccacggcgccgccgccaccgccaccgcggtggatcctaagcgcgtcaagaggatcctggcgaaccggcagtccgcgcagcggtcgcgcgtgcgcaagctgcagtacatctcggagctggagcgcagcgtcacgtcgctccagacggaggtgtcggcgctgtccccgcgcgtggcgttcctcgaccaccagcgctcgctgctgacgctggggaacagccacctgaggcagcggatcgcggcgctcgcgcaggacaagatcttcaaagatgctcatcaggaggcactgaggaaggagatcgagaggctgaggcaaatctaccaccagcagagcctgaagagcggcagggagcccgacgcggccccgtcggtccgcgacgacaaggacatgatcggcagcgaggggaccgccgcgcccggcccgccctcgtga

SEQ ID NO: 25113 - DNA, 486 bp, Zea mays
  Peptide Sequence Number=SeqID_66892
atgcgacgtgggtgtggcccggtgctgtgctggtgcaggtgggggttgcggctctggctggctccctcccgctcccgcttctattggttggtctggtcgccttcaccacaaatcacaagctcacagttcgtttctgttgaaatcctcgcaggccggagccgagctggtggcctcgtgcgaattctggatgaattttgtaccacgaggttggctggcgcctggcgggcggcggtagtgcagtgcagtgcagtgcacgcggccgcccgattctcagtcgggcaagggacggcgtccaataatggcagtcgattcgcggcagctttcagctacagaacacctcgagctactgccctcgccgtttctcctgtctcgtctcctcatcaattgcaaatggttgatggtccaacggagacgacgcgcattcatggcgagcgctgtggcccaacctccaactgcgccagccgcgagagggtcttcagctcatga

SEQ ID NO: 25114 - DNA, 1500 bp, Zea mays
  Peptide Sequence Number=SeqID_66893
atggcggcgcagtctctgtccgtgcccgtgcccatgcccagctccttggacctccgcgcggcggcgccgttcctggttgccgcggtggctttgtacttcctgatggagcaggtgtcctaccaccggaagaaggggcccctgcccgggccggcgctcgtggtgccgttcctcggcagcgtagcgcacatgatccgcgacccgacggggttctgggacgcgcaggcggcgcgcgccaagcggtccggcgcgggcctcgccgccgacttcctggtggggcggttcgtggtgttcatccgcgactcggagctgtcccaccgcgtgttcgccaacgtccgccccgacgcgttccacctcatcggccaccccttcggcaagaagctgttcggcgaccacaacctcatctacatgttcggcgaggaccacaaggacctgcggcggcggatcgcgcccaacttcaccccgcgcgcgctgtccacctacgccgcgctccagcagcgcgtcatcctggcgcacctccggcggtggctcgaccggagcggcggcggcggtggcggggcgttccccatccgcgtgccctgccgcgacatgaacctggagacctcgcagacggtgttcgtggggccgtacctcgccggggaggcccggcggcggttcgagcgggactacaacctcttcaacgtcgggctcatggcgctgcccatcgacctgccctgcttcgcgttccggcgcgccagggagggcgtggcgcggctggtgcgcacgctgggcgagtgcgcgcggcagagcaaggcgcggatgcgcgccggcggcgagcccgagtgcctggtggacttctggatgcaggacacgctgcgggagatggacgaggcggcggcggcggggcgcccgccccccgcgcacaccgacgacgaggagatcggcgggttcatgttcgacttcctgttcgcggcgcaggacgcgtccacctcgtccctctgctgggcggtgtcggcgctggactcccacccggaggtgctggcccgcgtgcgcgccgaggtgtcggccgcctggtcgccggactccggcgagccgatgacggcggagacgatccaggggatgcggtacacgcaggcggtggcgcgcgaggtggtccggcaccggccccccgcgacgctggtgccgcacatcgcgggcgaggcgttccagctgacggagtggtacacggggttcccggacgcggaggcgttcgacccggagcgcttcttctcggaggcgcggcgggaggacgtggcgtacaggcgcaacttcctggcattcggcgccgggccgcaccagtgcgtggggcagcggtacgcgctgaaccacctcgtcctgttcatggcgctgttcgtgtcggtggtggacttccggcgggagaggacgcccgggtgcgacgacccggtgtacatgcccaccatcgtgcccaaggacggctgctccgtgtacctcaagcagcgatgcgccaagttgccgtcgttctga

SEQ ID NO: 25115 - DNA, 180 bp, Zea mays
  Peptide Sequence Number=SeqID_66894
atgacaaacaagcaagcttcgtacttatcacacaactgcaaggccgtcaaggatgtggtcgacgaagattatacctgcattcatgtgcctttcttgcaacacatgactgttattggagaggcatacagcaggaaccctccaaaaggcttcgccaatgaagttgtatggacagatatataa

SEQ ID NO: 25116 - DNA, 1140 bp, Zea mays
  Peptide Sequence Number=SeqID_66895
atgggttggccggtgcgcgtgcggagcccctcggtgctgcagtccaagctgctgtgcctgtccctgctctacctcctcaccacgctgccgctcgcgctctacgtctccttcaccgactccggccgccgccgccgctgcctccagcccgtcccctccccgcccaagccgctcttccagtacccggccgggtacggcgagcacaggcacgccctgcccacctcgcgcgcgctctgctccaaccccgtcgccttcgcagactacaagactgctttggaagagatccatggcctctgccgcgacacctcggcgtcccctgcgttgcggtaccagagcggcaggagggccacgtttgcagggaacttgtcgacccaggaacggagatccttcttcaaccacactgatgaccaagtggcggttccctgtgggttcttccgtgaatttcccgtcccagaacctgcacaaatgatacgcaacggcttttgctgtcgcgcgcggtgcagatcgcaaagaacgtcactaatgagtgcttttagcgttgacggcttccagacagactggccatggagaagtgcagggggcgtggtggtggcgtcggcgatcatgaacgaccacgacaaggtccgtcagcccaggggcctgggcgccgagacgctacgcgcggcgtgcttcttcctgttcatcgacgacgccacccgcgcggccctcgcgcggcagggcgtcctgccggcgcgcggcggcggcggccacaccacggtcggcgcgtggcgcgtggtgacggtgggtcgtcgtcgcgccggcggcggcgggctcccctacgaggaccccgcgatgaacggcgtcgtggccaagcacctgctgcaccggctgttcccgggcgccaggttcagcgtgtgggtggacggcaaggtgcagctcacggtggacccggtgctgctggtgcacgcgctcctggtccgcgagcgcgccgacgtggccgtgtccaggcaccccttcaaccggcacaccatggaaggaggccatcgcgacggcgcggtggcgcaagtgccgcgacgtggacgccgtcagggcgcagatggagacatactgcggcaacggcctgcgcccatggtcccccagcaagcttccctatccgtcgggtaa

SEQ ID NO: 25117 - DNA, 372 bp, Zea mays
  Peptide Sequence Number=SeqID_66896
atggccattctacatgctgctgtctatcccatgctgcctgcagatgtgccggacacggcggtcatcatccggaggcacggcgtggccagcgacctcttctcctgcctgctgttcaatgagctggaggcgttcagcccgcgggaccagctcgccttcgcctacgtcagggaccagatgagccccaagctgagcatcaacatgttcgaggtcgaggtgttcgagcagatcgccgtcgagtaccggcacaacctcaagcctggccgagggaagcggcagcaggggggcactaggatggcgtcctcgagagacatcgccgggagcagctgcgaagagtaccttcaccagatgtggggggagtctgctgctgagtaa

SEQ ID NO: 25118 - DNA, 1863 bp, Zea mays
  Peptide Sequence Number=SeqID_66897
atggagcccgcggagaacgacacgtcctcgccgcctgagtatggcgcaggcaaggccgcggcgacggtaccggcgaggagctactggcggtggcgcagggacgacttcttcccggagccgtcgttcgcgagctggggcgcgtaccggcgggcgctgcgcgagacgccggcccgcctccgcgaccgcctcgcggggcggtccaccgacgccgcggagctgggcgcgctgcgccggcgcagcgagcacgagatgcggcggtgcctgacgtggtgggacctgacctggttcggcttcgggtccgtcatcggcgccggcatcttcgtgctgacggggcaggaggcgcgcgaccacgcgggcccagccatcgtgctctcctacgtcgcctcgggcctctccgccatgctgtccgtcttctgctacaccgagttcgccgtggagatccccgtggccggcggctccttcgcgtacctgcgcgtcgagctcggcgacgccgcggccttcgtcgccgccgccaacctcatcctcgagagcgtcatcggcacggcggccgtggcgcggtcctggacctcgtacctggcgtcgctcgtcaacaggcccgccagcgcgctgcggatccacgcgccggggctcgcgggcgggtacgacgagctggaccccatcgcggtgctcgtcatcgccgtcaccgccacgctggccatgctcaccgccaagggcacctcgcgcgtcaactgggtggcgtccgccgtgcacgtgctcgtcatcgccttcgtcatcgtggccgggttcgcgcacgccgacgcggccaacctgagacccttcatgccgcaaggcgtgccgggcgtgttccgggcggccgccatcgtgtacttcgcctacggcgggttcgacaacatcgccaccatggcggaggagaccaggaacccgtcgcgggacatcccgctgggcctgctgggttccatgaccgccatcacggccatctactgcgtgatggcgctggtgctgagcatgatgcagccgtacacggccatcgaccgcagcgccgcctactcggtggcgttcgccagcgtggggatgcggtgggcgcagtacgtggtggcgctgggcgcgctcaaggggatgaccacggtgctgctggtgggcgcgctggggcaggcgcgctacaccacgcacatcgcgcgcagccacatcatcccgcccgtgttcgcgctcgtgcaccccaggaccggcacccccgtgcacgccaccgcgctcatcgccgtctgcagcgcctgcatcgcgctcttctccagcctcgacgtcctcgccagcctgctctccgtcagcacgctcttcatcttcatgatgatggccacggcgctcctcgtccggcgctactacgtgcggggcgtgacgagccggacgcacgcgctgcggctcacggcgctgctgctgctcatcatcgcctcgtccatcggcatcgccgcgtgctggggcacgtcgccggagcggtggcagggctacgtggtgctggtgccggcgtgggcggccggcacgctgggcatccagctgctggtgcccgcggcgcgggcgcccaaggtgtggggcgtgccgctcgtgccgtggctgccctcgctgtccatcgccaccaacctcttcctcatgggctcgctcggcaaggacgccttcatccgcttcggcgtctgcaccgccgtcatgctcgtctactacgtcctcgtcggcctccacgccacctacgacgtcgcgcacggggcgtgcggttgggaggaagaagacgacggggacgcggccgccgccgatgaagacaagaaggttgttgccgcggcagacgtggagaaggctgatgcggcaggcggtacccgttaa

SEQ ID NO: 25119 - DNA, 477 bp, Zea mays
  Peptide Sequence Number=SeqID_66898
atgtcgtggatctacgcggcgctgcggtgtagcgtggagcgtgcgattcccaagccatcgaaagtttttgtgtacatgatgttgagtccactccctccatccatgaggactttggagagacgctatgggtcgacgattgcttcgacgataaggggggccttcagccatgaggggcatggcgagccggaggactctgccgcgtacaccccttggttgctagactcatgggggtgcttgctgccgcctcactgcaaaagcaagtcaaccgaggcattgcttgagagtggggacacgtttccaatggcgttgcctcttcagtctgctcctggtggagcgccccggcgcctcactcgcgacgacccgcagattggggccagcgaggcgaaactctctaggggagttggcgaggaaatggagggagctgaacttgatgctgctgccagggcgaaaatcccatctctggcagatgctgattag

SEQ ID NO: 25120 - DNA, 237 bp, Zea mays
  Peptide Sequence Number=SeqID_66899
atgaagccgtggaaggagacttccaggagttcctggactacgacgagttctaggcgtgggttagcggcaacccccagtcggctgcctgtgaaggccgcgtttatctacgtttcttttccgcactttgatttattgaggaaaacacttggagaaatatcggtggaatatttgggcagtatttctggaaagaacttgaagggatatgttggtgacttgctctcaaatgctttggcttaa

SEQ ID NO: 25121 - DNA, 120 bp, Zea mays
  Peptide Sequence Number=SeqID_66900
atgacgaaggtcgatgcttgccgaaggtggtcgaaaaaggattcaccggagtgtaccttcggcttgaagggagataaagagtacaagcgtgacgcaaaagcaaatgccaagtcagcgtga

SEQ ID NO: 25122 - DNA, 249 bp, Zea mays
  Peptide Sequence Number=SeqID_66901
atgaccattgcctcgtcgtcgtcggtgtgcaaggacaacgatgacgacacctccttcttcgacatcgaggttgcagtgtcccccaacgagagcgccgcatcagacgtcgaggaggagcgggttttgtttctacaaagactacaagaggaaaaggagaacgaaagcggcgtgtgtcatgatggtgtcatgcggcaccggctggccataccgccgcggcgtaccaatgatgggattatggaatggaggtaa

SEQ ID NO: 25123 - DNA, 786 bp, Zea mays
  Peptide Sequence Number=SeqID_66902
atggcgatcgaccacgagtccccgttcaaggagctccgcctcaagaaccgaaggatcatgggcggcggcggccctgaccctgagccggaggaggaggaggaggagggcgtcacggcggcgtacgcggagcggtggccgcggtggctgcagccgctgctgtccgcgcgcttcttcgcgcagtgcaggacgcacagcgactccaaccgcagcggcgaatgcaacatgttctgcctggactgctcggccgccgggggcacgggcacgggcgcgggcgcgctctgctcgctgtgcctggcgcagcacgggcaccgcgaccaccacaccatccagatccggcgctcctcctaccacgacgtcatccgcgtctcggacatccagcgcttcatggacatcgccggcgtgcagacctacgtcatcaacagcgcccgcgtcgtcttcctcaacgagcggccgcagcagcagaagccgggtggcggcaaggccgcgtcgtcgtcgtcggcctccgccaacctctgcgaggtctgcgcccgcagcctcctcgacaacttccgcttctgctccctcggctgcaaggtcgtcggctgctcccccgacgccgccaaggccaggaactggctcctccgggccgccgacggcgacggttccaccacatcctcctcggccccgcgcaacgccgacaggaagctgagcttcacgccgcccacgccgcagccgaccctgccgacgaagcgccgcaagggcatcccgcaccgcgccccgttcggcagcctcatcgtcgagtactag

SEQ ID NO: 25124 - DNA, 420 bp, Zea mays
  Peptide Sequence Number=SeqID_66903
atgggcaaggacaaaaagggccaaggttcgccgcgacgctccggcgacaagcggaagcacgagctgagtcctccctcggaggacttcggtgattctgagtactcggaggaggagttttcctccgagtccgaggggtcaccgaaacgattcccaggggatagctgccgagatgtggacgtacatctgaaccgtcgagcgcgccggctcgagggctcggatgagtcggaggtctcctcggacgaggagaactcttctgactcgtccgaggaaggaagcggtggtgatggcgacgacgaaggcgacggcagtggcggcgacggcagtggcggtggtggcgacgatggcaatgatagtggtggcaagggcagcaacggcaacggcaacggcagcaagatcagtggcaaagcgccactggcttaa

SEQ ID NO: 25125 - DNA, 402 bp, Zea mays
  Peptide Sequence Number=SeqID_66904
atgacaaggaactatgctggttgcatctcccaatggttgaaccatgaagaacaggaaacatgcttagctgctaaagatgttatgtcgtttgatctacttaagaagagtctaatgtatctattgaacgcgatgggagttcgtatccgaaaagtgtatgatgaggaatggtcctacatttctgttggatggtccttaccaaacacagatcagaaaaatcttgcatttggtgctacaacaagcatgatctatacaggagcaagaggtggaagtgtccagcgctatatctgcttcggcgtcgagctgctcctgtgcgtgacctgcaagtgcgacgtccacaaggagtttagcttcaaccaccgtgtcagatcaggttttgccttacaattcactgtacaaggttaa

SEQ ID NO: 25126 - DNA, 1212 bp, Zea mays
  Peptide Sequence Number=SeqID_66905
atggcgcagccagaaaaaggcagcctcctcccccaacccaagtctctctctctctcccaaaccaaaagaaggcttccacttccagctgcagcggagcatcgccagttcagagttcaccaccacgcctttgacctccagcccatagcccaatcccgcaagcatccatccacgcccaccgcacccgctataaaatctccccctctgctcccgattcgccacctaaaggaggcgcctttccccaaatccaccaccaccgagaaacaaccgcaggaaatccgctcggccctcggctccggtcactctgttgcggccacgatgaaagagggcagacccggcgccggcgactacattgccagcctgctaagctcgtcgccgaggctcgacttcggcggggaggaggaggaggactgcctggacaggttctgcggcgacccggggttcgcggctcgcgcggcgcggctgtccagcttcagcgggcagcgcttcgccgtcaccgcgggcctcttcgggctgcccccgccgctgcccgccgcgagcggcggcggcgagttcgccgggtcccgggaggcgtcgtcggtgtcggacccggcgtcggcgatgaaggacgccaatgccaagaagcggaaggcgcccgcggcggcggcggccaagggcaaaggcagggagccatctgcgcaggggagccgaagggtccggacgccaagaggtgctgcaaggcggagggaggcgagggggaggagggggagccccgtgaagctgcccaagccggagcaggccggcagcgacagctccgtcgaggacggcggcgcgcagaaccagaagccgccgccgccggtgaagggaaagaatgccaagccggtggagcctcccagggactacgtccatgtccgggccaggagagggcaggctaccgacagccacagcctcgcagagagggtgagaagggagaggatcagccagaggatgaaggtccttcaggacctggtgccaggatgcaacaaggtgatcggcaaggcgctgatgctcgacgagatcataaactacgtgcagtcgctgcaacggcaggtcgagttcctctccatgaagctcgcaaccgtcaacccactggacctgagcaacctgcccacgctcctacaaaaagatgtaagcgtaagatttccccttgtgatcatgtcctcctgtgatggaccagtcctccaaacgagcatctag

SEQ ID NO: 25127 - DNA, 435 bp, Zea mays
  Peptide Sequence Number=SeqID_66906
atgggaggaagacgcgagcgccggaaagaagaagaagaagtggggcggaataactgtgagggaggtttaaacggccggataggtgcggtcacggtgggatgtgcgcggtcgccatgccgaagtcaccggcgaattttcagccgagcgcgccgtggaaatagtcgaggggaggaaaggatagagctgacggagtccgcgcactggatgaggacgaatccgaccagcgagtcccacttggaggtgatttccctcggagtaatcgatttcgggtgcgcggggttggagttcgtccacggactcaggccacccgcatgccccgagcggcccgcgcggagtgaagaagaccgacccgacaggttggtcccacgatgtagtgacaccgcgagcaaggaggctggaggagctgagggcccacgtgccagagggactaggtga

SEQ ID NO: 25128 - DNA, 309 bp, Zea mays
  Peptide Sequence Number=SeqID_66907
atgacggacggtctcggcaatggcacttcgattcgcgtccgtggtccgggaagcacaggggtgcgcatcgttggctatatagcccgaggactcggacccaagcgagatggacgtaatcaacaccgagatcaccggcgcacgctccgccatggccgggttctgttggaggaacggtctggccggccgggtccacatgccagtgacacaaacgggagacgcgagggggaggggcgatcccgaccacaaggccccacatggtggagacagttttcagatttttccaatgtatcaattgaaatccaaaggtga

SEQ ID NO: 25129 - DNA, 379 bp, Zea mays
  Peptide Sequence Number=SeqID_66908
atggggagtatgttcacttctaagaaaactggcaatctgtcagaagtgattaaagacactggtgaaaaagaagggtctgatggggatgtggaatttaatgaaagtgaagatgatttactcagttcacaagaattggatgttctagttaaagatatgggtgttgaggtcacaaactctcaggaggagatgacttctgaaaaagaagacacaggaaagcaggaaatggacacagatgagaaaaataagaaaaataaaggaaaaggagctgaacttatggaaggaaccaggaaaagtacaagattggaggcaaatgaagatatcaagataactgaaaaggctatctcaagggcggtagctaaagacgctttcctaaacaaag

SEQ ID NO: 25130 - DNA, 204 bp, Zea mays
  Peptide Sequence Number=SeqID_66909
atgacgtcgatggttctcagctccttacggaagcaaggaaacgtcagcaggaccccgggccgcaccgtcagctacgcttctacgaagctcaagcacttctctgacggccacgttagcacgtgtacagggctcaaggggatgtccagggccttcctgggggagagaggaagggcgaaggcaggcgagcagaggcaggcagagtag

SEQ ID NO: 25131 - DNA, 133 bp, Zea mays
  Peptide Sequence Number=SeqID_66910
gatgaggtggagtggaacccagcagagagctggcggatggcgtgcaacgggcccggccggcggccggcggccggcggggcagccgtggtgcggatggggccctgcgacggcgccctggacgagctatgcgact

SEQ ID NO: 25132 - DNA, 643 bp, Zea mays
  Peptide Sequence Number=SeqID_66911
ggtgatgatggcacctcctgttgacgtggccggtctgcgccctagattgggcgatgtggaagctcctccgaagtcgaggtcgagtctgtcttccgtggccgacatcgagttcgagcccctgggtcgggcgaggcggagaccgtcggctgaggccagggcggagtccgagccctggggtcgggcgaagcggagttcgtcgtcttctggggctgagcccaagtccgagccctgggtcgggcggagcggagttcgtcgtcttctggggctgagcccaagtccgagccctgggtcgggcggagcggacccgagtccgagccctgggtcgggcggagcggagttcgccgtcttccggggcttagcccgagtccgagccctgggtcgggcgaagcggagcttcctatggtgcctgtggccgggcctgactacctgtcagtctcactctgtcaagtggcaccgcagttggagcggcgcaggcggcgctgtctttctgtcaggctggtcagtggagcggcgaagtgacggcggtcacttcggctctgccggctgggaggcgcgcgtcaggataaagctttatgctgatgggggttaccagctgagaattaggagccttgagggtacccctaattatggtccccgacagtag

SEQ ID NO: 25133 - DNA, 288 bp, Zea mays
  Peptide Sequence Number=SeqID_66912
atggctgggcgattcctcgccgtcgcgggggatccgtgctccaccatggccagactggtcgtctcggcgcgcgtcggtgagaactctacctcatggtttgcggtatcctcctctacccgtagcaatatcgagattggagttatagtgaccaagtgcagttggggctgttggtcggcaatggcggccaccgcggtggcacaccccgccgtcggtggttcatcaggggggagagagaataggcaggttgtgccgtgggccgtccatccggatgtgggcggtggagattag

SEQ ID NO: 25134 - DNA, 330 bp, Zea mays
  Peptide Sequence Number=SeqID_66913
atgcccaggtgcccggcaatcaggagaaactatccacccaccgaccggggcattagcaccagtgcaccggtgatttccccaacgacggacccgctgtcttcctcctacggcgatgaagctctccccttctctcggtcacggcttgcgcatggtttttataggccaggaatcctacgaaagtcggaagcgcatgcctcaccaattgcaacaaccccggcgaattggtcggggaactcctggaatcgcggtgtgttcggtgcggcgacgccggatcgggcggcgtccaacggattcgagctgagcgagacggctgacagggctggcccatag

SEQ ID NO: 25135 - DNA, 1959 bp, Zea mays
  Peptide Sequence Number=SeqID_66914
atgctcttggggttcatcgtctccgagcggggcatcgaggccaacccggagaagatcgcggccatcaccagcatggggcccatcaaggacttgaaaggcgtacagagagtcacgggatgccttgcggctctgagccgcttcatctcgcgcctcggcgaaagaggcctgcctctgtaccgcctcttaaggaaggccgagtgcttcacttggacccctgaggctgacgaagccctcgggaacctgaaggcgctccttacaaacacgcccatcttggtgccccccgctgccggagaagccctcttgatctacgtcgccgcaaccactcaggtggttagcgccgcgattatggttgagagacgagaagaggggcatacattgcccgtccagaggccagtctacttcatcagcgaggtactgtccgagaccaagatccgctacccacaaattcagaagctgctgtacgcggtgatcttgacgcggcggaagttgcggcactactttgagtctcatccggtaactgtggtttcatccttccccttgggggagatcatccagtgccgagaggcctcgggtagaattgcaaagtgggcggtggaaatcatgggcgaagcgatctcgttcggccctcggaaggccatcaagtcccaggtcttggcggacttcgtggctgaatgggtcgacacccagctcccaatagttctgatccaaccggaactcttgaccatgttcttcgatgggtcgctgatgaagacaggagcaggcgcaggcctgctcttcatctcgcccctcgtgaagcacctacgctatgtgctacgcctctacttcctggcgtccaacaatatggctgagtacgaggctctggtcaacgggttgcgcatcgccatcgagctaggggttcgacgcctcgacgctcgcggtgactcgcaactcgtcatcgaccaagtcatgaagaactcccactgccacgacccgaagatggaagcctactgcgatgaggttcggcgcctggaagacaagttctacgggctcgagctcaatcacattgcccgacgctacaacgagactgcggacgagctggctaaaatagcctcgaggcgaacaacggttcccccggacgtcttctcccgagacctgcatcaaccctccgtcaagaccgacgacacgcccgagcccgagaaggcctcggccgagcctgaggcaccctcggctcagtccgaggtaccctcggctcggcccgaagcaccctcggcccaacctgaggcaccctcggctcagaccgaggtaccctcggctcggcccgaggcaccctcggcccagcccgaggcaccctcggttcggcccgaggtaccctcggcccccgatggtgaggcactacgcatcgaggaggagcgaagcggggtcacgcctaatcgaaactggcagaccccgtacctgcaatatctctaccgaggagagctacccctcgaccgagccgaagctcggcggttggcgcggcgcgccaagtcgttcgtcttgctgggagatgggaaggagctctaccaccgcagcccctcaggcatcctccagcgatgcatccccatcgccgaaggtcaggagctcctacaagagatacactcaggggcttgcggccatcacgcggcacctcgagcccttgttggaaacaccttccgacaaggtttctactggccgacggtgatggccgatgccactagaattgtccgcacctgcgaagggtgtaagttctacgcaaggcagacccacctgcccgctcaggccctgcagacgatacccatcacctggccttttgctgtgcggggtctggacctcgtcggccccttgcagaaggcacccgggggctacacgcacccctgggaagggccgttcgtcatcaccaaagttctgaagcccggaacgaacaagctggccgatagtcaaggcgaggtctacaccaacgcttag

SEQ ID NO: 25136 - DNA, 740 bp, Zea mays
  Peptide Sequence Number=SeqID_66915
atgcgcgaaaatccgttgacgggggtggaactgaccgcaagggtccacggcttagagaaagcgcaagagggtgtgtcgaagccaggtgggcccgagcatgcagaagagaaggcactggcatgtgggtcccggtcggtagaggcaccacagtgcacatacgcgaaactaggtgcgcggcgaggaactgacgagctggccccacatgtaggcgagcgacagaatggtagagtgtgggctgcgcgggggaaattccctagtgggccgaaatgggttccgaagcccagtcacttcgccctttcactgaccgacctgaaaggaaaacaacgccgctcgccccgctccgactgctgtgccacccaccggggtgagactgacaacagccgagttctgcctcgggcgcaacaggaagctccgcctcgcccgaccttaggcctcggcctcggaaggaggtctccgcctcgcccgaccccagggcttggcctcagcctcggcctcgggaggatcgcgtcctcgcccgaccccagcctcggcctcaggagaagtctccgcctcgcccgaccttgggctcggaccgaccgcgccatgggggatacatcattaccctaccccctagctagctcaggctacgagggaacaagaccggcgtcccatctggctcgccccggtaacaggcacttctccgacggccacgttatcgcatacccagggctcaagcacttctccgacaaccacgttggcat

SEQ ID NO: 25137 - DNA, 294 bp, Zea mays
  Peptide Sequence Number=SeqID_66916
atgtcgggagcatctgccaagagggagattagggccggcgataagtccgcaagctcgggggagaacgcactcaagggagtccgcccacaagcacaaggaggaatcctcttcctccatcaagtctcaacgaaagggaaagatcgaattggagaagagatggctaagttcagccaaggtcagcgcagtctgggtgcaccggactgtccggtggtgcaccggacagtgtctggtgtgccagactggctctggcgaacttgctgctctcgggagttcgacggcggtgtacggctataa

SEQ ID NO: 25138 - DNA, 423 bp, Zea mays
  Peptide Sequence Number=SeqID_66917
atgggctgccgcaccactgtctttgcctcctctgtgatcaagatgtggagaatatacaacacattcttgtgtcttgtgtcttctcccgggaggcagttgctcctcaacctgatgtgcgaaactttctctgcctggtggtgttgggcagccagcagtttgccaaaggagaagacgaaagggtttaattccctagttatccttgtggcctggactctttggaagcataggaatgcgtctatagctgaacttcttgacaatgcagtggatgagataagcaatggtgccacgttcataaaagttgataaaagcatcaatttgaaagacaatagctcaatgctagttttccaagatgatggaggcggcatggatcctgaaggtgtccgtcgatgcatgagtttaggattctcaaccaagaaaatctaa

SEQ ID NO: 25139 - DNA, 195 bp, Zea mays
  Peptide Sequence Number=SeqID_66918
atgcagcaaggtatcaagagcgtcgtggaagtgacacccggggcatctctggctggggtgcaggggaaggtggcttctcagactccacctcctgctgaggcgagggggaagagtcctgctgctcgtggtcctgctcctggcgtcgacactcctgctcctcgtgcaggcgacgatgcagtctctccaggtgactag

SEQ ID NO: 25140 - DNA, 198 bp, Zea mays
  Peptide Sequence Number=SeqID_66919
atggcgtggggactggccggccaggcccagcggcagggttgcggaatggacgacagggatcggatggttcgtctcggttggttttccctgactgccagggatggcgccgcccgtgttcgtggcgacgagttcactggagatgaggggtgcgagcgctccagggttcctagggcgatggggatagcttgggaaggttag

SEQ ID NO: 25141 - DNA, 168 bp, Zea mays
  Peptide Sequence Number=SeqID_66920
gcggctgcatggattatacttgggatattctcgctcatcagacttcaagctgattaccttctcgttgttggagtttgcttgagcctcagcattgcaaatattattgggttcaccaaatgcaataaaggtgcacattctcctgtattgcatccaatgctaccttgttga

SEQ ID NO: 25142 - DNA, 288 bp, Zea mays
  Peptide Sequence Number=SeqID_66921
atggagagtcatgatctccgggcagaaagagaatcacagcttgtgggtggcaatgagaatgatagttttggtattgactctggtgatggtaagtggtattcttttcgtttggaaagggttgtccgcattgcaaccactgctcaggagaagatgaagccgtggaaggagacttccaggagttccaaaattacgacgagttctaggtgtgggttagcgacaacccccagtcggttgcctgtgaaggccgcgtgtatctacgtttcttttccgcactttgattattgttaa

SEQ ID NO: 25143 - DNA, 231 bp, Zea mays
  Peptide Sequence Number=SeqID_66922
atgggggaatggttgtggccaggtttgttaatggtgttgcggctgcaagcgtcgtgtggcatctgtcgcgaccaagcattacgagacagtctcctccagcgctttgcactgctcctatcaagctttctaatttctgttgtgattggtttggtcactcttattggcagtctagaaatgccaaaggatgacatatggcttgtcacagctatcctatctggtctcattgaataa

SEQ ID NO: 25144 - DNA, 189 bp, Zea mays
  Peptide Sequence Number=SeqID_66923
atgacgcgtgggcccggaactccgacagctcacatctccctcatgctcgcgcggtacgcccaggtccgccgccgcgtttgccggaggatctccgccacgaatggagcacaggaacggtggtcgacggctgaggcgaaggtcatgcgggctcgtgctgatggaccgatagcgttgaagggcgagtgctag

SEQ ID NO: 25145 - DNA, 849 bp, Zea mays
  Peptide Sequence Number=SeqID_66924
atgggcgacgtcgctgccggcgctgccgccctgagtccacccccgatgaccaaggagaccaacctcttcatgcaaatcgtcgtcaacccggacggcacggtcacgcgccccgaggtccccctcgtcccggcctcagccgtagccgctggcggcgtcgtctccagggacgtgcccctcgacgcctccgccggcacgtacctccgcctctacctgcccgacctgtcctccgcgccggccgccaagctccccgtcgtcctctacttccacggcggcggcttcgtgatcctctccgccgccaccgtattctaccacggccactgcgaggcgatggccgccgcggtgcccgccatcgtggcgtccctcgacagctcgggcggcaacatggcgttcttcgcggcgctccggaccgggggcctcgacctgggccccgccacggtgcgcggcctcctgctgcaccagccctacctcggcggcgtcgaccggacgccctcggaggccaggtccgtcgacgacgccatgctgccgctggaggccaacgacaggctctggagcctcgcgctgcccctgggcgccgaccgggaccacgagttctgcaaccccgtcaaggccatggcgccggaggcccttgccggcctgccgcgctgcctggtcaccggcaacttgggcgacccgctgatcgacaggcagcgggagttcgctcggtggctgcaggaccgcggcggcgcgaaggcggaggtcgtcgtgaagttggacgtcgcggggttccacgcgtcggagctgttcgtgccggagatcgccgaggtgctgttcgccgcgatgcgcgagttcgtgtacaccggcgacgcttga

SEQ ID NO: 25146 - DNA, 324 bp, Zea mays
  Peptide Sequence Number=SeqID_66925
atgagccaagtggaagaggatgcacaccaccaactcgccaaggttcaggaggagacgaatgagaaattcttagcacacttcacggtggatcaccaccagaagattgccaaacatggagagatcgagatcacatctctcctaccttcatctcaagtccccaatcccaggaatgtgccagcgcgcacggtcatgcgaagagtggatgacacatgggccctgcttgacagcttcttcatcctcgtcgagttcaaccgagactcaattctaggaatttattgtgatatcctgaccccagtggatggtgatatcctagctcagtgctga

SEQ ID NO: 25147 - DNA, 317 bp, Zea mays
  Peptide Sequence Number=SeqID_66926
caccggaactacaaggtcatttacatgctctacatgttccaattcttcctcgtcggtgttggcagcgatgagcctgggtttagctgctgcaatatatctgtgctcaaccttgattgtgatgacaatggtttggcacttacttgcggaatagctggttatgattaccagtctgttaggagatggacaacattcaagaggctgggttatggccttgtcgagtccaaacctatcctggcgaattttcagctctatgtgcagttactcgatcttattattgttgaaatagaagtgtgctccatttacaaagagctctacag

SEQ ID NO: 25148 - DNA, 375 bp, Zea mays
  Peptide Sequence Number=SeqID_66927
atgactaaggcttccccaagcacatctcatagaaaggctttgaaacggattatgaggtgtggagcacaggaacggtggtcgacggcagaggtgaaggtcatgcgggctcgtgctgatggaccggtagcagtgaagggcgagtgctgggtcttgaatgacggatcagagcagccagcgctacggatgacgggttttgctgagtttgggcctcaaaactcagcggtggcggttctggagggaaccagtggtggcacatggcgtgatcacggagggtgcgtcaaggcgaagcaacttcgtgtgaaggacgtggctgtggatcgaaaacctaggagttggtccatttcgcccccggtggagtggatagactctatgtaa

SEQ ID NO: 25149 - DNA, 1200 bp, Zea mays
  Peptide Sequence Number=SeqID_66928
atgacttcaccctcactaccccagagctctagcagtgacacaggaagatttagtggaagccagcaagaaacactgtcacaaccacaacaagagtatattaatgattcaaagccgatacaaatagatgatgatgagcctcagttagaggatgtggactttggtactaagaggaagcttacttctgttgtttggaaagatttcaaaaaagtcaaagtccgtgatgatgtcaaggctcaatgtctacattgccacaagcaacttggtgggaagagcattaatgggacaaaacatctccatgaccatttgaaaatatgcacactaagaaggatcaagctgatgggacagaacaaaacacttgcacaatcttctttaaggttaaattcacaggaaggagggaaaaaatctgtggaaaattacacctttgatccagaggttgctaggagagagcttgcttccatgattacattacatgagtatcctttatatattgttgaccatactagttttcgacggtttgtgagtgcacttcagccattattcaagatggtgactcgaaacacaattaggttcatatatgtgcctgctccacacacagctgaagttatttgcgaagagctttatgaagcattggtgggatggaatattgatgagaggatctcaactctaactcttgataattgtacagccaatgacaaggtaattcctgatttaatcaacaagattggtaaatcaaagttgatgttagaggggagcttgttgcatatgctttgtgctgcccacattcttaacttgattgttaaggatggtttagaggttattaagagttcaattgcatccatccgcgaaagtgttgcattttggatagccacacctaaaagagtagagaaatttgaagaaattgtgaagcatgtcaaagtcatagttaaccataagctaggtctcgattgcaaaactaggtggaattccacatacaaaatgcttagtattgcattaccttacaaggctatttttggccatgcaagaagggttgagaagctatttgattgtgctcctagtgagcaagaatggacctttgctagagaggtgcttgataggctcaagttgtttaatgatatcaccgaagtattttctggaacaaattatgtgactgccaatgttcagcttcttaaaatttgtgaggccaaagagcagattagatag

SEQ ID NO: 25150 - DNA, 474 bp, Zea mays
  Peptide Sequence Number=SeqID_66929
atggggggtgggggatggggctggcttgggctgcgcttcgtgaccgtggttccaatccagaaggtgacgatgatgattggtgagggcatgaggcgcatccggcgagcggtcgagagggcgcgcgtgtggccccacgtgtgctgccatttacgcactgcttgcattatcattcgcgacggtggaggacgtggcattggacacgacggggatcagccgcacatagaacggggtgcgggtcaagacgtgtctgggcggggccggagtgatggcggcagcggcagtggcagctcttgtgccaaccagacctccgccatggtcgtgtccgacgtgtcataccgcaacaccagtggcacgtcgatccacaccgatgccatcagtgctcgattcaatgcccaaaacgagtctgcttgctattctattccagggaaaaggtctccagttgtacaaatacaggctccattattctataagtaa

SEQ ID NO: 25151 - DNA, 426 bp, Zea mays
  Peptide Sequence Number=SeqID_66930
atgtctgcggcgggagctcaccagaggcgagggtgcgggcacgctgagggtcccagggtgacaggaatagctcagggaggtctgagggggtgcggcgagcacgagcgtgggcacagcaccatcgctgaggcaccggagggtggcgacaccgtggcgaagcggctcggcaacgatgctacctcactccgtgggaccgacctgtcggcgctgaccccatctgcgcactcgcaacttacctcgctgctccgcgagtctcgcttgccagaccggccgccccttcactcgtccgccctcgctgactggtgggtcccgtctgtcggagccttcccctccgaatcgcccgcgcacgacccgcgcgtcgctatggactccgcgcccacaacgcacgccgaggccgcgcccatccccaccctggcctttttctag

SEQ ID NO: 25152 - DNA, 633 bp, Zea mays
  Peptide Sequence Number=SeqID_66931
atgttctgtaatgtctgcaagacgggtgaaacgttcctggtgagagtgaggctgacagcagccaagtccggcctcgggcgccataggaagctccgcctcacccgaccccagggctcggcccccatctcggcctcagacaacgaactccgcttcgcccgacccccaaggctcggactcagcctcggctccggaagacgacgaactccgcttcgcccgaccccagggctcggactcagcctcggctctggaagacgacgaactccgcttcgcccgaccccagggctcggactcagcctcggctccggaagacgacgaactccgcttcgcccgaccccagggctcggactcagcctcggctccggaagacgacgaactccgcctcgcctgaccccagggctcggactcggcctcggctctgaaagacgacgtactccgcctcgcccgaccccagggctcggcctcggcctcggctccgaaagacgacgtaccctgcctcgctcgaccccagggctcggactcgacctcaacctcagaagacagattcgacctcgacctcggaggagcctccgcctcgcccgacccagggctcggaccgaccacgtcacaggggggccatcattaccctacccctag

SEQ ID NO: 25153 - DNA, 288 bp, Zea mays
  Peptide Sequence Number=SeqID_66932
atggctaaacataaaagcgacttagaaggattcaagttagatgtatacggaagtggtgcggactcgcaagaagttcaatccaccgccaggaggttagatttgagtctcaattttttcgagggaagggatcatgcttataattcactccatgggtacaaggttttcaaaaatctgagcattagtgatgtcctgtgcacaacaacagcagatgctcttgcaatggggaaattcgtgatctgcgtagaacatccatcaaatgagtttttacgcagtttatcagggacgtag

SEQ ID NO: 25154 - DNA, 312 bp, Zea mays
  Peptide Sequence Number=SeqID_66933
atggaaacggccacaagccacgggaaggctccatcaagggagtctggcggcaaaggaagggaggaatcacctccccgcgtcaagtcacatcagagtggcgacaagaagaaaaagatgaagaaagtggtctactacgaaaccgattcttcgtcaccctccacatccggctccgacgctgcgtccgtcacttctaagcgccatgagcgcaagaagtttagtaagatccccttacgctatccctgtgggggacagatatcccccgggtccaccagaaggataaaagacctcacgaaaggcccgtgggcccaataa

SEQ ID NO: 25155 - DNA, 358 bp, Zea mays
  Peptide Sequence Number=SeqID_66934
atggctgttcggctgccaggtgggacccctgtcagctatttcttctcgctggtaacaaaccccgcgcaattcgcgtctctgatgtccgatcttgttccatggctcgatgtgccggggcagggttgggcgtgcgcttgggattttggcaccaccggcgggattctcatggtggtctgtgccgtgggcacgtccgcctgtatggaacacggccgaccccaggcattggcttctggagaacgtggtccgtatggggtcagctatggcgccgccgcgccggaccctgttcacctccgtggttgcggccagtgtgggaagatgggcgagcgccgttggtatggcctggagcggctaggattag

SEQ ID NO: 25156 - DNA, 1335 bp, Zea mays
  Peptide Sequence Number=SeqID_66935
atggcggcggccgtcctagcgcccaagccgcctcctccgctgcctaccagggcctttccttcctcatccccctcgcggtttgcccctgccttcatctccccgcgtcatcccctgagaagattgctcctccgccccattccgtgcgcctcatcgccgtcttccgtcttgatgccgaacccggacctcgagactgagcctgcccacgatggagatggagatggagatgaggcgccgccggagtccaggccccgccgcatcgcccttttcgtcgagccgtctcccttcgcctacgtctccggctacaagaaccgcttccagaacttcatcaagtacctacgggagatgggcgacgaggtgattgtggtcaccacgcacgagggcgtgcctcaggaattccacggagccaagctaattggctcatggagcagcttcccttgcccctggtatcaaaaggttccgctgtcgctggccctcagtcctcgaatcatcgcagaagttgctagattcaagcctgacattattcacgcctcttcacctgggataatggtatttggcgcgcttatcatagcaaagttgctctgcgtccctctggtaatgtcataccacacccacgttccaattttcttgttcttgttaattgtaccatatatctctcaaacggtgcatatgtttccagccaataaaatacgcctttggaacaagggtgttgactcagaaagcttccatcctcgtttccgcaacatggaaatgcgttcaaggctaacagtcatggaccgacttccaggagcaaggattgcatttattggagacggaccattcagagctgagctcgagcagatgttctcaggtatgccggtggtgttcacgggcacgttgcaaggggaggagctatcacaggcctatgccagtggggatgtgtttgtgatgccttccgagtcagagacactggggtttgtggtgctggaggccatgtcatcaggagttccggtagtcggggctcgcgccggaggaatacctgatatcatacctgaggatcaggaggggaggaccagctttttgtacacaccaggggatgtggatgactgtgttggcaagatcaagcggctcctgtcgagcgaggaactgagggaggccatggggagagctgccaggaaggagatggagaagtttgactggcgagcggcgacgaggaagatccgcaacgagcagtacagtgctgcaatctggttctggcgcaagaagagggcacaggtgctgcggcccctccaatgggtgctgcggctgctgaggcggacaatgccaggagctgccgatgccgcagcgaagcaatcctag

SEQ ID NO: 25157 - DNA, 321 bp, Zea mays
  Peptide Sequence Number=SeqID_66936
atggaggacctggaagactacaactgtagtgcctacagctacagctacaactacagcacaactcctagcaagcagcatcagcagcaaccatcagcaagcagcaagcagcaacacgcaacaagcagcaagcagcagcacgcagctagcagcggcaagaaacaaacagtagcacgcagcaacaggaagcacgtagcagcaagcgttctactctatctctaccagagaaggcagctgcagcaccagcctaacaagagcgaaaacaagctatcaaataagcatgctgcacagagccacaaacatgtgtactgctcctatggttaa

SEQ ID NO: 25158 - DNA, 690 bp, Zea mays
  Peptide Sequence Number=SeqID_66937
atggatgtgctcgggcagccaggggagggtcgcggcgaggtgcggtccaacggacaagctccggtagccagcgacaggagctgtgtgctcagggccattcttgactgtttgagggcacaggcgtccaggtccaaccgtctacgggcacgtaggcacagtggcaggagcaggccgatcaagcgatcaccgatcgccaaggcagggcgggcaggcgctaagcgtaggcggcgcaaccaagatccaacttccagtccaagagagcagcgcggggtttgtgtaattgtgttcgatacgcagacacagtcttccagtgaaaaggctgacgagcaaggcagatgcctatgttttttggagggtgggggcccatgtcttgggggggcatggcacccctcgcaccccctaggtccgggcctgtgtgttgtgcgcgactgcgcggggctggttggctgcagcgtgtcgagcatagagctagcgactggtggccgccgagaagctggacaattggtggttatgggcgatatccgccgccggccgcggagtagggagacagacgcgcacaagcttggcgacttggcgtgcggggtgcacctgctgatagacccggctactagagaaattaggttttacacatctaagctgtgccgaaaagtcctgcaaaaactcttcatcaatttgagaggcgacttcgtg

SEQ ID NO: 25159 - DNA, 342 bp, Zea mays
  Peptide Sequence Number=SeqID_66938
atggacacatgtacatctgagcgagcaggaaacgcagccggtgcctgcagcctctcagacctcgccgtaacgcagaccgcggtgccctcgaaggcgaacgtctacgcggtgacggtggagaaccggtgcatctgcacacaggcgaacgtcaagctggcgtgcgatgggttcagctcctccgtggccgtcgacccgggcgtgctcagcgtggacggcaagctctgcaccctcaacggcgggcgccccatcggcatgggcccggagtacgccgtcaagttctcctacgcctcgccctcacagttcgccttcaagcccgtgtcgtcttccattgcctgctcctga

SEQ ID NO: 25160 - DNA, 546 bp, Zea mays
  Peptide Sequence Number=SeqID_66939
atggtccggacggtccgcgtcccggatagttcgtgggatagctccaatggtttcaaaggcagcttttacgtagtgaatctcagcggcggtgacaggatgcaggcgcgagaacacgtcagcaaccggtacggcgacaacggtggcacgagtagagggcggagatgcaacctgacaacgttgatgagcaagagtgggggctcgatcacgatgcaggcgcaagaacgcgtcagcaacaggtacggcgacaacggtggcacgagcaaagggcggagatgcaaccacacaacgttgatgagcaagggtgggggctcgatcacgatacagggcggtggtatttatagagaaagggcatgggcgcaggggtggccaaactactcgcaaacgttggggagcgttgcggtgtcgtgctcctgtccgcgtgggaacgacggctggagactagggccaaagccgacagtgggaccggggtgtcagcgagagccgaatcagctgcatctccgaacgatccaatgcaccggtgggaggttcaggtctaggctactctag

SEQ ID NO: 25161 - DNA, 399 bp, Zea mays
  Peptide Sequence Number=SeqID_66940
atgcccaaggtggctgcaaacagagtatgtggccacgaaggcattcgacacatacaccatgccacacgcaaggacgttcctgacgacctccgcgtgggtgcatgcgacgagtgggaggcagctcagagcaagacacgcccccacggtggagggatcgagcgaagaggcgagtggcggcaggagaaggttgaagaggttgagcgacggggatgggatggagaggagaaggtgatgggcgtaagcaagttggaggtgcgacgggtgcagcaaaatgagccgacacaagagggtgggtccgagggaagagaggtgtttgaaggtgataaggtggatgtgctggaggtggtgccagtggaggcggcagtcggaggtgtgaaccatgcccatgggaggtgctag

SEQ ID NO: 25162 - DNA, 141 bp, Zea mays
  Peptide Sequence Number=SeqID_66941
atggcgggggagaggtgcatgggccgcgcgggagaagaaactgccatgcatcctgttcaccacatgatcgatgaaatgcctcctttagatattgtttgggatgaggatttgttggatgcagagggcttgcaaggggtttag

SEQ ID NO: 25163 - DNA, 372 bp, Zea mays
  Peptide Sequence Number=SeqID_66942
atggtgtcgacaactactgcacatgaaccgttcgacgaaagtcctcttgcgaaggtgatctgggatgaggaatcgtatcatggttttgatccatatggtctagtgcaccagtgcaagctggcagtgttcaaggcaccaatgatgtccaagagtgatacacacaaagtgttcgatccactttcgagccaggttgtgtgggatgatgagttgctgcaaatttatgagccccaagatagttcacttaagctagtggctctggaagagtgtatgcagctagcaaatggtgaagagcatatgacagatgaaaagacacatcatattgatgagcttgctgccaaggatgggtctacttatgccagggactctccatga

SEQ ID NO: 25164 - DNA, 1087 bp, Zea mays
  Peptide Sequence Number=SeqID_66943
ccgaagccccagcgcgcgtggcccaccggggacctctccctggcacggcctagccggcgtctgtcgcggctccgctcgccccctaccacctgcgtgccgggcctactgagaagccgcgccccggcgcccccaactgcccgcgcgcaccagccgccgcagcagccacacccacgacgccgaatcaaagaaatcggtctcctttctcccctgctcaacccaaaactcctctctcgctcgacaccgtgcagcgaaaaccgaatcgtcgacttggagctcgcgcggagctcatctgcacccgttgaggtgaaccctccttctcctttcccctttccccctcccttcttctttgttgcagtgcgcttcctagcgttcgtcgtggttcgcggctcgcccatggcggccagcgcgactagcgcggtccgcggctcgcccatggcggccggcgtgtgcagcgcggtccgcagcttgcccggcacggcgtgcccgcggcatgtggccccagcctggcgtgcctgctgcctagcgcgcgcttcgtcgctgcgcgtggcccggcgtgcccgcggcgcggcctggcatggctacggcctggtgcgcacgcccccgtccccgcgcgatgaccctcggcctagcatggtgtggccttcagcgagcgcgcgacccctccccgccccggcttggtccctccctgcgcgcggaggcgcgcccgcccagccgtggtgtgcggccccctgcctcggccctgcgctcgcgcggcggctcagcgccctcagcgcggcagggcctcgcccctccccttgcgcccgtccgtggcttgcccgcggtggcgcgcggccgaagctcgcggcgcggtgcacgtcctacgcagctcggtgtgctaggcgcggccgtccgcggcgcgcgcagagcggctgctcgcggttggcccccgacgcgacctgctcgctgcgtgcggcgcgtggccctggcacgcgcggccagcttgacagcttgctcaaccaacgcgaccaagcgcgcggcaaccccatgcgcagaggcatgtggcgttgtggtgatgagaatgatggttttggtattgattatggtaatg

SEQ ID NO: 25165 - DNA, 153 bp, Zea mays
  Peptide Sequence Number=SeqID_66944
atgtcgcgcacgttcgacgactactatattgaggattgtggtgtcatcttggcgccagaggtgacgcagaggaggatcgacaataatgacctgttcgtcatcctcgccaccattaggcacaagagggctcatttaaatgtgttgggcacttaa

SEQ ID NO: 25166 - DNA, 789 bp, Zea mays
  Peptide Sequence Number=SeqID_66945
atgggcgccaaggagcgcggcggtggtgcggtgcgggctgttgcacgtggagccgtgggcgccgacaatggactcccagagcgtggcctctcagttcttcgccgtttcgctcttcccctacctcggcttcctctacttcatgaccaggtccaagaccgcgcccgggctcacgctctttcggtttcattcttcctcctagccttcgtcggcgccaccaagatttctctgctggtctttcttcctcgcgggggtaacgccgcggtccttgcccaggcgcttgacctggggctgaactgggagggattcggcatggaggacggcgtgttcgacgggcacggccgctgcgggcagctggtcagcaagctggcgagggaccacctccccttcatgatcctgagccagcggaacgcgctgctcctaggctccgacggcgacggcgacagggacggcccggccttcagcgacgcgtcgcccacggcgttgtcgtccacggacggcagccgcagcgggcggtcgtcgctggcgccggcgcagatgctggaggtgtggcgggaggcctgcgccaacgcgttcgagaccatggacagggagctcggggtccaagccagggtggactgtgacttcagcggcaccatgtccgtgtgcgccaccaagcagggggaggacctcatcgtcgccaacctcggtgactccagggccgtgctggcgaccgtgtcggagacgtgctacctgaaggccgtgcagctcaccatcgaccagaagcccaacgtgcctcgtgagtcctcctga

SEQ ID NO: 25167 - DNA, 789 bp, Zea mays
  Peptide Sequence Number=SeqID_66946
atggacggcggcggtgacaagagcgcgctggcctcggagctggcgcaggtgctggccatggttcgcgagctggaggcgcgcatggaccaggacccgctcccggcggccgccagggagctctgcgccgggctggcctcgtccgtcgaccggtccatccgcatcgctaggtcctgctgcgccgacttgccggacggcaatgccgccgcccagtccaagaggaggcaagtcgatcatcggaaggggacgccgtgcgtgaggaggcagctgcgggcggcgtcgctgcaggacgcggcggcgctggacgacgggctcagctggaggaagtacgggcagaaggacatcctgggcgccaagtaccccagggcctacttccggtgcacgcaccgccactcgcagggctgcctcgccaccaagcacgtgcagcgcgccgacggggacccgctgctgcacgacgtggtgtaccacggcgcgcacacctgcgtccaggccgcgcaccccggcgccaaccagctgcggcaggagctacagctgcagcacgggcacagcgcccaggacaaggaccagggagcctgctccccgctcgcgctggccaccgggctgctagagcccatgacgccctactcgttcgcctcaggcgccgacttcccgctcttctcgccgacgggcttggacgggcagctgagaagcagccacggggccggcatcggcgtggagttcgagaccctgttcgaggagctgttcaccaatgctacggagcccttccaatgggacctctatgccgccaattag

SEQ ID NO: 25168 - DNA, 222 bp, Zea mays
  Peptide Sequence Number=SeqID_66947
atgcggggacagacggacggacctacggatctagcagcactgctcgctgacaactacgtgcaaataacaatcgcggacgctgtccacatgacgacgagccgaaaacgaaacgagtccggaaggaaaaggaaccgatggcgacggaaatccaactcgctggccgatcgatggacagtaacatttttggctcacaggagcgcgacacggatggcgcagccgtga

SEQ ID NO: 25169 - DNA, 795 bp, Zea mays
  Peptide Sequence Number=SeqID_66948
atggacgcgagcctccgcacgctgcccccggccggcagcagcttccgtggcgaggtccgctccgccgtgtcctcgctgctgctctcctcccggggcaccagcgccctagactccagcttcttctcgcacctcccgccgctcggctccagcgtctactaccgccagtgcgagctcctccgcaacttcgccgcctcgcagacgcagcagtccgccgccgccgcatgctcgccttcctcctcgtcctccggcctccagctccagacacccgtgccgcacgacgacgccacggcggcggcggcggctacgctgctgcgacagatctgtaccgcggcgtgcggcagcggcagtggggcaagtgggtggaccgagatccggcctgccgcaaaaccggggtgcgcgtgtggctcggcacctacgactcccccgagacggccgcgcacgcctacgaccgtgccgcccacaggctccgcggcgagtacgcgcgcctcaacttccccggcgtcatggacgggcctcccgggcgcggattgccccgaccacctgcgccggctccgcgccgccgtcgacgccaagatccaggccatccgcgcgcgcaggcagcagcgcaacaagagggagagcgcccgctccggcgccaacgccaagctacccaccgcgcgcccaatcgcctcggagacgtcgacgacgccggacggggtgctgtccgttagccccgcctcggccgacggcggctgcccgctggatcggatgccgtcgttcgactcggagctcatctgggagatgcttagcttgtag

SEQ ID NO: 25170 - DNA, 420 bp, Zea mays
  Peptide Sequence Number=SeqID_66949
atggccagggtcgtgcacaccttttactcacctataggttctgcccgtgtactcaggtcattccccgcaacatttaggacgtctcaaacaggggaaatttatgcgttagtgcgtggtttgggaacgccggtgatggtgtcgtcgtggatcgggtggcaccgctgtttagctcggtcgcgcggggacgataaaggagggtcgtatgatctaagattgacggccacagttaggagcaagataacggttcggccagattattattatgtattttgtttacatgtttggtgtgatgttaatttctcctttatactatgcttgtttgtattgtggcgagtagaagagccagtggctgaggatctcggtgatcagcagatagaagttgctgagcaggagctcattgaaggcaagttgtgcccttaa

SEQ ID NO: 25171 - DNA, 219 bp, Zea mays
  Peptide Sequence Number=SeqID_66950
atggaggaaggagacacacgaggacatcaaggcaaaggcgaaacaaagggattgcgaaggaagaaccctcttaatctaggaaaggcatcagcaaactattccacaatctcctccatcgagtcacaactcttcgcgacttcgcagctcctcaccatctcatccatcgtgtctattcctctctcctacactgctcatgactttctcctatactactcataa

SEQ ID NO: 25172 - DNA, 627 bp, Zea mays
  Peptide Sequence Number=SeqID_66951
atggcaatgaatgttgtgtgttgcaggtgtgaaggtgaatcgtcaagttgtccgcacccgctgaacagttactcgcacccactgaacggtggaccactcggcgtgtgggaggtgaatcaccagatcgcgcgtatctaccgcatggtgaacagtatccctgtactgttcacgctggcttgtattcgctcgtgcgtcacgtttggacttttaccttctgtcaagccgaaggtattaatatatattaaagtccatataattactcatgctatttctcatgtttcatatgtttcttctttcattaacacatactgtgatgatgaaggtttttgctttgggatgggctgcacgttagagctggggcccggggctaatgtatggactgagacattgggagtgggaaggccgaaggccgctcaatcgctcaaggctgcaggttgggctcaaaactggattgctaaaacggtattttcccggaacaaaacggtaactgtaaaaacgaacgaaaaatcagttaaaccgttttcgataccgttcccgaatacaatctacctgttttcgttccgaaaccgaaaaatacccgaagtaaatgaaaatggtcggaaaaatggtattcggaacgggacgtga

SEQ ID NO: 25173 - DNA, 717 bp, Zea mays
  Peptide Sequence Number=SeqID_66952
atggaaacttttggccgttaccttgacttgcatgagctttataatgagttcataaattccaagttcggaacactgatggaatattcagcttatgttggctgtttctcccagacggacaagatctcacatagtcataaagctaccagaaaatacagagaatacttggaacatattttggaatatctgacatcatttctgtatcgcacagagccattgcaagacattgataagatttttttaaagctggagagtgaattcgaggaacaatgggccaatgaaggaatacttggatgggggaataaagggacagaaaaagagtctgaaatagatctcgattactacagcacagttgaagaacttgttgagcttggcccagaaaaattaaaacaggctttagctgctcgaggtttgaagagtggcggtactgttcaacagcgtgcagatcgtcttttcttgttgaaggttacaccgttggaacaactagataggaagcattttgccaaagttccacatactaaagatggctcaaacacagctcctaatggtaatgctttcaaggaggatatgaagaaagaaattgcattgatggaagtgaagatgaaacgtctttgtgagctgctagatgagggaagtactaaggcctttgtaaggacaaaggaaaatgcggagaagaagcttactttgacatatgaagagatggaagcagaacgggaagag

SEQ ID NO: 25174 - DNA, 330 bp, Zea mays
  Peptide Sequence Number=SeqID_66953
atggcgtcaacggtgctggaggcgacgcgggcggcccatgaggatctggagaggctggagcggctcgcggtgagcgagctgcaacgggagcccgctaacccgcgtgaccgcctctttcagtcccaccgcgtccgccacatgctcgacctcgtcgtctccacctccggcaagctcgtggaaatttacgaggacaaggacaatgctaggaaggatgagatcaacactcatcttactgcacccacgcaaagtggactgtttagcaagtactatgaaaggctcaaagaggtaccttacctatctgcttgcttggatgtgacaaaagtgaaatag

SEQ ID NO: 25175 - DNA, 729 bp, Zea mays
  Peptide Sequence Number=SeqID_66954
atgacgccaatagtggcctcgttgagcctcgcccacctcgtggtggccttgttgctgatgttgttagccctcctttgcgtcgacgcgtcggtgcacgattacgatggcgaacggttcgcgaccgacggcaacgccttcgtcctccacggtggtaccgtggtagtgagggtgtctacggctccgctaagggtggcgcgttcatccgctttgagaaggtcacgttcaaaggatgcccgagtcggcgaccgcagccgaggaggacggcaaccgcacgaccacggtcacagcggtcatcttcaaggccggcgaccgcgacgccgtcgggggcacagacgtctccgtcgctggcgggcgggcgctctgctgcacatgggacatggtgagggcggtgaggctcggggcctgcacagagggggggcagtgatgtatcgcgcgcggaacgacaacaccggctggcctagggtgctcgcggcctccttcctcccgggcggcctcgacgcggctttcccggtcgagggcgtcgtcgtggcgcgcaccggcatgtacacactcctgttcgtccactgtgatgcgtcgctcgccggcgggcaggtggccacggcgggcaagaccatctggaagaacagccgctgctacctcccggaccgtatggcgtcgctcgtgcccttctacggcgccaagtcgctggcgttggcggcgtcctggttcgcgcagtgcgcgcggttctag

SEQ ID NO: 25176 - DNA, 402 bp, Zea mays
  Peptide Sequence Number=SeqID_66955
atggaggcgtccagttggtacttttacctcgtcgagttcaacgagtctgggtccgcccccgcggcgagacgttctgggcggccacgtccggcacgctccgcggcgcggcggcgcacgtgctggtgctggccgggccacggcgtggtgcagcccgcgctggcagggctcaagagcgccagggtggctggcctcggcgtcatgttcttcgccgccgcgaaggcccttgaggtcagcaagaacgccgacaccgtgagcgaccactcatcgtcgccgacgaggaggttgttcctggtactcccgggcggtcctcaacgcggtgttcgtttactggatcttcagctcgcagtcaaagacgctgaacaagctcaaggtgacgatcaacgctcttttgcaccaaattga

SEQ ID NO: 25177 - DNA, 390 bp, Zea mays
  Peptide Sequence Number=SeqID_66956
atgtactggaggttgaacaacgccttgatcatcgcggtggccgtgtcactcagctggatcacatttgaggtccaattcaagtcgacggacgagtacaacgagcggtggcgcgcgacctgggtcatcccgacggtgtgtcagctcatcttattctcgctgctctacgccgtctgcctcatgtgggcgccctcacagagcgcggcgaggtacgcctacctggacgacgaggatgagggcgaggacagtgacatggaggacaaacggtcgttgatcaggcccgacccgctgtcgtacgtggactactggacaatctccgtgtccaaggacgccaccaccatcatcctgagaaccgactccttcgtcatcggtggtggaggcaagcgggtgtag

SEQ ID NO: 25178 - DNA, 481 bp, Zea mays
  Peptide Sequence Number=SeqID_66957
atggctcgtccaagcaacccgtcgggccacttcacgccgtcttttccggctccggccaacatcagccaatgcggtccttctaccgccggagaaccaaccccgcaggacgaccatgcccgggagctgggcctgggcgcctcccgtgcagcaacctggtggacagacaagatgggcctgggcgcctccagcgcagcgccctggtataccggcgacggcgtctccagcagctggcggtctcgccccagggcgcagccgccgcgggtgccgggcgacaagagcttcgaggagttcctcctggcctctggggcggcttcctcctctgtgccgagcaggcatcaggttcgcctgcccgcccaggaccaggaggcactcggcgctggcgaccaagcggcggcggtcgaggccagggagcggaggagcaggaggatggccaagcgaaaggaggccgctgctagacatcatcgtcccgagaaacatgcag

SEQ ID NO: 25179 - DNA, 843 bp, Zea mays
  Peptide Sequence Number=SeqID_66958
atgtcgggtttcggcgatgggtacgtggggacggcgcaggacgcggtgaagatccggcggctggagaagcagcgcgaggcggagcgccgcaagatcgaggagctcaagaacaagtccgcggacgggcagcccggcctcctccagttcggctccagcacctccgagattcttgagactgcatttaagaaggaaacagttggtctcgtctccagggagcagtatgtcgagaagagggttaacattcgaaccaagattgaggaggaagagaaagagaaacttcaaaagctgcaacaagaagaagaagaattgcaaatgcagaaaaggaaaaagaggagagtgaagagtgatccacgcttatctttctgtgatgacattgagaatggaagtgacgaagatgattttgagaatcaagaaaccaagaaaaatggccctgccaaacttgggaaggatccaactgtggagacaagttttctacctgatagttactgggatgggactgggcacagaagagcaatccaggtccgtaaaggtgacaccattggagaatttctaagggctgttcaacagcagcttgcccctgaattccgtgaagtacggacaacttcagttgagaatctactttatgtgaaggaagatcttatcatccctcatcttttccattttgacgttcatgaggatgttcgtaccattgccgacgcaacaaaagaaaaggatgagtcccacgcggggaaagttgtagagaggcattggtatgagaaaaataagcatatattcccagcctcaagatgggagatctatgacccaacgaagaagtgggaacgctacacaatccatggggattag

SEQ ID NO: 25180 - DNA, 396 bp, Zea mays
  Peptide Sequence Number=SeqID_66959
atgggcgagcagggatccgtgcgcggggccctgaatccgagcagggaagcaggcgctggaaaactgagaaggagctggggtgctcggtggccatggctgggcgcgccaggggagcttcggcaggtcgcggcgagctcggaagagcagacgcgcggagggagaggctcgcgagcacagctggacaccggacttggggatgaagccgcgacgctggggcgaaggccaagccaggctactaaagaacagttgcagcaacaaattcgcttgaaagcttaccttggcttgagaagctgtggtagccgtcgttgcgttgcagcgaacccccggcggtatcctgccatccggtccgagtcaaccaagcggctctcccttccttcttccgcacccgctcgctag

SEQ ID NO: 25181 - DNA, 306 bp, Zea mays
  Peptide Sequence Number=SeqID_66960
atggtacagtgccccgatggatcagaccgccagctaagctcgccgtcgttgatcgccgtccggattcgtgcacggtatgggagggataacaccggggaaaagggtgattcatacatggcgacatctcctgagctcggccggagttttctcaccggcagtcgctgtgactcagcacggctcgccgcgctgtcgccatacttcgatctctcttactgtgcttcgttcttacgtggtagacatgcgctaacaacccacctcgtggccacggaccgattccggacctccgcgactataaatagccattag

SEQ ID NO: 25182 - DNA, 1791 bp, Zea mays
  Peptide Sequence Number=SeqID_66961
atggctcttttgcctaaacggcgcgcgcaggaggagacgacgaggtacctcggcacgaacctcatcgagagctgcggcgactcggaggacgggctcgccggctgggctccgtccggctcgtgcacgctctccgcgcacgccgacgaggacgcgtctcttccttcgctggcagccgcattgtccgccgccgccggcggcgacgacgaaggcgacgactctgacgaggacgaattccagcagcgcgcgccgaggcccagcggccggtacgtcctggccgcgcgccgcgcgagcgacaaggacgggctctgccgcgcggtctcgcgcgccccgatcaggcccaacgtaacgtaccgggtggccgggtgggtcggcctgggcgccgccgtggacggctcccacgccgttcacgtcgaggtccgcgtcgacggtggtggccgcccggtcggtggcggcgtggctgtggtcgagtcggggaagtggggccagatcaagggctcgttccgtgtcgactgcgatgagccaccgcgccacgccaaggtctacgtccacgggccgccggccggggtggacctcaaggtcacgacggatctgcaggtgtgcgcggtgaacaagattccgaggctcaggcacctcaggaagaaggccgacaaggtgcgcaagcgtgacgtggtcctcaaggtgagccggcggacggacgtcgacgacgacgacacgacggcgagcgtcgccggggcgcacatccaggtggtccaggtccagaacagcgtccccatcggcagctgcatcaccaaggcgggcatgcagaacccggagtacgtggacttcttcaccaagcacttcgactgggccgtgctcgagaacgagctcaagtggtactacacggaggccgtgcgggggcaggtgagctacgccgacgccgacgagctcatcgacttctgcgaccgccacggcaagcccgtgcgcgggcactgcatcttctgggccgtggagaactcggtgcagccgtgggtccgcgcgctcagcgccgaccagctccgggcggccgtggaggcccggctgcggggcctcgtgtcgcgctacgcaggccggttcccgcactacgaggtcaacaacgagatgctccacggggcattctaccagcagcgcctcggcgacgacatcaacgcgcacatgttccgggagacggcgcagatcgacccggcgccggcgctgttcgtcaacgactacaacgtggagagcgccaacgaccccaacgccacgccggagaagtacgtggcgctggtcacggacctgcagaggcggggcgcgcccgtgggcgggatcggcgtccagggccacgtcacgcaccccgtcggggacatcatctgcgacgcgctggacaagctcgccgtcacggggctgcccatctggatcacggagctggacgtgtcggccgccgacgagtccgtgcgcgccgacgacctggagatcgtgctgcgggaggcgttcgcgcacccggccgtcgagggcatcatgctctggggcttcatgcagggccacatgtggcgctcccacggccagctcgtcaacgccgacggcaagtacacccaggcaggcaacatgttcgcgggcctccgccgggagtggacgtcgcacgcgcgggggaaggtggacagcatcggcaacttcaagttcagagggttccacggcacgtaccaggtgctgcttacgacgcccgccggagaggtgaagaagcggacgttcgacgtacacaagggggatgcgccgctcgtgctggacatggatttctag

SEQ ID NO: 25183 - DNA, 243 bp, Zea mays
  Peptide Sequence Number=SeqID_66962
atggatagttctgacatcattgccatagtgctggtttactgcatggtgtgcctatctaaaggtttaagcgtccccattggattcaaaggcttttgtatatctatcgagcacgtttatagatttactgatcagattgataaacatcacacacacacgaagttcatcttgaacatgcttagtattattatgcatgtgatggtcaatcagctccaaagtgaccagcgcaagaatggcctcctgtaa

SEQ ID NO: 25184 - DNA, 219 bp, Zea mays
  Peptide Sequence Number=SeqID_66963
atgttggacccagcatcgtcccactaccccacctggcgcgcacaagtgctgttcacgctacggtgtttcgccctccccgaccatgtcctcgacggccttgtcacctcgctgtcaccatcgtgggctcatatgggcagcgtggtgctctcgtggctcaacgacaccatcaccgttgagctacaggatatcgtccacgaccaggcggacactgctcgctag

SEQ ID NO: 25185 - DNA, 273 bp, Zea mays
  Peptide Sequence Number=SeqID_66964
atggccgtcattctacaacccctagaccgggaccatctccatgtggccgggccaggccccgagtgcctcccgtcctccagcgccggccctcctgactacgcctccctacgacgtgcctccgccacccctacgactccgactccgccccagctcctgcccctgggaccagggatgccttggtccccaatggttggaggatgggactccgcctccgacgccaccgccttctgccaccatggcaatgacccccccccccccccccccgactggggg

SEQ ID NO: 25186 - DNA, 183 bp, Zea mays
  Peptide Sequence Number=SeqID_66965
atggtctacaccaccgccgctaggatttccgactaccaccactctatcctgggatcagcaggcgctcctctccaacttcagcaccatgatacttcaaccaccacgccaaaacgagtggcaccagggagttctctaggacaggcgcccaacgccgtcgctgttcctgggtcctcttcagcctag

SEQ ID NO: 25187 - DNA, 441 bp, Zea mays
  Peptide Sequence Number=SeqID_66966
atggcctcctcatccgccgcggcgtcggccgccgccctagaggccgtgcaggtgctcgtcgcctcgctcgccgatgactccccagtcgcccgtgacgccgcgctcgctgccctccgcgacatcgcgccgttgaacccgatgctcatcctcgactgctgcgccaccgtctcccgtggcggacgtcggcggtttggcaacatggctggggtttttcttgtcatggcatctgcagtcagggctctcgatcactctgacgccgagagcgagttcctccggaaaatcgcgaagattgcaactgctgagattgttacctcaaagactgatgaattagtcatgaagagtagttacgacttcctatctcgaagcaacaccccacccccgcggctgccaaacctcacatgcagtggaaggttcaccctgttgttgagccacatcccttga

SEQ ID NO: 25188 - DNA, 168 bp, Zea mays
  Peptide Sequence Number=SeqID_66967
atggtgattgtgagtggttcacgcctaccacaccggagcggcaaaggcgatgctagtggaatcgagatcaagttgtgtcttgatagaggagcaagtgagaacttggagtccagctcaatgtggattaggggtgatcgacaaatcaccgataccacgggaaaaatctag

SEQ ID NO: 25189 - DNA, 354 bp, Zea mays
  Peptide Sequence Number=SeqID_66968
atggcgacgagccaaaggacgaaggctgccaaggcgaggtggggctcggcggcgttgatgcaggcgacggccgcgatggccatgaggaggagccgcacctgcgctgccgctgccgctgccggcggtcgtgggtcagggtccatgagcgcgcggtggtggtgcctgctacagagtagaggagacgggttctctacagcttctcgcgcctttactgctgacaggagggaagagagcggatctggtgatccgcgctatcgctgttgtggtcctgcccttgcgtgtatccccactattcacgataaagaaataatatggtggtggctctgctggccatgcctcgctggagcacattag

SEQ ID NO: 25190 - DNA, 372 bp, Zea mays
  Peptide Sequence Number=SeqID_66969
atgccgcgcgtcaacccccaccccttgatcccgcgcattgatggtcgctgtggatggcgcccccgatctcgtgcacgcccgtgcgtgaacccagccctagtcatgcccgcatcgagccctcgcccccggatcccgcgtgtggacctagcttccaccgagccaccgcccacggattcatctggccccttcctacctgtcgtcctcctccgcgcacctcctgtctgcctgtcgtcctcctctgtgcaagtgtgtgaccacatcggcagtgctccagatccgattaatcaccaaagccttgggagcgttctagagctgaaggagcatctggtcctgcacctttttttagcccccatctggtggaagcaccagtga

SEQ ID NO: 25191 - DNA, 411 bp, Zea mays
  Peptide Sequence Number=SeqID_66970
atggcgcaccagatctgcgccgctgcctctcctccactatgcgctaaccccccggtacagataatttacctgaggcaaggcattggtgtgggtggctttcagaagatttattgtggtcgccaaaataatggctcccacccaccacacttttgcaagattagtggtgccatttcacacaacatcctactgcaactgcagaagatgtacatcattgatatcgatcccaagggtgggtgcctcataacctcccagggaagtttgagggtgattgctaccctagggtacaatgacgataggttcgcgctaggaaggtccacaagatgtaaggctaggaactccggtatcgagccttacattgtcgctcatcacctcaaccagaggctcattgaacatcatcaatctatcgtctag

SEQ ID NO: 25192 - DNA, 526 bp, Zea mays
  Peptide Sequence Number=SeqID_66971
atggaaagtcctgagtactgtgagataaactcaaatatgactcttgactacataaaccgactgttaatggaggagggcactgatgagaaggccagcatataccaacaacttgatgcacttcaggccatggagaagccattttatgatattattggacagacatatccatcttcacctatggagacaatgatcagtagagataaccaagtagattgtcctcaagacaattatagtaaacaggcacgccgtggttgttttgtcagtgatattctagagccacaaggtgtgcacctggtagccaatgattggacttatgaatgtgatcatttttctttgcaatttgagagaggtgctgaagaagcaaataagttagttcccaatattgcaaaattggctgatctggatagtaatggcctttctgattccaatcgaatgatagaggcaacaattggacaaaagggcaagcatggaagcaaaatacggagtcatcctcatgtggacttggagtttttggaagcgaggaaca

SEQ ID NO: 25193 - DNA, 2181 bp, Zea mays
  Peptide Sequence Number=SeqID_66972
atgccgattgagccttcctttgatgatctgtacaccattacagcgcctggacagcggcaagatggctcttctttctcttctcagcagcaactcacactgtatgaccacagactctgtgatccccagttgttccacaaaccaaccaatgaatcaaacatgcaattttccggtgtagtcaccattcctggaatgcacaatgtgagtaccaacctcggacaaaaccacctgcagattaccacaggggttagtccagactaccaaaggatcagatcaaacaatgctcttcaccacataagccagatcctgatggaggatgtggatgagagggtcggctcacatgaaggtggggccgcccttcaggatgccgagaaggccttctacgatattcttcagcaggtatacccaccttcactcgactggtcaccgctacataacagcagcgaagcaggaggaccaaatgagggtagcagcaattatcacaaaaggcctcgcagaagcagtttcactaatgacatttccagtcacagcatgttgcagtccttgccagccccattgagtccatatggctatggcaggagccttttacttccatatcagtctctggcaaacactgggagggcctcaagatttggttcccctgccttgcaaactagaagagaagctgaggatgcaaagtggttcgataagatggtgatcaatttggatgacgacaagcttttcatttccatactgaccactgctaaagcaaaaagaatagtcgggaagagcaaatatgcaatctttcagatcacaggccacaggaacaatccatatatccaggacttggataccagggaagggagaagtaaaaagcataccatcagctgcgaaataagccgcaacgagaagttggacaccgttctgctatgctatggtctggactgtttcattgaaacagcaaggctgagagacatggctgtaaaggaagtaagtaaggatgcaccgaagggtcaaagcaaagcaaatgctcaacagaagtctcagggtggtactaggcagctcaagaaagaggtggtcgatctcaggaccctcctcatccactgtgcacaggctgtggcagctgatgaccgtctgttggccagtgagctcatcaagaagataagacagcactcctcaagagatggagagtggtgccagagacaggcattttactttgtgaatggccttgaggcacgcctgactggcacagggagccagttgttccacaagatgctggcgaagcgagtaagcgaagacgtcgtgttgaagatctacaacttttatcttgcagtctgccctttccacagggcatcatacacctttgctaaccaaactattatggaaacctcggtggggcaatccagggtgcacatcgttgattttggtgtctgctatggttttcaatggccatcgctgatccagcttttcggtgagcaaggagtgactccaaggcttcggattacaggtatagaagtgcctcggccaggtttcagccccttggagaacatcgagcgggcagggaaactgttggctgactatgcaaacatgtacaaggtgccctttcagtatcagggcatttactcacggtacgaagatattcagatcgaagatctcaacatcgaggaggatgaagtgcttataatcaactgcatgtaccggatgaagaacctcggcgatgagacagtagccatggatagcgcaagggatagggtactgaagataatgaggaggatgaacccgaaggtgtctattttcggcattctgaatggatcatacagttcccccttcttcgtgacacgtttcaaagagcttctgttccattactcctcgctgttcgacatgcttaataccaatgtttcacgggataatgaagcgagaaagctgttagagggtgggctccttgggcgggacatcttaaacataatagcatgtgagggtgctgacaggactgagaggccagaaacttaccagcagtggcaagcaaggtgcctcaaggctgggttcgagcagcttcctctcgatcctgccatcatgaagtcagtattatggatgaagaaagaaatttaccatgaggactttgttgctgatgaagacaacggctggctgctacaagggtggaaagggagagtactgtatgcactgtccaaatggaaggttaattaa

SEQ ID NO: 25194 - DNA, 624 bp, Zea mays
  Peptide Sequence Number=SeqID_66973
atggagcccataccggacagggtggtagcaatggtccagccaacgagttcatgcggcgcggcggtggatccccgacaccggctagggacgtcgcgattgatctccgacctcgcaacaccggacgatgatgaggttgcaggccttcgcgagggagaagtcctagcgacactgcaggttattgcgatcccgttgtgctcggatcggtggagttccgccccgcggtcgcggatgcgtcggccgtggcaagtttgttgggatacggagaagatggacctgccacaggggcccaccggcagtgagagtttgttggatgggggaaatcggagggaggctggagctggggcggtggccggtgggcaatcttatccggattccacgcgcgccgttcagcggagtctgtttaccgggtggaagatgaacctgacgtctgggccccacattgtcagcggcacagcgaggcgagaaggagatgtatggctggtatgcgggccccactggcagcacctagagccatgtacataccgcgcgtggacttgggccacacaaggggaattggtgagttttatcccaatttcaaattcgaaattcaaatttgattcaaagttcaaggtttccaagatttaa

SEQ ID NO: 25195 - DNA, 579 bp, Zea mays
  Peptide Sequence Number=SeqID_66974
atgagcaacgccaaaaccgccagatttgggcctgcggccaactgggaaggataccggcgccagccgaactacacggaggcaatgaaggagggcatggactgcaggcccgtgtcgggacactacgctgacggtgacggcagatcttggagctggcatcagacttacgaaagcggagctgggggaggcctgcccaagcctgtcgttgtggccatccgtgcgctccgcagcttcgtcggcgtgggcgccgtggccgcttgcaaggtcgccgccgaggacgcagtcgactgcctcagtgaagggggtgtttcgaggcatcaacctgggcgttcgtcaaagaacgcggtgattggaggcgccttggcaggtgcagctgtctcagtagcagacggctactacaacaggagccatggcggcaatgctggcacgccgcaggtgatcaaggctgcagtcgccggtggcgccatcggagcagccttggagctcatcagccaccgcaggcacgtcgatcggttgagaaccgatggccagacaatggaactgacacatgaaccaaatccgctcacaagcggtcgtaaataa

SEQ ID NO: 25196 - DNA, 312 bp, Zea mays
  Peptide Sequence Number=SeqID_66975
atggcgagcttggccacggcgcaggcggtactacggcgattacacggcgacggacagcgcttggcgaggaattcctggtgccagaccgacaatccaactccggagcgcccagaggaggtttccgatcacctccgacggacacgcagggaagcgattgcggctgtcgacggtgacggtggatctctcgtgctctgccccctcccctttctctcagctggctaccgagattttgggccttacaaatcctacccccttaacaaaaatctcgtcctcgagatttgtaagaaaagggatataataggtttggtctag

SEQ ID NO: 25197 - DNA, 402 bp, Zea mays
  Peptide Sequence Number=SeqID_66976
atgggtagtcgtagattgctcgccggatttttgtatgcgccgctgggccgccattcgtggtgggaagctcctcagcgtcgaccgatttactggtccggcctccagattgttcctaattgtcgccagctcggtgtagcacctgcccgtggtaaggattgtgcgttaaggcgtcggattgcctctctccggcgagagggcgccgtgatgtcgggcggcgccgccgtcgctggcagagaattggggggaagcgcccggggccgttggatcctggccaacggtggagatgtgagcgacttgataccggttcgaagaattgatcggaaccgtttagaaaagatcgtacggttagcattgaagataacgaacttcctcggccaatgcgatcgtagccctcggttttaa

SEQ ID NO: 25198 - DNA, 252 bp, Zea mays
  Peptide Sequence Number=SeqID_66977
atgcctcctgaaactccaaaacccaatgccacagaacatgaaagaaaagagaaaaagaagtttaacttcttttcagaaaattggggtgaggttcgagaggaccccatccacgccaggtcgctcctacagccgctggatcgagatgatggggaactactgccaatggcccacatgtccgagggggagcggggcgcgacaaccatggatggaagctttgtgggcgattcgcagcggatttgggagatcgagtag

SEQ ID NO: 25199 - DNA, 736 bp, Zea mays
  Peptide Sequence Number=SeqID_66978
atggaccgtccgcccttcctattttggcactcaacagagagtgacaacaatcagcagaccattgcagcgctgagcttcaaggcaattagttttgccccgcgatgtgaggcaggtgcctctcctccacgcgtcgcgcgcatcacactgatactgtcatccagctcgacgctatataaagtggtaagcatcttcgtcctcggggccgccccaacggcccttgcgatcgccaccacgtcagcgcggaggatgcacggccaccagcagcagccgtacccatacgggctgcggcaagacccgctgcggcggatgcgaggtctggacgtgaaatcggcgctccaggccagcccgcgcacgtccacggtggccacggccgcactcgtcgtcccgctgggtgccgcgctgctgtgcgcgtcggggatcgcgctggctgcgaccgtgaccggtctcgcgctcgccacgcctcccctcgtgattttcagcccggtgctcatacccttcgcgctggccgcggggctcatcgcgtcggggctcctcgcgtcgggcgcgctcggcgtcgcgggcgtctcggcgctcacgtgggccgtcgggtacgtctggcaacggcagggcgaaggcggcggcggggtcactgggatggtggtgcagccgctggaccaggggtcgaagcgccatggtgtccaaggcgccgccgcgttcgtggggcaccgccgcctgccacgggacatcgacgttgctg

SEQ ID NO: 25200 - DNA, 387 bp, Zea mays
  Peptide Sequence Number=SeqID_66979
atggctgggaaaaaggactctttagcgattatgccaggccgaaggggtatcctttgctacgagccacctagattagatccaacggcgcaaaacttacgaagaccagatccgatcacgaccgcatacccgcgatccaacgacacaaatgccaccggtgaaagggtatttcttgatctaatctcgcccatccgtatccgatcccgcagtcgcggatcacccaacccgaatcgggaatactatgaacgaggtcttaccacctatcggcacgtcggtgtcgctggccacgacgagacacggctccgccgtggacgtgaaactccgacgaggaatttcaccgaccaccactgctcctcccgcctaaatcctccacagtcacgacccacgtag

SEQ ID NO: 25201 - DNA, 576 bp, Zea mays
  Peptide Sequence Number=SeqID_66980
atggcttcttgcggtagcttctactttgttcccttgctcctgctgatgctcctgctcgcttctcccgccactgctgcactggtgacatcctcccagcctggcggcaatgccactgctgcaaggccgaggccggggatggagcagctcaagcgcaagaggatcagggctctgctcaccaagcttaacaagcctgctctcaagactatccagagctcggatggcgacatcatagactgtgttccctctcacctccagcccgcatttgaccacccaaagctcaggggcgaaaagattctggatccgccggagaggcccaagaaccgcaacttcacctttggcggcagcggcagaagcagggtcggcgaggtggtggtgcaggcgtggcacgccaccggcgaggcgtgtccagaggggaccgtgccgatacggcggacgacggagaaggatctgctcagggctagctccctcaggaggtacggcaggaagccagcgcgccggggtgttcgccgtgattccacaagcagcggccatgagtaccataatcttaagtgctccagaaaacaacacaaattttga

SEQ ID NO: 25202 - DNA, 171 bp, Zea mays
  Peptide Sequence Number=SeqID_66981
atggcgtgctggcggccggagaggaagaaggtcactggtggctcagtcgtggcgttcaccggtgcagcggttctgagatgtctagtttcagagctgtactcaactgagagaccaacttcagctctacaagtttgctatgttgaccaagagcaaaatcctcaagaattctga

SEQ ID NO: 25203 - DNA, 561 bp, Zea mays
  Peptide Sequence Number=SeqID_66982
atggctgggaaaaaggactctttagcgattatgccaggccgaaggggtatcctttgctacgagccacctagattagatccaacagcgcaaaacttacgaagaccagatccgatcacgatcgcatacccgcgatccaacgacacaaatgcaaccggtgaaagggtatttcttgatctaatctcgcccatccgtatccgatctggcggtcgcggatcacccaacccgaatcgaggttacgacgatctccgccatgtgcgcgaggccgccctcctacggatttcacagacttttcttacaaagtgggtattacatgtgcccgagaggcaagcgaccccgctcggatggattgacatgtctgtaaccttcgggacgccggccaagttcaggaccgagactctatccttcgaggtagttggcttccaaaggacctgccatgccatccttggaaggtcgtgctacgcaaaattcatggtcgtccccaactatacctacctgaagctcaagatcagcaatggtgcttctaagtcggaaaacaactcaaattcggccagaaaggggtaa

SEQ ID NO: 25204 - DNA, 1053 bp, Zea mays
  Peptide Sequence Number=SeqID_66983
atgaccattgaaggccgaagaaatagttggacccaaggaacaaatgtcggtaaggatagaagagcttgtgagggccatgctctcaataactatgctcctctcacacttgctcgcataaaggattgtcccttcaatggcatacttaatgatgatgaacaaagcgccaagagttctcatcattctacctcagcggtgtggttagatttccaaaaactcttcaaaaatgtcaatggtaagaaggtcaagtacatagctaagtgcatccattgctctaagcaatactctgctttctctagtggcggcactagccaccttacccgacatagggataaatgtcccaggaggcatgaaaaaactcgcatgtctcaatctcatatctcttttaatcctgatggtagtatgcgtaattgggagtcttgtcctatggcacataatgaactagttcaattgcttgctaggctcgaagttcctatttatatggttgaaagtgctgcatttgaatactacattagaactgctcgtaatcctcaatttgtacctatctctagacaaaccacctctagagacatggttaaatacttcaatgataaaaaggctaagcttgttgagactcttagttcttctattgttaatttggactaccttagtgttgttgctcattacataaaccttgattggcaactagagaaaagggtgcttagtcttgtgcttattgatgtgtcacacaatggacaaaacattgttgatcgtgttgctggtgtgcttgctgattatggcttgactaataagttgcattgtctagtgttgactatcctacatctccacttatgcttcattatcttgttaaggttgagaagggttgtccctcctaacctatctggatcatcgacgagtagttcagaatccacttttagtctgactggcaggatcatcgatgagtggcggaggaggttgaagtcttatgtggtagagatgttgacctacattaaagattgggaggatgctaaagtaaggatgcaacacttggtggatgataaggagcttgaagaataa

SEQ ID NO: 25205 - DNA, 147 bp, Zea mays
  Peptide Sequence Number=SeqID_66984
atgcagaaacctgattcagatcagcttgactctgagcacacctctcctcagcgtcggaacatcatcgagtcagagctgggagggcaagaggaaaaggtcatctttctgtttctgaagcaggtgaggattccactgctgcaaggatag

SEQ ID NO: 25206 - DNA, 556 bp, Zea mays
  Peptide Sequence Number=SeqID_66985
atggcgaatgtcatggattctgaggcagtgcaggtggtagagtcgtcgtttgtagtgtcgagcgagccgacaccgtcggaggggctctggctctctccgctggacctcattctggccaacagaggccacaccccaacagtctacctgtacagctccagcagcaatgctgttgccgccgccgatggtttcttcgacgtggccaggctcaaggaggctatggccaagaccttggtggccttctaccccctcgctggtcgcctcggcgtcaacaacgacgatggcagggcagagatcacctgcaccggcgagggcgcgctctttgtggtcgctcatgccgacctcactgtcggtgacatcgaggacgacttcaggtcgtcgcctgagctcaggaggctctttgttccaaggattgagccagcatccatcatattggccatacaggtctcctctttttgcttcttccaagctttacgcgtgtactggacactggtacactgcttggatattgataatgcagcatatgcatgcgctcgtgtgccgcgtctgcttgatgcag

SEQ ID NO: 25207 - DNA, 1005 bp, Zea mays
  Peptide Sequence Number=SeqID_66986
atgacgagcaaccgtactatagaagcagaatttgtcgttgtagatcgctttttggggagaggcatgacgcgaggagaaaaaagaaaaaggaaaaaacaacacttcaatcgtctgctagtgactttcctcaagttcggaggtgtggtgctagggacggctctccaccacaccgccagcgatgcctcaagcgcgttccacttcttccagacgtggtcagccttgtgcaagtatggcgaccgcgcgaccgtggagctcccgtgccacgaccgcacactcctccgtgcacggtccccacctaccgtccacccggacgccctctcgaggttctacccaaagctcaccttctccgacgacccgttaggatcaggaccccttgccgttgaagtatttgccatttccaaggatcaggtcgcctccttaaagcgcctctgtggcggcacaagcacgttttgcgccatgagcgccctcgtatggcagtgcactctcattgcacgtcggcttccacccgattccgaaacacgcctcatcttcccagccaacgtccgcggcagaatgagaccgcctctcccgaaccgctacttcggcaacgcgttgatcaggctgggcgtcactggtgcggttcaggacattgcttcggaggctttggtatctgtcgccggccgcatcaaagacaccatcgatcggatggacgacgagctcgtgcgttctgcggtcgactactgtgagatggccgagatggacagccggcctgtaaagggcaccttgctagagacggagctgatgcttattagctggctgggcatgccaatgtacgacacggatttcggatgggggaagccagcggtgatgtcgcgggcggagtccatccgtggcggctttgtgtacataattgacgacgggccaacaaacggcgtcggcagcggcagcggcggcgtccgcgtgctcatgtgtatggaagccgcaaatatgaaggagctggagcggctgctttacgcaaaactctag

SEQ ID NO: 25208 - DNA, 750 bp, Zea mays
  Peptide Sequence Number=SeqID_66987
atggccaccccgcgaaccactcgccccgtcgcattaactctgcggcgggacaggcggcgtctctggcaggggaagcgagcgacgcttcgccttcgccataatgaccgcgtcaaaaagggaccgagaaagggggataccctgaaaaggacccttctccgtgaaggaaacaggctccgagcctccctactgatcagaggttcgaaggctggcccctcggagggattcaacagccgcctcagagcacgtgggctccacacccactactggtcagaggttcgaaggccggcccctcggaagggttcaacggctgcctcaggccactcgggctccgcgcccactactgatcaggggcccgacctcaggcaccataggaagctccgcttcgcccgacctagggctcggactcgggctcagccctggaagacggtgaactccgctccgcctgacccagggctcggactcgggctcagccccggaagacgacgaactccgctccgcccgacccagggctcggactcgggctcagccccggaagacggcgaactccgctccgcccgacccagggctcggacttgggctcagccccagaagacgacgaactccgcttcgcccgaccccagggctcggactcagccctggcctcagccgacggtctccgcctcgcccgacccaggggctcggactcgaccacggccacggaagacaggctcgacctcgacctcggaggagcctccacatcgcccaacctag

SEQ ID NO: 25209 - DNA, 312 bp, Zea mays
  Peptide Sequence Number=SeqID_66988
atgccccgcctgaccgagctgaaggaagcgcggaccagagacagagtgggcactaggggcgagttcacagcaacagacacgcttgacaaccacagacgccgccaaataactaaaaatactacgacagccaagaatcggctcggagacgatgaccggcacgcaagagaggagctggacacaaaaactcgacacaccgttacgagcagaaaattttcgtgcgtgcggcaaataaagaaagagcgaactgcgcgtgcgcagagagctcgacacgaaagctcgacgcgcgcagggactacggcgaggaaggagtag

SEQ ID NO: 25210 - DNA, 429 bp, Zea mays
  Peptide Sequence Number=SeqID_66989
atggatcgtggcaagtgcctcgctccagaatgtccttaccatggtcggtccaagagttgcccaccttgggaaaggtgggtggtttctaggaactcatccctttcttgctactctatcatcttggtgactggctttacaagtcaaggcgatgatgagcggctcagatgctcggatgctggcgaaagcttcaagtgcggcgagacggggctccgcggcgacgctcacgtgggagtcacgcgagggcgtggttttaggcgagggttgggcaaggaatggggaaagggtcagctccgagtctttgtggcgtcatgggcgaggcttgtggcggcagttgcacgcacgccaaaggagcggttgcgcgtgcaccggggcggcggctgggcacgaccagcatgcggcgcgctgagggagttgggacatggctgctag

SEQ ID NO: 25211 - DNA, 294 bp, Zea mays
  Peptide Sequence Number=SeqID_66990
atgacttctactaaagaagttatcacccagactgcaccagctattgacccaaagattcattttcccgtacttacgaaggaggagaaggagaatgaagaggaaattatcgagaagcctataaaagtggtgtcgcctgctatgccaaagaacatcaaacctattctcagcacacatgttgctaatagtgtgaaggctgagctggaggtggttgttagcccaaagtttgaccttgacccagagaaagctagtgcttcgaagacttacactatagccaatgctcttaaagaaaaataa

SEQ ID NO: 25212 - DNA, 126 bp, Zea mays
  Peptide Sequence Number=SeqID_66991
atggcacttggtgaggaaacagtgagcagtggtgacaaggacaccaatgacaactccacctctgaggaactgttcgaggtgctgaacgttccctatgcccgggaacaagatctgaatgtcgcctag

SEQ ID NO: 25213 - DNA, 118 bp, Zea mays
  Peptide Sequence Number=SeqID_66992
gaggttctgtttccacactgcatatgtcgaagtaaaagttgttatccaccggaggattctcattttaggagacaacttcttcctctactacgggttcttcctcgtgttctatacatga

SEQ ID NO: 25214 - DNA, 687 bp, Zea mays
  Peptide Sequence Number=SeqID_66993
atggatcgacgggtttcggccggacggagagcggggctcgactacggacagcgaggtgccggcgtcgcgcggctcgggctgcctgcgcgcggttgggcattcggcgcgggcatcacgcgggtcggcgcgcggatgcgcgcagcaggcagggcgcggctctgtccggcgtcgtgtgagagagagaacggtgggaggagagagagagtgggagagagagagagaagtgagggacctgtgttgggttatggaatgtttatcttcggtctgcttggctattttggcctggaccgcatgttgccacatgctcatccgcaggatttaatgcaaaaatcggtgcagccgttgccaaaatcgatcaagcgcacagccattctgctcactctcggcatcagtctgcataacttcccggaagggattgccacctttgtcacggcgagcagcaacctggagctgggatttggcatcgcactggccgtcgcgttgcacaatatccctgaaggtctggcagtggcaggcccggtttatgcggcaacggggtctaaacgcaccgcgattctgtgggcggggatttctggactagcagaaattcttggtggtgtgctggcgtggttaatcctcggtagcatgattatccccggtgggtcagggcggctatcatggacggaggttgctcgcatttacgggtga

SEQ ID NO: 25215 - DNA, 426 bp, Zea mays
  Peptide Sequence Number=SeqID_66994
atgaagaaagtggtctactacgagaccgactctttgtcaccctccacgttcggctccgagtcgtcgactacttctaagtgccatgagcgcaagaagtatattaagatgcccctacgctatccccgtatttcaaagcgtgctccattactttatgtacccctaggcaaaccaccatattttgatggtaaagattattgtatgtggagtgataaaatgaggcaccatctaacctcactccacgaaagtatttgggatattgttgagtttggagcgcaggcaccaaaggtgggggacaaggactacgactcggacgaggccgcccaaattaggcactttaactcccaagccacatctatactcctcgcctccttgtgtcgagaggagtataacaaggtgcaagggttaaagaacgccaaagaaatttga

SEQ ID NO: 25216 - DNA, 570 bp, Zea mays
  Peptide Sequence Number=SeqID_66995
atggacaagaatcagaacctgacctatgctctttacattatggctctcatactagccaagaccaggtttgaggggagatgcgaggtcgctcatacatcatttaggcccttcaagaacgagatagcattccttcatagggccctgacccccttcccagatgttgaggatgcagctggagatgatgaggaagctgatcctgtagcagatgcagctcagcaaatgccaccacctccacctcctcctcagcaggggcagtactggcagcctggtcctggttattttgatccctatttacatcagatacagcaaggacttcagcatcacatggacagccagtatcaggggctgatgactcatatagatggcagatttcaggccatggacactaggatgactgctctgcagactcatgtggatggtcaatactctgcaatcacctcgagactctgcaacattgatgatcaatttgatggagtgttctctgagttctctgaacttcgcactcatatccataatactgtccatgatcccataatgaacaggatgaacagtatgcagcaaagcttctag

SEQ ID NO: 25217 - DNA, 180 bp, Zea mays
  Peptide Sequence Number=SeqID_66996
atgaccctcctcgacgtcgccgagtgtctacgaaccatttccaccctcaccagtgtgtgcatcgggttcttggtcataataaacaatgttggtaaaggctttggtcaatcactaaccatgtctagatcactcaggttactttttggaacaatgttcatgtttggcattttgcctaattag

SEQ ID NO: 25218 - DNA, 417 bp, Zea mays
  Peptide Sequence Number=SeqID_66997
atggctcatgggaagcggtggcgctgtctccgtctcccatggggaaaggaaccccattacttttgggatagggagccgcgtggagatgggacacttgtctatgtgacggctgtggtttgtgcccggggtgatgagtcagattggaatggttggaactttgaaggcaggggcagaacacccagagaaggagcagaccgagctgcctacacaatattgcaggatatcatggagaggttttcaggggagttagctactgctatgcctggtgtctttccacgaggtgatccctatgcttcaatatgggagcaaaccacgggaagtgccttgggaggtggcactagcgaacacctgcacagtgacaacgccacgatgagtgccatgtttgtagtgatgaaagcataccgaggtgtggagtga

SEQ ID NO: 25219 - DNA, 513 bp, Zea mays
  Peptide Sequence Number=SeqID_66998
atggagatccaatcacagggggcagaggaacctcgccggcgtcagcggcctgagctgctgcaagccgacgacgcaccagacatcctgtcgcggctcttggtgctggccgcttcgcttgcgctcacggccgatgtgccggccccgacccccacccccgcgccggtgccggagctccagaccgaggcacccgcgctgaccgctaaccccttctccagctccctcctcacggcctcgaagtcgtctgcctccgcgtccgcctttgacctccccgagggcatgcagtggcgctacagcgagttcctatccgccgtcaagcgcgacaaggtcgagcgcatgcgcttctccaaggatggcagcctgctccagcccgtggtcgtcgactgccgtcgcgccactgttgtggtccccaactacccggacctcatcgacatcctcgccaccaaccaacctgctctccgtcgcctacaagaactcatcggctggctcaggcgagcgagcgctgctccggtctag

SEQ ID NO: 25220 - DNA, 237 bp, Zea mays
  Peptide Sequence Number=SeqID_66999
atgggagagagcgatccagtgggtcgctgtaggggggagtaccaactacgacgtgaaataagcccgtggtggcgctatcccgttacggtggcgcacggccgaacggcgactgggctcttagctttctggtggtcaaaagaggggcggagtttgacacttagcctaatcctcgaactcgtcaacgtcctagaactcctggagatccagctcgacacctttttcttcctctttacctga

SEQ ID NO: 25221 - DNA, 267 bp, Zea mays
  Peptide Sequence Number=SeqID_67000
atggccgtgatgggttcaacattagacaagatgtacctctgccaggtaccaagctttggattcttaaatgataaagctgagaccgggcggcatttgagaacaagtccccaacattggcgcccacctccggtgaactcacttccactttttgagctgatggcttcgttcaacaatcaagctgaagctgcttcagctatgaagctggaacccttcatcaagtcaaaatggtctcacatcccaattaccttctcccaagaggacctttag

SEQ ID NO: 25222 - DNA, 529 bp, Zea mays
  Peptide Sequence Number=SeqID_67001
atgcaggcggcatgcaaccgcgccaagtgggcgcacttctccgactcccaacacgcccagcctggaggcccaggcccacgtgtcacgcgaccggcgcgccgaatgctttgtgcatgcaactgcaccgccacttgcgccaccaccgcgcctcctcgattgcggaaccaaaaccgcgactcgaggccacccagcgcacgacccagcagcgccagcctggcgcggcggagaagcgggcgacgcttcgccttcgccataatgaccacgtcagtaaagggaccgggaaagggggataccccgaaaaggatccttccccatgaaggaaccaggctccgagcctccctactgatcaaaggttcgaaggctggcccctcggaagggttcgacagccgcctcagatcacgtgggccctacacccactactggtcagaggttcgaaggccggcccctcggaagggttcaacgaccgcctcaggctactcgggctccgcgcccactactgatcaggggttcgaaggctggcccccgaagg

SEQ ID NO: 25223 - DNA, 264 bp, Zea mays
  Peptide Sequence Number=SeqID_67002
atgcagtcggcatgcaaccgcgccaagtgcgcgcgcccctccgacttccaacgcacccagcagggaggcccgggcccacgcgtcatgcaaccggcgcgccggttgctacgtgcgagcaactacgccgccactcgcaccactaccacgcctcctctaatgtggaaccagtaccacgactcgaggcaaccctgcggaccgggaaaggggataccccgaaaaggatacttctccgtgaaggaaacaggccccgagcctccctactga

SEQ ID NO: 25224 - DNA, 306 bp, Zea mays
  Peptide Sequence Number=SeqID_67003
atggcgtcccctgcccttctcctcccatgggcgcgagccccacttcccctgcaggagaggcaccccgtgttttgcatggagaagaaggcaagttgtccaacgctcatcggatgttcggagcgatgcaccaatcggaatcgccatcgtccttacaaacaccgattggatttgtttatgaacagatttcgaaaactgaattgtttgactcagttcaacatagaatcaattcttggtgattataaaagttatgtagtgcaattgccaagctttccaaaaagtcttggatcactatttttagtggtctga

SEQ ID NO: 25225 - DNA, 138 bp, Zea mays
  Peptide Sequence Number=SeqID_67004
atggcgctgagccgcaatgttcaggaacaatgggcgtacattatgctagagattgatagcatatatatagggaagaccaaagcgacttcagggggaagctgggggcttccattggaagccaaccgtggcttcctttga

SEQ ID NO: 25226 - DNA, 1908 bp, Zea mays
  Peptide Sequence Number=SeqID_67005
atgggcgagacaatctcgttcgcccctcggaaggccatcaagtctcaggtcttggcggacttcgtagccgaatgggtcgacacccagctaccgacggctccgatccaaccggagctctggaccatgtttttcgacgggtcgctgatgaagacgggagccggcgcgggcctactcttcatctcgcccctcgggaaacacctacgctatgtgctacgcctccatttcccggcgtccaacaatgtggctgagtatgaggctctggtcaatgggttgcggatcgcgatcgagctaggggtccggcgcctcgacgcccgcggtgactcgcagctcgtcatcgaccaagtcatgaagaactcccactgccgcgaaccgaagatggaggcctactgcgatgaggttcggcgcctggaagacaagttctacgggcccgagcttaaccacgtcgctcggcgctacaacgagactgcggacgagctggctaaaatagcctcggggcgaacaatggttcccccggacgtcttctcccgggatctgcatcaaccctccgtcaagatcgacaacccgcccgagcctgaggcgccctcgacccagtccgaggtaccctcggtccagaccgaggtaccctcggcacagcccgaggcaccctcagctcggcccgaggcgcctttagttcagctcgaggcaccctcggcctccgagggagagctacccctcgaccgggccgaggctcgccgggtggcacggcgtgccaagtcattcgtcttgctgggcgatgagaaggagctctaccaccgcagcccctcaggcatcctccagcgatgcatctccgtcgccgaaggtcaggaactcctgcgggagatacactcgggggcttgcggccatcatgcagcacctcgagcccttgtcgggaatgctttccgacaaggattctactggccgacggcggtggccgacgccactagaatcgtccgcacctgcgaagggtgtcaattctatgcgaagcagacccacctgcccgctcaggctctgcaaacgatacccatcacctggccctttgctgtgtggggtatggacctcgtcgaccccttgcagaaggcgcccgggggctacacgcacctgctggtcgccatcgacaaattctccaagtggatcgaggtccgacctctgaacagcatcaggtccgagcaggcggtggcgttcttcaccaacatcatccatcgcttcggggtcccgaactccatcatcaccgacaacggcacccagttcaccggcagaaagttcttggacttctgcgaggatcaccacatccgggtggactgggccgccgtggctcatcccatgtcaaatgggcaagtagagcgtgccaacggcatgattctacaagggctcaagcctcggatttacaacgacctcaacaagttcggcaagcgatggatgaaggaactcccctcggtggtttggagcctaaggacaacgccgagccgagccacgggtttcacgccgttcttcctagtctacggggccgaggccgtcttgcccacagacctggaatacggctccccgaggacgagggcctacagcgatcaaagcaaccaagccagccgagaagactcgctggaccagctggaagaggctcgagacaaggccttactacactcggcgcggtaccagcagtccctgcgacgctaccacgcccgaggggtccggtcccgagacctccaggtaggcgacctggtgcttcggctgcgacaagacccccgagggaggcacaagctcacgcccccctgggagggaccgttcgtcatcgccaaggttctgaagcccggaacgtacaagctggccaacagccaaggcgaggtctacgacaacgcttggaacatccaacagctacgtcgcttctacccttaa

SEQ ID NO: 25227 - DNA, 2433 bp, Zea mays
  Peptide Sequence Number=SeqID_67006
atggctcgtattcaagaaattcctgaattcccttctccgtttgtgaagccgaggaccgatcaaaggcctgctgtggacgtggaccacgtcggccatggaaacttcacgggtcatctgaagagcactctcagctccggcgatatggacttgccaggaggagcacgagcccctaaggcacgcaagccatacacgatatccaagcagagggagaaatggaccgaggacgagcacaggctcttcttggaagccctgcggcagcatggccgtgcctggcgccgtatacaaggcagcaagactgccgtgcagatcaggagccacgctcagaagttcttctccaaggtcatccgagaatcctctggaggggatagcaacggcaacggcaacggcgtagcggctccaccacaaattcagattccgccgccgcggcccaagaggaggccaacgcacccgtacccgcgcaagctgggtagttcggtcggcaaggacgacgcctccgcgatcaagcggcttcaggagccccagctgcaggcacagtccccgtctctgtctgagcaggagacttgctcaccgaagtctgtgttaaccacagctgaaggtagtggatcaccagcttcctcggtttacatgatggaggacagatgcctcacaccaagcacggcagttgcactttccaaggaggccaccacttctgacgaggcggcgtgtgaactacctggaggtccagttctttggctatttggcaagagggttgtggttagtaatttattcgatcagcaaccaagctccaatactgggagcctgcaactacaacgtgtggcagacatggaactggacgcttcagctcctgagtcaccgactagttgtggaactgggaagaagctgtcctcccatgccgcagaggaagcgaagacatggcacccgtggctgaccggtacgcggcagtttatgcactgtcttcctcaaggcgagcagttctccgtgcattctgcttgccgacccctgagctacggtgatggaagcatgccttacacggcgtggaacgcgcagacagttacctcaaacaagcagcaggacaaccaaccgtctcaagccgcagcagactgcgaggtcacgagggcacaaggatcgtggacggagccgtccgtcacaacctcctccagcagcgtggttgaaacagctcagaattcagattctgtagaatccacgaaagtaaacaacgacggagacaaagtggcacctgttccaggttcaaggaaatgcgcgagcgtagttccagactgccttcgaggttttgcaccgtgcaagcgcacgcctcagagcaagatgctgctgcagtcagaggcacctggggaggcagatagagagatgacaaggctgtgcctgcgttctgctgttacttatgagaggcagattgacactggtgaagcagccttccacaaaagggatggagcaatatttgggcgcgatccttcaggcttcagctcttcgtttcgcaacctcgacaaagatcactctgccatccaggaactgcagaagatagaacgagcgaagtctgagatcggagcgcctaccgctgacgtacagcctggtggcggcgccatgggaggtattcggcggcggcaggcaggcggtggcagtggacgcgcgctgctgattgcgaaccccaacggaggaggccgctggaagatgagtgcgcgaggggaaggggcatgccacgatagtgaagcggctgaagccgaagcttgtggaagcagcgacgggctcctcttcgaccacctactcttcaccagtatatatgtccagaaagcacgtgacccgttaccccgctcagcagtcatggctcgcccccgcagcagcagtagcgccgctgcccgcctccttctgctgctcgtcgccgtcgcagcggcgctccaggccacggacaccgcgctgccggtggccagcggcttcatccgcaaatcctgccgcgcgatgcagtacccgtcggtgcgcgagcatagcctcgcggcgtacagaggctccccgccgtcgtggagcctgcgggagctggcgcgcgccgcgctggcggtgagcgtggaccgcgcccgggcatcgttcgcgtacgtgggccgcctgtgtggctcccggtctggatccggcgatggcagcccccgccgtggtgcgaagaaggggtcagcggctgcgggtcccatgcgcaactgtctggagaatctagcggacagcgtgggccacctccccgacgcggcgcaggagataggcggtgccgggatggttttgtgttttgcgggctcgggccggcacgggccactaaatgggtcgtgctatttgggccgacccggcacggtcgggcctacaccgtgccgtgctcgggaagagttatgggcccgtcgggcggcacaacatggcacgacacgattaagtgttcgggcttaa

SEQ ID NO: 25228 - DNA, 291 bp, Zea mays
  Peptide Sequence Number=SeqID_67007
atggcctcgaagtcagtacagggaactccacagtatagcttggatagcgtccgtggccgtgacggggtggatcgaccactgtggcggcatcaattgctcatcggagaaggaaggctgccgtggattgcgtctctccgtggaccgccctcacctcgacgtcacggctgcggaagaagacccggcgacggcgaggtccgtcgtggtgcctgggtggcggcgccatgctctgggcggtcgagaggtggaggatggctgtgcgccgttgatattctgttggacgatgtagattag

SEQ ID NO: 25229 - DNA, 501 bp, Zea mays
  Peptide Sequence Number=SeqID_67008
atggcttgcgggccccgtcggctcggcggcccctgtcccgggcctcccccggcggctgtacgacccctgcggggctttgcgcgggcgagcgcacggcttcagcgcaagggcgcgcggcctcgaccagggcacctccggcacgggctcggcggtccccagcgcgcatgggcgcggccccaggaggtgaccaggcagcggcgctggtggcgcgcgcggacaggctcccggtggagcgtggcgtggcaacccaacgacacgcgggcacacagccacaacgcgcaggctcggccacggcgcttggcacgcagccctgttgagcacgggcacgggtgcggcctcatgcacgcagcccggcgcggcgcgcaggcaagccccggcgtgcaggccaccgctgtcgccgctcgggagcgaacgtgcgagccggtgtgcatgcctgctgcgtgcgctgccgccgctcgacgacgcacggccagggtgatgtcgcagccagatggtgcgtga

SEQ ID NO: 25230 - DNA, 504 bp, Zea mays
  Peptide Sequence Number=SeqID_67009
atgccccacgcgccagtttcacctcccctaaccggcggcgctcgtaaccggccgcgcaaatcgcgcgcacgccagcccaatctccgctggggtggttacaccagctccaggactccgcagggagggctttggggcattggacgaccagcaggggctcgtcgcagtgaccgccgtcgttcggccgtgggtgccaaaggttcaacacagaccaataaaaagatcaaagttagggttcaaaacaaaggagcaaaagaaactgaagagaaccctggtctggcgcaccggactgtccggtgtgccaccggactgtgtccggtgcaccaccgaacagtgtccggtgcccagggccgtactccttcaaacttgccaccttcgggttttctaaagagctgctccgctataattcaccgaactgtctggtgggtcaccagactgtccgttcacaggatgcgaagagaattggaccaaggcaatgaggatgcaacacctcaaaagaagacataa

SEQ ID NO: 25231 - DNA, 1144 bp, Zea mays
  Peptide Sequence Number=SeqID_67010
gccgcctagccatttcggtttcttccgcaactacggtccatcgccgctgcccccgttcgtgcgcaccgcgggcctctcccttgacatcagtttcctcccggtgccgcccgcgtgcggcgcggtcctcgtcgactcccgcaacggccgactactcttgcgggaactcggccctggctaccctcgcgaactcaggctcctcgtctgcagcccgctggagaaggcgtacgttcgggtgccgcctctgtgcatagcggagcacatggtggcgtgtagcgtgctcgtcccgggggaaggcgatgcattccgcgtggtggttgtcctcttcggcaacgacccgaaacacttcagtgttctcgtctacttttcgatatcttccgcttgggagtctgccactgggccggttcatcggaatctggtccctcgtcaaggcccatcagtcgtcgtcggagatgtcatgtacaagctgcagagcgaagagaagtacatcatggttgtcgacgcggtccagatgactctgtcggcggtgccccttcctgatgccagaacgctcctctacgctggtaaccactggattggcaggacaccggacggccggctttgtttcttcgtgatcagggagcagcttactctcgccacctgggttctccaagcacctgggaagtgggtggagcagcaacccgtggacctgcgcacgctgatgcacccggcgtttatgggtgatctcgcccacatgaagctctcggcgaagatgtcggaccagctccgtggcttcaaacttgtgagcttcgcagcgttctgtgagggtacatgcacgctgttctttgtcatggcagattgggttgtgatgctcgaccctaggacgaggagactgctgaggctgtggcgcaacagtgatgagtcgcggccattgggtgatgtatacccgtgtgagatgctgcagtggccgccagtgcttaagaactttggcgggtctgaatcagatgaggcgggcaagtgctgctggtatcttttctactgcggcaaaattaggacaattcagttggagtatactgatgctaaagaaagcgtcttgcaagctgcccagaaggcactcgagactttaaactatcttgcacagcctcatgttgtcagcatttttgcagag

SEQ ID NO: 25232 - DNA, 597 bp, Zea mays
  Peptide Sequence Number=SeqID_67011
atgggggaaaagggccggtgtctcggccacatacgtcgcatctacccgtcagatagccacaccaaatgtcacggtggaagtaaccaggttcccggatcgatgggatcgaggaacgggaatatggagaggctggatccagacaaagctggaccacacagcggcaccggcatcagatctggtggtgcaggaggcagacgatctgtactgcatgttcatttccaaaatatagaagggtctttatgcaaaaatgtcgaccccacgtgtcaacgcacagaggggaaatctacgcttgtgagtgcactttctgaagctgatttatacagtgatgacaggagaaaagcacttcttagtgataccgttggcttcatctcagatttaccagtacaggcagaatacaccttgggtccaattgatatggaatactcactacaggggggacatatatctcaaacttcgaatgaaagaggatccttttggtggagggatatcagcagaatgaccgagggatacagagggattgccatgccaaaggcaggagatgggaggaccttcctactttggatggatgtttggaataatgtgcatctgacaacataa

SEQ ID NO: 25233 - DNA, 627 bp, Zea mays
  Peptide Sequence Number=SeqID_67012
gtcatcgaggagcctcgccagggaggccggcggcagcacacgcgtctgcgtcggcgcccgcgacagaaaagaagggcttgtggaagcatttcatgcgaccctagaagaagttgttgaagcagacatgttagtgcatgtgttggattcaagtgcatctaatcttgaagagcatcgatctactgtattgcaagtactgcagcagataggggtttctcaggagaagatcaacaatatgattgaagtttggaacaagattgatcttgtggacgagaatgttaaatctgatgggattgacgatgaagtcttcctgaccgaaggtgaacaggaggatgacatattctctgaagatgatgctccatcagaacaaacatcttttgattctgtagatgtagatgacggagcagattcagaatatttatcagaagaaaattctgaagatagcaatgaactgccatctaaaaagtcatttgctgagccaactgagatgggagcaatgaaagagttgtcatcaaaagaatgttttggagaacttcgtgtcctagatacaaatggacacactttcccacaaccagcttccacttgtcatgtaaaaacttctgctgtgacggggacaggattgcaagagtt

SEQ ID NO: 25234 - DNA, 150 bp, Zea mays
  Peptide Sequence Number=SeqID_67013
atggctcccctccctctattcctattccttatttgcttccttactgttcttattatgcttcagggattaaacagtttacttgatgaggaggctgtcatgaggaaacgactccgtgagacgaaagaacagctggtgagacaaagattttaa

SEQ ID NO: 25235 - DNA, 396 bp, Zea mays
  Peptide Sequence Number=SeqID_67014
atggacggtgtccgcagcctgtccggcggggcctgtaggagcgaccttcgttctgtggaatgccgagagccttgggctctctttaactacaggaagccccgaccacctactgaccgggccgaccaaccagcgccggtgctacatctccagactgcgcctgctccgtgcgaacccactctccagcgcgactgcacggctattgttcctagcggcggtggtgttccgcggcgcgacagcgaaatcgacgatcgcaggaacgcgctcgacttcgactctccaggcgatgccaaccgcatcgtcccctggaggaaaagcagggtagccagaatctctgttggcatcgcctgtttcattgtgttcatgatgatcctttcagtaataggcctttttaggtag

SEQ ID NO: 25236 - DNA, 327 bp, Zea mays
  Peptide Sequence Number=SeqID_67015
atgtgcacatcacatgctatcgcacttcgaatttcccctgaaaccactcgccattcgctaccgcacttcaacgcaaaatcaaacgccacggggaataatggtccgtactctcgagaaaggcagagaatggaagatttccttggacgagtcgacggcgatggatggatgccccgacgcctgcttcttcggggggcggagtggtcgaaagatgaatttatggttccagcgtgtatagattgcaaaagcatcacaagccctcctcggaagcttcagatctttcatgcggccacattggtgctcagtgagctaaaagccatgctgccgtag

SEQ ID NO: 25237 - DNA, 693 bp, Zea mays
  Peptide Sequence Number=SeqID_67016
atgactgggtacgagctgctcaagcgcgtcaaggagtcggtggcgctcagggacatcctcgtcgtcatcatatcgtcggagaacggtaatgatggtgccttctgtgacgtggtcggtccgagccctgggttgggcgaggcggaggctcctccgaggtcgaggtcgagtctgtcttccgaggccgaggtcgagtccgagcccctgggtcgggcgaggcggagaccgtcggctgaggccagggctgagtccgagccctggggtcgggcgaggcggagttcgtcgtcttccggggctgagcccgagtccgagccctggggtcgggcgaggcggaggccgagcccgagtccgagccctgggtcgggcgaggcggagttcgtcgtcttccggggccgagcccgagttcgagccctgggtcgggcgaagcagagttcgtcgtcttccggggccgagcccgagtccgagccttgggtcgggcgaagcggagttcgttgtcttccagggccgagcccgagtccgagccctgggtcgggcgatgcggagtttcctatggcgcccgaggccgaacttggctgctgtcagcctcactctgtcgagtggcacagcagtcggagtggcgcaggcggcgctgtcctcttgtcaggccggtcagtggagcggcgaagtgactgcggtcactttggctctgtcgactga

SEQ ID NO: 25238 - DNA, 210 bp, Zea mays
  Peptide Sequence Number=SeqID_67017
atgagggactctacgggcggtagggcccacatccctggctcgtgcacctccctggtgacacctagggacaagaggtcctccaaatgggattctctagaacctaacaatgagacgaccagaaatgatgtcgatcaggatcatgttgtcctatgtcatgtcagggatgaactccaaccagtacttgcagttgctaatgtagtaaaaaattag

SEQ ID NO: 25239 - DNA, 501 bp, Zea mays
  Peptide Sequence Number=SeqID_67018
atggaagatcacctattcaccccctctaggtgctctcaactgggttatgcgtcaaccgtggctagagagcatttgttcgacatcacactcgttagcgattatgataatgatgacgccaaccctggccttatgatgatgattggctcctatgacttccgtgtgcatggtcagtgcaccatgttcttggcatgcgccaaactaggtgagcgtctacatatcctcatcgacacatgcaccatccacatcgtccttgacatcaaattttctaggttggccaaccttggagaacaatgcgtctatacaacaatgcttgtcggtagcggcaatgacattgcccacccaagagcctacctcaacatatcgctacacatcaacaccaagatgttccaactcaatgtcttgctcatggaccttggtgtcaatgttgacttcatcctttgcatgccatggttggtggttcttggcaacatcatgtggaactttgtgaccctagagatgtag

SEQ ID NO: 25240 - DNA, 426 bp, Zea mays
  Peptide Sequence Number=SeqID_67019
atgatgaatgtgttgcacatcacagagggtaagccagaggacgatatgacttctgagcaagagaaaaatacgatgaggttaatactttatgtgatggccaataagcacgaggcccgtgagcccggcacgaagcccgctttttgggcccggtccgagcccggcacggccctcaaaagcatgtccgacacgctccacgcccgcttcacctggacgcgctctgatggtgttcggctcaccgagaaactggagacattgctagaggaagttgatgtatctacaccattggaggagcacactgtcgccccccgccaggagatgaattacaccatccatcacgttatggctatgctacaggtcgctttgggagggggaacacccccctctcagcggccaacaaataccctgaacaaaggcaaagctgactag

SEQ ID NO: 25241 - DNA, 243 bp, Zea mays
  Peptide Sequence Number=SeqID_67020
atggcgatgacattctatagcgtgctctcgcctcatccgtggtcgtctcctatttgcggttggggaggtggatcttctcctgcgttgttggcgtcgtcggtctgtggtcctgttggggatccatggacggtggtggctatgtcgtggtggttccagtcaatgtgtgggcacagtcctctcttggtgccatatctagtgagccatccggtgcaccaccagatacgtctggtgttttctaattga

SEQ ID NO: 25242 - DNA, 189 bp, Zea mays
  Peptide Sequence Number=SeqID_67021
atggcggtggatgagttctcctatttgtctactggtggacgtgatgaaactctaatggctggcaagaaaggcggcaagagcaggaagaaagacaagggcagcaataggaggcatccttcgaccttgccatcggaggactttggtgactccgagctctccgatgagtggtccccttcccccgtcccctag

SEQ ID NO: 25243 - DNA, 234 bp, Zea mays
  Peptide Sequence Number=SeqID_67022
atgccgtgtgccatggtggccatctcggccgactcgaagctaccgagccagatgcacgtcttggtaccagctgtcggatctccaataccgtcgctcatggaagccggtggcagctccgctcgtcgtcgaagccatatacagattcgccggttcttctctgttgcgagaggcaaaagtgtctcacagaccacaaatacatgtagacgaattagaaaaacaaaacaaatacagtaa

SEQ ID NO: 25244 - DNA, 474 bp, Zea mays
  Peptide Sequence Number=SeqID_67023
atgggcattgctctgataccctctatcaaggaacctcccaagatattaggcccacctacagatgtgcttgtcccgaagaccttagagagtcatgcaggtgcacctaatggctcaacaggtttctcaagaccagaatgggttcacgccaaccgagagcacagatactccaccgtccggcctcttgccacggatgagagaacccggagtggccggacgacgtgcgtaaccagagggcagagcagggagggcactcaatttaaagggattgatcgcttgcttcgcaaatttgggagggaagttcccacgacggcgcttagatttttcaccgagtttgtggactctgtaatcgcgattgctttgaagcttcggctttttgcctcaaccaaagctgagagggccgaagataaaaggagtgaggacccagcactggctgggttttacgaagctatggagataacaaatgttgaaaaataa

SEQ ID NO: 25245 - DNA, 1101 bp, Zea mays
  Peptide Sequence Number=SeqID_67024
atgcatctgcatggcatgcgcgagagcaagcagggcaggcatcttggttttgttacttcctgcgctgttttgctctcgcggattcggtacgttccccgcgtcgtgggaggagcgttcctcggccgcacgcctgcctcccgccccggccgcacgccgtcgtggcaccgtgctctcagtgccgcgcatcacccacctaccaactgtccggctcaggctgtccgtccccatgccgccgtggcgtggccaggcccggcccgcaacggctatatgtccgcgccggttcttgcttcgaatcctctctcgggggcggggacgagcgcgagggcgaccatgattgcttgctgctgccggtggcgtggcgtggcccgtgcggcgctgggcgcgcgcaccgctctgccagccagccactctgtgcgtgggcgcgaggcccccccgcctggcaccggcacggccgcgatcagttggctgtacgcggcgcagatcgtgctcagctctctctcagcacttgagcaggcctggggtgccgtggccctgtggtctgcggtgccgcctgtggccgtgagcctgcagagcagggacgtgtccgcatggggtgggcgggcgggcgtggcaggcgccttccccttttggcctcactcgcacgggccggtgctcgaccaccgccatctatctatggccagttcgccatggattcaaacgagtcgcagacagaagcgtctcagcttcttcactgcgctgcgctcggccctcggacacggtcccgacacggctgccctgctcgtgacgcggcctcatgatcgctgccccggtacgaacgacggccacgccgggctgccaccccgactgaaaggaccaccgcgggtggagccaccactcccaccccgcccttgcggggacgacgacctccgttggcggtgggagtcgaacgaggagccgcaggggtggggggtgagctcctcgaggagatgctcattgcagccggcgtggaaagtaggggaagggcacgatttgcttaatgagagccttcaaatggacatactgggggctgaggccacacagaaggttcaactccagggtacgatcggtgacgggctcgcctag

SEQ ID NO: 25246 - DNA, 1134 bp, Zea mays
  Peptide Sequence Number=SeqID_67025
atggagccggcgcggcggctcctgctgtcggactacgacggcgcgatcgagtcgccgctgccgtcgccgccgccctcctcggccacgccgttccgccccggggtggccgtcgtcgtcggcatcctcaccagcgtcttctccatcacgttcctgctccttctctacgccaagcactgcaagcgcagcgctgcggagtcgtcggggccctacgggagcgccggctcgggcggtgggttcgggtcctccggcaacggcgcgggcggggaccggaggaactccggcgtcgaccgcgccgtcgtggagtccctccccgtcttccgcttcggcgcgctgcgcgggcagaaggaaggcctcgagtgcgccgtctgcctcggccggttcgagcccacggaggcgctccgcctcctgcccaagtgccgccacggcttccacgtcgagtgcgtggacacgtggctcgacgcgcactccacctgcccgctctgccgctcccgcgtcgacccggaggacacgaaggcggcggcggcggcggcggcgggcaaagagccggctccggctccgcctccagctccagccccaacgcccgcgcagtccggtaggaggatctctggccggcactccacggggtcagtgcgcgcgcctgggcgtgtcggcccggcctcgcggcggtcggccgacggcggcgtcgccgtcggctgcttcgacggcgccaaggtgcggaaggaccgcgtgctgctggtggagccggcggccgtggtggcagagccagacccggtggcgttcgaccggcggttcgggcaccgcatcctggtgagcaccgcgggcgggtgcaagggcgagacggcccccgcggcgcagcagcggtggagcgacctgcgaccgtccgacctcatgttcgtccgcgccgagttcctggtcaccgacgccggccgccactcctgctccgcggccgtgaactccggcaacgccaggagcgccatcggcgtgcgcagcgtgtcggagctggcgggggtgcgccgtctcccgcccatccgcgccggagcgtgcgagggcgagccacgagccggcggcggtggcgcccggcggtggcccgggtcgagctggtgggcgccacgtggggaccccggccgtgcgtaa

SEQ ID NO: 25247 - DNA, 480 bp, Zea mays
  Peptide Sequence Number=SeqID_67026
atggagaagagcaggggcgacatgctggcggaggaggccaagctcgcgcgcgaggggttcaaggcgcccggtcaccagatcctcaccatctgcaagtcgcttgtcgtcgccgccgtcgtgggcggggtaggtatagacacagtgtttacttgcacaatgtgcgctttttccctccttgcccatgctatcctaaaaatcaagggagtggttacatttgtcgaaagtcaaagtagtagatcttatattatcaatgtgtatgttgtgatatggaatgaggcaaagagtcagttactattgataaaggttactgtaacaaaggttgaggttggctgtcttggtgatcgtgtttgtgtggatctttgcagtatcatgcaacctggcggagaccttctggtttgtgtgtacctctcacctgttcactgttgctacacattggttctttgcgcgctagactggctttgcatcatctgggatgtttag

SEQ ID NO: 25248 - DNA, 878 bp, Zea mays
  Peptide Sequence Number=SeqID_67027
atgggcggcaaggactgcgtgccccccgtcgccatggtgctcgtgcagctgggcttcgccgtcatgaacatcgtgtcgaagctggcgctggacgcgggcatgagcccctacgtgctcatcgcctaccgcaacctcatcgccgccgccgtcatctcccccatcgcctacttgcttgagaggtgggcaacgctgaaccaggtgctgttcgtcgtggggctcaagtccaccagcgcgaccgtggcgtgcgcgctcaccaacacgctgccggcgctgaccttcgtgatggcggcggcgctcaagatggagccggtgcggccgggcacggcggcggggcaggccaagctggtgggcacggcggtgtgcgtgggcggatccatgctcatacccttctacaagggccccgtcctcagggtgtgggcgtccccgatccactggcgcttcgcggagcacgcgtcgccccccgccgccgccgccgcggcaggcgcccacacgggccccgccgcggtgctcggggacgtcctcgtcatcgccagctgcgtcgcctgggccgtctggttcattctccacaccaagatctcccaggggttctccgcgccctacaccagcaccgccatcatgtgcctcatggcgggcgtgcagtgcgcgggcgtcagcgccgccctggaccggagcctcgccgtctggaagctcgggttcgacatcaggctctactccgtgctctacatcgggatcgttggctccggggccgggttcacgctcatgtcgtggtgcatccaggtgcgcggcccgctgtacgtgtccatgttcagcccgctgctgctcgtcatcgtcgccgtcgtcggctgggccatcctcggcgacaagatacgcctgggaag

SEQ ID NO: 25249 - DNA, 267 bp, Zea mays
  Peptide Sequence Number=SeqID_67028
atggcccttatcgcacttgtcctcgcgaggcccatcactatgggccgaatcacacatgggcctcccctggtggtgagggcgcaggaggtccgccttcgtcttgcaacaagagagcgaagggggtcgcacaggcctccgtccgccttcgtctgcgcgatgagaggacgaagtcgtagagcgaagggtagcgtgttcaccttcgccccaacatttgccctccgagggaccagttcgactaagtcagctggtgccgaagaccaccgctag

SEQ ID NO: 25250 - DNA, 465 bp, Zea mays
  Peptide Sequence Number=SeqID_67029
atgggcaagggcaagagaggtcgaggctcgcctcatcgtgccgacgacaagtggaagcgcgatccaagtcctccctcggaggacttcggcgactttgagtactcggaggaggaggtttcctccgagtccaaagggtcgctagccctcgcctctcccctggcgtcgtctgatgactcggacgactcccaggggatagctgcggaggtgtggacgtacatcctctccatcgagcgcgccgggctcgaggggtcggatgagtcggaggtctcttctgatgaggaggactcctttggctcgtccgaggagcggagcggcgacgacagcgacaacgagggcggtggcggaggcggtgacagcgacaacggtgacgacggaggaggcaacgacgacggctgcaggggcggcgaaggcgacgacgacggcagcggcggcgccaaggccagtggcaaggcgccactggtttaa

SEQ ID NO: 25251 - DNA, 2580 bp, Zea mays
  Peptide Sequence Number=SeqID_67030
atgacgggtgcggtcgattccagtctggcaagggcgatggaggcgcagtcgcaggcgatagaggcgcagtcgcaggcgttggcgactcaagcccgcttgcttcaacagatctgcgatctccttgatgctcaggatagccattggggagtgctcgaacggacggtgtccagtaacgtcacctccatcgaccccgacgaggtgctcgacaaccactgcgtcggcgagccaatcgccaccttcgcatctgcggccgatgctaccttctccagcactgccggcgtcgagtgtggcacgatccatagctacgcggctaccaacaccgagatcaccgacaactggggcagcgacttcgacagaggagaagacttattcgagccgaacagactgcggcaacacgcgatgctcgacgccgtcaccgcggacgcgcttgaggagttctcctcgctctctgatacaaagaccacgatcagcaaccgcggccccaacttccctaagctcgtcatcgcggacctcgtcgtcgaccacctcttcactgctagcatcgaaggtacacctcccaaatgtttggtgaaatgcttgaacgtcttctcaagcagcgacgggcaccacacgcgcgatgacggacctgtcttcgacacactgggcaacgacgacctggatggccgccaccacctcctcgggcggcggaaacagactgcagtagcaggcgacatcgacgtccgccctgaccctgcagagcgggcagctagcgttaccctggagccaggcgtcgaagcagccgacgcggaagacgtggaggagccgcaccccaacgtcaccgtgttgcatgacgtgtacgaggacacgtgcggcgtgcacctggtcctggagctctgctcatgtggcgagctgttcgatcgaatcaagcacctcgcctccgacctccatgtgccttcgattccgcccatttccaccgctgccttgtcggtgcccgaagcggccgagcttgagctctacggcatcaccgacgacctccctgagttcgtcaagagcatgaccataagcacggtgggacgacatgacctgagctcggaggagctcgacaacctgcagattcactttgcacggataggcgccgacggcgagaatgcgacgctggcgaagttcgagcaggtgctgaaggcgatgaagctagaggcgctgggcccactggcgccgcgcgtgttcgacctgttcgacaacaaccgtgacggcacggtggacatgagggatgtcctgtgcgggctgtccagcctccgcaacttccacggcgacggagcgctccagctctgttcccagatgtacaacgtcgaccgctttgggtgcatcaacaaggatgagctggcatcaatgctgcgagcgctgctcgagaaataccttccaggcgaaatcgcagagcacgggaagctagaccaggtgttcgatgatatgctgactaagggagatgtagcacctggtgtcttcgtgcagatcgcagtgctggatgaccatctagtcgatgtgttgttggatgctgcggtgccgggatggaacatagtgcagagggagggtatatccatattccaccatgcttgctcgggtactcacaatcagaaagcgctttgcagtgagatgttcagtcaggttacagaagaggagcctaggttgtgggaactaaatgtggaaactgacgcctacacaatggacttcctcaacgagcactggaaaatttatgaatgcaattttcttaagtcatggaatctaggaactctcaccactctatgttggaaaagcccatggccaccacccaattcattgcagagtttgcacgctggagtgggtcttggtagcattgcttgcttatggggatttcgggggctcaacttttatggcagtacattacatggcctagtgtctgccaaagcctatgagacgacgattcatggtgcatctgatgagacaaatattggaatcatccgagttgtgttcagggatgagcggattatggtttgccaaattgtggtgagaatgaaggagagtgtgccacctagtgttatcacgatgaacacaattgttggtggcttatgccgagctgggagagtctgtgatgcactggaattcttacttgaaaagaggatagtgtggccagaggccaagggaaatactgtcacctatagccctttgaagctgagagacacacaggatgttcagctcttccaattcattgatggtggtgctccgtttgacttttccaagactcctgaggaagctgcaagagttgggcaaccatggccgtcacctatacagtttgagaggcaggacatccggtctccaattgatatgtttcgcagtttgatgaatgagaaagcgaaaggagatgagtcagaacttgatgacatccatgttgcagtaagggagggaacttgttcccgtgttacaagagttgctgctacaagaccagaacccttgccacgtccatgtctggaagcagagcagcacatgccagataggccatcacatgtgactagttcaacaatgaaaaggactacactatcagtggcttgggggcaagccgccacttaa

SEQ ID NO: 25252 - DNA, 294 bp, Zea mays
  Peptide Sequence Number=SeqID_67031
atggcggcctgcatagtcatcgtggcgtccgaggaggagcacggcgacgacattgcccttgcgcaggaggacatggagtgcaaggcccgagatgtccctggtggtgcgtcggccctcggcaacaagcgacctgcacaggcatccggcgaaggcgaggagcacgagatcagtggtccaagtgacaagcatggcgggtgcggcaaaggggagcgcgacggccatgtacaacaggctgaacacaacgtcgtacatgacggatgcatagagcgcgactggccagggccggtgatgtaa

SEQ ID NO: 25253 - DNA, 414 bp, Zea mays
  Peptide Sequence Number=SeqID_67032
atggtagacgcatgcggggttggtgaagcatgccagatgggcacaagcgacggggttgtgcctggcacaggagaaggcgacagggctgctcttgtctatggtgtcatgcacggtgcagacagaggcaatggggctgcgcgtggtatgatcgtggtcgacggggccacacgttgcgtgggcagaggcattgggtctgcgtgtggcacatgcaagagcgatgaggccacactcgttgatggcgtcgtgcatggcgcaagcgaaaatggcgggaccatgctcattgatggggccacgctaggtgctaaaggttcaacacaaaccaataaaaagatccaagttagggttcaaaagaaaggagcaaaagaaactgaagagaatcctggtctggcgcaccggacagtgttcggtgcctag

SEQ ID NO: 25254 - DNA, 480 bp, Zea mays
  Peptide Sequence Number=SeqID_67033
atgggcgtcgtgtcctacacttgcagtggtggtggtgccgctggtcatgcagcgaccgacggccgccttgtcgtcacggctgctgccctctcgaccaccgtagctctcctgcttgtttcctccacagctggatgcgtcgcaggcgcaggcgcagccgccatgagacaaggagatgccgaggctgaggtccagatgtccatgcaagcaagtgttgctggagctttcttcgtttcccctgacggcggcgacgaaaatgagcttgttagagacatgtattcccgcttaaatcttgtaattaatgagctcaactctattggaattaataagatcggtgatgcaaacatggtgaagatcatctcccctctaacacaacaaagatatgggagcatcatcaccatccttcacaatcttgaggacttgagccaaatgaccccgacgattgtgattagaaagattgcggcatttgagatgtcacaataa

SEQ ID NO: 25255 - DNA, 504 bp, Zea mays
  Peptide Sequence Number=SeqID_67034
atgaaggagtcaaaccactcctccgtggcctcgagggctacacccggcggtcgacagagccgaagtgaccacagtcacttcgcccctccactgactgacctgacaggaagacagcgccgcctgccctgctccgactactgtgccacccgccagggaagctccgcctcgcccgaccctagggctcgggctcaacctcgacaccggaagacgatctccgcctcgcccgacccccagggctcagactcaacctcgacctcggacgacggactccgcctcgcccgaccccagggctcggactcaacctcgacctcggacgacggactccgcctcgcccgaccccagggctcaggctcaatctcgaccaaggaagacgatcttcgcctcgcccaaccccagggctcagactcaacctcgacctcggacgacgaactccgcctcgcccgaccccagggctcgggctcaacctcgaccacggacgacgatctccgcctcacccgaccctag

SEQ ID NO: 25256 - DNA, 1257 bp, Zea mays
  Peptide Sequence Number=SeqID_67035
atgtcctcgtgccaatgcggcgtcttgccgggctccgccaacctctgcgacgacggccgctgcgtctgcgtcgactgcgcgttcgagctcaacgtcgccaggcccaacgcgtcgctcgtccccgtgaagggcggcaggggcaggaagaccatgtggattgccatcgcggcggggaccaccgctttcttcgtcttcttcgtggcattgcagttcgcgctggtcctgcggtgtcgccggcgccggcgccgccgcaggaacgaacaggatacctccggtggtgcgcaacagtcgctgatgccgccgagggtcgggtccagcaggagcagggggcctggcagcgtggtggtggagaacttcatgctagacatgctccacgcctcgacggacgggttctccgacgacagccggatcgggaccggcagcttcgggtccgtgtaccgtggcaccctccccgacgggcgcgaggttgcgatcaagcgcgccgaggactcggcaaaggcatcaagctcggtggcgcggcaccgcgaccgcgagacggcgttcgactcggagctgaccgcgctggcgcgcgccaaccacaagaacatcgtgtgcctgctgggctgctgcgccgactccggcgagcgcgtgctgcgcggggcattcgagtacatgcacgtgtacgccgtgccgcccatcatccaccgcgacgtcaagtccgcaaacatcctgctcgacgacgcgtggacggccaagatcgccgacttcgggctgtcctccgtcctggaccccggcgccggcacgccgcaggagccgctctacacggggggcacggtggggtacatggacccggagtactaccggctgcaacacctgacggacaagagcgacgtgtacagcttcggcgtggtgctcctggagctcgtgtccggctgccgcgtcgtgcagcgctacgccgagagcgtgacgcccaagaacgtggttgagttcgcggtgccgcacatcctggccgacgacgtcgcgcgcgtgctcgacccgcgcctgcccgcgcccacgcccggcgaggctgaggcgctggcctacgtgggctacctcgccgccgactgcgtgggacccgtgggctgcgaacgcccgtccatgaccgaggtcgtggtcgccctggagcgcgccctcgtagcctgcggggcggcggcgccgctgtcccgcgcaagcaccggccgccggtccgtcctctcccgctccggcaccgaccagttcgacctcaccgacacggactag

SEQ ID NO: 25257 - DNA, 810 bp, Zea mays
  Peptide Sequence Number=SeqID_67036
atgccgccgccgcgccggctccacctcgacgccaccttcctcttcctgcccgtcttcctgttcgcgacatggcggcccgtggcggcggcggcgctctccaccttcgccatggccaaggcggacaccactaccatagtgtgcgcgctgctgccgtccgcggcgtccccgctgctggtcgacctcaactgcacggccgccggcggcgaccacgcgcgccaggtgacgtacccgtcctcgcaccccttcgccgcgctggccggaggggagaacttcctctgtgccagtaccgcgtcctgcggggtgctcagcagcggggagctccactgctggcgttggcgcggcctcaacatctccagggacctccgcttcgccgccgccgccgtgggggacggcttcgtgtgcgggatcctcaaagggacgccggcgtccatccgttgcttcgggaacgacacggcggctgcggccgtcgccggcgcgccggcagacgggagcttcgacgtcgtggccgcgtgcggccaccgcgcgtgcgcgctgtccacgacgggggtgctcgcgtgctggggccacgacccgccgacggtcgcccccgacgacgcggccaccgggtacgcggcgctggcattgggggaggccggcgtctgcggcctgcgcaccaattccaccatccgctgcttcggcgacggcgtggcagtgccgccggccggactcgcgcgcgcccagttcctcgacgtgcgcgcgtacggcaaggccttttgcggcgtgctcatgagtcatggccaattactccctggtctgctggggcggacctga

SEQ ID NO: 25258 - DNA, 318 bp, Zea mays
  Peptide Sequence Number=SeqID_67037
atggcgatcatcgtgtcggcgatcttgcgggacgccatgcttggtgtccagacggttaccggcgctcgatcgccggtgaaagggtatgggcgtgcgggagggcaaggtcgagggtcggggcttcttatgggggaggtttcgggcgcgggcgtaaggtggagcgcgcggccaagccgaccgacactcgtggcatgcgctgcgcagcggtcagagtgtgcccaagacagctcacaacacctaagtggtttagacttaggttttctaaaatctttctcttgtcatgagcatcatagggtcaagattagggtgtggctctag

SEQ ID NO: 25259 - DNA, 336 bp, Zea mays
  Peptide Sequence Number=SeqID_67038
atggcagtagagcttggtccggtcggtaaggaagctccacagggttggtggagcgctgaccctcagaggaattggacgatggtggtatgtggaggttggcccacgttcgtcggcggattaccgagcattggtgatgccgatcccactatttcggtgggtcttagcttgtgctatagcttggtgattcctctcaatgctctagggaagttttcagagcaacggagtgggatggaacatgacctgggtcgattggttgcggtggctggcactcggaggcaatggtggggcgctgagctcaccggatttgacaaggtctcgggtagagcttggcactag

SEQ ID NO: 25260 - DNA, 228 bp, Zea mays
  Peptide Sequence Number=SeqID_67039
atggagaattggaatgctctgatgctcagcatcacaacggattggtggtcacacccttataagtatggttatgcccctgtctttgccttgggcaccgggtcttcgagtcttgccgtggccggtgtgtggagttgcggcaagcgaggtctcgaggagcctccgcatggatcgagtgatcccttcgcccccaagctttcgccgattgtaaaccctagaatgggcttgtag

SEQ ID NO: 25261 - DNA, 504 bp, Zea mays
  Peptide Sequence Number=SeqID_67040
atggcgaaaaggattgtcgtaatccatcacatagatgcggcagatgacttggatgccttacccaaggtgaagaggaccgcaaaggggatgctccccggcgatgagccaattcgcggctccgacgagagatttccgccaccgggatgctctgccgcgccaaccaccgttgcagatgccaccacggagaaccgctactgccccgaagccgcccccacgcccacaacgagggccgcagacgagaactacctcgacggcggacgcacgcttcttcactcctatctgctccctctccggcggtggccgaattctgggctagtggatagggcaaaattggcacagcactacaacggcagcgaggtccgcacccttatacccgcggggaagtcagcgcacgattcagctggagccggtatcctcggtcgtggccgttgcagatcgcccgccatgcgcgcggagcaaggggagagcggggctgaccgccagggcccacagagcaacgactga

SEQ ID NO: 25262 - DNA, 399 bp, Zea mays
  Peptide Sequence Number=SeqID_67041
atgaggaaggaagaaagcgatccaagcaacaagagcatgaagaacacgaacaaactctctctcaagtcactaagtggttgtagtggatttgtcacttggagaggctttgattcttttgatttatgtctaggagtgaatgcactagctcttgtattgaatgagaaccttggaaaacttggatccttggagtggtggtggttggggggcactgttcaatgttcggtgcgctctgactctaccgcgcactgtagcgttgcaatcacaatggttaattggaacatggagcaaccactcgagactacagtgctaccacaaggggtggaacatgatgctcttggccaatcaattaggaaagttggtgatagattaccttacctgaaaggggcaagcggagagtga

SEQ ID NO: 25263 - DNA, 135 bp, Zea mays
  Peptide Sequence Number=SeqID_67042
atggaggatcaggcaaggctgttgacggcaagcagtgatacatgttctgcttgcaatggccacgagatccatgtgcctcaaactgcccaacagcaactaactgcagcaagagaactacatttcaagctcccatga

SEQ ID NO: 25264 - DNA, 411 bp, Zea mays
  Peptide Sequence Number=SeqID_67043
atgttgctccatgttaccttaccctgtatatggtatgatgaggaggatcattaccattcatatacactacagaaactatgtaacaggggagcatctatacagttgggtgatgcatttgcctctttaagcgcaaagaaggagcctgttctatatgggaattcaagaatcacacaaatcttagctgactctctaggaagtagctcaaagatcttgctgatcgtgcatgcaaatgattcacgcaaacaattgcatgacaaagaaaaggaggttctagacctgcggcaagaagttattgggttaaaacattctctaaaagaggctaacgaccagtgcatacttctgttcaatgaagttcaaaaagcctggagagtttcatcttcactccaagctgatctcaaggttgatatttaa

SEQ ID NO: 25265 - DNA, 528 bp, Zea mays
  Peptide Sequence Number=SeqID_67044
atgtcggcgacgccgctgcccccgccgggccccgatggcgcggtggcgctcctgcctccgccgggtacggacatgactgggatctgcttccgcgaccagctgtggctcgacacttacccgctcgatcgcaacctcgtcttcgactacttcgcgctctcccccttctacgacatcacctgcaacaacgagtccctccgatcgcgccaaatccaccccctcgacatgtctcatctgacgaagatgaccgggatggagtaccttctgagcgaagtgatggagccgcacctatttgtgatccggaagcagaagcgggagagccccgagaaatctagccccatgctcgcctactacatccttgacggctccatctaccaggcgccacagctctgcaacgtcttcgcctcacgcataagcagggctatgcatcatatatcaaaagcctttaccatagcatgttcaaagttggagaagattggaaacggattgattgtaaggtgcctcatccccatggtgttacatgagtcctga

SEQ ID NO: 25266 - DNA, 906 bp, Zea mays
  Peptide Sequence Number=SeqID_67045
atggtcatggttcccgaactgcgcttgttgatgaacatgtgcatggtttcaagtgaagttaatgtgttgagtttggacatggagacatggagacagcatgttactggagggaagctccgggaaattactgaggaagctaaggccttttcaattggaaacaaggctttagctgctctctttgttcacacgccagctggtgaattacagcgccaaattcgtgcatggcttgctgaaaactttgagtttctatctcgcagcccccctaccactgatgctttaggccagcttttatcagaatacacaaagcgtgacatagctggcacattggcaacggaggaggctgatgatcctgcacatgtcagtaaactccgctctgctctggagtctgtggatcacaaaaggagaaagatgccctctcttcttgatatagatcatccatgtgctcagaagcagatcatggaggcacggaaagttgtcgagtcactgcaagaagaccctgatgatcctgccccacagtctaatgcattgggagagggcgaggtttcacagtggaatgtactgcagttcaacacgggaacgactgcgcctttcatcataaagtgcggagcaaattccagtggtgaactggtgattaaggctgatctgcgagtccaggagcctaaaggtggcgaggtgatccgtgttgttccaagaccaacagttcttgcggacttgagttttgaggaaataaaaggtgtgtttgagcaattgccagaggcagttagcttgcttgccttggcacgaacagcagatggtacaagggccaggtattcaagattgtacagaaccttagccagcaaagtgacggccttgaaagagactgttgcagagatggagagaggtggtgttttcaaagatgtacgataa

SEQ ID NO: 25267 - DNA, 411 bp, Zea mays
  Peptide Sequence Number=SeqID_67046
atgggcccgtactcgaatcgttcgaggattacgcgcaatctcaatgaaccattcgactttcccgcgcccagcgccctcgaacgtcggggctgcggcccgcgcaaactggccgctctcaagttttctcagaggcactccactataattcattggactgttcggaacagtgaacatgcagaagtcagaactacaaagtcaggatgcatcggactgtctggtgtgccaccagactgtccggtgctgcaagaggacaaaggacttcaacggtcaacagctctaaaccccaatggttggctgacatggcacccaccggatagtgaacagtgtcatgtccgatgcaccaccaaactgtctggtgtgcccattgacagcaaagtcagccaacaactaggaagtggttggaggctataa

SEQ ID NO: 25268 - DNA, 1743 bp, Zea mays
  Peptide Sequence Number=SeqID_67047
atggtctacaaagagagaaggtcagcctcctggtcgttcatgccacaggcgggcgcatgcccttggcctggctgcctggccgcctgtcaacagatgcggtcatgccgatgctttcacaatcccgtgccactgactaccgccctgctccgagcgataactgcgtgcaccggctgtcgggaggcgcaagccctacactcactcgccttcaagacggggctcgtgcccgacatggtgatcagcaccgccttgctgaccagctacgcgaagcgtggccttgtggctcccgcccagaggctgttcgacgaaatgccgcgcagagacgtggtcgctaccaacgccatgctcgccgcccttggcgccgctggaagggtcacagacgccggggcgctgttcggccggatgtcggacaggacgccggcgtcgtggaacaccatggttacgtgctactgcagggccggcgacctcgccgcggccagggacgtcttcgaggccagcctccgcgccgcgagcagcagcgtcgtgtcgtggaacgcgatgatcgacgggtactgcagggccgggcggatggacgcggcgcgggagctgttcgaccggatgggctcctcgctgccggacgtcgtcacctggaacacgatgatggccgggcacctgcgcagaggggacccggcctccgccatctcgatgttccaccttctgatgcgcaggcagcgggagggggagcagaggctgagacccaccaacggcaccatggccaccgcggtgaccgcgtgcgcgcgggtgggggacctggcactgggccggcagatccatcacctcgtccagcaggcggggatatggatggacgccgtgctgagcaacgcgctcatggacatgtacttcaagaccgggagcgtgggctgcgctctcgacgtcttccgcgccatgccctgcagccccaacctcttctgctggaacacggtgatctcagggctcggaatgaacggccgcggcgaggacgccgtagctgcgttccacgacatggtcgaggggagggggagggtgaagaatgggagcagcgtcaggcccgacggggtgacgttcgtggcgctgctgtcggcgtgcagccactccggcctggtggtcgaggccagggagttcttcttccagatgctgccggtgttcggcctaccgccccagcccgagcactacggctgcatggtggacctcctgtgccgcgtgggccacgtggacgaggccgcgctgctcgtgcaggcgatgcccggccgccccaacgccaaggtgctcggagccctcctgctcgacgcccacgtcctgcagcggtggcaggaggacggtgtgaggctgggcgagtgggcggcgcggcggatatcggagctggacctccacgacggcgcggcgtacagtctgtccaacgtgtacgcgtcgctgcagcgatgggatcgcgtcgaggaacagaggaggcaattgagggccgccgtgagacacgccaagggcccgcgccgcaagcggcctggccgggcttgctccgggcccgcgccaccggcctggcttcgattggcagtcaaggcaggcatgcagactgacgatcgatggagtgtctgtgactcaccagcatctcaaaaaccaaatgtcgtcactggctgtccggatcccctgtcacgcaacgcaaagcgcgcttcttgtttgaattcgtgccgccaatcaactagaacagcaggcgtgcatagcttattgcacgcttga

SEQ ID NO: 25269 - DNA, 423 bp, Zea mays
  Peptide Sequence Number=SeqID_67048
atggtggtggtgcgctcgagcccgggttcctttgggccggagctgcgaggcggtgccctgtgcctgcgtggctgtgctgcggctacgccgctctgtggctgtgctgcggctacgccgctctgcgcctgcgtgctcgtgccgtggctggtgcacacactgcaactttcaacagcacagtccttcaacttcgacacatgcagggcgacaggccgacagccagtggccgtgcgcctgctcacggcggcggcgtgcaccatcgacaaggcccacacccatgtgttcgcatgctctggcgcggcggctatggctcatagaatttcacggttacaacaaatggtggtgtcctcctctatatatagtgcaaagttagggtttcggctaaatgggccacatgggccttcggggcccaaactggtttcttaa

SEQ ID NO: 25270 - DNA, 1509 bp, Zea mays
  Peptide Sequence Number=SeqID_67049
atgggggcttcaaaaaggtttctggtagggagaatggtgaacagtagaaggttatggagtcctaaagatgagcaagcctgggttcatgacagatttgatgagatggacctgcatgattttcatggtgacaatccaaaaagaaagcagggaggtgtctttagaggacgtggtggtggacaaggtggtagaactcgtggtattagccgtggtaacttcagaggcagcagaactcgaacatactatcatgatggtagcaagaactacagctatgttccaaaggaatctcatgcataccgtgataacaccaagaatgcccatcattcttcacacattaatggaaagaatagagttccaaaaccatctcgtgaccactatgatggtgctaaaagttatgacattgtcccaaatgaatctcacatttaccatggtgatgctaagagccaaaaaaatgcaccaagagtagttcgagggagaggctccaagcgttaccaaccacgcttgaaaagcacctctgatgtatcttcagtgcaaaataccaaatctcagagtcttgaaggcacttcgtcaaatgcaaacttggtaaaagatgaagctcaaggaccaaattcacgacttgagcaagtccttcctattaagcagactgttgcatcaaacttgaattcagcttcgccaccattttatcctgcgaggtcatccagtcaagagtttgcagttggtcaaggagagaatacacaagaacttagtactaacctagtaagaggaaaggcttttgtgccatcggggcatgttgaagctgctataaatggcatgaatagacctgcactgcttccacctgcatcgtcatcaaatggtccatttcctgtagccactaatcaagtcaatagagattatggccatcctgcacatccaattgttcaacaaaacccagttcaaccccctacacgatctgcacccaggatgcctgcccagatgtttggtgcaacattcagcaatggcagtaaaatatcacctgcacaacctacatcaactattttagatgatgacgctgaaatttcttcacctagtggatcaaacaaatatgattctcggttaacagttaaaggacaacctgatgaccaaggagaagagcgagcttcgtttctctatggtggggctcgtgttcttggggctacaagcgcaatgggaatcacacttggtgatcaaaattttcatggtaccccagcattgctgccagttatgcagtttggaggtcagcgaccagttggacgtggtgttccttcaattggtatggctctgccaggatttgtgtctcaacagcaacttggtatcaataattctgagatgacttggctaccaatattgactggtgcctctggagctctaggagcaccttatggttcaccttatatagccgtcgatggaagttattactctcgaccgcctgaacaaccatcttcatcagtttctaatagaggttgcaggcgacgcaagaactcaacaccaaaataa

SEQ ID NO: 25271 - DNA, 243 bp, Zea mays
  Peptide Sequence Number=SeqID_67050
atggaggaggaattccaggaggcccgaaatcctatggccggcaggcgtggacggcggcggcgaggcggcgcctgcttgctcgtcgtgccgccgcacgttcttgtcgcgcggcggaggaggctggtgcgcggccggacggcggcctactccatgtgcgctggcaaggggaggacgctcaaagggcgagacctccgcgacgtccggaacctcgtcctcaagatgacaggcttcatcgaggagtga

SEQ ID NO: 25272 - DNA, 1332 bp, Zea mays
  Peptide Sequence Number=SeqID_67051
atggagaagcagaagttcctcggagccaactcgacggcgcggcggcgcccgctcagctccctctccggaaacaagccgagcccggcgctgcaatccctgatctgcaaggcccaccctcacgccgaccccgccgcccaagcgaccaccgccgaggtagacgcggcgctcgaccgcctcctcttcgcccgcaccgacctcgtgggtatcgtttcccagattgacgaattgatctctgaagccttaaaatgccaaaatgtgtccaaaaaagcaacacgagagatagaatccttcaatggcttcttaacagacactaaggcttccttcaagcaatggtcttcaagactgaagcaagcactagagaccggtctggtgaaaaccgaagctatcccaaaaaacacaccgggaacttgcttaaatactgctgcaaaagggaatgacaagttgatcagctgcagtaccaagctacctgatacagttgagagcggaaagcagttgtttctcttgacaccactgccaaaaacaaaagcatgctcgtcaaggtgccaaacatcaaaaacccagatgaagacagtttctagcactgaccaattgaacaatcttctaaggcctgtttcaaagctaaccatttctgataataatcatcctgatctagagcaaagtgtgaaggtaaaggaatcatggactagcactacgacacctcatgttgctctagcaaacaaggcctcactagaagacaagctctgttcgcctcgtactttctcagttcagaagagcagaacactgcctagatcatgcctgaagacagcattatctagcaagcagcagctgttctctccaatcccggagggaaggaaggaggaagacattgacagcaatggttcaattggggatgacaaatgctcatctgataaaatctcaaaggatttagcatcaagatatgatatttatgggcttaatcaatcaaacagacaagtcgaagatcctcttcagtggtttctgtcaccactgaagacaatggtgttaatagatccatcagaggataatcaacttccaactccagcgaggagtaacatgggggaaagattggatattgccgatgacaagcccatccacactcctgctgtgcatagcaaggccttacttggtaccccctggaaaggcttggagagcacgaacctgaagggaaggtgtgctggagaaactactcttaagaaagaactgtggactcgatttgaggcggcttcaaccaatgagctgcactttgataaggtgcgcttccagcagacagacgcaaaatgttttctggacatgcttgaagaagaggcgtcgtga

SEQ ID NO: 25273 - DNA, 1467 bp, Zea mays
  Peptide Sequence Number=SeqID_67052
atgcggctggtcggacgccgcaggaccggcgtcctgctgctgctcgccgtcgcgtccgccgctctcttctgctccctcttcgccgtcgtcaaagatgacgccaattcaactagtattgtaaataattacgaagtcccaaatgccatacagaagtcagtgtatcccagcagaacacgacctctaatgatgtctggaaaccaagagtccaccagtgttgtcaacaaaattgattttccaaatcggcttcatctttcatttgcaaacttcacacatccttgtgaaggtttctcagttcctcctcccctggttgataagaaacgcactggaccccggccatgccctgtttgctatgtttccgtggaccaggcatttgccttgatgcccctacaagcttcaccatcacctgtcctaaaggacttaaactatgtatcagaagatggtgttactgcaaatttatcaaatcagggatctggatttggagggcatccatccctggatcagagaaacgattctttcaacattaatgagtcaatgactgtccactgcggctttgtcagaggaaagaagcctggccaaggtactggattcgatatcaaggatgacgatctgctagagatggagcaatgccacgatctagtcgtagcttctgctatttttgatgaagaaacagaggcttatgtcaagaattctagttctctgtacaacaataataaagttggactgtggaggctgattccaaaacttctgctccataggctttttccaaatgtgagattttcagtttggatagatgcaaaacttgagcttgttgtggatccctatctcctgcttgagaggttcctttggaggaagaataccacttttgcaatctctcggcattacaaacgctttgatgtgtttgaagaagcagaagcgaacaaagctgctggaaagtacgacaacgcgtcaatcgattaccaaatagagttctacagaaacgagggcctaacgcattattcttctgctaagcttcccatcacaagcgatgtccccgaaggctgtgtgatcatcagagagcacatccccatcacgaacctgttcacgtgcgtatggttcaatgaggttgatcgcttcacctccagggaccagatcagtttcagcacggtccgggacaaaatcagggctagagttggctggatgcctgagatgttcatggactgcgaaaggcgcaactttgtcgttcaggtataccacagggagctactggagcagatgattgcatctggtaggatgccccctttggcggcggctgtgacgcacgcgaatgtccgggtaggtagcaggaaagctcctccgacaaagaagccctccgtgaaacggaaaagggagaaaaaatcgagctcgcgacggcgtctcccgaaacccatcgcccaggggttggatgccaatgtgacgcaagtttttttctcagtagcagagtctggatag

SEQ ID NO: 25274 - DNA, 894 bp, Zea mays
  Peptide Sequence Number=SeqID_67053
gacttagcatattgtggtcttgatgttgatcacctggatagaccagacagaatgcgggataattcacatggcagaataaatgttgttaagggtgcagttgtatattccaacattgtgacaactgtatcaccaacatatgcacaagagggtgggcgtgggctccaagatacactcaaagtgcactccaagaaatttgttggaatacttaatggcattgacacagatacttggaatccgtctacggataggtttctcaaggttcaatacagtgctaatgatctatatggaaagtcagcaaacaaagcagctcttaggaagcagttgaagcttgcttccacacaagcttctcaaccattagttggttgcattacgaggctagttcctcaaaagggtgtacatctcatcaggcatgcaatatataaaataactgagttgggtggtcaatttgttctgctgggttcaagtccagtacagcatatccagagagagttcgagggtattgcggaccaatttcagaacaacaacaatgtcaggctgcttttgaagtatgatgatgctctggcacatatgatctttgcagcatcagacatgttcattgttccttctatgtttgaaccatgtggcctcactcagatggtagctatgcgatatggttctgtgccagttgttcggagaaccggcggtttgaatgacagtgtcttcgatttggacgatgaaacgatacccatggaggtgcgaaatggcttcacctttttgaaggctgatgagcagctgggatacttcagtttctcaatacgaagaaatctatcagaaaacagccactcgagccagggcagcggcataaacagcagagacattgagacagttccctgctgtctccatgaagtctcctag

SEQ ID NO: 25275 - DNA, 294 bp, Zea mays
  Peptide Sequence Number=SeqID_67054
atggggaggggtgagcgtcgcgggcaggacaggatggaagaactagttgtcaggcgtgcagcaaacagaaaacgtgcaacaaccccttctctccagtatagcttgcgtgtacaagaggcgctagtgataggtggattgaaggaatgcatttccgcgagccccgccggaggaaaaggatctagtggtggattccaaagaggaatagatcaaagaggagatagtaagccgaccaactatggcactggtggtcaggcaacagatgactggtaccttgtatgccgttctagcgcctaa

SEQ ID NO: 25276 - DNA, 267 bp, Zea mays
  Peptide Sequence Number=SeqID_67055
atggtcaggctggccgagctgctggtggcacatgctcggacgccaacagtgcccgcccgggacatggccatgctggccgcgatgcagtggagattggcgcgttatagatgttgtggagaagtctcacttggaaggaaatatgctcccaacaagatatggactggagggggtggaggtcctgtcggctctcagttcggccgttttttttccctttactttacatttgtctcactaaattgcatattcagaacgaatcaagctgattaa

SEQ ID NO: 25277 - DNA, 654 bp, Zea mays
  Peptide Sequence Number=SeqID_67056
atggacatggcttcaggttcaggctttcaacaaggcaaacagtcatacgtgatacgcccatggacatgggcagggcagcaacaggccaacagccatagtgccatactacaacatgaagcaaataatcactggaaggtttcaggctttcagcatctaagtaaaactgaaaaccaacaaacatggacatgggcagcaacaggccaacagccatacgcccatacctacaggctacagtacaacagcaccagaaaacagggacaagctctgaatctggattctggagactggagaccgtacctgcaggccggctgctggcgccgccgcgcgggggatggaggagggaccgagggggacgatgccgccgtatcccccgtcaccggtagcgcgccgctgtcacctgcacagtgttccgctagggttcctcccagctggttgcctggttcgtgtagtgtgtgcctggggcctgggcgttgctctgttggctctggttgtgcagcttctgctcacgtggtaggaatcgggaaaaaggaagctgggctgggccgctgggcaagtgaagtgggccactgcaccgaaatttcaatccagccaggcaggctgatcgttactaaactaatcggacgccctgatctcgtcccgattgatcggctctag

SEQ ID NO: 25278 - DNA, 1044 bp, Zea mays
  Peptide Sequence Number=SeqID_67057
atggagcaggagccgcaccggcccatggagctgcccccgggcttccgcttccacccgaccgacgaggagctcatcacgcactacctggcccgcaaggccgccgacgcccgcttcgccgcgctcgccgtcgccgaggccgacctcaacaagtgcgagccctgggacctgccatgtaagcacgcacgcgccggcatagctactagatcatgttctaaaaggaagggagccacgggcaaggacagggacgtcttcaggggcaaggcgctcgtcggctccaagaagacgctcgtcttctacacggggagggcgcccaggggagagaagtccggatgggtcatgcacgagtaccgcctccacgccaagctccacggccacggccacggccacggccaaggcgcagccgtcgtcgtcgtccccaaggccgccgggaccaagaacgagtgggtgctgtgcagggtgttcaagaagagcctcgtcgtaggtggtgcagctgcagcagcagcaccaaccgcaggcaagaggggcggcacggagacgtcgtccaactccaagacgggcgacgtagcggccatctcccacctccctccgctgatggacgtgtccggctccggctccggcgccgccgccgcggcggcggcacacgtgacctgcttctccgacgcgctggagggccagttcttggaccagacgacgaccacgccgccgccagaagccgccgccgccgccacggacgacgacggccacctcggcgccctcgccgccgcctcctcctcggccttccagctgcccggcttcgcgcactactactacggcgggggggcgccgcacctgcaccagcaccacggcgccgccagcctggtgcagctcctggagggcagcgttccgccgtgcaataagggcggcgagcgggagcgggagcgggagcggctgagcgcgtcgcaggacacggggctcacctccgacgtcaaccccgagatctcctcctcctccggccaacgcttcgaccacgaccacgaccaccacctctgctgctggggctactga

SEQ ID NO: 25279 - DNA, 636 bp, Zea mays
  Peptide Sequence Number=SeqID_67058
atggactccgcctcgcccgaccccagggctcggactcagcctcggctccggaagacgatgaactccgcctcgcccgaccccagggctcggactcagcctcggcttcggaagacgacgaactccgcctcgcccgaccccagggctcggactcagcctcggctccggaagacgacgaactccgcctcgcccgaccccagggctcggactcagccttggctccggaagacgacgaactccgccttgcccgagcccagggccggactcagccttggccttggacgacggtctccgcctcgcccgacccggggctcggactcgacctcgacctcggaagacaggctcaacctcgacctcggaggagcctccgcctcgcccgacccagggctcggaccgaccacgtcacagggggccatcattaccctacccctagctagctcaggctacggggaacaagaccggcgtcccatctggctcgccccggtaaaacaaataatgatggcgccccgcgtgctccatgacgacggcggctctcagccccttacggaagcaaggagacgtcagcaaggactcgacagccccgatagctgtccttccacaaggctccaacgctcctccgacggccacgacatcacatga

SEQ ID NO: 25280 - DNA, 168 bp, Zea mays
  Peptide Sequence Number=SeqID_67059
atggaccggaacctgagtgggttcctgatcgggtgcgtgggcaccgccgtgacgctgctggcgtaccagcagacggcggtgaccagcacgcagtgcgtcgccgcgggcttcgtcgtcatcctcttcgccctcttcgtcaaggaagagtctgctgtatatgggaattga

SEQ ID NO: 25281 - DNA, 693 bp, Zea mays
  Peptide Sequence Number=SeqID_67060
atgccaacgctgtttgttggagcgtttttttctctcggtctctcactttctctctctctcccaggcgtcgggctgctgtccatcccgtacgcgctgtcggagggcgggtggctgagcctggcgctgctgctcctcgtcgcggccgtctgctgctacacgggcctgctcctgcagcggtgcatggacgcgtccccagccgtgcgcgggtacccggacatcggcgccctggcgttcgggcgcggcggccgcctcgccgcgtccgcgttcctctacgccgagctctacctcgtcgccatcggcttcctcatcctggagggggacaacctggacaagctgttcccgggcaccagcctcagcctcggcctccgcggcgccgccctcgtggtctccgggaagcagctcttcgtcgtcctcgtcgccctcgtcatcctgcccaccacgtggctccggagcctcggcgtgctcgcctacgtgtccgccagcggcgtgctcgcgtcggccgtcgtcgtcgtctgcgtgctgtggaccgcgctggccgacggcgtcggcttccgggccagggggaggatgctcaacgtcagcggcctccccactgctctcggcctctacaccttctgctactgcggccatgccatcttcccaacgctctgcatctccatgaaagaaaagaaaaggttctccaggttttactaa

SEQ ID NO: 25282 - DNA, 420 bp, Zea mays
  Peptide Sequence Number=SeqID_67061
atggcggcgttcaagaacgggagggcgaggtacgtcctgacgctgatggggacggcggtgtgctggcaggcggcggccgtgggcacggtgaggctgatcgtcaggatgtcgtcgctgttcgccaacgtgacgggcacggtggcgctgccgttggtgccggtgttcgcggtggtgctgtttggggacaggatgacgggcatcaaggccgtggcgatgctcatggccgtgtgggggttcatctcctacgtgtaccagcactacctcgacggccggcgagcggcctccgggaaggccgggacggagtgctgcatctgtgctgcacggacggcaggcgacactagagatggccaaacgggccgcccggctcggcccggcccgggcccggtgaagcccggccaaaagccgggccgggcctgctga

SEQ ID NO: 25283 - DNA, 747 bp, Zea mays
  Peptide Sequence Number=SeqID_67062
atgcccgtcattccaagaccatcccggcatccgcccccacgggacgccgccgacgccgatccgcacggcgcgcgcaccacgcccgacgacgagcgggtcctcgccgagttccttgaggcctccctccgcgtgccggacctctccctaccccgcggaagcgcttcggcttcccgccgcggcgccggaaccggacgggatcccttctcacgcccttgtttagggcgacgcggacatggagcagcgggcgattccgggggcagcggagtccggcgcgttccgtgtgaccggcgcagtcgacgctcgcgaggcgcgcgacgccgtggaggcggtgtcggggctcgtgtcgcggcgtcggaggaggagaagcgtggcctggggagatggttccgaaggagagatctagagccccgggaggagttcttttggttccggccgatgagcgcctacgaggacagagtgttggacgcggccttcctaggctccacataccgtgcgttcaggcaggtactcacatccgtatgtccgtatgtcaatgtagcgatagcttgtgctagctcggtgcagggcgacgcgggcgtggagcagcaggcgattgcggcggcagcagagtccggcgtgttccgcgtgaccggcgcggtcgacgctcgcgaggtgcgcgacgccatggaggcggcgtcggggctcgtgtcgcggcgccggaggaggagaagcgcgacctggggagatggttctgaaggagagatctga

SEQ ID NO: 25284 - DNA, 174 bp, Zea mays
  Peptide Sequence Number=SeqID_67063
atggccccgttgccccaaagggatctggaagaccctaacaccccgaagagccctgatgcatttaacgattacttctccactgttatagacttgatgcgagtctcaatcccatctcactcgatgcattacctattacattacatgacagactcagttgatctactagaattttag

SEQ ID NO: 25285 - DNA, 459 bp, Zea mays
  Peptide Sequence Number=SeqID_67064
atggaaagtaggttgtcagaatacgcagtggcgtctctctgcgtcagtccggcagagtttgcggatttggcttcaggtgaagggtgcagtaaagttgttcgttcagagttggtcttcaaggcagatcttacggagcagatttcgcagaagaggatccctgcatctgagaagttcaaatggggtttggatgagcatgccttcaatgcttcgggggtcttgaatactggtggtgatttgtcacatcggcgtggggtgaccggcggagcagtgccgagggacaaatctcgtcgccctatccgtaggtcgtgcatctggaaggggatgacaggtgcttcgtcgattattgatgaaggctggtctgtggtgaagccaaaattctggtggcggaagagctatgattctcatggagagtttcctctcaaacaacatagtgagatgaagggcaccagttttttttaa

SEQ ID NO: 25286 - DNA, 420 bp, Zea mays
  Peptide Sequence Number=SeqID_67065
atgaccccgcgcctgagcccttttcggcagcccacgcccactcactcactcccctcgcccagttgcgcccctagccgacctccctcatgctctctctcgctctgcacgcacccaggaagttccgccacagcttgtcatggtctcgcgcccgttctgcggtcgccgttgagcccccgtcgtgtcctttgcctcggtgagttccgcctcgtcgtcagtagctctagacacccctcggttcgccccgacccctctggttcgcctagtccgcgctcaccggagttctccccatgcagtcagagctccgccaccgtcaacccaaggcgtacctatgtctctgtcattgctccgatgctccagtgtttcctctcaaggcccctgtactcttataaacagacccatggcctttcagataaatcatag

SEQ ID NO: 25287 - DNA, 216 bp, Zea mays
  Peptide Sequence Number=SeqID_67066
atggggagtcatgatctctgggcagaacgggaatcacgactcgtgggtaaagtgtgcaacctctgcagagtgttagaaactggtatatcagccgtgctcacggttaagagcagccttgggatcccctttgattggaagaactttggattctcttatatgatgatggttaatgatgatgaatataactttgatctctggtcatcgaacttaccataa

SEQ ID NO: 25288 - DNA, 516 bp, Zea mays
  Peptide Sequence Number=SeqID_67067
atggcgggttatttccctaaaactccaggggtttatttacaaattaggcttagcgaaggggtaagatgtattgtgagccgaccgattgtgaatcaagggtttggattagaagcccccacatccgaactggatgtaaatagccgagagggaatctcgtacacccgatcatatccaatggtcggattgggacacatgaaggggtatgcgatggcgcgatctcatccatccatcgccaatccaacggccaacccatcttcttccctcaggacccgcacagaggcggcgccgcccagagcgtgcggtggcgtggttgccggagcaaggtcacccatcaattttgaatgcaaatccaagcgtggcgaggcacaaaatgacgtggatatcatggcggatgtaaagggggtgtcataccgtgaatcgcacagctctaagccttggccacggtgcatggcgggcaattggactcacctggatggtcgtttccccccattctggccacagacacatccccgatga

SEQ ID NO: 25289 - DNA, 486 bp, Zea mays
  Peptide Sequence Number=SeqID_67068
atgggaaaccaggagaaggaggccgagcgagctggagacctggaggtgcgtgcagaggatagggaactgcgacacgagcagggagaactggagggagtaccgcgcgtagagaaatcggctagggagtgggtgcggctgactggaatccgagcacagggcactgctgcgcatggggaagaagccggggaggagcagaggtcgaggagggagttggagatggccgacgttggggcaggggcaggaccgagcgccgtccgagctccggccatgaagggagttctgggcgcggcagtgagagagaggatctgggcgcgcaaggagcagggcagtccaagctggaacgcggcagggagaaggcagagggagcaggggcgcagcaagggaaatcaggggcgcaccatggatgagcggagcgcgcaggggcgaagaagacccggacgcgcggcttgcagggtgtcgagcataaagggcgcgcggggaagatga

SEQ ID NO: 25290 - DNA, 375 bp, Zea mays
  Peptide Sequence Number=SeqID_67069
atgggtcggcgcgagacggagcgcgaaggggtgaaaaggcagccggagagagggaggtggaaatcccgcggccttcgtgtttgtcccgtgcccaggttgggcgatgtggaggctcctccgaggtcgaggtcgagtctgtcttccgaggccgaggtcgagtccgagcccctgggtcgggtgaggcagagaccgtcggtggaggccagggctgagtccgagccctggggtcgggcagatcagagttcgctgtcttccggggctgagcccaagtccgaaccctgggtcgggcggaacggagttcgccgtcttccggggctgagcccaagtccgagccctaggtcgggcggagcagagttcgccgtctttcggggctga

SEQ ID NO: 25291 - DNA, 210 bp, Zea mays
  Peptide Sequence Number=SeqID_67070
atggtcctttctccaccgcagataatctggtcccatggcctggaatttctaccacgccactgccggggtagtgtccttgaacgccggatcgtggtcttcgctgcggcacagtgtggccgccatgcccagtcgggtgtgggtgggggaagacttgggcatgaccgttggattcaacggactgtccagattaaagctgatgtggccggatag

SEQ ID NO: 25292 - DNA, 843 bp, Zea mays
  Peptide Sequence Number=SeqID_67071
atggatctggggtacttacgatgggagcctaaggtggaggtaggagagatgacatatcgatctccccacgacgggcacctcctcctcctctttgtcgcgtcgttccttaagttgtcgcaacacgtcctcatcctctttgtcgcatcgttcggcgagttgtcgcagcacctcctcctcctggcgctttatgaggtcatcgaattgatgctggtcatcagcaggaagtgcctccatggtcgccttgatgatgttgatggtggagacgatccggccgccccggctcgcgcggcgcaagtagccgttgcattgcacgcgataccccggtcccatgtcccatccgattccgagctgcgccgcctcgcctataaatacgtcgtctcctgcaaccttctccccatcaccaagttttggattccagcagcggcgcccccaggccaggccccacccgctcagcctcctcagctgcccaaccttctccccatctgctcagcctcagctgtcattcccgcgaagcgccgtctcccggctctatcgatggaccgagtcgccgccctcgtcgtcgcgctcctcgccctcttcttcgccgccggggccacggcgcaggccccggcctcgtcgcccaagcgcactccagcgccagcgccacccaggacggccttcctcccgccgccgccggccagggcgcctatggcctccccgccctcgcctcccgcgatggcgccggtgcccgcgccctccgccggcgtgccggccacgagccccgtcggcgcgggagctgcctccgccgccgccgccagcctcgtggccatcgttgccgccgtggcagccgccgtcgcgttctag

SEQ ID NO: 25293 - DNA, 952 bp, Zea mays
  Peptide Sequence Number=SeqID_67072
gaggctccatgtagatcagtacatgcctcccgtccaggaaggcagggcaccacatggtggtcatggcaagcatgaatcccgcttaaccaatccgctacaaagggagcagaggtggcagggtcttagggaggacaagggctatgcttcgcggaagctgccaaatgtgaatgcccattacacatctggtaaggcactggtgaaggaggtgcaccatttgacaatacctgctggcagttcagttccagtggaaattacggagaatcaagcgagtggtttggaaggaggcagaatagggaaagtagttttggaggatggaattgatgaagaaggggtagtggaggcaagtaagtttgaagtgtcatatgaaaagagtaagattagatttgctggacatgatgaacaagatgatggtggtgacagggaagatgctataattgagcagatggcacaaaatctgctgattgatggcaatggtgatgccaagggagtagtgttggaaaaacctatcctgaggagtaaggccgcactccagggctccaggccaccgctgccgctgcttcaggccgccgcctcctcccccgtgcagcctcatccctcccccgtgctcagccgctcagcgtcgtcccccgtgctcagccgctcagcgtcgtcctccctcctgcaccgcccgtccggcgccgccagccccgcctctgcggctgctgcctgtgccgctgtccgcccgccgccagccccgcctctgcggctgcgcttgtcccgcactcctgctgtccgctcgccggcctgtcccgcattcccgctgctgaaaggaagaaggattggaggtgaggtgctgtcctcctgttttgcgtctgttcccgttgctacagactacatactacagagactaccagagtacagaaacctgtccccactgttctactgtccgctgggcgtatgctcccactggtga

SEQ ID NO: 25294 - DNA, 585 bp, Zea mays
  Peptide Sequence Number=SeqID_67073
atggcggccacgaccgatcggacacggggtctgggcgcgcggcagctcgctgacttaggtcgtgctagcagcgcgccggtggccaggggcatggggacggggctgagcgtgccgagcgcgcagctactcgaccgcgacgcgcaggggcgaagattcgccggcgaatgggagggcgcggctgccgcggcgctaggcgccgacgccctgctcggggagaagacggacaggggaggagggacgagggcgtccgggttggctcagccgagcctcggccatggcgagcgagcggcgaggaggagagcggtggagagaggaaaggggggacgagctcacctcagcgaagcacaacgaggcgctgcgcacgcgagttcggcgacccgcacggcgacggcggcggcgctccgggcggggcgcggctccgacggcagcgatggcgaggcggagagcgaggtcgaggcgaggagaggcggcggtgggcgagaaactgtgcaagaatcacgggcgtttcggttttggaggcgtcgtgggcggaaaaaactgcgtagagccgtttggggaagatgtacagtggagagcgctccctga

SEQ ID NO: 25295 - DNA, 441 bp, Zea mays
  Peptide Sequence Number=SeqID_67074
atggaggagccacgaccagccgacaagcccctgtgcgcgcgagcttgtcctcccgtggtcggcctgcttcgcccctgtgcaccggcgtggccatctcggtgcccggcacggcccgcgtgccctcggcgcggctgcgggtgcccgcggcgcgtggccggcgtgactggctacctgcgcagcgcgcggccagcctaccgtttcggccagctgtgcatggtcggcgtgcccgcggctcgccagcgcgccctcggcgcggcctgcctgtggccggcgtgcccacgactcgttcgcgcgtctccggcgcagtctacgcggcatagcgacagccttgccgtcgcttcgcgtcgtgcgcgcagcacgtcgtcgtgcctcgccactagatcgcctggccgtccgccgtcgttgcaagctcaatcgaatctagtttataattttaactag

SEQ ID NO: 25296 - DNA, 453 bp, Zea mays
  Peptide Sequence Number=SeqID_67075
atgccctcgccccccgcacagatcttcgaagaggccgccaccccgcccccgttcttggcccctcattggcgtcgggctcaccacggcacgggctgcactccttcgccccgctcgcggccgcggtgctgggccacctccgggcctccggagctggagctggcgcgcgtcgaggccgagatgaggtacgcgttcccgcccgacctccgcgccgtcctcgccgcgggcctgccgttggggcccgggttcccggaccggcggtcacgcacggggctgcggtccgccttcgacctgcccatcgcggcgatgtcactgcagatcgcacggggcgcgctgtggccgcgctgctggggcgcgcaccacgccgaccccgaccgcgcgttgcggctcgcgcggattggtggtgcagagtctttgcttcggactgggtttttctgcttcctatatgggagatga

SEQ ID NO: 25297 - DNA, 372 bp, Zea mays
  Peptide Sequence Number=SeqID_67076
atggccgactcctccggtcgcagtggcggccgccccacgtcagcctcgccatccactgccacacacacctcaccggcgtctttcgacggcggtctcctactccgcctcctccaaaaccctccttctgcgcacccgcgagaggaaatcctcgccccgtcccccgttgccccgggggcgcaccacttctttagtgaccctgccgtcgccgccgtggggcctctcttcgccgcatcggcgcagacgcaaggaggggacttcgggtggtcctccacctcgaccacgcacatgttcgtgatccggttggcagaatgcctcctggtcacggagagcagttttacagggaacagcagcaagatcaacgaatcaagctga

SEQ ID NO: 25298 - DNA, 906 bp, Zea mays
  Peptide Sequence Number=SeqID_67077
atggctaggctcgttggctccgcgagccagaagcgagctgagccgcgccgctttttcaagctcgtcagatggctagtgaagcttctgaagtcatgtgactatcgaactttggcaatcggtgatggtgggaatgatgtaaggatgatacaacaggctgacattggtgtaggaattagtggtagggaaggtcttcaagctgcaagggctgctgactatagcattggcaaattcaggttcctgaaaaggttgattcttgttcatgggcggtactcctacaatcgcactgccttcctgtcgcagtactctttctacaagtcattgttaatttgctttattcagatacttttttcttttctttcaggcattgctggaacaagcttattcaactcagttagtttgatggcttataatgttttctacacaagcattcctgttttaactactgtactggacaaggatttatctgaaaagacagtgatgcaaaatccagagatattactttactgccaagctggaaggcttctcaatccaagtacctttgctggttggtttggtcgatcattgtatcatgtaagttttttgttctgtattgcctttttgctcatggtttgcaaatggttgtgttatggatggctggggcactacagtactcgcggtgctacagtacctctggtactgttccgggctgcagtaccccgcgctacaagcgaggggagggagaagggggcagcggctgcgttgtcgctggtggaggtgaggaggctgtgcacggcgcaggacgtcgtggctggtctagagatagaacttgtagatagggttaggaggctgatagggacacatttgtgggccgtgtgtaccagaggaggcctaggccgaattgaagatgatggtgccaggtgcagttaa

SEQ ID NO: 25299 - DNA, 447 bp, Zea mays
  Peptide Sequence Number=SeqID_67078
atggctgggcaggctggccttttgttgggcggttgggtggacgcgtgtgcctgcccgtttctggggggaaatgacagcgaggcgccgagaataggaggcgcactggctcatggctggcgcagggtcttctgccgctgggccgacgtcgcctccgtcgtcggcgcgcgaggccccggaccctccgccgccggccaggggcttcgtcgtcggattacggtgaatgatttgctagacctgaccatgcatgcgattcgtggtagcagccgtcgccaagccaacagcccaacaccagaggctgctagccgtacccgtacgcgacacgcggtggctgctggtatcgggctccgtacgtgtctatacgtcaaagacaagaggtttcactacaaagtgtcagattggcttgcagttgtatcagttgtttcatctggcgaaaaatcaaagcactag

SEQ ID NO: 25300 - DNA, 753 bp, Zea mays
  Peptide Sequence Number=SeqID_67079
atggcgcagcaagcgagcctcccctgctcgactgccaccacatggagagagctcacgaacacgagctggagggacgacgactacaggcggatggtgatggcgtacctgatcgaggcggtgtacctgctggagctggagcggcaggagcgccgggacgcggcggcggtggcgcagcagtggtggaagccgttccacttccgcctggcgcacgagctggtggacgaccgcgacggctccgtgttcggcgccgtcttcgagcgcgaccaccagggcggcaggccggggccggggccgagcccgagcggcgcgcccagcgccgtcatcgcgttccggggcacgctgctgcgcgcgcccaccatccgccgcgacgtagaggacgagctccgcctgctggcccgcaacagcctgcggggctccgccaggctggcgcgcgccgcgcaggcgctccgcgccaccatcgaccgcttcggctccgagaacgtctgcgtctgcggccactccctgggcgccggcttcgcgcgccaggcggccgccttcgccgccgcgacgctcgagtcccacctcttcaacgcgccctacctgtcgctgcccatgggcgtcaggagcgtggtcaggacggcggactgcctgctcaaggcgctccgctccggcgtcgccaccgtcggcaagtggcacggcaaggcgctccggaacgtggcctacgccagctgcgtcctcggatacaccaggctcgagagcaccaggaagttgtga

SEQ ID NO: 25301 - DNA, 351 bp, Zea mays
  Peptide Sequence Number=SeqID_67080
atggcggccccatccgcttccgccccgttgctccgctcccacccccaccacggctcgctcttcccctcgtcaccgcgccaccgtcccgcggccgcttctctgtctgggttcccgcccctcagacccgcctcagcccgcaggctcccatacactgcggtgcggtcctcctccaccgcctcaccctcggcaccagtagaagatgctcccgcggccgcggctccgaccggggacgcggaggaggagcgggtggtgctccccaccaacgagtcctccgaacgccttctgcgcatccggcacaccgtactgccgctccccttctccccctatgttacagtgcttgaactggcctaa

SEQ ID NO: 25302 - DNA, 570 bp, Zea mays
  Peptide Sequence Number=SeqID_67081
atggctgtccagaagctcttccccaactccaaggtgacaataggtccctggatagagaatggtttctactacgacttcgacatggagcccttgacggataaggacctcaagaaaattaagaaggagatggatcggatcatccgacagaacctcccattggtgagggaggaggtgtcccgagaagaggctcagaagaggattgaagcactcaatgagccttacaagctggagattttggagagcattaaggaagaaccaatcaccatataccacattggagaagagtggtgggatctctgtgccgggcctcatgtggagtctactggaaaaatagacagaaaggctgttgaacttgagtccgttgctggtgcttactggagaggtgatgagaaaaaccaaatgctacaaagaatatatggaactgcttgggaaaatgaagatcagttgaaggcttacatccactttaaggaggaagccaagcgacgagatcatcggcgattgggccaggaacttgatttgttctctatacaggtgcgtcttacatcttggtttctgagaaagcatgcataa

SEQ ID NO: 25303 - DNA, 513 bp, Zea mays
  Peptide Sequence Number=SeqID_67082
atggcgtcggcttacccaccagagaccgcttcctccaacggtccaaccccatctcgaccatctgccctcctcaggttcctcgagcacaggagcaggggagggttccaccaggccgaggcgccataccagtgcgctctcgctgcacgtgtcgtcgcgtgggccgttgacttcagcttctccttcctccccagccgccaccgcgttcgtggacctcgcaccatgcgatcccttgcaccgccgacttatttgcaccaggggactttagtaataagaattggttgcacaaaggaactagcatcgttgagaagaacaaacaagctttccattccacgtgttaaatacacctttgtcgagtttccaactacaagtggagtacagttgggaggaatttgctgggaaatggttatcttctcagacatcaatgcttacgaggtggaccttgatactgatgagaagcactgtttctgccgggagttagatctgttagctgtagtcgaaggaattttaccatga

SEQ ID NO: 25304 - DNA, 1302 bp, Zea mays
  Peptide Sequence Number=SeqID_67083
atgcatgcagcctccaccgtcggcaccaccctgacatactgcacaaacccctccagaggggcatcgacgcgccggctgccgcagcagcagcaaagctgcgtcgaccgccaccccctccgactgggcacacggaaccggacaacaccttactgcgatgatgctggtggtggcctagtattctggcatccaaaaggcgctatcatcagacacattttagaagactcatggaaacagattcacttgcaacatggttatgatctactgtacactcctcatgttgcaaaggctgatctttggaagatcagtggacacatagacttctacaaagataacatgtacaaccaaatggatgttgaagatgagatgtatcaactgcggcccatgaattgcccttaccacattttggtatacaagagaaaactacattcatatagggattttcctatcagagtggcggagctaggaactgtctacagatatgagctatccggtagtctgcacgggttgttccgtgtaagagggttcacacaggatgatgcccacatattttgtctggaggaccagataaaagatgaaatcagaggtgttcttgatctaactgagcaaatacttggacaatttggttttcggtattatgagataaacctttcaaccagaccagaaaaatctgttggcactgatgacatatgggaaaaagcaacaattgctttgaagaatgcattagatgataagggttgggaatacaaggttgatgaaggtggaggtgctttttatggtccaaaaatcgatctaaaaattgaggatgctcttggaaggaaatggcaatgttccactgtgcaggtggatttcaatttgcctgaacggtttgacattacctatgtcgattcaaactctgagaaaaagcgacccatcatgattcatagagctatccttgggtctttggagcgcttctttggtgtcctgattgaacactatgctggtgattttccactttggcttgccccaacccagacacgtattctacctgtgacagacaatgagttgcaatactgtaacgaggtggcctccgaactgaaatcaagagggctacgtgttgaagtctgtcatggagagcgcctaccaaagctaataaggaatgctgaaacacaaaaggtgccactcatggcagttgttggtcctaaagaagttcaagccaggaccctgactatcaggtccaggcacaacggggagatcggcacgatgcccgtcgatgaattcatcaccaggcttcaacttgctgtcgcaaacaaatcatcactatag

SEQ ID NO: 25305 - DNA, 1005 bp, Zea mays
  Peptide Sequence Number=SeqID_67084
atggctgctgcgtgcatcagccatcgctttcgccactccaagctcccggtactggtcctggcgctggcgacggtggtggccgccgcacgggctcagctgtcgccgccgacgttctacgcctcgtcgtgccctgccgcgctcgtcaccatcaacgccgccgtgagggctgccgtgctgctggaccgccgcatgggggcctccctgctccggctccacttccacgactgcttcgtgcaggcaagtcacagtccacagcagccgggctgcgacgcgtccgttctgctggacgacacgggcaacttcaccggggagaagagcgcgggccccaacgcgggctcgctcagggggttcggcgtcatcgacaccgtcaaggccctgctggaggcgctgtgcccgcggaccgtgtcgtgcgccgacatcctcgccgtcgccgcccgtgactctgtcgtcgcgctcggaggcccatcgtggaccgtgcagctcggcaggagggactccaccacggcgagcctctccaccgcgaacaccgacctcccctcgccggcgtccagcctgagtaccctgctcgccgcattcgccaggaaaggcctcagcagcactgacatggtcgctctgtctggagcccacacggtggggcaagcgcagtgccagaactaccaggccaggatctacaacgacgccaacatcaacgcggccttcgcggcgtcgctgagggccggctgcccggcgtccggagggggcggcgccaacgcgccgctggacgcgtccacgccgaacgcgttcgacaacgcgtactacggcgatctggtcgcgcagcagggcctgctgcactccgatcaagagctcttcaacggtggctccacggacgcactggtcaggagctacgcggccagctcggcgcggttcagtagcgacttcgccgcagccatggtcaggatgggcgccattggtgtcctgaccgggagcagcggacaggtgcggcgcaactgccggaaggtgaactag

SEQ ID NO: 25306 - DNA, 2100 bp, Zea mays
  Peptide Sequence Number=SeqID_67085
atggcagccgtcgcgtcctcggaggaggccgtcaaggcggcgaaggtgctgatggtcggagcgggtggcatcggctgtgagctgctcaagacgctcgctctctccggattcagcgacatacacatcagccatgttgggcaatcaaaagctaaagttgctcgggatgccgtgttgaaatttaggccaaatatcaatataacaccataccatgcgaacgtgaaggattctcatttcaatgttgattttttcaagcagtttaatgttgttctgaatggtcttgataacttggatgctagacgccatgttaatcgcctttgccttgctgctgaagttcctttggttgaaagtggtactactggttttttgggacagtatatgcatatagctgctgctagccctattgttgtatcgttgtacacttgtactactcagtctatgatattttttgggacagataagaagggattgaggcagaatgctgatatacatgataggctagggatagcaccaattgaagaggaaaacttgtccaatatcgtgtgcaaactgtgctctcagaatttgaagcttgagacatttagtaattttgcaatgctggtggaatacgtacaagttactgttcatgtcaagggtaaaactgagtgctatgagtgtcaaccaaagccggtccctaaatcatatcctgtctgcacaattacaagcacaccatcaaagtttgttcattgcatcgtttgggcgaaagacctactttttgcaaagctatttggtgataaaaaccaggataatgatcttaatgtgcactccaaagatgataccagttcaaaaacagatgtttttgaaaggagtgtagatgaagatcttgggcaatacgcccagagaatatatgaccatgtatttggttacaacattgaagttgccttggataataaggaaacttggaagaatcgaagaaagccaaacccaatatacatcagagatgcattgcctgaagacgctgttcagcaaaatggccgctctctggatcacatacatgaggagcatgatccgtctgctatggtatccctaggccttagaaattcgcaagagacatggagtcttgctgacaattcaagagtgttcttggaggctttaaaattattttttgagaaaagagagaaggaaatagggagtcttatttttgacaaagatgaccaattggctgtcgagtttgttactgctgcagcaaatatcagagcttcctcttttggaataccattgcatagcctttttgaagctaaaggtgttgctggaaatatagttcatgctgtggcaactaccaatgctataatagctggtctaatcgtcatcgaggcaatcaaagtgctcaagggtgatcatcaagattatagaatgacatattgtcttgagcatccatcaaggaagatgctcttgatgcctgtcgagccttttgaacctagtaaatcatgctacgtctgctctgagaccccacttgttctggaggttaatactaagacaacaaagctccgggaagtcattgaaaaagttataaaaagcaaacttggaatgaacctccctttgataatggttggtgccacgctagtttttgaggatggtgaagatttggaagaggatgaaattgcaaattatgctttaaacctcgaaaaggtcttggctgaacttccagctccagttctaaatggtacaacacttacagtcgaggattttcatcaagaactaaaatgcagtatcaacatcaaacacagggacgagtttgatgaagaaaaggagcctgacggaatggttcttgctgggtggtctggcccagttgataagcaaattaccagtaatggtgagaatagatcagttccatcttcatccaatacagaagatgttgatggtactgccgaggatatatcagtgaagcctggaatgaagcgtaaactgaacgaaatattagaggcaaaggagaatttagatgctcttgagaatccttcggatgttgattccagcggcactcaagttgttgaagacgatgacaacgatgaccttgttatgtttgatgaggacccaaggcaagacaagaagatgagattgcaatag

SEQ ID NO: 25307 - DNA, 1659 bp, Zea mays
  Peptide Sequence Number=SeqID_67086
atgcctgcgcccgtcgcacctgtaacctccaggctgaagcgggaagactgcccccgcaccaagcacgactccctcttttccccatggaaggtccttgtcgggccgtcggactggagggaccacgccgccggcaaggaaggggtccagaggtaccgcatccgcaacctcccggacaacttccccggcctctacgagctaggcgttgcctgcgcggccgacgagggcgtcaggtcccggaggcgtgacgcgcgaggcgtcgtcgtggtgtacctcggccaggccgacagtgtccgggcgaggctgcagcagtatggccgctcggggtcgcatctggacactacgaactcgccgggctcttctgatagagatgcggcgaatgcgctcgccgagggtcctggactcttcagagaagtgttctccagaggctactccgtcgtgtttcgatgtgcgctggtcttagcttctgtacatagagtaataaaaatacttcctgctacatgggtctgttggaataagtcctgtggtcagatggacaataaacaagaagctgagaagactgaagcactactcctgagagtatttgattatgcatggaacaagcttcagaatggtgcttgtcgccggcaagaaatactgcataagttagaactgcgagcagccaaccataggtctctacttagcagaaaagcaggtataaatataaagggaagtgggccagctaacacctcgcctagcataattaaaagtatgctcccaagggttcgtacaatcgttcgtttcagacctcagttagtaaaccctaacaacagtgaaggtgggataactggtattccctatgcaaatagacaagcacatagaaggaagtccaaaggataccaagtaaaaaagttcgatgttacaaaacggagaactgtgccgatacatgattctaactctgtctgtggagtgctgctggaagatggtttttgtctggagcacccagttcatggaagaaagaggtgcagcttacacaaaggtaaaagagtcaaaggcagcccaaaaagttcgcctactagccatccttgccaagttgggattgcaattactgagttttgcctaactgaagatttggacagctcggtcccaaaacaggaaagcgaaatacggcccaaaaatatgtctacaactctgaaagaacctcagaggcaaagcgataatttggaatcacaaaaggtgaatactggagaagcttctacagaagatggaacacaagaagtttctagggatgcttgtatcttagaagagaaggccttcttccatgctgactctgagtctcaggagcagcagccttctgggagaatgtggtttgagctgctcaaatcacagaggaaaccggcgagcgcacatccatcaagaagaggcttgggatctcagataacagcaatgacagataacaggtcctgcaaaatggtgtcaattgcaggaatggaaaggactgagaaggacagtggagtagaggtcactgctgcttcgttttccagaagctcaggatggccctgtacctgtggcgcccgtacgtcggacggttcacgttgtatgaatatgccgattgaagggaggaagagatgtgcattgcacaaagggcaaagggcagcattcccccctacaccatcggcataa

SEQ ID NO: 25308 - DNA, 1824 bp, Zea mays
  Peptide Sequence Number=SeqID_67087
atggctaaacaatggtatgttaagtatgatgacaatgaaccatggtatcagattctggttatacctctgcggtttgaactattgtgctctattatgattcccatttcgataaagcatatttctgtgaactgcatcttctgtatgcagttgtatgttttccattttgtagtttccttctgtatgttttctttggactttgttaaaagtctctatgcaaagttcatagattgggatgatgatatttatgacctggaaaatgacacacctgcccgtgcagcaaacacagcaattagtgaggacttgggacaggttgaatatattttgacagataaaactgggacattgactgagaacaagatgatcttcagaaggtgctgtattgggggtaccttttatgggaatgaatctggagatgcgctcagagatgtggaactactgaatggtaacatatcagatacaaccatacacattggtggaacagtgcaactaagacacaaggatagagacgttgaattactgaacgctgtcgccaataattctcctaatgtcatcaagtttttgacagtcatgacactctgcaatacagtaattcctataaaaagtcctactggaccaattttgtataaagcccagtcccaggatgaggatgccctggttaatgcagctgcaaatttgcatatggttcttgtcagcaagaatggaagcaatgcagaaattcacttcaaccggcgagtgatgcaatatgagatacttgacattcttgagttcacatctgaccggaaaagaatgtctattgttattttggattgtcagagtggcaagttttttctcttgtccaaaggagctgatgaggcaatgcttccttgtgcttattctggacaaaagacaaagacatttgttgatgcagttgacaaatatgctcagctggggttgcgcacactctgcttgggatggcgtgagctggaaccagaggaatacactaaatggtctcaatcatttaaggaggccaatagctcattgaatgacagggagtggaaagttgctgaggtttgccaaaagctagaacatagcttggagattctaggtgtcagtgcaatagaagatcgcctccaggatggggtaccagaaactatcgaaatactgaggcagtcaggaatcaacttctggatgttaactggtgataaacaaagtactgccattcaaattgctcttttgtgcaacttgatttcttcaggaatcgtccatgtttcactgaggatcattgggtttggctggtacagtcctgtccatgtggccaccaaggccaaactttcccagcagggaattgaagaaaggcacccacttgtgaatactccccagggtactggtggtggcagaggaggcggtggactctgtggacatcttgggcagaggagcaggctcacacacgctctgtggacatcttgggcagaggagcaggctcacacacgcagaagcagagccgagctggcggagcagaggaattcgcaagcggggcaggtgtacgggcgtgtgcagcacatgtgtggagcagtgctgcgcgagaaggcgaagagaagcgtgcacagagatgtgtgtgggacggtggccggcgcgtgcgagcaggaggtaaagcatgtgcgggcgagcgcgggatttcgcgtagggctgctgccgcgggaagcagaggtgtgcacgagcgagtgcgagggaggcaaggatcgcatgtggggagccggcatcatggaaggagaacattgtggtgcagacatcgtgaggtggggtggtcgcgtggccatgaaatcggaggcgcggaagcgaagctag

SEQ ID NO: 25309 - DNA, 228 bp, Zea mays
  Peptide Sequence Number=SeqID_67088
atggagcacctcagccttgtcggcttagatgagtcagatgagagcgaggaggagaagaaagaggaggacgaggatagcggcggtgatggcaacaacgatggctcgaacgtcggcagcaagggcggcaaagacgagggcggtggcgacggcaatggcgcgggtggcggcagtggtagtggtgatgatggcatcggtagccgcgctagtggcgaggtgccaccagcttag

SEQ ID NO: 25310 - DNA, 1080 bp, Zea mays
  Peptide Sequence Number=SeqID_67089
atgggcggcgtccaagagaaggaggccggcatgccgcccgccatggcggtgccgccggtgctcgtcaagggcaagcgcagcaagaggcagcgcgtgcacgcgccgccggtcgtggccgtggccgtggcggcggcggcggagtggtcgtcgtcgtccgcggcgtcgccagccggcggcgacgactcggggtcagggaccgccacgtcgccgtccgccgcggacgacgccgaggccgaggccgcgtccgccgggtgctgcctgctcaccgaggaggacgaggacatggcgctctgcctcatgctcctcgcgcacggcgagccggccagggacgacggtggtggcggcaacggcaagacagcggccaaggaggccagcagcaggttcaggagccggcgcccggctgcggccggcgacggcgagtacgtgtacgagtgcaagacgtgcaacaagtgcttcccgtcgttccaggcgctcggcggccaccgcaccagccacaagaagccacgcctgctgctgctcccgccggtgccatcccagccgacccaggaaaaggacctggggctggtgccgactcctaaccctgcagccgcggagacagctgaggcgtcgccgccaccggcggctccggcagaagcggccgccgatgccaccgcgctcgcgatcccagttgccgcggcgccaaagcaagaaggacaggccgccgccgccgtggccacgagcagcacgagcaacagcagcagcggcggcgccaagcagcctcatcatcggccgcgcgtccacgagtgctccatctgcggcgccgagttcgggtccgggcaggcgctgggcggccacatgcggcggcaccggccgctggtgccggcgggcgcgcgggagcgggacgacgcgcacgcgcccagcaggaaggagaagagcctcctggagctggacctcaacatgcccgcgccctgcgacgaggccgaggccgatgccccggcggtcacgtccccacgcttcgctttcgccgtcgcggagcgtcctccggcgccgctgctcttcccgccggccacgccgtccgccctggttgactgccattactag

SEQ ID NO: 25311 - DNA, 183 bp, Zea mays
  Peptide Sequence Number=SeqID_67090
atgaagaggctaacaattgtgccatcaccgactaccaatgtggaggtcttctccatgggtggagtggatgaaagtggacatgagaacgttacacgtgaagttgatgacctatgtgagatcgcgccctcttgtgaagagaatgatgaggaagtggttagcgtctcggatgctgccaatggggtg

SEQ ID NO: 25312 - DNA, 397 bp, Zea mays
  Peptide Sequence Number=SeqID_67091
atggcgccaagtgatggcggcggagcaagtgccgaatgcccaccgagtgacacttggcaaaggctcactctttgccgagtatccgttgtactgacactcgacaatgtactgacactcgacaaagaagctcctgtgggctcctttaccagttccgttgctgagcgtattagttggcactcggcaagggatcacctgtgggccccttttgtcagttcctttgtcgagtgcactaggtggcactcggcaaagcttgcttctttgacgagtgccaagaccacaacactcgtcaaagaggctttaccagtgcccagatttgatcgcgagagctgcgctgccgccgcggacatgatcggccatcgtcgccaagggccgtgccgccgctcggggggtcataagg

SEQ ID NO: 25313 - DNA, 849 bp, Zea mays
  Peptide Sequence Number=SeqID_67092
atgtggaagtatgcagtgcgcccttaccaattacaaggggagcgcctttcctaccgtcgctgccgaagagttgaagttcatcgcccgtgggacacacactatactcgcacttggagacaatgggctagcgcgattgctgatggccgtccgacagggcgaggttgcgcccttgagtgtcgaggtcaaccactaccaaggttgcctcgagcatctgccagccagcgcagccactatagccgccggcacactaggaggccacacgccgcagcccatggctgcacagccgccaacgtctggtgtcgtgctaccaacaccagttgccgcccacgttgctccgctgccttgatttgcagcaacctctactcaaccactaggagcgaggcttgcatctttgagagattagcccttatgttggcccacaagtacaccatcggtggagatggtgatagctgcatcaacgacagtgacatgggcatagtgactgcccatgtgcatgtcgacagcgttggggacgtcggcgtgacaaaattggcaacagaagtcatgcagtgtagatcgaaacccaagctatccgataccagcttgttatggatggttgggggcactataatacgcgggtactgttcatgggttagggctgcaagcgacgggaggagaagggggtgtcgactgtgttgtcgctggtggaggcgaggaggctgtgcacgacgcagggcgtcgtgggctgatctagagatagaacttgtggctagggttaggaggcgatggggagaccggccgcagggctttgcccacaaccggcaagagaaaaggaattttccttataatttcttgcttatcctcaattga

SEQ ID NO: 25314 - DNA, 1842 bp, Zea mays
  Peptide Sequence Number=SeqID_67093
atgaatgcgtgggaagctacggagagggagaaccatgtaaccgagcgtgggctcgtccccgtcagcaccggcgacgtgcaggtgcagcacgagcatggcggcgcggccaaggcggacggcttcgtgcgcagggaccagtcatgccggtacgctagcagcgacatcccaagcgatctgctggtcaaggtgggcggcgtcaacttccacgtccacaagcacccgatggtctctcggagcggccgcctggcccggctcgtcgacgaggcgtcggccctgcacggccccgtcgccgccaccgtggtcgagctgccggacctgccgggcggccacggcgcgttcgagctggccgccaagttctgctacggcgtggtggtggacatcacggccgccaacgtcgccgcgctacgctgcgccgccgagtacctggagatgacggaggaggtggaggagggcaacctggccttccgcgccgaggcgttcctgagctacgtggtggcgtcctcctggcgggactccgtcgtcgtcctccgcgcctgcgagggcctctccccgtgggccgacgacctccacctcgtgcgccgctgcagcgagtccgtcgcggcgaaggcgtgcaccaaccccagggccgtgcgctgggcctacgctggcaggacgtcgtcgtcgcccaataagtcgcccacggccggcaccgccggcaacagccagcagcagcccgggccgccggccgactggtgggtggaggacatctgcgtgctgaggatcgatcacttcgtgcgcgtcgtcaccgccgtccaggccagaggcatgcggcccgacctcatcggggccgccatcacgcgctatgcctccaaatggctctcctccgctggcctcctcgccaacaaggacagccctgcatcgcgtggcggcggcggcggcggtgtgctccaaatgatcgttgccagcgagggcgatgacgcgcagacggagacggaggctagtgagcagaggaggatcgtcgagagcctgatcagcatcatcccaccgcagaaggactgcctctcatgcagcttcctcctccggctgctccgcctggccgtcgtcctcaaggcggcgccggcgctggtcacggaggtggagaagcacgtgggcatgcagctcgaccaggcgaaactgctcgacatttttggtgccgtcgagcagtccggccgcgacaaggagaagcaggaacagcaaagctccagagcgctgcgcatggcgagcctgatggacagctacctctccgaggtgtcccgggaccggaacctgtccctgggcaaattccaggcgctggccgagtcgttgccggagtcggcacgcgtgtgccacgacgagctgtaccgcgccgtcgactcctacctgaaagcgcatccgacggtgaccgagcacgagcggaagcggctgtgccgggcggtggactgcgggaagctgtcgcgggaggcgcggctccacgcggcgcagaacgagcggctaccgctccgcgtcgtggtgcaggtgctgctgtcggagcaggcaaagatggccggcgcgctcggcagggcgggcaagaaggaggacgacgtcaacgcgctcaggcaggaggtggagagcgtgaacgcgaagtacatggagctgcagcgcgaggtggagctcctgcaacggcaggtggagcgcatgctgccgccctccgcggcggcgaagcaacataacgtgtccgggtggagcagcggatggaagaagctcgggagactcggcaggattcaggtggagcagccggtggtgacggcggcaaccggcgagacagcgaacaggcaacttcggcggaggagaaactccgcatcgtga

SEQ ID NO: 25315 - DNA, 495 bp, Zea mays
  Peptide Sequence Number=SeqID_67094
atgccggttccgcttgctccgtacccagctcctccggcgccattcacgccgcccaatggggcccagagccagctcgtctgcaccgggtgccggaacctcctcatgtacccagctggtgcgacgtcggtctgctgcgccgtctgcagcaccgtcaccgccgtgccggctccaggaactgagatggcgcagctagtgtgcggaggatgccacaccctcctcatgtacatacgcggcgcgacgagcgtgcagtgttcttgctgccacactgtgaacctggctatggaagcaaatcaagtcgcgcatgtgaactgcgggaactgccgcatgctgctcatgtaccagtacggggctcggtccgtgaagcgcctgcagaggtcgacggacaatgactatcagtgcatgatcagtatccagttattggtgggcacggattgtcacagttcagagaaaacagtagttgctgctgttgagaggaggagacagcgcaacgcttag

SEQ ID NO: 25316 - DNA, 471 bp, Zea mays
  Peptide Sequence Number=SeqID_67095
atggcgtgccggggcttctttgagtgcgtcctcaagctcctcaacctcgtcgtcatggcggttgggctggccatggtgggctacggcgccttcctgctcgtgacctggcttcaggtcgcgccgctcccgccgccttcgtcgtcgccggacgccgtgccacccagcggggagctcgtgcggctcgggaggccgctgctgctttttgttgatgcatccctgtcggatgggaccgcggagaggctctccagtgcctggttactagctatcatagtacagtcaggcaaccaaaccgactatgacagcgacgatgagtacatcggcgcaaggtccggaatacggcagccattggtgaaccagcaagctgctgctgctgctgctgatcctagggtgcccaatctcgactaccgcccaatccggaacgacgcatggagccaacggatgagagagaagataacgttccaatgtgcataa

SEQ ID NO: 25317 - DNA, 195 bp, Zea mays
  Peptide Sequence Number=SeqID_67096
atggcggccaggggtgacgtggatcctccacgcgccctcgccgctagccgtgccgccgccgcgagacgccccaccgcccgccccggccgccgggcgcgccgcccgccgcgcgcacgccgccagagcatcctccgcccgccgccaggttttcgaaacatcactttacaggggaggtgctgccaaattttttattga

SEQ ID NO: 25318 - DNA, 556 bp, Zea mays
  Peptide Sequence Number=SeqID_67097
caggcgtcgcaggccaaaaccgccgctcgtctctgctcgcccgcggccagcatggcggctcttggcccagcagcgcgacgagcccgcccagaccgccatcgaagccctggcgcggtcctgcctttcggcgctgcccgccctgcctagcctccgcccgtgccacaactctacggcagccgacgaatcagagccacctcgttcctgccgggctcgtcctgccggagcgccgccatccccgtcgggcttgccgtcggcgccgttcactttcccgagacgcccgtcgttcgtgctcgtctcgctgttcaccggtgctgtcgtcgttcgtgcccgcctcgacgtccgtcgtcggtttcggagaaactggggtgtagttcgcttcgccgtcgtgccgttaatggggctcggtgtatgcggctcgctctgccaagatggtgacaaggatgatggttttgactatggtaatggttgcctttggtgcaatctatgctcaagtaaagaagaaggcgtcgaggcggatctccaggagttccaggacttcgacgagttcgaggattag

SEQ ID NO: 25319 - DNA, 321 bp, Zea mays
  Peptide Sequence Number=SeqID_67098
atgactcgtccagcacctcaggaagacttccgcctcgaccgagcaggggctctaatctcgataaacgtagcagggaatctcgacgtcatcccgtgcaaggacgctgacgcgccccgtaagcagcctttagcccataccctgacgctgttacaacaactacagtatgggcagcctctccctcgggggctcgggcgtacggacaacccctcggcctctgcctcggctctctacaggaaatcggtggacgcaagtcaaccgcacagtgcaccatcacgtcggcttgcagagcgccaggacatctccttcgaatgcaacgcctag

SEQ ID NO: 25320 - DNA, 546 bp, Zea mays
  Peptide Sequence Number=SeqID_67099
atgctgaaggagtcgtgtcattaccacaagggctcagtaaagcactcccacacacgatccctcggcagaaggagaaataagaaagctcccgacggtggagatgacgacaaggacgacggcttcctcgatgtacataactgctacatgacctttgggggagacaccatcaacctttcctcaaggcagagcaagcaggaacgccgagaagtcttctcggttgaggtagcgatcccggtctacctagattggtcggatcgcgccatcatcttcgaccgagatgaccacccagaccacgtcccaagccctgggaagtatccacttgttgtcgaccccatcatcggcaacacgcgcctcacgaaggtgctcatggatggaggcagcaacctcaatatcatctatgcaaacactttggatctcctaggggtcgggcggtctcagatccggcctggggccgcgccattccatgggatcacccccgacaagaggatgcatcccctcgggcagatcgacctgcttgttttcttcaggacgcccaccaatttctaa

SEQ ID NO: 25321 - DNA, 714 bp, Zea mays
  Peptide Sequence Number=SeqID_67100
atggcgggccggccgccgccccctcccctctctccccgtgccggcgagctcttccctccccttcctctctcctatcgagctgctctcgccgcgcccccggcggccatcttccccgcgactggggcgccgtcgggctttgccgcgcccacggcggccttctcccacgcacccggcgcgccgccggatctcgccgtcactccggcgaccagctccctcgcgacaggagcgccgccggatctcgccgcccttctggcgcccgtctcccctgcggccggcgtgctgccggtacccaacactccggcacccctccgctctgcggcaggaacctcgctgcacaccgccgcgtccctgatgaccctcccctatgtggtcagcgcgccggcggcagccgccgcgccccctgccgcccccttcccctcctcatctgctgtctcgacccttccacgccccatcgccgctcccggtgcaccgacggggcacgccttcgtcatcactactgcgctgccccccatcgccgcgccgacccaatccgccaccctcgcgaccgccccctggccccgacgggtcctcgggcctgctcctgtgctctccctggccggatgcccaccctgtttcgctcccagcctgctaagcgccgggggttttccaacatgttcccactccaacacgcccgggcgggggctcccgtgcttaaatttccccctggccgactaa

SEQ ID NO: 25322 - DNA, 387 bp, Zea mays
  Peptide Sequence Number=SeqID_67101
atggggacggtggaggctgtccgccggtgggatagaagatggagcggtggagcggcggtggtggagcggcggtggcgcggggcactggaggccgcgaccgcggctggaggcgagcaagcgggcggcggcgcaaggcgagcatgcgggcgggggcgcagccgcgcagggctggatgccacgggcggggatagggtttcatggagatgggcctcgcagaacacaaatcggcagatgggcctcgcagaacacaaatcggcagatgggcctcacacgacgtatgtggttgtcttcatttttttgcaagatttcctttctcacattcaaacttgggttcttagtttcaaatctcaaatcgaatgtatgaagaagaaaaatacttcaacatga

SEQ ID NO: 25323 - DNA, 690 bp, Zea mays
  Peptide Sequence Number=SeqID_67102
atggatcaccgtaagcttctggctccagagtgctctcaccaagttcggtccaagcgccgcccatcgcagggaaggtgggtagtgaccaagcactcacttgactccgacccctccatcgtattggtgattaactttcctcgtggggcggtcggctcaagcatcagaggatatggcatatccctttcgtcttccagctcgctagacggggagtcgaaggctggcccttgtggcggtgaacctacatcgttggttttgccggccggtgctgtcagcaccccggtcattgttggtcgcctcatgatggtcgtgaggtcggtcctcggcccttctgctgttggtgatggccgagctacagggtcggatggaggcatctcgattgacaggcaggaggccaagttggcggagctgcaccgggaggtcaattcggtgacccagagcatctgttcgcgtgtagcaactcgcctacattgcctcctcaacatttcgagccacgttcagaacattgtggaccatgacatccaccgtggggctggtattgccctggggtacgacaaggccggctgtggggtggccgatgccatgtcagtggaggacctgatccggatggaagatgggggacaatcaagcttccctcctttcttagtcatcagtctctacttctttctttttgatgctgggttctgcgcctag

SEQ ID NO: 25324 - DNA, 183 bp, Zea mays
  Peptide Sequence Number=SeqID_67103
atgtccacatcatgcatgccccctccctggttgtctccgcccatcgccctccaacaaggaaccttagagaggatcagcaaggacttaggaaaggccaaggtgtcgagaaggagcaacaagggcgtacacaacaggaaggagatcaagtctgactcggatgcgattccatttcgagttccatga

SEQ ID NO: 25325 - DNA, 942 bp, Zea mays
  Peptide Sequence Number=SeqID_67104
atggcgctgaccagtgggccccatgtggaagtggtagggcgcatgcgcaaagccgggagaagcactaaggattggggcccactggcaactccctccatccatgagcaccttggtgaggtgcttcgagcctacgattggctcgacaacgacggggagttcacacttctgaagcttgtggcagacacgaaagccgtggttttggcatggttattgagccttgcatatcgcgcatctgaaggcatgcggtcccgacctaggagggttggggcttcgctcttgccttttctcgcgcggctgctccacttcttcctgctcccagcgccaattgtcgatgatgtatggggcatcattgatgcctccgaggaggtcatttatgaggatgcgcgtccttggggattgggaagatcggagcataacggccgctgtgaccatgttctgcctgggactgaggaagtattacgcgccatcgctgctctcagtgagcagctcatgtaccttcctcggctagggcctcttagcctcgatacacctccgctcgacgtccccgtaggcatggttgatcttttgcatgtgggcatcgagctcttcctcctgctggcggagggtggcctcgcaagcgaggatgcgtgcttggcactggtgttggtactcctcttggttgggggcctccttgtcccctctgcagttattgtttcacggtgtggagcggaccaggcatggtccgacggggatgtgaacgctagggcggagaggtggagttcaccggtggtggtggcgaggaagtcgaaggtgcctaaagtgatgcggttccctggggcgaaggcctcacttctggcgaacgatgatgattgggtcattggtgcgtcaggtgtcacttggcatgctatcggcccccaacttggtgcgccaactttcgtggtttcgaaaactgagggacaataa

SEQ ID NO: 25326 - DNA, 102 bp, Zea mays
  Peptide Sequence Number=SeqID_67105
atggtgacagatgagttgtggacggtcatggatgaattctcctatcaatctaatgatagtgtggttgctatgagtgggatggcgagatatgggatggaatga

SEQ ID NO: 25327 - DNA, 171 bp, Zea mays
  Peptide Sequence Number=SeqID_67106
atggacgggagctcgcgagaatgggagggacagcgctgggagcgtggagaaggaatggagaacgttggggagtgccctggcgccgtttatatagatgggggaggcagagaagggtcagacaggagggggcaatggcaggctccaaatttggctgttcttgagattgaataa

SEQ ID NO: 25328 - DNA, 315 bp, Zea mays
  Peptide Sequence Number=SeqID_67107
atgaaactcacttatgaagaatgtttaccttgtcactgcttctcactgctcatgagccgttatgggctggcagcgaggcatcgtcctctagggcagatggtcgctgcagacctgatgctggcacaccgccagtcgcatagaggttccctaaatcctggaaaggtcccccacagcgacctcttggtgactgcatcggccagccacatgctctaccaacgatttgtagcaaacgctttgcccctaaccgttctcatgtcacccctacgcgcagatttggaggggagagggagacgaaggatggagcaagagtactag

SEQ ID NO: 25329 - DNA, 315 bp, Zea mays
  Peptide Sequence Number=SeqID_67108
atggggatggttgagaacacaccaggccctcaggatcccgatactgacctcattaagtcgaatacccctttcttcggcatcgaacttactggagagtacccgctagggcatctctacatgccggtgaccttcggcgctccagacaactaccgaaccgagttcctatgtttcgaggtagctcgattggagtgtggatataacaccatcattgggaggccgggactggtcaagttcatggccgtcccacactacccttacatgatagtcaagatgccaagacctcaaggcatcatccctgcccgggctgacttctaa

SEQ ID NO: 25330 - DNA, 1273 bp, Zea mays
  Peptide Sequence Number=SeqID_67109
gtggtactgcgcagcggacgacgcgttcctgtgccaagtctgcgacacgtcggtgcactccgcgaactcgctcgcgcggcgtcacgagaggctgcgtctgcgccccacgtctccgctgcagacgccgccgcctcccacgccggcgtcagcgaatcgcgagagccacgacgaggtggtgccggcgtggttcaagcgcaaggcgcgcaccccgcgcggtgggcgcgccaaaagcgatgtgcggacgttgtcgcggcgcctcgttgtgccccatgcggcgggcggggactcgccagatggtcggaacgacgagggggagttcgaggccgaggagccggaggaggaggtgctttaccgcgtgcctgtctttgaccctgccctggcagagttctgctcgccccagcctcttgaggacgcggccgctctcgcgtcgtcctgcaacgaagacggcgccgtcgaggacccggcgaagacagatcgagagacacctgcagcggcgccgctggtgcagtttttccccgacggaggtcatgccaacttcgggccgaccgacgccgagctcagggagttcgccgcggacatggaggccttgctcgggtacggcctggacgacggcaacgaggagagctcgtcgttctgcatggagacgctgggcctcctggaaccggtggaagtgggtgaagacgcgtcgcgagtcaaggtggagactgacgccggcagtgcctgcgaagccagtggcacgctggcgtgcgccctcgagctgctggacccagatgcatctgacgagatgctggacatcgacttcaactacggctcgcctcaggacacgacgacgaccgagaatgccgcgagcagcagccacacgggaaccgacggccagttcttgcagacgagcctctcgctcaccctcaactacgaggccatcatccagagctgggggagctcgccgtggaccggcggcgccgaacgaccacatgtcaagctcgacgacagctggccccacgactgcacgaacatgtgggttgtgggacgaggaatggtcggccacggcggtgaggacttgctgggcacgccgaggctggggcagggcatggacgacgttggccgggaggcccgagtgtcgcggtaccgggagaagcgcaggacgcggctcttctccaagaagatccggtacgaggtgcgcaagctcaacgccgagaagcggccacggatgaagggccgcttcgtcaagcgcgccaccgccggtggcagtctcaccatcgctggcctcgcttag

SEQ ID NO: 25331 - DNA, 396 bp, Zea mays
  Peptide Sequence Number=SeqID_67110
atggagggggagtacgagggggccagtgcgcactgctggagggtcgtagctcggtcggaggtggctggtggagcgctgcccacggctgcgagcagaacgacggcggccatggacgggagctcgcgagaatgggagggtcagcgctgggagcgtggagaaggaatggagaacgttggggagtgccctggcgccgtttatatagatgggggaggcagagaagggtatgacaggagggggcaatggcaggtgcgagctctgctcattggtgggcgtgggcggctgcctgccagagcaccagtctgcacagcgacagaagaaggcacgcattggacgaacgtttttggcattttctgtttagattcggacccggatcactgtagaagatttgttccttga

SEQ ID NO: 25332 - DNA, 1038 bp, Zea mays
  Peptide Sequence Number=SeqID_67111
atgagccccgcctccgaggcttttctggctgctggcttccctttccgtcgcagagcagacctttctggtgtcgtacggcttctcgacctcttcttttatttcgggcctccagccctccaggggatgatgggcctaagctacgacgcggacagcgggagacgcctgctggctcgctacgccaaggcgaagccgaggccgtccaagtgggacgacgcgcagcggtggctctcctcctcccgtgcgcacgacgacgacgaccggcgccggagctcctgcgcggacgaccgcctcctgctgccgtcggcatcgcagaaggcgcgacactcgtggagcgccgcggacggcggcgccgccctgcccgcggcgctggggctcggcgcgcgggacgacgcgggtgcggaggcggagaccaagagggtggactccgttctggcgtacgggcagccgccccggtgcccctcgctgcgggacgtcggcacggagatgacgccggccgggagcaaagagccatccagggccaacaccccacgcgcaaccctaccggccacgccgccgtccacggcggggcgcgcgatccacgcaccgctgcgcccaccggatttgtctacggtcgacggtggatcgccaccaggcctagcggcagcggaccgcgacgagacggcgcccggtgcgccgacgacgacggccgtgtcgcccgcggcgacgtgggacgccgccgagcgcgccaagcacatggccaggtatcggcgcgaggagatgaaaaatacaggcctagaaaaccggcgacggcaaaagacggagctgcaaatgaaggtggccgaggccaaggcggagaggatgaagctacgggcgcaggagaagacggcgagcaagctggcctcggcgcaggcggctgcgagggagaagcgcgcgcaggcggaggccaagctgaaccggcgcgccgcgcgggtcgacagggcggacgcgctcaggcggaccggccacctgccgtcctcctcctccgtgttctcgctcaagctgccgctgatgtgcagatga

SEQ ID NO: 25333 - DNA, 159 bp, Zea mays
  Peptide Sequence Number=SeqID_67112
atggcgaacatggtggtggcaactaagacgaggaccatcattatcgtgcggaggcctctttcttttttgcttgtacttgaacttttgcatgtgatgtttgttctccctgtgatgttccatcttgcgctagttcaacaacgccatttggaagaggtataa

SEQ ID NO: 25334 - DNA, 450 bp, Zea mays
  Peptide Sequence Number=SeqID_67113
atggcgcagtggatactcaccagcctcggtggagaagaagactttgcccacggtgtcgtgcagtccgcgcactccgacaacgaattgaggtcgctctgcccgtcgattcggcccacaagtgcttcggtctcccacgcagcaacccgacgaaggttcctgagtctatccccggcactagacagcgacgggaacagaaatcccgtctctccccacacgatttggcttggcggcggcaatggtgtctctggcggcgctagtgggcaaaggaacagggcgcgaggtgttatagccaacgtgggagggatgaagcttccgcacgatctcaacaacccggagcgcgcggaacctccacacccgtgctgcgaactccaccgcgatcccgccattcacggtgttcgttggagagggatgagctccgagccctggcccaccagtcagccaaataagtga

SEQ ID NO: 25335 - DNA, 297 bp, Zea mays
  Peptide Sequence Number=SeqID_67114
atgcaggcggcatgcaaccgtgccaagtgggtgcgcccctccgacttccagcgcacccagcatgggggcccacgcccacgcgtcatgcaaccggcgcgccggtcgctacgtgcaagcaactgcaccgccactcacaccactaccacgcctcctcgactgcagaaccagtactgcgacttgaggcaaccctgcgtacggcccagcagtgccagccaggcgcgacggggccgggaaagggggataccccgaaaaggatccttctccgtgaaggaaacaggctccgagcctccctactga

SEQ ID NO: 25336 - DNA, 366 bp, Zea mays
  Peptide Sequence Number=SeqID_67115
atgagcggcggagcgaacggaaccgcggaacactgtactggcgaggacgaacgccgatttgtctggatcactcgtactagaggaaaggcgtcgctcctgtgcccaggtcacgaactgtccggcccagagctgtggaccgtccgcgccgccgtagagggcatcgtcaagcggtacaccccggtgattggcgccaagatcgacgccgacacactttttgatgactccactggaagaaggttgcagatctacaaaaatcgggcttatatggctgattctaaagatctcaacggtgcttctccaaacaacgacacaaggctgacaaaaaatgacatgaagaagctggacaaggagatccagcgacaataa

SEQ ID NO: 25337 - DNA, 300 bp, Zea mays
  Peptide Sequence Number=SeqID_67116
atggctcagcctcaacctcgacctcgggaggaatcgtgtcctcgcccgaccccggcctcggcctcaggaggagtctccgcctcgcctgacctcgggcttggaccgaccgcgccacgggggatacttcattaccctacccctagctatctcaggctacaggggaacaagactggcgtcccatccaggctcgccccgaaaagggtgatcgctaatccctaccgacggaacaatcggtttgagtcgaggttcgacctaaatcggtgttgcatgttctcacaaacagaaagaagtgatctataa

SEQ ID NO: 25338 - DNA, 225 bp, Zea mays
  Peptide Sequence Number=SeqID_67117
atggggaggaagaagcacacgcggagtggctgtcgccctggccccactggtcagacgactaggagcggcgcacgcgattgcgaagctgccacggtgggcccactcgtctgtcagcgaccagcactattgtcatttgttgtagcaccagcatttgggcggcaaccactggatcggttccagccggtggaggatttggaggattcatttctgtttgttgttgcctga

SEQ ID NO: 25339 - DNA, 318 bp, Zea mays
  Peptide Sequence Number=SeqID_67118
atggtggggagtatgatcacttctaataaaactggcaatttgatagaagtgataaaagacactggtgaaaaagaaggatctgaaggagatgtggaatttaatgaaagtgaagatgatttactcagttcacaagaattggatgttctagttaaagatatgtgtgttgaggtcacaaactctcaggaggagctgacttctgaaaaagatgacacaggaaagcaggagatggatacagatgaaaaaaataagaaaaataaaggaaaaggagctgaacttatgggaaggaacgaggaagagtacaagattggaggcaaatga

SEQ ID NO: 25340 - DNA, 273 bp, Zea mays
  Peptide Sequence Number=SeqID_67119
atgtcgttagaagcattgcagagagacgaggaaatcaccgatatcgaagtcatgcaagggtatgcaagtgttcccatttcagaggatttgaaaaagatagaaactatgacgaagaagggggagactgataaagcagtcgaagaaggggaggatttagaggataatgtctctgctactggggatgatgttgccggggaagaagagtatgaccttcatccatccaagcctagttatactgacatggtgcaatatctcataaagcccaacgagtaa

SEQ ID NO: 25341 - DNA, 141 bp, Zea mays
  Peptide Sequence Number=SeqID_67120
atgtcgttagaagcattgcagagagacgaggaagtcgccaatatcgaagtcatgcaaggggaaggaagttttcctaagctgaaagtcatggtgtataagagcttcttctgggcaggccttttggcttctgagaacacctag

SEQ ID NO: 25342 - DNA, 561 bp, Zea mays
  Peptide Sequence Number=SeqID_67121
atggtgaaccatatcctggacctcatggggctggctttaagtgcttttattgttttaccaccaaaaaaggaggttactagaacaagacatggttatcgaagtgcaagaatttctcttgatgaagaagcacaaattgatgtggcaatgagaaattcattgagggattatttttccacattggaacatgatagttgttcatcttttgataagtcaactgctagtgcaagtggagctgcaagttgttctacatggaagcaaagtaggctctcaagatgttatgctagagagggtcacaaagagaagctagggatagcattggcaaaatggttccatgctaatgacattcctggaaggaaggcaaactgcccatacttccgttcagcccttaagttagctcaacaatttggtgatgaaataccatttccatgtgggagagaaatagatggtccattattggatacgaattatgcaaactggagactcacatggctaaattcaaatagtatgggaaggattgtggagttacagtcatgtgtgattcatggaaaggtcctaccttga

SEQ ID NO: 25343 - DNA, 303 bp, Zea mays
  Peptide Sequence Number=SeqID_67122
atgccaagagcacatagggtcatcaccgttagatcctcattctgtcatgcttacgaatgcgagctcaagagctatgagcttgccttagagactattgcgttcgaagagctcgtagccatttgccagcagatggtcaagaacgccatgactccaaaaagtagggtgggtcctttgagcccaccaagggcaccaaaggaggtcatcatcgaccccaactacacccaaggcaatgtggtgcgcgtcagtacatcacttcttgagaaatatgaaagcatgctcgtcgactactctctgcgcaaataa

SEQ ID NO: 25344 - DNA, 2493 bp, Zea mays
  Peptide Sequence Number=SeqID_67123
ccgcaaatcacctgctgggccccgcgcgcgtgcgcgtcggccaggaaacgcgccgaggtgtcgcgctgggactgggccgccgcgccgctccgggcgctcggggctgcgtcacatcatcgccgccacacccagcaccagcaccagcggcggcgcaccaccaccggcgccatcaccagcgccagcgctagcgccggcgcaggcggaggcccgggcgacgcggactgggcgaagttactggcccttctcttcgtcagcggcgtcccttgccttcaagctaaggtcagcctcaacctgtccccctcgtggacccgttcctgcgtcgtttccttcattctggcggtcagtgaagcaacgggaaagctgcttctctcgggtgggttctgcaaggttacgtggagtttaccaatgggtctggataatacttatggcgacctatctggcatgttctatggaggcctgtcttatgatggctacacagaccacagcagcgcaagtgattacttcagatttgccgatccacttcctgccactgtgccccagatggcaccagaagcctgttcaaatccttcctccactgtgtcaagggccaatactgaaactgacaacccagaggattgggaattcatctcagatgagtccctcgactatatcagccggatgctcatggaggaggatattgatgagaaagttagcatgtaccaggcggagtcagcagcactgcgtgctgctgcaaagccgttctatgacattcttgggcacaagttcccaccgtctcctgaccgccagctgatctcttggtccatggacagccccagtgagagtagcagtagcatctgcacacaatctgtggcaagtactgtcacgagcagcagtgttggtggcacagtggatagcaaccggcgctatgacattggacttagtgagcagctggaagcttaccgaggcttgtgtggtcaagcttctcatccacttgttggtacatcaagtgatgcttccaatgcagtggatgtgctagaagaccctttgatcacgaacggtcagatccctgagtatttgtttgagagccttccaacttgggatttcaggagaggtattgaggaagcccagaagtttcttcctgttaacaataaactagtcattggtttagaagctggtggtattgcaagaccccaagaggcaaggaaagatgtttctttgaatgccaaaaaggcagatgcattgaaggtcaagaaaaatagacagagtgaagaccttgacgtgattgaaggccggaacattaaacagtctgcattttgttccgatgaacctgattggattgaaatgttcgatgatctgcttcttcaaaccgagaagaaggccacagatctgcgagagctgatgcggaatgaagcttccaagaattctcaggtcacccagacgaaaggaccaagtggaccacggccacggggaaggaaaccaacaaagaaggatgtggtggaccttaggaccatcctcatccactgtgcacaggctgtggcagcagatgaccgcaggactgctaatgaattgttaaagcaaataaggcaccattccaagccaaatggtgatggaacccagaggttagcacattgctttgcagatggtcttgaggctcgattggcaggcacagggagtcagctttaccgcaagcttatagcaaaacgaacaactgcctcagacatgcttaaagcttaccacctttaccttgcggcatgcccatttaagaggctttcacattttctttccaatcaaacaatcttgagtatgactaaacatgcatcaaaggtgcatatcattgacttcggcatttatttcggcttccaatggccatgcctaatcaggcgtctctccaagagggaaggtggtccacctgttctgcgcattactggaattgatgtacctcagccaggtttccgacctactgagagaattgaagagactggacaaaggcttgcagaatatgctgagaagttgaaggtgccttttgagtatcagggaatagcatctaagtgggaaaccatccgagttgaggatctcaaagttggcaaggacgaagttgtgattgttaattgcctatacagattcagaaacctgattgatgaaacagttgctgtagacagtcctaggaatagagtgctcaacaccataaggcaagtaaacccagcaattttcattcatggaattgtgaatgggtcatacagtgttcccttcttcatcacacgtttccgtgaggcgctgttccatttctctgcattgtttgacatgctagagacaactgtcccacgggatgatgcacagcgtgcactcatagagagggaaatgtttggccgagaggcactcaatgttattgcatgtgagggctcagacagagttgagagacccgagacatataaacagtggcaggtgaggaacctcagggctggatttgttcagtccccgttaaaccaagaaatcgtgatgaaagccaaggacaaa

SEQ ID NO: 25345 - DNA, 564 bp, Zea mays
  Peptide Sequence Number=SeqID_67124
atgccagagagcccgtgggggttatctcctttcaaagtacgtgagaggtctaccgcgagagctggcaagtctgcaattgtcaagtattcaaataaaaagaaaggtgctggtaaaacagctattattgagggattggctcttataattgctaatggagacgttcatatcttccttgtgggaggttctgatccactgcaatttatgctacaggttagagctctttgtgagaaggcaaaggagattctgatggaggaaagcaatgttcagagtcctgttactatatgcggtgatattcatggacaatttcatgatcttgctgaactcttccgaatcggtggaaagtgtccagatacgaactacttgtttatgggagattatgttgaccgtggttactactctatcgaaactgtcacacttttggtggctttaaaagttcgatatcctcagaggatcaccattctcagaggaaaccatgaaagccgattactcaagtgtaaatcgttttctttattcttccaaagaatcaaagccaaaatctgtgctatcgttcatcttgttctttag

SEQ ID NO: 25346 - DNA, 102 bp, Zea mays
  Peptide Sequence Number=SeqID_67125
atggctactgctcacatgatgtcgcttgcatggccatacaagaaatgtgagactgagattgtctccgagttaagcagaatggcacgaaatggacaatgttag

SEQ ID NO: 25347 - DNA, 213 bp, Zea mays
  Peptide Sequence Number=SeqID_67126
atggacgaaggccttaagccgaagtttttcaagctctccgagcttcggtttagaaaacgcgttttcaccatttctgaagaaaagatacctcaagacaagaagattgctgctgagacgaagctgattgaagaggagaagctttttgaggagaagaaggctgtgaatccttatattgctggatttattgagtcaatggcaaaaacaaatacatag

SEQ ID NO: 25348 - DNA, 1131 bp, Zea mays
  Peptide Sequence Number=SeqID_67127
atggggatcgacccctactggaagttgtgtcagtacttctttagagcacgagtgactccaggccacgatgaccaattgtacgttggatctgccgacattcaactctgcacgagccaaaaggtggagtacttcaagatcctgcttccctcctccgtgcagtatgaaaatgagttgttttatgccaagaatgtggccgacagcgccccacctttcaccggccgggagccggtgtcgacgaagaagtggcactacgacctagaggcacgatttaagagcaaggtgggacatcttctgaaggcggttgctacactgaagcaacagggctcaccggggattgggcttatggcgccctgtctttcaccccttctcaaggatgtagtcattaaggctaagcgaaagcagaagagagaggctgagttgaagactttggcggcgtgtcggaagcgtcgcctggtgagaaaaaaggagaaggccgtgtgcctcgcccgtgcggagcctaggaggggcattagaccatccacttacatggaggacatgacttctactgcgtccaggtggatggaggtccttgcgctggagggtagcctttccaacctcagggacgctgaggttagctccaatgtcccagcccaaggaagggggctggcgttggaccccatcgtgcttgcggcatcctccagaggtcgcgtgggggcaccagttccggtgatgatgagggggggagcgacactggtggcgttgcgccctcccacatcccaaccgacggatgtaccttgcatggagcctcaagcgtcattgcaaacaccggggctcttcatgtcatcgaggcgtcgtgaggggaggaaaacagaggtggttccctctcacatgccttccgtcgccacgctaaagaagcggccgaccgtcttggggaaaaatagcatgaactcatcgcgcttcgtgctgaggtcgatcggcttcaagttcaaggttgaggaggctaagtcgactcttggggaggacaacgctcgtctggaggaggcgaagtcgaaactcctgaaagcgtgcaatgcagctggagagctccaaaaattgctctcccaagctcaagacaccaggaagatggcagaagaggcgaaggcagcaacatag

SEQ ID NO: 25349 - DNA, 474 bp, Zea mays
  Peptide Sequence Number=SeqID_67128
atggccgccgcgggggagcgccgcaagctttgtggctacctacgcgccgtggtgtccatccccggcggggacgtcgcggcggcggcgtctatccttccgctgtccccgtgcacgctctccgcgtgcggggccgtggcccttgcgccgctccccgacgacgtgcgggcccagccgcggtggcccaggtcgcgcgcccccggcgtcgtgcgcctgctcaggacgctcgtggcgaaccgctgcgtggaggtggagggtacgcttctccgggtcgtgaccaggaggaggcctggggaaggggaaggggaaggggacggcgccgcggtggaggccagggccgtcgtgctgctcgacgtctacatacccgtcgccgcgtggtccggttggcagttcccgcgctcgcgctctgctgccgccgccgtcttcaagcatgttaggtgcaattttgtcgatcccattgccatttcggaggaataa

SEQ ID NO: 25350 - DNA, 396 bp, Zea mays
  Peptide Sequence Number=SeqID_67129
atggcgggagctggggcggtggcggagtcgttggtggcacgccgtagggaggcgcgatcaggagagcctacgcaggagagcgggaggcactcggagcttgggacgacaacctccgtcgacgtcagaagttggacgaggggccgcaggggcagcgggtggagtacgggtggcatccctagtcaacagagggcgaggggccaggccccccgatggtgcctaaccatcggtaggagcactatagaggggtggcactggagcagaggcctcagtctccatagtgagctcctcgaggagaagctcgttgcgaacgacgtagaaggtggggaagggtacagtcctcttgatgagagccttcaggtggctgtagctagggctgaggtcacgcagaaggtttag

SEQ ID NO: 25351 - DNA, 2928 bp, Zea mays
  Peptide Sequence Number=SeqID_67130
atggcatgtgcaactgggatgctaggaaagcgttgcttgattttgatttgggcttctcatgacaatacacactgtgatgaccaatccgtttggagatgcactgattgtcacgtgcttgattgcgaggaccataagatagcatcgatatcaaataaagaaaagtcatttgacctgcacgaaatcttcaagacactccctggtgttaggatggagaagaacatgcaggtagcaagaataacaccagacgaaagagcactggaactgggtatttggtccgtccctgatgatgtattgcataaagtactaattctactcaaacccagagatttggtaagagtggcagcaacttgtcatcatctaaggactcttgctgccactgttatgccttgcatgaagcttaagctcttcccccatcaagaggctgctgttgaatggatgttgaagcgagagcagaacgtgcatgtcctagcacatcctttgtacaaggatttctgcactgaggatggtttcccattctacataaatgttatctctgctgaaatatctaccggtgatgctccaacaataaatgatttctgtggaggtctgttttgtgatgaacctggcctagggaagacagtaaccacactatctctgattctgaaaacccacggaacaatggcgtaccctccacaaggggtagatgtgagttggtgcatgcataagcctgataaaaaatgcggttactatgaattaagtcccagcttttcttctaatagaaacagctcgtctgtgtcaaaaaagcttttgggagaggatgtgatagcagattgtccaagtccagatgattctgtctgcagtaccagatcttcaagaaagagaggtaggttactgagccctgatccaaccaaggtaatgttgcatgctgcgattgagaattccccatcatcatcaaacagcaaagtgcaaccaatgccagctatgcatatactgaagttcactaaaaactcgagacaagttaggaaaaaccccatggatgcatacagcgacgtttcagttggcaataaaaggaagattgacaccacctctgaggtaagtgagacctgggttcagtgtgatgcttgtagaaagtggcgaagggtatctgatggaacagttcttgattctaccacagtgtggttttgcactatgaaccctgatcctacacgacagaaatgcactgccccagaggaatcctgggattttaagagaaagataacctatttgccaggattttacaagaaaaattctttgcctggaaatgaggaaaacgtatcatttttcacaaacatattgaaagattatgttactatgatcaattcagaaaccaagaaggctttgttatggttagcaaaactttctcctacaaaacttcttgagatggagtttgttggtttgactcgcccagttctagatacacgtgcaactacaggcaagggtgcccatccatattacaagatattccaagcatttggccttgtgagaaagattgagaaaggtatgactcgctggtactatccctctatgcttgatgatttagcttttgattcagctgcacttggagctgctcttgaaaacccactggattcaactagattttatttatctacagccaccttgatagtggtgcctgctaacctaattgatcactggacaacacagatacaacgccatgtgtcctcggatacccttaatgtctttgtgtggggagaccacaagaagccatctgctcacaaccttgcttgggactatgacattgtcataaccacattcagcaggctaagtgcagaatggggtccacagaagagaagtccactaaagcagatccattggttcagggttatactggatgaagggcatacactaggttccagccttgccctgacaaacaagttacagatggctgtcgctttggttgcatcaaataggtggatattaactggtacacctacaccaaacacaccaactagtcaggttgctcatcttcacctcatgcttaagtttcttcatgatgaaacttatggtcagaattaccagtcatgggactctgggatccataggccttttgaggcgcaaatggaagaggggcgtgttcgtcttgtgcagctgcttcagagaacaatgatcagtgcaagaaaagcggatctgaaaactattcctccttgcataaagaagataaccttcctagacttcaatgaggggcatgcaaaaagttacaatgaactggtggttactatacgccgaaatatactgatggcggattggaatgacccttctcatgtagaatcccttcttaaccccaagcagtggaaatttcgtgctgctactttgaagaatgtccgttttgtcttgctgtgttgccgggcatatcaaagttgtggatatcattatgagatgcagtctcctgagactcgtgcaaggccagaaaatccaaacccaaagtggccagtgcctaaggatctaattgaattgcaaccttcatataagcaggatgattgggatcccgattggcaatcaacatctagcagcaaagttgcttacatgattgagaagctaagaagtctgcgagaagcacacatgaatcatgggaataacataaccaacagtgttggtcattctaatacactatcttatcaaccacaggcaatgctggacaaagttataattttttctcagtttctagagcatattcacgtgattgaacagcagctgactattgctggaataatatattcgggaatgtatagtccaatgcctctagctagtaagcttttttgttcaccagatcttatatttccctatcttttttttttcaaaaagcgcaggagaactgcaccctcatatattaaagaatataagggtcaaaaaggacccagatacaatgcactccataatctttatggaggctag

SEQ ID NO: 25352 - DNA, 486 bp, Zea mays
  Peptide Sequence Number=SeqID_67131
atgcccggcatactgagggatgtcgccgagcactcactggatatccgagctggggcccgacccgtgaagcagcctctgctccgattcgacgaagaaaagcgcagagccataggcgaggagatccacaagctaatggcggcagggttcatcaaagaggttccctaccctctgcctcgcatcgaccaaatcatggattccactgctgggtgcgaaaccctgtctttcctcgatgcctactcagggtatcaccaaattaggatgaaagagtctgaccagctcgcgacttctttcatcacacccttcggcatgtactgctatgtcaccatgccgtttggtttgaggaatgcgggtgcgacgtaccaacggtgcttgaaccatgtgttcgacgaacacattggccgaacggtcgaggcttacgtcgatgacatcgtagtcaagacgaggaaagcctccgacctcctttctgacctcgaagtgacattctga

SEQ ID NO: 25353 - DNA, 288 bp, Zea mays
  Peptide Sequence Number=SeqID_67132
atgggcgaggggcgcggcggtcgatgccactttggcgtggggggcaaacgacgaccgaggcgcaacggcggtcgagggcgcggcggcgtggagggcgcgcgacggtcgaagggcaggggcgcgacgaccaaggggcgcggtgggcgagggcgtggtggtgtcgggcgcggtgggcgagaaggcgcaacgaccgagggcgtggcagtcaagggcggggtggcatccatcgcggcggcgtggagggccgcggcggcggcgcgtgtcgttaaggtagaacatggtgggtga

SEQ ID NO: 25354 - DNA, 333 bp, Zea mays
  Peptide Sequence Number=SeqID_67133
atggcgcaccaaacaagtcgcctcccagcggtccgggtaaacctcgcgattgtgctggaagaccacacatcaatacttgatggaccaggtcggtgctgtggctcgagctactgtcatcacttccatcgtcggggtctcctccagcagctactccagcggcctggatgcccagtggtggtgcagggggcgcctccagcgggggcacaggagagcagctcctcacagactctacctcctactgaggcgaggaagaaggaccctgttgctccaactcctgtcgctgacgctcctgctcctcgtgcaggcggtggtgcaacctctccaaatggctag

SEQ ID NO: 25355 - DNA, 4164 bp, Zea mays
  Peptide Sequence Number=SeqID_67134
atggccggcgaagatgacggcaacgccaccaacggccggcggcggcggcggaggtccgccgtgcgcctcagcaagctctacagctatgcgtgcggccgccggcccagcgtggccgacgaccactccgtgtccaggataggaggccccggcttctccagggtggtcacggtcaacgccggcggcggcgagccttcagcggctgcagctgacctgctgcagcagcagcagcagcagatggcctccagcaactccatctccaccaccaagtacaacctcttcaccttcctgcccaagtccctcttcgagcagttccgccgcgtcgccaacatctacttcctcctctccgccgggcatcgcctacagccccctcgccgcctacagctcctccagcgccattgcgccgcttgtcatcgtcctcgtcgccaccatgatcaaggaggcaatcgaagactggaggaggaaccagcaggtaccgacacggaggtgaacaacaggaagactcaggtcttccaggtcaacaacatcggcggcggcggcggcttccgcgatgccaaatggaaggacatccgcgtgggcgacatcgtcaaggtccacaaggacgaattcttcccggctgacctcgtcctgctctcctctagctacgacgacgccatctgctacgtggagaccatgaacctggacggcgagaccaacctgaagctgaagcagtccctggaggccacctccgcctcgctgccgccggacgacggcgccagcttcggggccttccggggcgccgtcgtgcggtgcgaggaccccaacgcgcacctctacaccttcgtcgggaacatcgagatggacggccggcagcaccccctgtcgccgcagcagctcctgctcagggactccaagctccgcaacaccgacttcgtgtacggcgtcgtcgtgttcacggggcaggacaccaaggtgatgcagaactccatgaaggtcccgtccaagcggagcaacgtggagaagaagatggaccgggtcatgtacctcctcctcttctcgctcatcgtcatctcggtcgtcagctccgtcttcttcggcatcgccaccagagaccacggcaggaccatgaggagatggtaccttaggcccgacgacactgagatctactacgacccgaaacggccagcggtggcagcggtgctccacttcttcacggccataatgctctacggctacttcatccccatctccctgtacatctccatcgagatcgtgaagctgctgcaggcgctgttcatcaaccacgacatccacatgtaccacgaggagacggacacgccagcccacgccaggacgtccaacctcaacgaggagctgggccaggtcgacaccatcctcacggacaaaaccggcactctcacctgcaactccatggagttcatcaaatgctccatcgccggaaccgcgtatggccgtggcgtcacggaggtcgagcgagcaatggcgaggaagaaaggctccgccgccgccgctgacaatacagacaaggccaaaaacaacggcattcagcagcagcagcatttcctgtcgtcgtcgtcgtctgatgataatgatgatggtgacaacaacagtaaaccagcagccaccaagggattcaacttcgtggacgagcgtgtcatgggcggcaactgggttcaccagccccgctccgacgccatcgagatgttcttccggctgctggcggtctgccacacgtgcatacccgaggtcgaccaagagtcgggcaagatctcgtacgaggcagagtctcctgacgaggctgccttcgtcgtcgcggcacgggagctcggcttcacgttctacaaacgcacgcagacaggcgtttatctgcgcgagctagatccctcgtccgggaaacaggttgacaggtcatataggatcttgaatgtcctcgagttcaacagtgcgcggaagcggatgtcagtgatagttaaggacgaggagggcaaactgtttctgttcaccaaaggagctgacaacgtgatgttcgagaggctgtcaggatcggggagcgcgcacagagacgtgacccagcagcacataaacgagtatgccgacgctggcctgagaacgctggtgctcgcgtaccgcgagctgaaggcggatgagtatgcgcacttcgacaggcagttcgcggcggctaagaactccgtcagcgctgacagggacgaaaagatcgacgaggctgcggacctggtggagagggaccttctcctcctcggcgctaccgctgtcgaggacaagctgcagaacggggtgcctgagtgcatcgacaagctcgcccaggccggcatcaagatttgggtgctgactggcgacaagatggagaccgccatcaatatcgggtacgcctgtagtctgttaaggcaagggatgaagcaaatcaccatcactctggagacagcagacatcgctgcgttggagaaaggcagcgacaaggccgccttaaccaaggcatcgaaagatagcgtggcgcggcaaataaacgaggggaagaagctcgtgaatgcgtcttctggcgagtccttcgcgttgatcattgatgggaggtcgcttacgtatgcgctggaggacgacgcaaaggacatgttcctggatcttgcagttggctgtggatcagtcatctgctgccgctcttcacccaagcagaaagctctcgtaaccaggcttgtcaaaacgggaacgggtaaggtcacattggcgatcggcgatggcgccaacgacgtgggcatgatccaggaggcggatatcggtgttgggatcagcggcgctgaagggatgcaggctgtgatggcaagcgatgtttccatcgcccagttccgcttcctggagcgtctgctactcgtccatgggcattggtgctatagcaggatctcatcgatgatctgctacttcttctacaagaacatcacgttcggtgtgaccctgttcctgtacgacgcctacacgtccttctcgggccagcctctgtacaacgactgggcaatggcgagcttcaacgtcttcttcacgtcgctgcccgtggtcgccatgggcgtgttcgaccaagacgtgtctgctagattctgtctcaagttcccgatgctgtaccaggaggggcctcaggaccttctgttccagtggcgaaggatcatcgggtggatggtgaacggcgtggccagcgccgtgatcatcttcttcctgtgcacggcgtcgctgcagcaccaggcgttccgcagcggcggggaggtggcggacatggcgacgctgggcgccaccgcgtacacgtgcatcgtgtgggccgtgaacctgcagatgtacatcacggtgagctacttcacgctggtgcagcacgtgtgcatctggctcagcgtcggcctctggtacgtgttcctcccggtgtacggcgccatcgcgcccagcttctcgaccacctactacatggtgttcgtggaggcgctggcgggggcgccgtcctactgggtggtcaccctgctggtgtccgccgcctccctcgtcccctacttcacctacgccgtcgtcaagtcgtggttcttcccggactaccacaacaggatccagtggctgcggcacagggagagggcccaaggcccacccggacccggagaccagcgccgacgtggagctcagccaggacttgctctttcttcatggatctcaaggatccagatatttcaggtttttcaggatattagtggatctttctgtgcattattgggacgggtgggcgctgaattcaaagggcattttccagagccatccctgtccgcgagttgggacggcaaccgcggcgccatcaacggagcggaagcgttgtctctaagctcttcggaaagagaccaaaacgtcaggcggttgaacggttcattcatttccgtgtctttgcctccagaaatggacaagttgaaagatgtctgcatgccagtcacagggttcaccgtaacccttcaaaaatcaaaaccggtggccaccgattaccgatcaatcacaatttatccccgtaaaccggtgcagaccgtctggaccaggcttgtggactgtccacgagtggcagagaagaggcacgactatgtgatggttgagggctataaataccaccccaaccaccccttcaatggcaccaagtga

SEQ ID NO: 25356 - DNA, 549 bp, Zea mays
  Peptide Sequence Number=SeqID_67135
atggcccacttgccgaccaagtctgtcgagcaaacctgtgaggccgagcaaccgaccaagtctcttctaagcaaacctgcgaggtggagcgacggaccaagtctctatcgagcaaccctgcgaggcggagtggccgaccaagtctctaccgagccctgcgaggtggagcgaccaaccaagtctctgccgagcaaccctacgaggtggttcaccatttggagtgagttcgtgctaacatccccgccgaacacaaattctactgtccccctggtttccgaaaccacgacaattagcgcgctaggtaggggaccattagcgtgccaagtgacaccctccactctgatggctcagtcttcagcatttactagtggcgagacattcgcacctggaagctgcatcatgttcgactccctcaacttccttgccaccgccaccggcaagctccgccttgccaaccccgacacacctgtcattacaggcataggacccgcacgctccaccaggagcaaggaagaaaatgacgcctcaagagacgcgtcgccaccttga

SEQ ID NO: 25357 - DNA, 102 bp, Zea mays
  Peptide Sequence Number=SeqID_67136
atggccgcgacagccatgatgctttggtccatcctcgagccggatgcaccagaggcaagggcgatgtaccggaacctccagaacctagtggataaagccacg

SEQ ID NO: 25358 - DNA, 213 bp, Zea mays
  Peptide Sequence Number=SeqID_67137
atggacatcaccgaaacatccaagcatttggaaagcatcaccgtttgcaccggcgtggccgtgcactcgattgcattctcctacgttgactatgctggcgaaaagcattctactggtcgctggggctggggtggttccggtggacaacctgagactgttgttggtgaggagcttgaagttttaactcgaatggagtcaatctatttagcttag

SEQ ID NO: 25359 - DNA, 405 bp, Zea mays
  Peptide Sequence Number=SeqID_67138
atgggacgcacgctggtacgggacgtggctatacctggctggggctttctgatccatctcgctaagtctgaggtggtcacagagttgtctgggacaatcggcaaagtggatgatcgcaccgtgataacctccatcaaattcgtgacaaacttaaagaaaacctatgggccttggggagcatatggggacgacagggatactcaattcatagtccccatgcagccaggcagtggcatcgtgggcttcttcgggcatgctggggactatctcgacgccattggcatttacgcgcgtgcgatccctactactactactactcctgtgatgggaaggtcgcttgatcgcgggttcatggtgctgatctcgtttgatttcctacgtttacttcagttggttgctagctga

SEQ ID NO: 25360 - DNA, 339 bp, Zea mays
  Peptide Sequence Number=SeqID_67139
atggcgcccgttccaaaaccctcggtgcagacccggtttgtacttgaggccatggcgaacaaggagaaggaagacggggatcggtgggatcggatgatggcgaagatcgatcggctgacggagaaggtcgttggagtggaggaggtacaacagaagctaatgatgcagtcggaattggcggcggctgtggctcagaaggcggcagaagagcgggtccatttggcgcagcaagtggagaagacaggacgagaggtggccgagatccgactcgagtggatggcgcggaacatggaaggttcagaatcggtgatggaggagcgagctcgcggggaaccttga

SEQ ID NO: 25361 - DNA, 249 bp, Zea mays
  Peptide Sequence Number=SeqID_67140
atgaaggagatggctacggatgaggatgaggccgacggtgcggacccaccagtcagcggcttggagaggagacacacacgcgatgcgagggatgcgccacagacgtgcgggcgggatgagacacgacccagcgcgcaggagtggtggctgacagggctgaccctcctgtcggtgagacgccagggtgcaaatttaaactcatttgaactatgcatattggtcataccaaattatgaggatgttatttaa

SEQ ID NO: 25362 - DNA, 249 bp, Zea mays
  Peptide Sequence Number=SeqID_67141
atgaaggagatggcaacggatgaggatgaggccgacggtgcggacccaccagtcagcggcttggagaggagacacacacgcgatgcgagggatgcgccacagacgtgcgggcgggatgagacacgacccagcgcgcaggagtggtggctgacagggctgaccctcctgtcggtgagacgccagggtgcaaatttaaactcatttgaactatgcatattggtcataccaaattatgaggatgttatttaa

SEQ ID NO: 25363 - DNA, 252 bp, Zea mays
  Peptide Sequence Number=SeqID_67142
atgggcatgaatttgtctcctaaactcacagagggacatgaccgcactcatgacgggatccagtcgtggctcagtcaagaaagcccacgccggtgctgcagggtgaagattatccatggcaagggaggggatcaagctgttacagcccgtggccgccgacgcgatcgccgggacgtgagcagggtattcaccgtcgccaggagagacaatgagagaatatttggtaggtgtttctactcagatttttcgtaa

SEQ ID NO: 25364 - DNA, 222 bp, Zea mays
  Peptide Sequence Number=SeqID_67143
atggcatcgtccgaggacaccgacgaatccatggggctgtccactgtggcccgagcatactggtgctccatcgagcacgctgggcttggcgagtcggatgactcagaggaggtctcctcggaagaggtggactcctccaactccgaggagtggagcggcagcaagggtgatggaggctgttggggccttcctcttccgaaggaggcttcagctcctgaataa

SEQ ID NO: 25365 - DNA, 234 bp, Zea mays
  Peptide Sequence Number=SeqID_67144
atgatggaagtggatggctctgacaagaggaccaacactgctgctcctgaaccatctctgcttccttctgagcttgtgcatcattttgatcaaccactgtccaaaggaaagattgaggccatcgaccttgttggaaaatgggaagcagttgaagaaggtcaggggcaccaaagtcgtgtcgactgttctggcatgcccaactacgctggtctaatggtggagctggctctttag

SEQ ID NO: 25366 - DNA, 285 bp, Zea mays
  Peptide Sequence Number=SeqID_67145
atggatcgacgggttttcggccgggtgaagaggagcagggctcgactacggacggcggatggcgagtgcgtggctccggcgacgaactgcgggctccgggagctcgggcgtgctcggacgtcggctggctggcgcgcaggctgggcgcacggcgtgggcgtcggactcgcggcgctgctcggctgcagggtggccgggacgcgtggggccaaggaagctcctggcgcgcggcactcagagagagaagcagagagagatgagaggagaggagagggaaagagctag

SEQ ID NO: 25367 - DNA, 837 bp, Zea mays
  Peptide Sequence Number=SeqID_67146
atggggctgagggagattgagtcgacattgccgccggggttcaggttctatcccagcgacgaggagctggtatgccattacctctacaggaaggtggccaacgagcgctccgtgcaggggacgctggtggaggtcgacctgcacgcgcgggaaccatgggagcttccagacgcggccaagctgacggcgagcgagtggtacttcttcagcttcagggaccgcaagtacgcgaccgggccgcgcacgaaccgcgccaccaagacgggctactggaaggccaccggcaaggaccgcgaggtgcgcgacccggccgcccgcgccgtcgtcgtcggcatgcggaagacgctcgtcttctaccagggccgtgcccccagcggcgtcaagtcatgctgggtcatgcacgagttccgcctcgactcgccgcgtacgacgacgacgccaccgaaggaggactgggtgctgtgcagggtgttccagaagcggaaagtctacggcagcgatcaagacaacggcgtctccccctcgccgccggtctttgccggcgcatcgcagtcgcagggggtcgtcctgccgccggaccagccctgcgtggtggacgcgtacgtcgtggagaacctcggtagcggcctggacgcgttgctgacgaacggagcgatgtggcagtacacctcgtcggtcttcggtcacttgttgccgcaggaggcgaccagctccccgccggtgatggacctaggctccaggggaggagaaggaggagactacgggtgcagcttcttctacgacagcagcttcgaggacatggccaacatcgggttccgacaagggtggatgggctga

SEQ ID NO: 25368 - DNA, 213 bp, Zea mays
  Peptide Sequence Number=SeqID_67147
atggcgcgtgagcccattgtcttgcaggggctgcctgcgcgtatttgctggctgggcctgggtgaacctcctcgcaccgggctggcgtttaacgaaatggtgcgtaccggcgaactgaacgcgccgattgttattggccgagatcatctggatacggggtcagtggcatccacgacccgtgaaaccgaagcgatgaaagatggctctgacgcg

SEQ ID NO: 25369 - DNA, 420 bp, Zea mays
  Peptide Sequence Number=SeqID_67148
atggatgtaggagataggggttttgggactctatcagcccatgagtctctcacgtcgttgtctacctacgctgcttcggtcagcaatgccgctagaagagctctgtggtctctcagtcacacctatcggcagcagctgcacgacacaaggtgcaggcatctttctctacgtcttcgtggagaaagccagaccagtgttgttccaggtgaagctggagaagattgcctcaacacccttgtaggtgtggtggcaggtcataacactaatctcgacagtgctaccctagatctctcaagggtacatgcagccctcgaagctcaggtcgaaggaagaaatccacctcaagcccaagtccctgtcatagctgtgtccctgccccgcaagaggattcgctatggatttatcaccaggctactctag

SEQ ID NO: 25370 - DNA, 1530 bp, Zea mays
  Peptide Sequence Number=SeqID_67149
atggggctgctgagctccgccaacagatgcggctgcaagaacatcctgagctgcaacctactaaggtgcgcgtgctgctgctcgtggatccgctccgtctgcggcggcaggacgacgacgagcaataaggcggccgcgcagcaggaggcgtcggacgcggagaggaaggcgaagaggaagttggcccgtggcttgtgcggcggagcggtgcgagaggcggaggagcccctgacgtcggaggcgaagaagaagaggacgaacacggcggcgacgatccccgagccgcagaagtgcaagtggacgaagaaggcgcggaagaaaaagaagacgaagaatgagcagaacgggctggcagccctagtggaggagatctcgctctcgacagacagtcccaagcacagggcagcagcaggggagatactgcggatcggcaaccacaacatccccagcagggtgtttacgttccgtgaactggtggacgccaccaactctttctgcccagaaaacctgctgggcgagggcggcttcgggagggtgtacaagggatgcattccagacaccatggaagtcatagcggttaagcagctcgacaaagatgggctgcaaggtaaccgtgagttcctcgtcgaggtgctgatgcttagcctgctgcaccatccaaacctagtcaccttggtcgggtacagcacagactgtgaccagaggatcctagtgtacgagtacatgtcactcggttcactgcaagaccatctcctcgatctcagtccgaaatcccagccactttcctggcacacacggatgaagatcgcagtgggtgcagctagaggcatcgagtacttgcacgaggtagccaacccgccagtgatctaccgcgatctcaaggcatccaacatcctcttggacgcaagcttcaacgcgaagctgtcggacttcggtctggccaagcttggtccgagcggcgacaacacccatgtcagcacaagggtgatgggcacgtacggctactgcgctccagagtacgccatgactggcaagctgaccaagacatctgacatctatagctttggcgtggttctcttggagctcatcactgggaggcgagcgatcgacaccacgaaaccaactcgggagcagatccttgttcactgggcagcaccattcttcagggataagaggaagtttgtgaagatggccgacccattgcttgacatgaagtttcctctgaaaggtctgtaccaagcactcgcgatctcatccatgtgcttgcaagaagaagcaagcagtaggccgctgatcagcgatgtcgtgaccgcccttacatttcttgctgatccaaactatgaccctccggatgacatcaaggatcctctgcccataacagttccaaacctagacatggaaacaactggccaaaacggaacagaaggaggtggacgtggtttggttaggtgtaatcaatttctcaacattcttgaaaccggtgtatgtcatataggcaaagatgtaatatcagctcattttcttgaatga

SEQ ID NO: 25371 - DNA, 690 bp, Zea mays
  Peptide Sequence Number=SeqID_67150
atggcgcaaatggaggagcgcttgaccgatgtgctgactggccgtggtcgcgagcaggccacccacggacgtacttcctccttcaacgacgattcgggcgccgactgcatcctcatcaacgtcggcaccgactgtaccgcggaagacgacgccccctactctgtcaccgccgccgccgaggtcgattctctccccaaccccgacgacgtctgcatcgaggagttcaacgtgttggacgaggacaccgcaagcgccaacgcggctgacgacgattcaggcgctgtccacgtccatgcgccgctcaacctcgacgcaacgtccctgctcgtcatcgagttcgagtatgccacctccgagtgcgtcaggacctgcgtcgtcggcgacgtacccgtcgcacactccgcgctcaaggtgtttgaccaaatgctcagcccaggcttcgatggagagccaattttcgacgaggatgcgggagagaatgccaggaagatctgcgacctagaggccatgcgcgaccaggcgcgcatgtcgacgctgttcctgtatcggatgctgcagaagggctactcgtgcatcatgtcggcgttattggacgcggagaggcagaggtccaaggacacggcggctgccatggcagagcctgaagccaagcaagaagaagtggcaacagtgcaagagaatgccacttga

SEQ ID NO: 25372 - DNA, 240 bp, Zea mays
  Peptide Sequence Number=SeqID_67151
atggcgacagctcctgctggcacaatatcttgggaagcaaagcaagcacgagtgacagaaatcgaggtggtgcagtaccatattatttccataagtgttttcttcgactccgagaacgctgttcgagaccttcttccagttgctcgccagatcgagacatctccagcaattccatctcttactcgctgtcagcgttgcagctgctcgttgccgctctggcttcgaccaggtcgtcgatga

SEQ ID NO: 25373 - DNA, 279 bp, Zea mays
  Peptide Sequence Number=SeqID_67152
atggcaagagcatgtcatccttggtgtgtgtgtgttgctgctgccttgcctacctgcctggccgttggtcgcgtggactatggagggtctcatgcgggcacaaaaccggtgagccatggaggaggtcaggcccttagggatcggcaaggatggaagaccggggctcttgagccagcgtcaaacatggagcccccatgctggcccacactaactggaggaatgggagaggcggtcgcagtggcggccggggcgggcggctgccgggggcagcgcggttga

SEQ ID NO: 25374 - DNA, 1668 bp, Zea mays
  Peptide Sequence Number=SeqID_67153
atggcctctacatgcctagcccccgcctccctctccacgcccctgctctccgactccatcgcgcgcgcgcccgccgccaacgggcacgccaccaaccaccgacaccaccaccacgacgacagcgacggtgctgcggcggtctccgtttgcgacgacggcggcggggacccgttcgcgttcctctcggaggaccggccgccgagggaccgagggccgtccccggccgacccgttccgcaacggcacgccggcgtggggcggcggcgtgtacgcgtggtcgaggacgctgctgctcctgccggtcgcgttggtgcggctggcactgttcgggctctccatcgcgatcggctacgcggccacgtggggtggctctccgcgggtgggcggacacgcacgggaggccgcgggtgggcggcgggcctatgccggcgtggcgccgcccggctcatgtggatcacgcggatctcagctcgctgcatcctcttctctttcggagtctcatgatgccctaccatttgttggaacaattattcgagcgatgcaggttatatatgttgacagattctcaccagcttctcggaaggctgctgtaaatgaaataaagagaaaggcagcttgcaatagcttcccgcgggtcctgttattccctgaaggtaccacaacaaatgggagattcctgatttcgttccaacatggtgcattcatacctggctaccctgttcaacctgttgttgtccgttatccacatgtgcactttgatcaatcatgggggaatatatcgttattaaagctcatgtttaagatgttcacccaatttcataatttcatggaggtagagtaccttcctgttgtctaccctcctgagatcaagcaagagaatgcccttcattttgcggaggataccagctatgctatggcacgtgccctcaatgtcttgccaacttcctattcatatggtgattctatgattatggcacgggcaatagaagctggaaaggtgaatggctcaaattacatggtagaaatggcttgggtaaaagatatttatggtgtgagcacagcagaagcaatggacctattggaacatttcctggcaatgaatccagataacgatggacgtgtgaaagcacaagatttttgggctcattttggtctggattgcagtcctctgtgtaagaagatatttcactactttgatttaggcattaaggaatcgattacgttccgtcagttcttggttgggtgcgcgcacctgaggaagcaaccgttgttccagggtgcctgtgagaccgcctttgagaagtgccgggatcctgaaacatctgagatctccagggcacagctagccgatgtcctgcggttaagcatgctgctgccgtctggtgatagaatgctggacctgttcaagacgtttgacatagatggcgacgaaaagatcagcaaggacgacttcatgacgtgtcttggggaggttcccgttcctgattgcgttctttgcagccccgatcaatggggaagtgtacatcgagatagtctgaaggcaaggcgatgccgtttcaaagatgaactagcaggcgacaaatatttgagaagggagttagtattatattgtcattacggaatctgctgtgagatacgcgctggactgatagattgtcgatggaactga

SEQ ID NO: 25375 - DNA, 1494 bp, Zea mays
  Peptide Sequence Number=SeqID_67154
gatactgaaactgctaccgctattggatcaaagtcctacaatgctcttgcttctggacttgctgaattcaagtcaggtaaaccaacagaagaaaacaaatatgtggaggaagaaactgttgattttgctgccgcaacaactgcagctttaaagattccatctcccagtgtttctcgtgggagatcgtttgatgaacatactctctcaaactcatcaactgtaccacataaaaggcgaggtgaccttgaggaagaagaggaactgatgagagtcctcaatctatctaaagctaaaagtggggatgtagaagtttcttttgacacttcacatagtcattcatcctccaatattgagacaccacaaaatgagagttttcagtcagaagcactcgagttggtggtggcgacaaaaaaagaggaatatggtaatcacgctacgagtgatcatgtctctatgctatcagtcacaaatgttgctattaatggcagcgaagttgtacccgaagaatcccaagaaaatttgatatctaaagaaccagaggacaatggaataaagaaccttgatatacccattcaattttcagaaactactccttatccgtctcatgaatcctttgctagcagtgaccaccaacctgctattcctacccttgttgaaggtgataaagaaacctgcaaagaacagttcgatgtacaaattcatggccagtctaatgatactgaggtcgcttgtgactcatcagttacaacttgtgaagctgttccagatcatgctacaacagaactggatgtgaaaagtgattctttagataattctcagtctctaccttcaagcattcaggaatgtgaaccaatataccaaggtgaagagcacatacttggcaccacaaatatggtgtatgaaaatcaagagccagtgtatgagggggaggtggttcttgctgagcaggctgacaagattggggaaagcagttcttctggggatgacaaggccacagaacatcaatgggaactgattgataattttctgctgaccactgctaaccagctgactgtctatggtctcttctgtttacaagagggacttaacgaaagtgagctttgtgtcttcttccgcaataaccactttaacaccatgttcaagtacaacggaagtctatatctcctagcaactgatcaaggttttataagccaaactgatttggtatggcaaaggttggatgaggattatcttgctcaatttgacaactccacttctggaaactctgatcttgagctagctatagcactccaacagcaagagtttgagcggcaaccacaaaggtttcaagctccacagccgcagcagcaacagcaacaacagcaacaaccaccacctcagacgcagtaccagactcaatctggccgaccaggacttgttgttggtccaaggaggtccaacgccccacctccgtccagaagtgaatcgaagaaagagagatgcatcgtgatgtaa

SEQ ID NO: 25376 - DNA, 225 bp, Zea mays
  Peptide Sequence Number=SeqID_67155
atggcgcttttccccctcctccttgcggaaaggcgacgcaggggcgcctggcaagaggacagcaccgcctacgacgctccaactgtcgtgccactcgacagagtgaggctgacagcagccaagcccggcctcaggcgccataggaaactccgcttcgctcggccccagggctcggactcgggctcagccccggaagacgatgaactccacttcgcccgaccgtag

SEQ ID NO: 25377 - DNA, 417 bp, Zea mays
  Peptide Sequence Number=SeqID_67156
atgtcgtccgacccatcgccccacctcccctcgccggtggccccgccgggcgcggcggaggcggatccccatcacctgccccaacccgccgagccacacgaggtgatgcaccggacgagggccgtcgacttcctcgggcgacgcacgcccatcgtctaccagaacgacaacgggccctgcccgctcctcgccatctgtaacgtcctgctgctgaagaatgtgatcagtctgaaccctgacgctggcgaggtgtcgcagcagaagctgctctcgctcgtggccgagcgcctcatcgaccccaacattgccggacaggttcggctatatctcttgcaagatcggggcttcgtgttcggtcgatcaatgcgggacggtcttgtgttgggttgcagcagcagcttgccggctggaatctaa

SEQ ID NO: 25378 - DNA, 1880 bp, Zea mays
  Peptide Sequence Number=SeqID_67157
ccgttgctcgctgaagaagatggggaggaggaagaagtccaaggagatggagaagaagccgctggacatcctgtcgggctccgacgaggacttcgacagcggggagaacctctccaagatccagatcaacgaggagtacgcgcgtcgcttcgagcacaacaagcggcgggaggcgctgcagcgcctcgaggagcgcaggaagcagggcctggtccccgcctccgacgacgacgagtcggagtccgagtcgtcgtcggaggaggaggacgaggcggccgccattgcctcgcgcctagtcgaccgccgcatgttcgaggtgatccgccgcatccgcagcggcgatccccgcatcctcgacaaggacgccaaggtctactcctcggaggaggaaggcggcgaggaaggtgaggacgccaagaagcaagaagagtccaagcaggagaaggaaaagaccaagaaggagaagcctctgtacctcaaggacgttaatgcccgccacctgctcgaggagggccccgagttcgcagcgcagcccagccggagcagcagcaagttcgagaggatcgcttatgacgagcagcagaagaagggattggaggctttccttgaggcacagaaagaagcattaggcgatggtggagacgatgatggcgatttattccaggtgaaggaaaaggctagagcaggagctgacgacgaagcggaggaggacgaggaggagaagcagacaaaggaccttgctggtgaggtctttgggaaggatgaggagctggatgagaacgagaagttcttgaaggaattttttcttaagaggccgtaccttgagacagagaagagtaagtcctatctagataatatccaggaattgtcagatgaagaggagctcgagattcaggaagagtatgagcatgcttataattaccggcatgaggaggccatggcatcaggggcagtggtggcggatcgggtgttgggacattcaagggttgttgaaggttcggtgaggaagaaggagagcagcagaaagcagcagcgcaagagcaaagaggagcggatggcccgtgttaagcaagagcaagcagaggagctgaagcatctcaagaatttgaagaagaaagagattgcagagaagcttgagaggatccgaatgattgctgggattgaaggagatgctgcttgtaagcttggtgctgatgacttggaggaggattttgatccggaggattatgacaaaaagatgcaggagatgtttgatgatagttactatgaggctgatgaggttgatcctgagtttggaagtggtgaggagatggatttggagaagccggattttggcaaagaagacgaattgcttgggcttcctaagggctgggctagtgaccattcaaaagaagagtctactgccactgatgcgaaaggtgaaaaagggaagatctctctcaaagacaaggtggagcttgagaaagagatggaagagtactacaagttagactacgaggacactattggagatatcaagactcggttcaagtataaacaagttaagcccaatagttttggtctgagtacctatgatatattggcatcagatgacaaggatttgaaccagtatgtttccgttaagaagctagctccttacagagaggatgaatggaaggttacacatcataagaagcagagcaaggatttgatccttggaggccagaagaaggaagggaagaaggacaaatctggcaagaaatctaggtctgaggaagaccctagttcttcaaaaacagagaacgacaggatgacaaatgggcaagagtcaacagatgccaagaaaaagtctaccagaagtgaacggcggaagcgtcgcaagtctgagctaaggccatcca

SEQ ID NO: 25379 - DNA, 141 bp, Zea mays
  Peptide Sequence Number=SeqID_67158
atggagcctagtgcccgtcccgaagccaaatgttggtgggaaccaagtggtttgttcccgcaacaagccaatatggaacatggtgttggagaacatggaaccaagctccactttgcaccaaaggttatgcctcagtctcag

SEQ ID NO: 25380 - DNA, 1131 bp, Zea mays
  Peptide Sequence Number=SeqID_67159
atggctaagcgatcctactcacattggacccagtgctcaggaccaattgggggtattggtcatggacttaaagatattttggaggctcataagggcccatttacaggacaaggccataaagccatttttatggtaagagactatgatccaactactcgatacaacgatctattagatcgcgtccttagacaccgcgatgcaatcatatcccaccttaactgggtatgtatatttctgggttttcacagttttggcttgtacattcataatgataccatgagtgctttaggccgtccccaagatatgttttcggataccgccatacaattacaacccatctttgctcaatggatacaaaatatccatgctggcgcgcctggcgtaacagctcctggtgcaacaacaagtaccagcttaacgtggggaggcggcgagttagtagctataggcggcaaagtagctttgttacctattccattaggaaccgcagattttttagtccatcacattcacgcatttaccatccatgtgactgtattaatacttttgaaaggtgttttatttgctcgcagttcccgtctgatacctgataaagcaaatcttggctttcgcttcccttgcgacggacctgggcgagggggaacatgtcaagtatccgcctgggatcatgttttcttaggtctattctggatgtacaattctatttcggtagtcattttccatttcagttggaaaatgcagtcggatgtttggggtactataagtgatcaagggatagtaactcatatcacagggggaaactttgcgcagagttccattacgattaatggttggcttcgagatttcttgtgggcacaggcatcccaagtaattcagtcttatggttcttcattatctgcatatggtctttttttcttaggcgctcattttgtctgggctttcagtttaatgtttttattcagcggccgtggttattggcaagaactcattgaatctatcgtttgggctcataacaaattaaaagttgctcctgctactcagcctagagccttgagcattatacaaggacgtgctgtaggagtaaccctttcccttctgggtggaattgccacaacatgggcatcttcttag

SEQ ID NO: 25381 - DNA, 312 bp, Zea mays
  Peptide Sequence Number=SeqID_67160
atggcgaagcgaggtagcgttgtcgcgaggacaagggattgccgaggtggcagagaatctagagaggacatcgtggccggggtggccgagacgacggtgctaggtggaggcagaggcattagaggcgagggcgtagggcgtggcaacatgggagcaagaagatcctggatggggagggagacaaggcctcgatcttcatggagacaattacggtgctggaaaacacaaactgtccgggttcatgacatgatcaagagccacaaaggtgtctcagagaagatggtcggtgtgaagggaaagcgcacacggtag

SEQ ID NO: 25382 - DNA, 2673 bp, Zea mays
  Peptide Sequence Number=SeqID_67161
atggcggttggggacgcgctgcgccggctctgcgaggaggtcggctggtcctacgccgtcttctggaaggccatcggcgccgccgaccctgtgcatttggtgtgggaggacggttgctgcggccacgtgtcatgctccgccgggtctgaggctcctgaagctgggtgcgagctgggcaccagtgtgtgcacgcttgttaggaaggtcatgacctcgcaaattcatgttgttggtgagggtaccattggccgtgctgctttcaccggaaatcatcaatggattgtccatgatcctgccaatgatcacaatctcagacccgaggtttctgctgagatgaatcatcagtttgcagctggcattcagactattgcaattattcccgtgttaccacgaggtgtactgcagctaggtgcgacaagtgtggtaatggaaaataccaaccttgtgctccagtataagaacctgtgttctcagctaaacaatcggtcgagtatggcttcatcgtcatctgttaaaaatgatttgaaccagaaaattcagtcacgccctttgaatggcctcacgagtatacaccctgcagatacacgctcaaagttttttagtggacccccattgacatatcaacaatgttatggtcctgatggcagaactgtgtctagtagtacattggcaaacatgggcagtaatgcttcaatgcttatggttgcacaaagaaatggccaagtgggtaaagaacacattgtatatgctcctgacatgaggttcagaccacaaaacccttactgtgacaggagagttgggagtaacacccaaaatagtgttgtgagctctggttttatctcgtctatctcagcatcaatggaaaggcatccattaatgaccaacaatcgacagttagaacaaggaaacactggagaaccatcagattccagaagtgttctcttgaaatctctcgcataccataaccctttagtgcatgaaaacacaaacatgactttgttgcatggaagaggccaggtgccaggctttgttaatggtcatgggggttttgattttctcccagaaggtactagagtagtcaagagtaacctgtatggcagcacaacaaatcaaattttagatcaaatatgcagttctacttctgggatgaaagggcacggaccaactatttcatataaaatcccccaacctacccaatttgttggaaaaacggagagttccaagagagagacatgtcaagcttctgttgctctgttgtctgactctgatattcaggtttctagtgtcttgaaaacagccatttcccaagagaatcagacgagtagatctgatcttattggctcaaaaaaggctaatgaagtgcatgatcctactgatgcaattgttcaagctgtcaagaatatggatcgccgcagactcccagacatatctaacgagagatcacccccattccttatggatcctgctgcagaaagtgatttgtttgacatgtttggttctgaatttcatcatttgtgtcacaatgtggataatgatcttacctggaaagctgcaaaacctgagaattcaaatagagatgtacctgaattctctgatcatcttggttcctctccagccttcaattcagtggatgacgagttcccttattctgggatcttctcactaactgataccgaccaactgttggatgcggttgtctctaatgccaatcctggtggcaagcagatatctggtgacagcgcttcttgcaagacttcagtgacagatattcctagcacttcgtattgtcgcttaaaagagccaaagcagtctgaatcatctgctcctcctttgctaatcaagaatgagttagctgtttcaaattttgttaaacatccatctttcccagaaaaggcagcggatggctgtctttctcaaaataatgcaatacagaaatctcagatacgcctctggattgagagcggacagaacttgaaatgtgaaagtgcctcagcctcaaacagcaagggcgttgatacatcaagcaaggctagtcgaaagaggtctcgaccaggagagaatcctaagccacgaccaaaggaccgccagcttattcaggatcgtataaaggagctccgggaactcgtacctaatggggcaaagtgtagcattgatgccttgttggagaagaccattaagcacatggttttcttgcaaagtgtgacaaagcatgcagataacctcaaggactcaaatgaatctaagattcttggtggtgagaatggtccattaaaagactacttcgaaggtggtgcgacttgggcctttgatgttggtagtcaatctatgacgtgtccaatcattgttgaggatcttgatcggcctcgtcagatgcttgtggagatgctttgtgaggatagaggtatcttcttggagatagctgactttattaaaggactcggattaaccatcttaaggggcgtcatggaagcacgcaaaaataaaatctgggcacggttcactgttgaggccaacagggatgtgactagaatggaaatcttcctttccctaatgcgcttgctggaaccgagttatgatggcggtggagcaggagagaatcctaataacaacataaaaatgccccttggaattgtgcagtatcccgttatccctgtgtcaggtcatcttaggtga

SEQ ID NO: 25383 - DNA, 447 bp, Zea mays
  Peptide Sequence Number=SeqID_67162
atgggcaagcttggtgccaagctgaccaagctcaccaagtctcaggccgactacatcagcgtgccgatcgatcgaggacagcgctgctatccaacgtgggctgggctcagcgtgggcctcgcggccccgtccaccagcgctgtgctggagagaagtgcaggcaggcagttggtaacttggccaatctcctcccactcctgcgccgccatagatcccaagagcaagtccagcaaggtgccacaagctcgacagcgacgtccatggccacgctcgccactgacaccgtcaccgacggcacgacgcgccaccgttgcacgaggaggagaacaacgtgccttcgaagatggtggcgtgggagacgcctccagctcctaccctggtggcggcgacgagggcttgaatcagattagccatgaggtcatggactcatgggttcctccatgttga

SEQ ID NO: 25384 - DNA, 1032 bp, Zea mays
  Peptide Sequence Number=SeqID_67163
atggaggacttgagcgccatgcgtcaccacttgatgtgccccatctcactgcagcccatgcaggaccccgtcacggcgcccaccggcatcacctacgaccggcgcgccatcgagcgctggctggccgccggccacgccacttgcccggtcactggccagccgctcgccctcgccgacctcaccccgaaccacacgctccggaggctcatccagtcctggtgcgccccgcgtccctccacgccaccggaggcggcgggtgctaataagccggcggatggcgacgacgcagtggagcactcgcagtcgcagaccgacgacgacgtcgtcaagaagctgctgcgcgcggctacttccccgcccatcgacgtgctccgcgaggccgcggcggctgcgttcgagagcgacgcggcgcggcggcgcatggtggacgccggcgtgctccagcgcgtgctccgcggcgtcgcggcaatcgccagcgaggtcaaggccgatgatccccgacaccatgagaatgagagcagctcagcgatcgcgcgcgccatcgaggccaggctcgacctcgcccgcgcgctcgccgtctctagctgcgacgacgacgagctgcggccgcagctggtcgccgacagcctcgtgcacggcctcctcgacgcggcgacggacgtgctggcggccctcgagcgcgccggcgccggcggcgccggcggcgacgcggcgcgggcgagcgcggtccggctgctggactccgtgacgggggcggccggcgcggccgtgctggagcggctgcggccggggctcttccgcgccgtcacggcggtggtgcgcgaccgggtgtcccccgccgcgacgcggtccgcgctgcgggtgctcctgcacgcgtgcccgctgggccggaaccgcgcgctggccgtggaggccggcgccgcgcgcgaggccatcgagctggagctcgacgcgccgcccgcgggcggcggcggcggcaacaggagggccacgcagtggcggagctgcataataaccattgggttcaactga

SEQ ID NO: 25385 - DNA, 480 bp, Zea mays
  Peptide Sequence Number=SeqID_67164
atggcggcggcgccgtgtcttggccgttcgtgccgtacccgccgcagctccactggcaggcatttgtgttggatggctgatgatgcttacccctgctgctgcccttcctcgtcgtcgtcgtcgcaggtcgggagcggcctggtgaaccacggcggcgtgctggactacccggtgctgccccctgctgctctaccctgccacgtcccgccgcccgccaacctgcgcggcggcaccggcgtgttcctgccgcgcatcgaggcgtaccgctacgcggccgctcccccggccaccgccaaaggtggggcagcgacaaagccgtgggctgggactgggagcaggccggcaacggggaagaagcaggagcggcagcaggccgagcaggcggcgccggcagcaaagcacccccagaagcagcggcagcagcagcagcaggctaccggcgcagcgctggctctgccccaggactggtgctaccgctga

SEQ ID NO: 25386 - DNA, 279 bp, Zea mays
  Peptide Sequence Number=SeqID_67165
atggcgccgcctaatatatcgataatgcaattaactaataatggcagctacttgaacaagaagcacttaactattgctattgctagccgtgaagaacggcagtttccatgcaaggcgaagggcttggcaccggcctcctctactcttcatccatccctataccatgtgacagctcattcctctgcccggcccggcattgatgaggtgaggcaaaggaatgggcgaagtggcattgcatgttcgatcggaaaccctcccgtttctgtcgagtgcgcgtga

SEQ ID NO: 25387 - DNA, 153 bp, Zea mays
  Peptide Sequence Number=SeqID_67166
atggcgacagaagctttagaggatttggtggtcgacgaagatagcggagcttggcgaacagtaatggatattcaatcaaggctccaaaaccccaatgcgatgggttggatggaaccagggctggagaggagtggtggcgacggaagtcgaatg

SEQ ID NO: 25388 - DNA, 3245 bp, Zea mays
  Peptide Sequence Number=SeqID_67167
cgagcgagcactaccgtgagttgttggacaacgtgctgaatgggccatttagcatcacgctgagaaatcgcatacagtgtcatgtaatacgagacgcggcgaaggatgaaatcgtgaccgaggagccgttcttagtgctaaatgaagttacgatcgaccgagggatatcgtcttaccttaccaacctggaagtctactgcgacagctcttttgttacttgtgtgcaaggagacggactgatcatatcaaccacatctggaagtacggcatattccctagcagctggagggtccatggtccatcctcaggtccctgggatccttttcaccccaatctgcccgcattccttgtcgttcagacctttgatcctgcccgagtacgtgactctccgcgtccaggtgccgtacaacagcaggggggcacgcctgggcgtccttcgacggcaaggaccggaagcagctgtcacccgcatccatgagggtctccactggaacttgaggaaatcccagtcgtttgacggcccgccgcgctggccacgtggacggggtccggacgcgacgacgcccctggcgccttggcgcgcgtggagtgcgacccggccacctcccgcggtgctccgcctcgcgctcgacgggctcgcgctgtccggccgcatgccccgggacctcgaccgcctgccggcgctccagtacctctccctcgcccgcaacaacatctccggcccgctcccgccgggcctctccctcctcgcctccctccgctccctcgacctctcctacaacgccttctccggcccgctccccgacgacatcgcgcgcctcgcctccctccgctccctcgacctcaccggcaacgccttctccggcccgctcccgcccgccttccccgagacgatccgcttcctcgtgctgtccggcaaccagttctccggccccgtgccggaggggctggcgtctgggagcccgctcctgctccacctcaacgtgtccggcaaccagctgtccggctcgccggacttcgcgggcgcgctctggccgctccagcgcctgcgcacgctcgacctctcccgcaaccagttctccggccccgtcaccggcggcattgccaggctccacaacctcaagaccctcatcctcagcggcaaccggttcttcggagccgtcccggcggacatcggcctgtgcccgcatctcagcgccatcgacctcagctccaacgcgttcgacggccacctccctgactccatcgcccagctcgcctcgctggtctacctgtccgcgtccgggaaccggctctccggcgacgtccccgcctggctcggcaagctggcagcggtgcagcacgtggatttatccgacaacgcgctcaccggaggcttgccggactcgctcggcgacctcaaggcgctcaggtacctgagcctatccaggaaccagctctcgggcgccgtcccggcctccatgtccgggtgcaccaagctcgccgagctgcacctgaggggcaacaacctcagcggcagcatcccggacgctctgctcgacgtcgggctcgagacgctcgacgtgtcgtcgaacgcgctctcgggcgtcctcccctcgggctccaccaggctggccgagacgctgcagtggctcgacctctccggcaaccagctcactggcggcatccccaccgagatgtcgctcttcttcaagctccggtacctcaacctgtcccgcaacgacctccgcgcgccgctgccgccggagctcggcctgctccgcaacctgacggtgctcgacctgcgtagcactgggctgtacggcgccgtgccagccgacttctgcgagtccggtagcctcgccgtgctccagctcgacggcaactccctctccggccccatccccgacagcatcggaaactgttcttccctgtacctcctgagcttggggcacaacggcttgacggggccgatcccggcgggcatctcggagctgaagaagctggagatcctgcggctggagtacaacaagctgagcggcgagatcccgcagcagctgggcgcgctggagaacctgctggccgtgaacatctcgcacaaccggctggtggggcggctgccggcgtcgggcgtgttccagagcctggacgcgagcgcgctggagggcaacctgggcatctgcagcccgctggtgacggagccgtgcaggatgaacgtggccaagccgctggtgctggaccccaacgagtatacgcagggcggcggcggcggcgacaacaacctggagacgggcggcggcggtggtgtagaggcgccgaggaagcggcggttcctgatgagcgtgtccgccatggtggccatcttcgcggcggtcgcgatcgtgctcggcgtcatcgtgatcacgctgctcagcgtgtcggcccggcggagggtcgaggctgcgggtgttggaggccctggccacgaccggaaggaggtggacgagagcatcgtcaccaccagctcgacgacgacgaccaagtcatcgtcgtcgccgccgcccgggggcaaggtaaaggaaaagctcgccaccggcaagatggtgacgttcgggcccgggagcagcctccggtcggaggacctcgtggcgggcgccgacgcgctgctgagcaaggcaacagagatcgggcgcggcgcgttgggcacggtgtaccgcgcggccgtgggcgacgggcgggtggtggcggtgaagaagctggcggcggctcacctggtgcggtcgcgcgaggagttcgagcgggaggtgcgcgtgctgggaaaggcgcggcacccaaacctgctggcgctgaggggctactactggacgccgcagctgcagctgctgatcacggactacgcggcgcacggcagcctggaggcgcggctgcacggcggcggagaggcggcgccgatgacgtgggaggagcggttccgcgtggtgtccgggacggcccgggcgctggcgcacctgcaccaggcgttccggccggcgctggtccactacaacgtgaagccgagcaacatcttgctggcggacgcggagtgcaacccggcggtgggcgacttcgggctggcgcggctgctgcatggcagtggcagtggcaggcaggtggcgatggcgggcagccggttccggcagggcggcggcggcgggatggggtacgtggccccggagctggcgtgccagagcctgcgggcgaacgacaagtgcgacgtgtacggggtgggcgtgctgatcctggagctg

SEQ ID NO: 25389 - DNA, 360 bp, Zea mays
  Peptide Sequence Number=SeqID_67168
atggcgaagccctcggcgtggccgcttccgcgtctcgctccacctcggggatcttccctcccgctcgccgtcccactccgtctcctccggctccgtcttcgtcccgctcccgctccttctcgtcgtcgtcgtccaagtcccggagtcgctcccctcctcctgctaagcgcagaaatggttattggtttcaggaaagcgtcgcctcctgctgagtcggttgttctctgcattgatcatttatcaaggaatgttaacgaagctcatctgaaagagatatttggttcaactggttttgaccagagtgctccttttgctcaaaacaggttgaactcccctgagggtaggttcaactacttttga

SEQ ID NO: 25390 - DNA, 315 bp, Zea mays
  Peptide Sequence Number=SeqID_67169
atggagacagccaggctcacgccgagggagcaggccacgaccaggatatgtcaggtgtcgagctttgcgacggaactgctcgagataaggtccaaagagccgtccctccacgtgctgcttattgctgggaacccaggcatcgctgcgttttataaggactgtgtcgaggcgctctatgaaaacctcggtggccaagcatctattacagcaatagggcacatttcacacagccagaaggattgcgagcatgggcgattgttttcgttgtatgaacaaattgaccacaaggtgcagtttgcatgctccatcagttga

SEQ ID NO: 25391 - DNA, 495 bp, Zea mays
  Peptide Sequence Number=SeqID_67170
atgagcgccacgcgctcgcggcacagcgcggcggggtctccgcgccgcggtgagggcccggacgcggacgcggacgcgcggcgcgcacggggccgggaactggaggaggtgacagcggcgggcgacggcgtcgtgggaggtcgtgcagcccattgccgcgcgggagggcgaaatcctacctccggaatcggcggcagaggcgtgcggatacagcgggctccggtggctcgtcggcgtccattatacgaagggggacggacggcggcagggcacgctgcgtcgggtccggggacgggaagggattcaattcattttttgttgcaagtagtggacgtttggtggtggatcgattctctgactttgaacggcagtcacgtcgacaatacaacgcggcaggagttgaagaaggttgatgctgctgcgctggtgcctgctactgctatgtgctatgctatggactacaatagcagcaataaaaagcagaaaatttactag

SEQ ID NO: 25392 - DNA, 2229 bp, Zea mays
  Peptide Sequence Number=SeqID_67171
atgagaagatcgcccaccgtgcccaccgtggtgtacgaggaccccaacgcccagacacagtacaccacagccgagaccagctacggatacgcctacggcgtcggcgacggctacgggcctgcgtacccgtacggtccctatggtgaggtagttgcaggagagactccggaggcggcaccgagatcgcctgggccgccgccttcgcccccgaccgcggaggcctcgccatgggaattcttcgacccgttcacgcagtacgaccagttcatggaggactacactcgtgggaatctgccaaccaacagccccaactacgccgagctgaggaggatggaaggcatcccggagcttgaggacgaggccgagttggtggggaatgcagaggcatcaaagccatcgacttctggggtttctgatcagaacaagaaagggaagggaccaattcaagacaatgccgcttccaacggcgatttttctggtgacagcaagctgcagaagaaagcgacttcaaaggccgattcttctggtggaaagctgcagagggatgccacttcaatcagcgattctcctggtggcaagctgcagaggaagggatcggaaccacctcctggtggcaagttacaggggaagggatcggagccaactactgacgccaaaggcgaggcggggaaaccggtgtccaggaatgattccgggccaagcaatgtcagctcgaaaaacaaagaagggaggaagaagaacacaatgagcctaaagggcacagttagcagtgacattgatggcagcagcaccagtgggaagaagaaaggtgtggccttcgaaagggaacgatccatcagagaagcagaaggatgtggggagatccatggccagtcggtggtgagcagcgacccattctcaccatcgcatcatgggacgagggatgtcagagaggcgattaatgaggtcaatgagctgttcgacgaggcggcaaactgcagcacagatgtctcaaggctgctggaggtgggcaaaatgcctcgtagcgataccccgagagttctcagatatgtctcttccagagtgatggatcctttaggccttgctgtgtcgacatcgtcttgcctcccgaaatcacatggcaggaagtcgagaccatcaagcagcatggcaaggacttcagcttcgttagatgctggcagtagcaatgatgttggccacctctcatcaaccctggagaagctgtgggtctgggaaaaaaagctctatcaggaagttaaggatgaggagaagctacggatgaagtatgagaagtattacagaaggctgaaatccatggacgaacgaggcgctgaatcaagtacaatcgactccacccgtttgtccgcaagacttgtggagtccaagatcagcatcaacattagaaccgcaaacgccttctcgttaaaaatacaggagattcgagacgaagagctttaccctcaactggttgatctcatccagaggttcaggagtttgtggaaagatattatggaatgccatgagaagcagctattagccatacaggacagtaggattcactggatgaaggcgatgactgtaagtgaatccggcgttgtgtcagaggcctcacgggatttggaacgggagctgacgaaatggtaccgttgcttcaacaagtggatgatctcgcaaaggtcctgtgccgaggcgctgaacgaatggctgaagaaatggctccctgagtcgcaggaggaggttacagcagacggggctcctcctttctccccgggcaggcttggcgcgccacccgtattcgtcgtctcaaacgactggttccaagcgatcgagatggtctccaggactgatgtgctgaaagcgatcgaccagttctctaaggtcgtgcgtagattcaagaagagccaggaagacgagcggcggcagaggcggagagccgaccacgcctccaaagactacgacagaaagcgcaaggatctggaggaagagctcgggctgagcaccatggagagtcctcgctacagccatgacaaccgtgtggtggacctggagaagctgaggaaaagaagagacgaggagagcaccaggcatgacagggtcctgaatcatgcccacgtcacggcttcagctactctgccagtcggtttggtccctgtgctgcaacagatcaccagcttctttcagaggaaccaacgggtctacatgcagattagaactcaacaaggcgcctga

SEQ ID NO: 25393 - DNA, 300 bp, Zea mays
  Peptide Sequence Number=SeqID_67172
atggggaggcatggcgaccagagcagtaacgtcggtgactgtcagggagggcgcgtcggggatgaggcggcgcggaggtctggcgacgctgccgaggtgcgggcgcggccaggggcggcgcgagcgcagtcgggcaggggaggccggcggccgggcgagtatactcagcagactttcatcctacatcttcgtccagccccttcaacgttggtattatggaacaccagattggtattatggaacactagagaggatgagatggaggacaagccccagatagcatgcatcacagagtcatag

SEQ ID NO: 25394 - DNA, 2532 bp, Zea mays
  Peptide Sequence Number=SeqID_67173
atggctgccgtgaccgccgcggccatctctctgtcctcctcctccgcctcctcccctgcggctgctgccaaggccaaggcggcgtccccgtcgtcgtcgccatgcaggcacctccagttcctgtcggcagcgagcccgcggcggcggtggcgggccggcgcccgcgcggtacgggcgcaggtgtccaccaccgagaccgcggcggcggggccggcgaagacgtccaagaagcaggacgaggggctggtcaccaacaagtacaagcccaaggagccgtacgtcgggaggtgcctgtccaacaccaggatcaccggcgacgacgcgccgggggagacgtggcacatggtcttcagcaccgaaggcgagatcccgtatagagaggggcagtccatcggcatcatcgctgatggcgaagacaagaacggcaagccgcacaagctcaggctatactccatcgccagcagcgccctcggagatttcggcgactccaagacggtatcgctttgcgtgaagaggctagtctacaccaacgatcagggggagattgtcaaaggagtctgctcaaacttcctgtgtcagttctctttctctatctcgtttgtatgtgacttgaaacctggcgccgatgtgaagatcacagggccagtgggcaaggagatgctcatgcccaaagaccccaatgcaacagtcatcatgctcgcaacggggaccggtattgctccgttccgctccttcttgtggaagatgttcctggaggagcacgaggactacaagttcagcggccttgcgtggctgttcttgggagtcccgacgagcgacagcctgctgtacaaggaggagctggagaagatgaaggagatggcgccggacaacttccggctggacttcgcggtgagccgggagcagacgaacgcggcgggggagaagatgtacatccagacgcgcatggcggagtacagggaggagctgtgggagctgctgaagaaggacaacacctacgtctacatgtgcgggctcaagggcatggagaagggcatcgacgacatcatgctcaaccttgcagccaaggacgggatcgactggatgcagtacaagaagcagctcaagaagggcgagcaatggaacgtcgagctcgccctcgccctctgcgtcctcaccgccggcggcgtcgtccgcgcgcagccgttcgactacccgacggcgaagccctcgacgacgtgggccaacacggacgcctcgctcccgcaccacgtcacctacgccgacggctccgtggcgcgcgccgcgctgctgcggctcaacccggcggggtacggcccgtcctacgccttcggcttcttctgcaccaaccacctcgcgccgctctgcgccgagttcctcctcggcgtggccgtcgtctactgcaacagcggcgggctcatgacctccgtcgtggcgggcatcccgcaggtcgtctggtccgccaaccgcggcagccccgtcggggagggcgccgccgcggagctcacggccgcgggcgacctcgtgctccgctccgcccagggcgccgtcgtctggtccgccgcgggcaccgcgggccgctccgtcgccgccatggccgtcgcccgcgacggcaacctgctgctcctcgacgcgcgcaacaacacggtgtggcagtcgttcgaccaccccaccgacgcgctgctcgtcggccagtcgctgcgccccggcgcgcgcctcgtcgccaattcctccgccgccaactggtccccgagccggctctacctgaccgtcgccgccgacgacgacagcctcagcgcctacgtcgacgccgagccgccgcagcggtactaccgcctgggattcagcggcggcggcggcggcggcggagcctacgcgacgtacaccaacggcagccctcgccgtgttcgctgctgcggcgcctgctcccacgccgctggccaccatccagctccccgccgtcggcgccggtacggtgcagtacatgcggctggagcacgacggccacctccggggtgtacgagtggagctccgcggggtgggcgccgggtgttcgacgtcctgcgcctcttcccggacgactgcgcgttcccgaagggtgtgcggcgcctacgggcgtgtgcacgggacatgcagtgtagctgccccgacgcggccaacttccgggcggtggacttccggaggcccaaccgcggctgcgtcacggtggcgccggttgccggctgcggcggttcgcaccccccggcgcggctggtgtcgctgcccgggctggcctacttcaacgaccccgccaccagcctcagggcgctggagagggtgagcgacgccgcgtgcaggaaggcgtgcctggacgactgcgcctgcgcggcggcgcagttcgtctacggcaccgacgccggcgacggcttctgctacctgcagtcggaggtgctgtcgctggagacgtcgcggccggaggtggtgcactacaactccaccatgcatctcaaggtgcgggccacgcggcgtccgtcaccgtcagccagattttag

SEQ ID NO: 25395 - DNA, 153 bp, Zea mays
  Peptide Sequence Number=SeqID_67174
atgggcggacgcgggcacgtcccggaggaggaggtggtgccggtgttgaagctgggcatgggcaacggcatctctggcctggctcggtcggcggcagcccgctgcaagtactatgtgtgcattcatgctagtatagcatggcaagcacagtag

SEQ ID NO: 25396 - DNA, 119 bp, Zea mays
  Peptide Sequence Number=SeqID_67175
atgccccttgttattgaaggtcggagtgacccaatgaaagatgcaaataaactagcccatttacttaggagggatgacctaatccaaatcgagaaggccaacttcagcaacaatgactg

SEQ ID NO: 25397 - DNA, 669 bp, Zea mays
  Peptide Sequence Number=SeqID_67176
atgtactgccttgtcttttcctctgaggacccagagcgagatcactgtaaacaggtgcccactgccttggaagctggaactccaaaaactgatgtaattcctcgattggagaataggcttttttgtgtcaacttaaatacagaacatcagtttaaaaagagggtgaaatggcacttacgtcggagatacagattaattgcatggatcaaaaatccacttccaggaactccattcaacagcgaagtgattggtataaaggacattgagtatgttacatcagaaattgtggaagaaaaacgtaaactgggaacatatattatgtccagccagaatcctttcatgatacaatattatcggcatctgggaaaagtcatacgtctaggtactgacaatacgccttccgaagatgatactcacaaaacgccttccgaagatcccatcagcaaaacaaaactcaacgagtgcccggttgatgccaaccgcatgttcccaaggccctccaggccaggggacaaggtcctaaggccctccggacctcctgggctcttccggcctcttatagcctccacgccagaggacaaggtcctaaggccctccggacctccagggcactcctgtggccttttggacctctggggcaagcgatcacggtctcccaaggtcctctag

SEQ ID NO: 25398 - DNA, 906 bp, Zea mays
  Peptide Sequence Number=SeqID_67177
atggcacgcagagccacgccgcaggaggccgccgtcgctgccgcggaggccgccatacgatccgtaggcctggggttcgacgtcgtcagcgacgtccgcctcaagttctgtaagcagcggggcgcgcccgacccctggctcatcgaacttgaccatggggaggtccaggatatcgtgctgcccggcggcgtcaccgtcgctggcgtcaccgcttcggttaagtgtgacaaaggggagcggatgaggttccgctccgatgtcctgtcgttccagcagatgtctgagcaattcaaccaggagctatcattgtctgggaaaattccatctggcttcttcaatactatgtttgagttttctggcagctggcagaaagatgctgctaataccaaagcacttgcttttgatggttggtttattaaaaaatttggcactcatatagttgttggcctaaagatgggtgggaaagatgtaatttatttgaagcaacaacattcatcaaccttgcaagctgtcgacgttcaaaaacgattgaaggagatgtcagatagtagatttcttgatgcaaatgtgcaatatgacatgagtaggaacaatcaggttttactttcgtcgggtactgtgactactgtcatgtatatttgtcatcgcataacgataccagggtatgttagtacattcaggcgtggcaatagggacggtggcacacattgcacaacagcctcgggtacactagctgcacattgttgtggctacagggacggtggcacggactacacggtggcctcggatatgcccgcggtctctggcgtgaccatagtgcaccttcttgatcgcataaacctccttgaccgcaatgtcgtccatcacatttatgcgatggacaaaagtcttatcctgattgcctga

SEQ ID NO: 25399 - DNA, 765 bp, Zea mays
  Peptide Sequence Number=SeqID_67178
atggacgagagtacttatctgtcggggaccataactaggggtaccctcaagactcctaaactcggctgggtgaggttgacagcagccaagtccagcctcgggcgccataggaagctccacctcgcccgaccccagggctcggactcaacctcgaccccgaggacggtctccgcctcgtccgaccccagggctcggactcaacctcgacctcgggcgacggtctccgcctcgctcgaccccagggctcggactcaacctcgaccccggaggacggtctccgcctcgcccgaccccagggctcggactcaacatcgacctcaaacaacggtctccgcctcgcccgaccccagggctcggactcaacctcgaccccggaggacggtctccgcctcacccgaccccagggctcggactcaacctcgacctcggacgacggtctccgcctcgcccgaccccatggctcggactcagcctcgacctcggaggagcctccgcctcgcccgaccttgggctcggaccgaccacatcgcaggggggtacatcattaccctacccctagctagctcaggttacggggaacaagaccggcgtcccatctggctcgccccggtaaaacaagtaatgatgacaccccgcgtgcttcatgacgacagcggttctcagccccctacagaagcaaggagacgtcagcaaggtcccgacagccccgacagctgtgcttctacagggtttaagcgctcatccgacggccacgacatcacatga

SEQ ID NO: 25400 - DNA, 189 bp, Zea mays
  Peptide Sequence Number=SeqID_67179
atgaagagcaataaggtggtaacgtcttccgattttctcgaattctcacaattggctgcgtctaggactctggaggaagaattgggagaagatgctctcgaggccgagcaagcagttgacggaggcgtcgacggcgagggcatccacgaggctcggtactccccaaggccttggcgagcactaccatag

SEQ ID NO: 25401 - DNA, 735 bp, Zea mays
  Peptide Sequence Number=SeqID_67180
atgggccactcggcgtcgcggcccactgcctgcgccggcgccggcgaggcgctgccctcgcgcttcgcgcggttccgccgccgcctgcgcaaccgcctgcgccgcggcgccggcgacgactcggtctcctccaaggccctcgccgccgacgagttcgccggcatcgcacgcgtccggatagccaaggagaagaaggttatagtggagacgaatggacctcatattgcacgtatctctgtttttgagacgaaccgattttcgaagaacactttggttggttactgcgaggttaatctctttgaaatgcttactaaggacttggaggaacactctgaggaccttcgtctgttggacccatcgtcacccaatactaccgtgggcagcatatccatctcctgtcacattgaagaccctgttgaaacagaacaaagctttgcccgccgtgtcttagctatagtggactatgatgaagatggaactctttccttatcagaattctcagacttgatgaaagcttttggtaataaattagcagttgcaaagattgaagagcttttccgtcaagcagatacaaatagtgatggcatagttgacatagatgaactggcagccctactggctgctcaacaagaagaagaaccacttataagtaaactgcccctgtctgtgggtgaagatcttggaaaatatgataacataaatgatatgatacatattgacactttgcttcgatga

SEQ ID NO: 25402 - DNA, 129 bp, Zea mays
  Peptide Sequence Number=SeqID_67181
atgctcaactacgaccaggtcttcatcagggacttcgtgccctccgcgctcgccttcatcatgcgcggcgagaccgagatcgtccgcaacttcctccttcacaccctccagcttcagtctggcaattaa

SEQ ID NO: 25403 - DNA, 189 bp, Zea mays
  Peptide Sequence Number=SeqID_67182
atgtgttgcttaatagcatggtcatatcaccccctgtcatttggtgtagcacccaatgcgcgaagctcgcagggcgtgatcaccgtctacggcgaccagcagacagcgtgcaatatcgaaagggacttcattccagggcaacgaaacgtacactgcttcacggcagagcgcgaaggtgtaacaccctga

SEQ ID NO: 25404 - DNA, 1161 bp, Zea mays
  Peptide Sequence Number=SeqID_67183
atggcgtttctctcgccagcagccgcctcgtcgaagaggctgagggtctattcgtccgccgctatcgacggtgccgtcacaggtagcagcaagcacgtggggacccacaacgacaacttccactgcgttgagatccttgatacattggatgttgttcttgatgttggggtgtctatgatcccagtcaacatcgccataatcatcaccagaagggcttcagtgagtcaacatcgccatgatcatcaccagaagggcttcagtgaggtttttgaacatggattcgacacaaaacttagcagcgttggacttgtctacaagcattttggtaaggagatcattgctaaggagcttggggttaatgaggatcatgaagatgttcaccgtttgtatctctcaatatataaaagttttgttgaggcactttacgcaattgacaatggaatcaatcaatatgacatagatcaaccaccaaataccttcagaagacaaaggcccccaacaaacagtacacacttgtcttcacgtgttggacgccttaatccaaactggactgatccagaacagtcacctgagaaagtgaatgcagcatttgaacatgcaatgatactcactgaaagtgaatttatggagagtgttcgcttccatgttaaatcatggttaccagcaaggtctattatcctggagtgtttgttatcaagaggaaatattgatccaagtcgagaaatcatggttttggataggttctgcccgtgctatgatcaacaacatattgaaaatgtgctcgcgatcatatcgaagatcgtgtctgtccgtacgtgctcgagaattggaacgatccgggtggccgggaggaggaaggcgagcaacgcggcggcgctggtagcggtgctgatcgtggccgtggcggcggccgcggccggcgccatcaagctctgcggcgtggacgagtccgcagtggacgcgtgcacgccctactgcaaggcgggcagcacgcaggcggcgccgggccagctgtgctgcgccaaggtcaagtccgcccgctggagctgcctctgcgactaccggagcgctctctccagcgacatcgacgccgcgcgcgtcatggacctcgccaccaagtgcaagtgcgactacccgccggcgtcctgcgacgacaactag

SEQ ID NO: 25405 - DNA, 267 bp, Zea mays
  Peptide Sequence Number=SeqID_67184
atgggggagggtgccgtcggcgacggtggaggtgcggcactgtcgatagaggaggccgctgccgaggaggcaggggaggggcgttcagggagacacggttggaggcgtgctaccggaggcgtggtggatccgtggatgggtgacgggggaggcgcgccgctaggggtggagcggcgggggagacgcgtcactaggggtatagcgacgagggagacgctgtcagggagacgagggaggggtatcattgtcggtagcgtggggagggcg

SEQ ID NO: 25406 - DNA, 1491 bp, Zea mays
  Peptide Sequence Number=SeqID_67185
atggcgctccggaccttccctccccgcgtcctcctcctctccgtcgtcctcctcgctgcccccgccgccggcgccggcactggttcggagttcgacgacggcacctcgcccaagttccccggatgcgacaacacgctgcagaaggtgaaagtgacgtactgggtggacggcgacgagcggagcagccttacggggatcagcgcgaggttcggcgcggtcctgccggacgcggcgcccgacgacgagaagcagcgggccgccgtgcccagccccgagagcggctgcgccaagtcgtcgacgccgctcgcgggctccgtcgccgtggctgtgcgcggggagtgcacgttcatcgagaaggccaaggcggccgaggccggcggcgccgtggcgttgctcctcgtcaacgacgaggacgacctgcagaggatggtctgctccgacaaggactcgccgcccaacatcggcatccccgtcgtcatggtgtccaagtccgccggcgacaaggtgcagtcggccatcggggacgggtccaaggtcgacattctcatgtacgcgccgctgaagccgtccttcgatggcgccatacctttcctctggatgatggccgtcggcacggtggcctgcgcttccgtgtggactgtcgtcgtcgtcggagaagagcctaccaagcagggcgacgtctccctgggtggggaggagaaccccgacgccgaggtcgtggagctgcaagccaatacggcgctcgtgttcatcgtcacgtcctcgctcgtccttctcttcctcttcttcttcaactccaactggtccgcctggctcctggtttgcctcttctgcctcgggagtctccagggtatggaattcgtggtatcttctctcgttgtcagactatgccagcggtgtcgcgaggccaaagtgaagcttcctgctctaggaaacgtgaaggtggtcacgctagtggtcctgccgctggccttcatcttcgccgtcacctgggctgcacaccaggactcgccggttgcttgggttggtcagaacctcatggttgcgtcggcgctccttgtctcggcctttttctacgacattttctgggtcttcatatcacccctcatattcaagaaaagcgtcatgatcacagttgctcgtggcagcgatgacgggccgagcctccccatggtactgaagatgccgaaggagttcgattcgtggaatgggtacgacatgattgggttcggggacattctcttccccggactgcttgttgctttcagtttcagatatgacagaacacacggcaaggacttgacagatggatacttcctctgcttaatgattggttatgccttcggattgtcatgcacatacgttggcttgtacctgatgaacagcgggcagccagctctgctctaccttgttccttcaacactaggagttatcgtcctgcttggagcgaggaggggggagctcggtcagctctggaacgccaaggtgtag

SEQ ID NO: 25407 - DNA, 342 bp, Zea mays
  Peptide Sequence Number=SeqID_67186
atgggcaagagcaagaaaaacagaagttcatcgcaccactccggcgacaagaggaagcgcgagcctagtctccctccgaggactttggggatcaccgccgaggtgtggatgtacatccgggccatcgagcgctccgggctcgagggctcggatgagtcggagatctcctcgaacgaggaggactcctccgactcgtctaaggaggggagcggtggcgacggtgatgacgagggtgacggcggcgacaagggcgatagcgacaagggtgatggtggtagcggcaagggcgacggcggcagcggcagggccagtggcaaaaagcgccactggcttaaatattag

SEQ ID NO: 25408 - DNA, 339 bp, Zea mays
  Peptide Sequence Number=SeqID_67187
atggccggaaggaaggtgagcagcagcagtgccgtggccatggccataatggcggtcgcgctgctggtcatggcggccgaggccgggacgtgcaacgtcgacgctgacgcggtggtgaaccattgcaagtccgcctgctcgagctggtggtggggcggcggggcaaggccgtctcagggctgctgcaacgccctgagatacgccgacttcggctgcgtctgccgcaactactggggaatactcaggagcacgccctacgccggctgcgccatggccatcccttccagggcgcctcgccgtcgcctaggaaagccttcgcatgggaaactccttgcctaa

SEQ ID NO: 25409 - DNA, 99 bp, Zea mays
  Peptide Sequence Number=SeqID_67188
atggcaggcgtgcccatactggccacaccggacaaggaacaagtagatgtccggggtgcaccggacaccctggaagggccacaattcagaagtccaacg

SEQ ID NO: 25410 - DNA, 246 bp, Zea mays
  Peptide Sequence Number=SeqID_67189
atgcggccactgttcccgcacgctgcttaccaactcctgatgggacacacatatgacaagagtgcaagatggccctctggcgcaaactccgcctcgcccgaagccgacctcatcctcgagataaactccgactcgcctaagcctggccttggctacctgctccccgcgaattctacaggaggccactccatttgtgtcacacctagattgaaaggcaaatccaggcgcgaatcaaatgtgtgctag

SEQ ID NO: 25411 - DNA, 288 bp, Zea mays
  Peptide Sequence Number=SeqID_67190
atggaagaggaaggaccaaggggtgtgctcatggtcaaggtagagcaagaccagctcgaggtgctggtccacagccaggtgaggaagattaagcaagagggcgagacggcaagggaggctccaggtctttatccagctcatctgcagtcttctcaggcttcctgcctctccctcgtccctggaactgggcacggcctctcccccggctctggaactgaccacggcctctcccccagctctggaactggccacggcctcgaccagcttggaaaccaccacggttattaa

SEQ ID NO: 25412 - DNA, 588 bp, Zea mays
  Peptide Sequence Number=SeqID_67191
atggcggctagtggaatagaaactggtacaaaattgtacatttcaaacttggactatggggtctctaatgaggatataaagggcactgcagaggtggtgtttacacggaggagcgatgcaattgctgcactgaagcgttataataatgttctacttgatggaaaagctatgaagatagaagtcatcggaaatgacttaggattgcctatgacacctcgtataaatgttgttggggcttctaatggcagagctacaagaacagttgttatgacgcctgagtttagtcaacgtggcagaggttcaagcagtagacctctaagtttgtttgaccttgtcctgacccatgaccttacatattgccgttcaagtaatcccagcaacaggtttaataaccgtggtggtttccaagctggtcgaggccgtggccagttccagagctgggggagaggccgtggtcagttccagagccgggggagaggccgtgcccagttccagggacgagggagaggcaggaagcctgagaagactgcagatgagctggataaagacctggaaagctatcacgcggaggcaatgaaaaccgattga

SEQ ID NO: 25413 - DNA, 1731 bp, Zea mays
  Peptide Sequence Number=SeqID_67192
atggcaaccggatccgccgcgggagaggagtcatcggcggcggcgcgccgcctccgccgcctctccctgcacctcctccagcccgccccggccgaccgccaccaccagccgctggccctcgcggcgtgcgggcaccgcgtcgagggcggcacggacgtggcggcggctctcgcggcgtacctccgcggccgacaccgcgccgcgcagatgcggctgttcgacttcttccgggcacgccccgacctgcagacgcccatcgagctgcccacggccgcgcaccgcgacctctgctaccgccagctgcgcacgctcgtgcgcgaggccggggtgcgcccgctcacgctcatggccaccgaccccgccgagtacttcgccgtcatggaggccgccggcggggccgacatctccctcggcgtcaagctcggcgtccagtacagtctctggggtggttctgtcataaatctaggaaccaaaaagcacagagataagtactttgatggaattgacaatttggattatccaggatcgaatgtccaagccctacaaactaccgctacatttgatcatgtcactgatgagttcattattaacaccccaaatgatggagctattaagtggtggatcggcaatgctgcgcttcatggaaaatttgctactgtctttgcaaggttaattttaccccttcaaggaaaaggaggggaggctgctgatatgggcatccacgcgtttatcgttcccatacgggaccttgaaactcacgctgttcttcctggaatcgagatcaatgactgtgggcacaagatcggcctaaatggtgtagacaatggtgcgctgaggttccgctcagttaggatacccagagacaatcttctgaatcggttcggtgatgtgtcacgggatgggaaatacacgagcagtctgcccacaattaacaaaagatttgcagcaacccttggggagcttgtcggtggacgagttggcattgcttactgttctgtgggtgttctcaaagtcgcagtaacgattgttgtgaggtatgctctgctgcgccaccaatttggtccacctaagcagcccgagatcagtgtgttggattatcagtctcaccagcacaaactgatgcccatgttagcgtcgtcgtatgcgtttcacttcgccacggtgcagttagtggataagtactcggaaatgaagaaaaccaacgatgaggaccttattgctgacgtgcatgttctttcgtctgggttgaaagcctacataacttcatatacagccaagtctataagccaggtcgctggagatctccttaagcaataccaggagaattttaagggagggacactttcagtcacctggaattacttacgggactccatgagtacctacctgtcccagcctaatcctgtcactgcccgatgggagggcgaagatcatctgcgggatcctaatttccagctggatgcattcagaaaacacagcaagacgcttggaggtttcggtgcgtggaatagatgtctgaaccatctgcttacgctagaatcacacatcgagtctgtcatccttgcaaagttcattgaatcggtgaaaagctgccctgacgaaaaatcgtgggaagtattgaagctggtatgcgacctttatgcgctcgacaggatctggcaagatatcggaacgtatcggaatgtagactacgttgccccaaacaaagctaaggtgtgtggtctcatctaa

SEQ ID NO: 25414 - DNA, 564 bp, Zea mays
  Peptide Sequence Number=SeqID_67193
atgtggacgagggggagtcgtgggccaaggtcgatctcgacgatctcgaccttggtagcgacgccacggagggaggtagatgcgatcgagggggaggaggcaggaggtggcgaggaggagagagggggtgcgaccgagggggcatggcctccccgaatcgctggtgaagcaagcacgggcaaggagcttctacaaatcgacggtggtcaggggggagggggtgctgatgtcgaacgggggcagggtcacggtgtcgccccctgtggacgcctccagcgcctgcgccaccgtgaatccgggcatcgccgagggggtgagggcaggggaagggagggggaggccttgaatcctggacgcgtccgcaggggtgttctcggatcctgtcaccgcggcgtgggacaaggggagcaggggcggcggctcacgcgaggtgggagagggggaggcgggggggacgaacgtgggtgtgggcgggcggacgatgtagatttacggaagcaagtggacgatgtagattcaccgaaggcagaaccaggggaggcagcctaccccttgcagcattaa

SEQ ID NO: 25415 - DNA, 375 bp, Zea mays
  Peptide Sequence Number=SeqID_67194
atgaactgccagatagtaataacttataaaattgcttaccttagaaaaacgaccacacctgaatacctacctaccagttacaggaagagaattatactcttgttagctcagagttcattcgtcattgtatcttttcagaatgaagaatttgtcaagctgttacatggtagcaatgttccttgcacaaaccatgttgtgggatcaaattactgcttcatgaatgtctatgaggatagaatacctggaagggccatcatcatctctgtcatagataatcttgtgaagggagcatctggtcaggctttgcaaaatcttaatctgatgatgggactgcctgagaatatggggctgcaataccagcccctgttcccttga

SEQ ID NO: 25416 - DNA, 363 bp, Zea mays
  Peptide Sequence Number=SeqID_67195
atgagcctgcacgcgtggagaagcccggagtggccgtcgctggtgagcctggccagcgtgaggcgggtgggcgagagggcggctagcaatcatgcggaaactccagcacttcaggttcaattcaaccaaccgttatcgagcaccatatgcaggaactcgtcatcaggacattcacagaacaatgcacaagcaaatgggtccacagaagttaagaaatgtgtacaaactcctaatcattttcccctctttctcttgtacagtacactttgccctaaggcgtggaaatcagtgaggcatggatcatgcagtctaaatacaatcacggcatcaacaatccccccaatgcttcaaacagacgagtga

SEQ ID NO: 25417 - DNA, 1614 bp, Zea mays
  Peptide Sequence Number=SeqID_67196
atggaggcagcactgacgcagcaggcggcagcgacggcgacggcgacaccgacgaggtggcggtgcgtgggggacgcgtcgctggctagccatggccagggccagcagcgagcaggcgccgtccggctcggagcggcgcggcgtgcggtcagcggggctgtccgggctagcagcagcaggcatctgggccccgtgcgggcgctcgtctccgaggccgccggcggcgagcgggcggcggagggcgagggaatggacaccgcggtgaggctgttcgtgggcctccccgcggacgcggtggtctccgacggccgcggcgtgggccgccccagggccgtctcggcggcgctgcgcgcgctcaagctgctcggcgtcgacggcgtggagctgccggtgtcctgggccgtcgcgcagcccgggcccgggggctggttcgagtgggccgggtaccgcgccgtcgccgccatggtccgcgacgcggggctcgacctccgcgtctcgctccgcaccgacggcgacgcgctccccggatgggtggccgacgcggcggccgccgaccccgacgtcctcttcaccgaccgctccggccaccgccgcatgggctgcctctcctttgccgtcgacgagctccccgtgctcgtcggcaagtcgccgctccaggcctacgaggccttcttccgcagctttgctgaagagttcgatgacttgttcgggtcaacgatcacggatgtgactatcagcctgggtcctaacggcgagctacagtacccgtcatacccgccggggaaccagggttcccgtggcttcgacggcgtcggcgagttccagtgctacgacaagtacatgctggcacggctgaagcgtcacgccgagtcgtcggggcagccactgtggggcctgtcgggtccacacgacgggccgcggtacgacgacgagtcgccggagtcgtccgccttcttcagagagctggggggctcgtggaagtcggcctacggggagttcttcctgtcctggtacaccggggagctcctggcgcacggcgaccgtgtcctggccgcggcgtccagcgcgttccgcggcaagcccgtggagctgtccgccaaggtgccactcctgcgagggccggggacgggcccgagccccgcggacgccaccgcgggattccacggcgggtacggcccggtcgccgagatgttcgcgcgccacggttgcgcggtgatcgcggccggcgtggaggcgcggccggacgccacggcggaggagcgcctggcccaggtcaaggccgcctgcacggagcacggcgtgcatctcgcggcggagagcgcgcctctcgccgtggcgcgcggcagcgacggcgacggccccacgcgcgtcgtctggctgtccgccgggcgcacccggccgtgccagttcacgtaccagcggatgggcgcagagttcttctcgccgggccactggccgctgttcgtgcagttcgtgcgcgcgctggagtgccccgaggaggcccatgaggacgacctgccagccagcgctgacggcggcgagcggctcactgtgccgtccgcggccgcggcggccccaaaggaccaagcgacaagggaggtgcaaaccgtgtga

SEQ ID NO: 25418 - DNA, 408 bp, Zea mays
  Peptide Sequence Number=SeqID_67197
atgggcctcgaagtcagccgaacccttaaggggaaggagagggtggccgagtcgtgctgcctgtcgcggccggaccaggtggagctggtgctggtcgacgacgacagcggcgaggaggacgacggctgcggcagctgcgtcgacggtgccggcggcggacaggccgaggaggaggatgaggaggaggaggggagcggcggtgtcgccgccgcctggtggagcgaggagagcggcggccgctgttccctctgggcgagcgggaggagaagagcagatgaagaaggcggccgccaattacgcgccgacgacagcgagagcgacgacgaggaccccgcggcggcggcggcgaggcggcaggaggaggaccgcaagttctgggaggcgtgcctggcgtcgggctacccctga

SEQ ID NO: 25419 - DNA, 297 bp, Zea mays
  Peptide Sequence Number=SeqID_67198
atggatggattgaaataccagtggcaagctgcaccaccacttagatatacagatcctgctcacaaatgcctcgggcgcaacagggagctccgcctcgcccgacccctggcctcggcctcggcctcgggagaaggtctccgcctcgcccgaccccaggcctcggcctcagccccggcctcgggaggagtcacaacctcgcccgacctcagcctcggcctcaggagaagtctccgcctcgcccgacctgggcctcggaccgactacgctacaggggatacatcattacgctactcctag

SEQ ID NO: 25420 - DNA, 540 bp, Zea mays
  Peptide Sequence Number=SeqID_67199
atggtgaaggctgttgctgtgcttggtagcagcgatggtgtcaagggcaccatcttcttcacccaagagggagatggccctaccactgtcaccggaagtgtctctggcctcaagcctggcctccatgggttccatgtgcatgcacttggtgacaccaccaatggctgcatgtcaactggaccacactacaatcctgcgagcaaggaacatggagcaccagaagatgagaaccgccatgccggtgatcttggaaatgtgacagctggagcagatggtgttgcaaacattaatgttaccgacagccagatcccactgactgggccaaactcaatcattggcagagctgttgttgttcacgctgatcccgatgatcttggaaagggtggacacgagctcaggaagagcaccggaaacgctggcggccgtgttgcttgtgtcggcgcactcggcagcaagccgctcgtgattgttgctggcttgcttgttaaaaatacactggccgcatcagctgtgcctacggttgcttccactgacggctaa

SEQ ID NO: 25421 - DNA, 201 bp, Zea mays
  Peptide Sequence Number=SeqID_67200
atgaagaataattataggacattggttacaagatacatgtgggatgtgcacaggatgtccgaaggtgggtacaatgctggagcttcgaaggtggagctcttcaaaggttgtgcaaacatgagagttcttaaaaagagatccatattcatgggcactgttgggggccttcggcttccgaaggtcctcaaaaacatgatttga

SEQ ID NO: 25422 - DNA, 174 bp, Zea mays
  Peptide Sequence Number=SeqID_67201
atgaccatagggctagcaggtggaaaccgcaagggaacaaaaaagagcaaaggaccacaaggctttctaaggaagaagaagactagggccttagcgcaagaacacggacacgaacctgtaagtgcatctagcccttttgtggatttcggtgaattgaatgacaacacagtttaa

SEQ ID NO: 25423 - DNA, 264 bp, Zea mays
  Peptide Sequence Number=SeqID_67202
atggagactgggattctccaccgcggattcatggatgcggctgaccctcgcttcaccggggacctggtggctctgtgcataaattttcgcatcaattgggagacagacttcctcacgaggtcgggtttggcatgctctggtgagctcgaccatcgtggggcagggaacgtcgccaaactccggcgttgtgaggtgggtgatgagcgtcggtcgttagatagggacctaacgacgctggttagatctgcattccccttcggctag

SEQ ID NO: 25424 - DNA, 603 bp, Zea mays
  Peptide Sequence Number=SeqID_67203
atggtgaagaagcttgagaagggaacaatcgtagctagcacaaagccctatcaaaagagaaaacaagttcctagagcaaacaagaaacaagagaaggatatgagcaagattcaagaaaaatcaaagagaagcaatatgaggtgttatgggtgcaaagagaagggccatgagattggatcatgcccccacatgaagattaagagctttgcaccatcaacaaatatgtccctcgacaaggaagtaaagaagcaagacaagaagaaggcttacaagaataatcgtcatatttgctacatttgtcgaggaaagggacatctaagtaatgaggaaccagtttgtgaggcaatcaagaaaaaggctattgaagaagaggctcctcatatggcatccattctgcaatcagctgccacagtcaccagcggtagtgccacacaaaggagcggcagtgcagcgcctctacaaagagcagcagctgataatattcaaattcatgatgatgcctacaacatgatgatgaacaaagcggagatgaacaaaccacctcatattcataaagtgtgttggtttgaaggaattgaaagcttggactacaatggaagataa

SEQ ID NO: 25425 - DNA, 276 bp, Zea mays
  Peptide Sequence Number=SeqID_67204
atgtcgaccatcgctgcctcccgccgctcgtcctcctcgtcctcttccgcgaccgccaagcgccccgcgattgcggacggccccgggggacccaaggcgaccgccgcacaggccaagaagcgcgtggcgctcggcaacatcaccaacgttgccgcgcggggagggagggcttccgttggcggcagccttgggaacgtcatggcgcccaccagcagcgcgtttgagttccgttgcgtctccgttcttgtgaggcgtcacctcttcaacattccctga

SEQ ID NO: 25426 - DNA, 468 bp, Zea mays
  Peptide Sequence Number=SeqID_67205
atggcggaggatcgagagatgctggggttttttttatgcgcgaaattaggaaggggtggttgcagacttgcagttgcagcttcgtgcgttcggagcgggagaagcagttttctccacggaagcgcgggtgacaggtgggcctgcatgaaatggtgttacagggtcgggcggagcggagttcgccgtcttccggggcttagcccgagtccgaaccctgggtcgggcggagcagagcttcctatggtgcctgcggccgggcctgaccgcctgtcagccttactctgtcaagtggcaccgcaatcggagcggcgcaggcggcgctgtctttctgtcagaccgctttatgctgatgggggttaccagctgagaattaggagccttgagggtacccctaattatggtccccgacaaatagcaacagtcaatgacaaacgggaccctccaatctggagcgcgtcgattgtataa

SEQ ID NO: 25427 - DNA, 744 bp, Zea mays
  Peptide Sequence Number=SeqID_67206
atggggtccttgggcttgctggttgttgtggcggtcgccgcggtggtgctggagctcaccgcagccgactcctggaacggcggccgcgccacgttctacggcggcggcgatgcctccggcactatgggaggagcgtgcgggtatggcaacctgtacagcgcggggtacgggaagaacaccgcggcgctgagcaccgcgctgttcaacaacgggcagagctgcggcgcgtgctttgagatccgctgcaccggcagcggcagctgcctgcctggtggttccgccgtcgtcacggccaccaacttctgcccgcccaactatgcgctccccaacaacgacggcgggtggtgcaacccgccgcagccgcacttcgacctcgccgagccggccttcacgcagatcgccgtcgccggcgccggcgtcgtgcctgtccaatacaggagggtggcgtgcaccaagcagggtggcatccggttcaccgtcaacggccactcctacttcgtcctgctgctcatcacgaacgtgggcggcgccggcgaactgacggcggtatcggtgaagggctcgcggacgggatggcagaccatgagccacaactggggcgccaactggcagaacggcgcgctgctggacggccaggcgctgtcgttccaggtcaccggcagcgacggccgcaccctcacgtcggagaacgccgcgccggctggatggagctacggccagacctacaccggcaagcaattctaa

SEQ ID NO: 25428 - DNA, 786 bp, Zea mays
  Peptide Sequence Number=SeqID_67207
atggagatcgagcgggcggtgcgcggcagcggcgacgcccggctacgcgccaagtacgacgccgccgtctacatcatccgccgcgcctacgccttgtacccgttcgaggagctcgctttcagtttcaacgggggcaaggattcaaccgtgctgctgcatctgcttcgggcaggctactacctgcacagaacaagttcaggcgacgtggacagcacggccctgcagaccgtgaagaactgccccatgcggaccatctacttcgaggaccccgacgctttccccgcgatcgaccgcttcacgtacgagacggcatcgacgtacggcttgccactggaaaccatcaggacagggtacaagtcgggactagaagccctgctggaggagaagccaaccaaggcgatcttccttggcaccagaaacggcgaccccaacgcggtcggtcaacaagagttctcccctagctcgcccggctggcctcctttcatgagggtgaacccaatcttggattggtcctacagcgacgtctggtctttcctgctgacgtgcgaggtccagtactgcatcctctacgaccaagggtacacttctatcggcagcgtacgcgacaccgttccgaacgagcttctgcgtgatggtggctcgggcgggtacaggccggcgtacacgctgtcggatgggagccttgaaagagctggtagaggaaagaagcaggccgggaagagagacgcttcggttagcaccaggaacggcagcggcagtggaccgcggcaaaggagtaagctgtag

SEQ ID NO: 25429 - DNA, 585 bp, Zea mays
  Peptide Sequence Number=SeqID_67208
atgacacacacatgcacatgcaaacgtgcgcccactctctctctctctctctctctctctcttctcatgactttgagaactttgaagtgtgcattttggccatttcaatctgatcagtctagtagcttatttctaaatgctgttgctgcaaaccagcgtggccctggtactttaggtgataaccaagcgaggtcatatgggaacacaagtgccattgagatggctgctgctaaagctgctcagcatagattgatgcgtggagtatggactaatgctcgttttggtgatatgcgtcgtgctttagcagcttgtgagcgactgatactactgcatcacgatccgcatgaactgagggattatgcagcccttctgtaccactgtgggtactatgaagactgcctacactacttatcattgtaccaaactgcaaagtctgggaaatccccaaccaatcgattggagatcttggaggacgaagctgtgaatactctcaaagcgcggttaatgcttattttagcagaggatggctggagcagatgtagacctgtggcaaggtactggaccaagaactctgagccgtggtaa

SEQ ID NO: 25430 - DNA, 384 bp, Zea mays
  Peptide Sequence Number=SeqID_67209
atgccagctaaggggtgttcaacatctgtgcatgaagtagatgtggcattgcataatctgcagctcctagaggaccctaatgtgggcttcattggccctctaactacctcaccgaggcaatatgacacttcacatgttcataaggagctctggaatgcacttcccgcacttccatcaacatcctcggagatgctcaacacgcaagttggaaaagacgacatgtcttctataggcctgctagcgaatgacctagaggctatggtcacttcctccctagatggtgaccctatcctagaagcactcttcatcaagtccacagcagtgatcatcctcgccctttccaccaacatagtaatggcggcgatggcggagactctgtcttag

SEQ ID NO: 25431 - DNA, 219 bp, Zea mays
  Peptide Sequence Number=SeqID_67210
atggccatacccaacgttgcggagacaaaaacaaggagcatggaagaggaagtaatcaagctgcagaaatgcttacaggacaaggatgagcaactgtgttcatccacaagtagcacggaacagtaccatcatgagttggatgatcttagaacacatctgtcatttactcaagctacaggagaagcaggtgttgcatcagctaagttagctcggatgtag

SEQ ID NO: 25432 - DNA, 357 bp, Zea mays
  Peptide Sequence Number=SeqID_67211
atggcaactggcggcgcctactcacttgatctgcttcctatccgtcctgccgataaggtcggcggcttcctgcccgtcttgccgctggatcatgcatgtcggactcggagtcactaccggaatccgggcaccagtatagcactcggaactataccactcggtaaaaaaccaagacctgagcaccagtataagttctttgtcgagtgtagtggctctggcactcggcaaagaagcacactttgccgagtgccataccaggcattcggcaaagtacctgacatggggacctctctggcggattctttgctgagtgctgttaggcacacactcggcaaagcagtagagaagagattatag

SEQ ID NO: 25433 - DNA, 504 bp, Zea mays
  Peptide Sequence Number=SeqID_67212
atgcctggcggtggcggctccctagaggcgcgtgcggggtttgccatccgcaccgtgggccccatgacattctttgatccggcgcacttcgagcacccccggcgagcggtggcgaacccagaggcgaggtcatacccaaacctcaccgcggttcgcctcggccgcgccgcgcgtcttctccaagagcgcctcaacctcgacagcacagccgcttcaccgcagcagctggccggcggccgccgctcctggcgtggacgagcctcccgcccaagccgctgcccccgccatatgcacccaagccgccgccgtgacgccgtcgccgtgactacgccgccgccgccaggcaccaccgcccaagcacagcccgtgcccgacgacctctcctcccgccccgacgtgcagtccgagcacgacgccaccgaagccaccccgacgaagcccgacgccaccggagccgccccgatgccaccggagtcgccccgacgcagcccgcggccgccgtag

SEQ ID NO: 25434 - DNA, 1013 bp, Zea mays
  Peptide Sequence Number=SeqID_67213
cagctaagtccagcctcgggcgccataggaagctccgcctcgcccgaccccagggctcgggctcaacctcgacgatggacgacgaactccgcctcgcccgaccccagggctcggacacggcctcggcctcggaagacggtctccgcctcgcccgaccccagggctcgggctcaacctcgatgctggacgacggactccgcctcgcccgacacagggctcggactcagcctcagcctcggaagacggtctccgcctcgcccgacccagggctcggactcaacctcgacctcggaagacggactccgcctcgcccgaccccagggctcggactcagcctcgacctcggaagacggacacgacctcgacctcggaggagccgccacctcgcccaaactcgggtccggaccggccacgtcgccaggggggccatcattaccctacccctagctagctcaggctacggggaacaagaccggcgtcccatctggctcgccccaggctctcgtatgagaaggttggccgcgcgggagaacgggccggcgcataaggctctcgctctctcccacgcgaacacttatggctttaaagagctcttctggtcgcgtcgtgttcgagaagaaataaaacatcaggcagttggatacaggtcatacccgaacctcaccgcggttcgcctcggccgcgctgcgcgtcttctccaagagcgactcaacctcgacagcagccgcttcaccgccgcagctggccggcggccgccgctcctggcgtggacgagcctcccgcccaagccgctgcccccgcttctgaagatactgtgcaaaacgaagcctcccatgcgcagctttataagctcggatgctgggagcattccgacacgcgtcgaccgaagacgccactcggacccaccagcagcacgcactcactcgaaagaatcaaagaaagacaaccgtcgaccaccaacaatggaagcatgtgtacttgctttagtgacgacgacctcgatcgccagctag

SEQ ID NO: 25435 - DNA, 138 bp, Zea mays
  Peptide Sequence Number=SeqID_67214
atggaggaggtgtctcaccggcaatcgttgcggcgaaaaggtcggtccgcggcgagggaagattccgtggcggcgaagtccgtgaacgtcggattcctcggtcgtccggtccttgtcgaggtgttattggtcatttaa

SEQ ID NO: 25436 - DNA, 327 bp, Zea mays
  Peptide Sequence Number=SeqID_67215
atggggtcgagaggaggacgaggatctccagatggcgctccgcatgagcctccagggctccccacgtcgttcagccctcaccattgtgaagtgtcaggagctctccaaacagctcttctacacatgcctcgcaaggacgaggtcctttataccatcgtccctgctagcgagacaggaggtcccagtggagcggctaaagccgagggtcgaggcacaggagagagggaactaggctctcaagtaaaaatcaacgccaccgagctcaccaagaacgatgtcgacatccggttcaagtgtacatccactctgcgcctgctgcaatgctga

SEQ ID NO: 25437 - DNA, 138 bp, Zea mays
  Peptide Sequence Number=SeqID_67216
atggaggaggtgtctcaccggcaatcgttgcagcgaaaaggtcggtccgcggcgagggaagattccgtggcggtgaagtccgtgaacgtcggattcctcggtcgtccggtccttgtcgaggtgttattggtcatttaa

SEQ ID NO: 25438 - DNA, 675 bp, Zea mays
  Peptide Sequence Number=SeqID_67217
atgcaagccggctcagagcagaagaagccaaaccgctgtgcgcggtgtgtacaaccgcccagcggttacaagcggctctccacttttgccgagaccagcgggcgaaagggcgggcagccatgcaggcggcatgcaaccgcgccaagtgggcgcacttctccgactcccaacacgcccggcatggaggcccaggccgacgcgtcatgcaaccggcgcgccgaatgcttcgtgcatgcaactgcaccgccacttgcgccaccaccgcgcctcctcgactgcggaaccaataccgaaactcgaggcgacccagcacacgacccagcagcgccagcctggagaagcgggcgacgcttcgccttcgccataacgaccgcgtcagaaaagggatcgggaaagggggataccccgaaaaggatccttccccgtgaaggaaccaggctccgagcctccctactgatcagaggttcgaaggctggcccctcggaagggttcgacagccgcctcagatcacgtgggccctacacccactactggtcagaggttcgaaggtcggcccctcggaagggttcaacgaccgcctcaggctactcgggctccgcgcccactactgatcaggggttcgaaggctggcccccgaaggtttcacagccgcctcagacacagagcgagggatga

SEQ ID NO: 25439 - DNA, 885 bp, Zea mays
  Peptide Sequence Number=SeqID_67218
atggataatgccctggtcctgcagaagcttaggcatatgactattgtctccttcccggggctcatggatcttgctcttgcatccgtcgccaagttcagcccaagtttgaggcttgttaacctcaagaacaaggttactcttacgggcattcttgcttttttcctcaactgcagcccaaagttcaagtccctctctctatcccagtgcatcgagatcaaggacatatgctccacacctgcacagcttccagtatgcaaatctcttcggtccctggccatcaaggattgctcaggcttcgccgacaccagccttcctatggtgggcatgttctgccctcagctggagaacatcaatttgagtggccttagtgcagtcatcgacaatggcttccttccactaatgaagagctcggacagtgggttggtcgacattgatttgaacagctgcgagaatctcacggacacggctgtttctgccttggttaaggcccatgacgcttcccttgccacctcagtctcaagggatgcagcaagaccactgatgcaagcctattcaccatctgtgagagctgcagccagctcatcgagcttggcctttcgaactgcatgtgaatcctgcaacaaggatgtccccatcgtccacgtcgacatgcaaaactatagccttgatgagaagatcaggatgacactcgaggcgtatgttgtcgagaagaccgacgaggtccatgagctctccgatggcatgatgatggtggtgtccccaaggccttccggcttgccggtgatggtgacaggctcccatgagaaggccatggcggtcggtggcttcaacacaattgctaatttctcctaccgccccatcgttgcttcgcttcgtgccaagtaa

SEQ ID NO: 25440 - DNA, 1920 bp, Zea mays
  Peptide Sequence Number=SeqID_67219
atgctctttactccgtcgtcctcgtcggacgctccacccttcacacctagggtcgccgccgcgctcctcgcccgctgcacttcccgcgtcgccgcggcagcgctgcacgcccgcctcctccgctgctcccgcgccttcttccgctccccgtacctctccaactgccttggcgctgcgtactcccgcctcggcgccgcaccgtacgccgttgcgctcctacgcgccgccgccaagcccaacattttctcacacaacatcctcctgtcggctctcgtcagctccggcctcctggaggatgcgcgaggactgttcgacgggatgccccagagggatgcggtcacctacaacgccatgctctccggctacgtcgccggcgcgcttctggacgaggcgttccatctcttctgctccatgaatgagcgtgacgttaggccaactcccttcaccttctccatagtatcgtcggcagttggctctgttcgccgcggccaacagcttcacgctgctgctgtccgccacggcctggcacacagtgatgttgtagtaggcaatgcgcttattgatatgtatggccgggttggcctcttggagtatgcagcgcgtgtcttctcttgcatggaacaagtagatgtcacatcctggaactctgtgatgtcagtttacaaggatcaggctctcaccagtactgtctttaagtgttttgggaccatgaggagcaaaggattttcagttgatggcttcactgtgtccatcgtgctcagtgcttgctcggatgtgaaggatcttgtcaagggtgaccagatgttggcactctgcattaagatgggcttccttacaaacttcatggtttctagtgctattattgacttcctctgcatgtctgacagactgtctgatgcgcttcagctcttcagagaaatgccaacatggggctcagagccatgcaatgcactgatatcaggctatgctaggagtggcctaatggaagaagccctcagcctgtttgcagtgtctatgcgaaatggtattgttccaaacgagttcagttttgctagtgtgctgaaatggagttcatgctttggtttaatggagcagggcactcaaattcattgcctggtttgcaagcttggatttcagaatgatgtaattgtttctacagccctcactgacatgtactgtaaattggggttaaccaagcatgccaggaaaattttcgatacagttggtgcaaaggatttggtgttatggaatacaatgctgcttggcctattgcaaaatggaagatctaaggaagcccttgtaatatttaaaaggatactcaagtgtggaatccaacctgatagaatcactctttttggagccttatctgcatgtggtttagaaggtttggtatctgaaggaatggaaataattaccctgtttaaagataggtaccatattatgcctagtctggagcactatacctgtgtggtcgacatgttatgctgcactgggatgttcagagaggcagtgaattatgtagagaacaagttggcaaagtttagtgctgctattttctctaatattctggaggcatgtatagtccaagggaacattggcatcgcagagctagttgctgaaaagatggtgatgcaaaaatcccgattgtcactaccatatattgttttggctcaaatatatggtgccagatgtaagtgggaaaaaatggctggagtgtggaggtcaatggaaaatcaaagagcaaagaaggttcagtcatgcagctggctttgcatcaagaatcatatttatgtttttacgtcggaacagatattgcaccatggaaaaggagccacctatgaggttttggatcttctattttgggacatgatgaatcataaatatgctcctagttttgtagagcccaataacttggactag

SEQ ID NO: 25441 - DNA, 498 bp, Zea mays
  Peptide Sequence Number=SeqID_67220
atggcgcgcccctggtccttgctcctagctcgcctgcgctcggcctccagctccagctcgccgagtccctctctgtctgcgccatggagctcgcccggccgcgacctcgccttgcttcctgttgcgctcctccttcagcgtctctcccatggcgccggccaccctcacctctgctcctctgcgctgccgttctctgcgcccggacatggagctccctcatccgcgattccctgtgctagcgtgtactctctccatggcgcccagcccccagctcggatctcgcccgaccccaagcggagctccatccctggccgccgtgtgcccctgcgctcggcctcctctccattttttctagccaagcccagccaagctcaccctagccatagctcctcatcgtgtgcctccacgccggtgctcgactggctcgacgatgaccctatcgtcgccctgctgttcgtgctccatttccgcagcactgctctttgtcatggccgttag

SEQ ID NO: 25442 - DNA, 171 bp, Zea mays
  Peptide Sequence Number=SeqID_67221
atggctctcactattgcgcaccttcactttggtggtaacctctgtgatgctattggtattcctgtcagtggaggaataagctatgccctttcaggtgaccttgtcccgtggctcgatcatttttgcaacgtgtatgggttttttgggtcccccagatcgcggttggtataa

SEQ ID NO: 25443 - DNA, 279 bp, Zea mays
  Peptide Sequence Number=SeqID_67222
atggccaagctgcagggcgactggaggcatcccgctcaaccggcggtggtcgcctccctcgaggagcaaaggtgccatggtctcatgccccagcaatcctccttatcgaccctttcggggcagacggtggacaaccttctgagggatctgggtgtagcccacacgactttggagatggccaatgctgaggtccaacgtctacaactgtggttagcggtccttaatgatcctaggaaagtagtctttcttgatctggtctttgggatctcggtcttttag

SEQ ID NO: 25444 - DNA, 588 bp, Zea mays
  Peptide Sequence Number=SeqID_67223
atggggaagagcaacctgctgtcccggtacgcgcgcaacgaattcgacccgcactccaaggccaccatcggggtggagttccaaacgcagagcacgccgcacatcgacggcaaggaggtgagggcccagatctgggacaccgccggccaggagcgcttccgcaccgtcacctccacctactaccgcggcgctcctcgtctacgcgtctcccgccgctggctccaagtagagatggccaaacgggccgcccggctcgttttgggcccgtcccgccaggcacgtcgacagagccgaagtgaccgcagtcatttcgccgctccactgatcggcctgacagaaggacagcgccgcctgcgccgctccgactgctgtgccgctcgacagagtgaggctgacaggcagtcaggcccggcctcaggcaccataggaaactccgctccgcccgacccaaggctcggactcgggctcagccccggaagacggcgaactctgctccgcccgaccaagggctcggactcgggctcagccccgaaagacgacgaactccgctccgcccgacccagggctcggactcgggctcggccctag

SEQ ID NO: 25445 - DNA, 2097 bp, Zea mays
  Peptide Sequence Number=SeqID_67224
atgccgttcggcttgaggaatgcgggtgcgacgtaccagcggtgcatgaaccatgtgttcggcgaacacattggccggacggtcgaggcctacgtcgatgacattgtagtcaatacgaggaaagcctccaacctcctttccgaccttgaagtgacattccgatgtctcaaggcgaaaggagtgaagcttaatcccgagaagtgtgtctttggggttccccgaggcatgctcttggtgttcatcgtctccgagcggggcatcgaagccaacccggagaagatcgcagccatcaccagcatggggcccattaaggacttgaaaggcgtacagagagtcatgggatgtcttgcggctctgagccgtttcatctcacgcctcggcgaaagaggcctgcctctgtactgcctcttaaggaaggccgagtgcttcacttggacccctgaggccgaggaagccctcgggaacctgaaggcgctcctcaccaacgcgcccgtcttggtgccttccgctgccggagaagccctcttgatctacgtcgtcgcgaccactcaggtggttagcgccgcaattgtggtcgagagacgagaagaggggcatgcattgcccgtccagaggccagtctacttcatcagcgaggtactgtccgagaccaaaatccgctacccacaagttcagaagctgctgtacgcggtgatcctgacgcggcggaagttgcgacactacttcgagtctcacccggtaactgtggtgtcatccttccccctgggggagatcatccagtgccgagaggcctcgggtagaatcgcgaagtgggtggtggaaatcatgggcgaaacaatctcgttcgcccctcggaaggccatcaagtcccaggtcttggcggacctcgtggctgaatgggtcgacacccagctcccaatagttccgatccagccagaactctggaccatgttcttcgacgggtcgctgatgaagacaggagctggcgcaggcctactcttcatctcgcccctcgggaagcacctacgctacgtgctacgcctccatttcccggcgtccaacaatgtggctgagttcgaggctctggtcaacgggttgcggatcgccatcgagctaggggtccgacgcctcgacgctcgcggtgactcgcagctcgtcatcgaccaagtcatgaagaactcccactgtcgcgacccaaaggtggaggcctactgcgatgaggttcggcgcctggaagacaagttctacaggctcgagctcaaccacatcgcccggcgctacaacgagactgcagacgagctggctaaaatagcctcggggcgaacaacggttcccccggacgtcttctcccgagacctgcatcaaccctccgtcaagatcgacaacacgtccgagcccgagaaggcacccgggggctacacgcacctattggtcgccatcgacaaattctccaagtggatcgaggtccgacccctaaacagcatcaggcccgaacaggcggtggcgttcttcaccaacatcatccatcgttttggagtcccgaactccatcatcaccgacaacggcacccagttcaccgacagaaagttcctggacttctgcgaggatcaccacatccgggtggactgggccgccgtggctcaccccatgacgaatgggcaagtagagcgtgccaacggcatgattctactagggctcaagcctcggatctacaaagacgtcaacaagttcggcaagcgatggatgaaggaactcccctcggtggtctggagcctgaggacaacgccgagccgagccacgggcttcacgccgttctttctagtctatggggccgaggccatcttgcccacagacttagaatacggttccccgaggacgagggcctacgccgaccaaagcaaccaagctagtcgagaagactcgctagaccagctggaagaggctcgggacatggccttactacactcggcgcggtaccagcagtccctgcgacgctaccacgcccgaggggtccggtcccgagacctccaggtgggcgacctggtgcttcggctgcgacaggacgcccgagggcggcacaagctcacgcctccctag

SEQ ID NO: 25446 - DNA, 1350 bp, Zea mays
  Peptide Sequence Number=SeqID_67225
atgtcggcggccgccgtcctgtgccgcctcggcctccgcctccgccgcctctccacgctctccgaactccccgcggtcgcggcgggagcgccgcagccgcagcacccgacctcgaaggacgcctacttcgcggcggtgcaccacctctccaccatcgtgcggcgggacttctacctggagcgcaccctgaaccgcctccgcctcccgtccccgttccccaccgacctagcgctccgcgtcatccgcgccgccgcccccgccgcgccgctccacgccacgcgcttcctttcctggctccgcgccaagccgtccttcgccgcctcagccgagcacttcgacgcgctgctcctcccactcgcgcgcgcgcggctcttcccccacctctggtccctcgcctccgacatgcgaggcctcggcctccccctctcgccgaccaccttctccgcggtcatctcgtcctacggccactcccgcctccccgaccaggccgtcgaggtgttcaatcgcctccctcgatttggctgcccgcagaccaccgaggtctacaacgccctcctcgacgcgctctgcgccaacggcaacttcaccggcgcctacaagctgctccgcaggatggcgcgcaagggcgttgcacccgaccgcgccacgttcagcaccctcgttgactcctggtgcgcggcggggaagctccaggaggcgcaggcgttcctcgatgacatggcgggccgcgggctccgcccaccggtgcgcggccgtgacctcctcgtcgacgggctcgttcgcgctgggcatctggagcaggccaaggcctttgccctccgtatgaccaaggaaggcatcctccccgacgttgctacattcaactcccttgccgaggcgctttgcaatgctggagacgtggacttcgccgtgtctcttcttgctgatgcttccagtcgaggcctgtgtccagacatctcaacatacaaggtgatgctaccggctgtggccaaggttggcaaaattgaggaggcattccggctgttctatgcggctgttgaggatggccatcgtccattcccgagtctatatgcggcaatcatcaaggcgctttgtaaggcaggacgctttgcagatgctttcgctttctttggtgatatgaagacgaaggggcatccaccgaatcgccctgtgtatgtgatgcttgtcaaaatgtgcgtgaggggcggtcggtttgtggaagctgcaaactacctcgttgagatgagtgaggcagggttcacaccccgggcaccgacctttagtgctgtagttgatggccttcgacattgtgggaagcatgaccttgcccggagattggaacagcttgag

SEQ ID NO: 25447 - DNA, 153 bp, Zea mays
  Peptide Sequence Number=SeqID_67226
atggcgctatccacgcacgcactccttgtggcgctggtcgggcactgtctggacgcataccacctcgagctgaagcgccgccggtggaatcgtggtgccgctgcccatgtccggcttcatccagaacatgcgcggggttgtcgcaggtgctaa

SEQ ID NO: 25448 - DNA, 351 bp, Zea mays
  Peptide Sequence Number=SeqID_67227
atgggttgtgggccacgcgcccacgccagtcccggcgcccaggatgcgttccgcctgcagctgcagcggaggatcgtggagagcgagcttacacatgggccccaggtggcagtgggagagttggcgggtgcgactcggcgacctagggcccacctgtcggtgaccgagtacgtgctcggtgccgcattcatgactgcgacgggaaagccagtgccgtgcgcgagcgatccgagcaagagcaaccgagcgggacggtgggagactgggaggtgctccatctcgcgcgccttccatcacaaggatctccacgcgtcgaccatccgaggtgctcgaggatcggggtccacgtga

SEQ ID NO: 25449 - DNA, 5046 bp, Zea mays
  Peptide Sequence Number=SeqID_67228
atgggtgaccactctgactccgattcctcccccaagtcctcctcgtcctcgtcctccccctccgcccgccgccgttcctcgccgcagcgcagccgggcccacactgacgagaccggcagcagcgacggcgtcctcgtcgagcttcctactcaggaagcgcggagccccggggccgaccctgacagcggcgtcctcgtcaacatgcccgctgacgacgccaccagcggcgagaccttcgacgacgcccccgaagatctcgcggccgccggctcgctctccgcacgctcgctggacgagtccatagccgtcatcgacttccctgaggtttccagcaccagcgccgagctccgcaagtaccaggaagagaaggctgtatttgctcgggaggcagtggcactccggaggttgctacaggagatgttggggcaggaagcttcagttgcgttgcatggagaggacgctgacgagacactgttgcattcaatgctggacgactgctcgaggcttgtgcttgaacttaactcgatggcacgggccagggagcaagagattgagagcctacatgccagggctgcagaggcagaggtatcaagtgaggttgctcatgtatacctgggttcgtggagagaagggtctgagcaagctgttgggcggatgcttgcatcaattgatgctgtggttaggcaagatgatgccagctttgagggtgctgaccaggatgggatttctattctggaaaggaagacttcattgcttgtggagaggtacaggcaggcctcgatgggtattgaacagcttgagcaaattttagctgaggtgaagcctggtttcgcggccacagggcacggtgaccttgctaccactttaagtgttctttcagatgaattggttggtagcaagagaaatgaggtggatttactgcagaagatgaatgcttttgctgaagagaagaaggctattgctgatgaacttgaggaagtgaaagctgctaggaatgcagtgaatgctgaggcaagcaaagcaaaggcagagtttgagcagatggagcaaaagttatcaacgactaaggagaagctcagcatggctgttacgaagggcaagtcactggtgcaacaccgtgattccttgaagcaggccttggctgaaaagacgggtgagcttcagagttgcatgacagaattgcaaaagaagtctgatgccctgcaagcagctgagagcagggttgatgagctacagatttttttagatgaaaagacaagtgagcatgaaaagtgcttggatgagcttcgagacacatatagtgcatgggaagctgctaagaccagcatggagcaattaaatgaatcaaaaagtgccctgcatgcttccctttcactaaaggatggggtttttgaacgcattgaagatatcatgtcagaggcaacatttccagaagatcttctttccttggagatgacagataggttgggatggttagttgagcagaagaaaattgcagatatgatcttctcagagcatcagaaagttaaagaaatcttgagctctgttgacattccacattctgtcttaacctctgaacttgattcccagatcagttggcttgccagctcactgaaccaggccaaagatgatgcggtccggttgcgtgatgagtctgctgaaatgttggctaaaatggctgcacatgaatcaaagctggtgtcaatgcatgaggaaattgaccgtttgacaattattctactggaagagaaacaggaaaaggatattcttttaaatgaacattctgaattgatgtccctatacaaagctgctgttaataagttgtcccttgtctcatcacaaaataatgagttgctaaaggcatttgcggaattttttgatgtcacattggagggtagtcagtctatggatattgccaaattggtacagcagggcctcagaaatatccaacaaagaccaaaatcttctcctattgagagtggcagctttgagaagctacaagcactactgtataccctagaccaggaatcaacactatgtaagatgattcttgaagaagacatgattaacagatctgagaggactggtgaacttcaaagaatggctgaggagattattgttctgaaaaatgagaaggtatcactgcagaaggaggttgaacgggtggaggagagatcagcattgcttagagagaagctgtcaatggctgtaaagaagggcaagggtctggtacatgagcgtgaaggactcaagcaagctctcgacgagaagagatctcaaatagagaatttgaaacaagttttggaagggaagagctctgagatagagaagttaaaacatgctctggatgaaaataagtctgtaacagagaatgtgaagcaagttttggacgggaaaaacactgagattgaaaggcttaaacatgctctgggtgatagttgcgtggaaacagaaaacttaaaacaagcttttgctgagaaaacctctgaagcatataaaataaaacaagaactggatgcaaagaacatggatattgagaatctaagaggtgcgatagagtcaagagaatctgccatgacagatctcagagagcatgttgaacatctattgtcgtcgcaggttgcacgtttggaaaagttgcaagtagatattgttacccttaatgatgaaaaggtgaaattagaaagcatgttggaagaagccagagcttcctgggacactcttgctgattcaatatcaagccttactcttcctattgatcagccttttgaggggcctatggaaaagtttagccagattgcccaatacatccaggaatctcaagttgctaagagttctcttgaaaatgagctacagaaagcaaatgagcaaattaccttacatgctagcaggcattctgatgccctttccacaataaacatgttagaacatgagttgagtaaactaaaagatcatatttcttccatttctgaagaaaaacgtcaaatgcagttaaatacttctgctgtacaggaggagttggagaaaacaaacgaggaactggcaatcaatttcaggaaccttgaaagtgccaacaccaccattaattcactacaagatgcactatcacaggctagatcaaatatttttattcttgctgctgaaaagaatgaagctgaagctaaatatgaaacagaaataaatgctcttaatgctgagctaaccaaatgtttggaggagttggataaaactcatgggcacttacaaagtcattcaacagaatatcatggttaccttgagaagcttggcatgtttatgatggatgatagtctcttgtctctgatagctgaagaatatggaaagacattcaacagcttgagagatatgtgtcttatagtcaagagtatgcatgagcagctttctgtgaagagttttcagaatgattcaattgtggaggattctctgttctgtgcagtgaagtgtaatgattgtaactttgacctcttcatgatcaccaaatgtaagcaggattcagaactctcatcacttttatctcttccggactatgagagctttgttagagaaagattggtcaagaacataaatagaaaagggaatattgatgacacttcatccttctctactattgttgaacagttgagcaaccaaactgaatacctttctagttttttaaaagatttgtcaacctacatgaatagcaatattattgtggtgcttcgttctctgcaactagtgagcaacacctttgcccatactctagaagagcatgacatgttgaaggttgaattggggaacaaggatgctcataacagagctcaagaatctgaagtgctttctctacaaaaagatctgagagcaatgtcatcaaaatgtatttattgcgtccaacaaattgaaattgtttttgacgatatggttgatcttggatatgcaatagacttggctacaggcagctcaagcatagggtctgaactagaggtaactgtgtctgatctgaagaatgaggataccagtgattatagtaaggtggctgatactttgcttgctacaattgacacacttaagtccaagtctgaaaaattatctaccattaaggggcttgtgataacttcattggatgacttcaaaatgaagctgaaacaagctgaagcagctgctgaaactgcttcacatgagcatcagttgtctgttgaaagggtatgcatgctggagaaagaactcaaaatattacaggatgagtgcaacaaaatggaactaaatattcaagagtataaggaaagggagggtgcattgaaggcaagggagttagagttgctatcagttgagcacactcaaatttcagcagacagaggcgagtcaaatgtgcagagggaagaggctacaagtccgcttgacaaactttttgttgtcattgatgaattcagtgcacttcaacacgaggttgagaccttaagatatgaaaatgaagatttacagttaaatattgaatcctatacccgtgaaattgaacagctaagagaggtctccagaaatagtgatctaactaatagggagttggaatccaaaggaagtgagcttcttgaggagctgggagcaaagctgcagtcaagggaaaaggcagttgatgagctatcaacaaaagtaaagatgctcgaggatttgtgccatgcacaactttctcagccagaacctagtaaagacagatcatttgaagcatcttcctcaacaattgggtcagatatgtctgatattgaagatgcggatgttagaactagggttactgagggaccagtgggcaagacaacatcagtttcatctgtttctacagctgcacatgctagaacaatgcggaaggggtcagcggatcatcttgttgtcaacattggttcagagtcagaacgattgattgctgcacaagattcagatgacaaggggcgtataaaatcgctccatacatctggcttcattccagctcagggaaagcacatcgctgatagggtcgatgccttctggaaacttaaagagttaggtgcaccattcccttag

SEQ ID NO: 25450 - DNA, 1047 bp, Zea mays
  Peptide Sequence Number=SeqID_67229
atggcgagcacgcgaagcagctcattgccctctcgcggcgccaccgatggagagaagcgcctcgaagcactggccctgggcagggtagcggaggctgccgacgcagttgcctccgctgcttgcgccggcgaggtggtccgcgcgattcacgctgtcgcatccctcctcttccccgtggactctgaggccgtcgccggtaccgtcgaggaaccattcaggagccagattcttgatgctgtaactgtaaccctcagcaatgaggagagggaatcttggaggcatgccttttatcatggtcctgcatttcctactatgtctaagatattgcttggcaatgttgccttgaagtggttgccgaagattaatgtctctgcaaggcaagagatttacgactcattttttgtcaaagggcctccaactgaagtgattcaagctcttgttccagcgctatctgaaaaagaattttctaaggaggaccaccagactttttgcttgaaccttgaaaggctactgattctatggttacttgataataagggtgttttccaaattgttgtggacttcatttgttctaaaaagcatggtgaagatattctcagcccagataaaacaatatccgtatcaagggttgcacaactacttgcatctgttccagataaagcaagattgggagcttcagctgcacttacatcaccgtatccttttaaactatgcagtattctgtattttactagacaattaatgagtatcttgttccttccttgcggtgttttagttgctgaattgattcctaaggttcgcaatcacatacatagatgtgtgccaccagatcatagggccacaattcctgagatggtccaacatgtttgccagtctcaattttggttcaatatggttgaagcaatgagagatcagcattctattgaaaggttgacagaagagctgttgcgtcaacttgcgtcacaacatataagcgatgaagaggcttattggattctgtggaccctctttaatcagagcttcaagcgtttaactgtcatgaggtga

SEQ ID NO: 25451 - DNA, 1242 bp, Zea mays
  Peptide Sequence Number=SeqID_67230
atgggacgggagaagataagcagcttgcagctttatctggtggttgtcgggggagctgctgcgttccttagcgatgtacgcgggtccaccggaaccagaagtgggcttcgagtgccagtccgacgggaccgcggcccaaaagtccctgcgcgttacggtgctgggagggaggttgttggtgggcatcaaactcgtgcagttggattggggatctcgcgagtcatggagtgcggtcggctcgtcgacaaggaggcgaatgcgagcacctcaaaacgcgtccgagggtgggacaatactgcatggttggtggatggtagccgtctaggagtgggcaggtcaggtcaacaaaaggcaggacgcaaggactggagagtggagacggaggccgccgggggccggcgcgactcggcggctgaacctcatataaattgtgtgattaatagtaccttctcagcctttgtaggtatttatctgagggaagaagaaactatacaattcatcatgtcaggagggtcgtctgaatcttccccgttatctggacaaaatagccttagttctctatcaatttccaaggacaatgaactatcttcagagtctggctgcttgtccattgttgtactaggcgcttctggagaccttgctaagaagaaaactttcccagcgctctttcaccttttccagcagggatttctgcaatctggagaagtccatatatttgggtacgcaagatcaaatctttctgatgatggattaagagaacgcattcgtggatacctcaagggagcttcagatgaacatctttctcagtttttgcagttagtaaaatatgttagtggctcctatgatagggtggaaggatttgagttattaaataaggcaatctctgagtatgaaacttcaaaaaacaatgactcgggaagctaccgcagattattttatttggcattgcctccatcagtctacccatcagtatgcaaaatgataagatcatattgcatgagtccatcttcacacaccggttggacaagggttattgttgaaaagccctttggaaaggatttgaacactgcagaggaactgagtgctgaacttgggcagctgtttcaagaagaacaactctatagaattgaccactatttaggaaaagagcttgtccaaaacctgcttgtgcttcgttttgcaaaccgcttatttttgcctctctggaaccgtgataacatagctaacgtacagtttgtctga

SEQ ID NO: 25452 - DNA, 360 bp, Zea mays
  Peptide Sequence Number=SeqID_67231
atggcggcccctggtgtcgagctctggcgcccaaagcccccgccattccctcgtctgagcccctgcgaagctgcgcgcgcgctccgtgccgacccggtctcgctgtatgtcatcgccgctccacaacacctcggcgtgtgtgcccaggctgcctcctggcgcgacgcggatagccccagcggccagcctgcgtggccagtggcctcggtcgtggcggctcgcggtcaccacatcccctgcggccttccccctgtcggtcgatccgcgccctggccccgtggagcggcctgcgcgcccactgctgcgccccacgccgcggctgccagtcagcaagtcgccggcgaactcgccctagattag

SEQ ID NO: 25453 - DNA, 336 bp, Zea mays
  Peptide Sequence Number=SeqID_67232
atggagaaccacccgggaaaacagtgctaccacaagggtggtgcacaaggttcaacacaaaccaataaaagattcaagttagggactaaattgaatcggagcaaagaactgagtgtgttgtggactagcgcaccggactgtccagtgtgccaccggacagtgtccggtgcaccaggcccgtacagggttgaaccagccactctcgggaaaatgcaggcgcgctccactataattcaccggactgtctggtgtgccactggactgtccggtgagtcagcgggcaacggctacccagcactaacggttgactctgcaaagtgctacagtgcgcggtag

SEQ ID NO: 25454 - DNA, 405 bp, Zea mays
  Peptide Sequence Number=SeqID_67233
atgaaggaactcctcgacattaaggatagccatgcgtcaggggatgcggtggggctgatcttcgatcaccgcaagcagagccctaaacacgataaagagctcgatggaggcaccagtggacaacccgacaaaagaaataataaggacatgcgacgacatgacgatatgctagtagccacaacaggccagaaagggaggaagccttcgaccgaggaggccatcgaccatttcgaggagatgcttgaagcttcatgtccaaaccaccgctccccccgtctagcatgcctacaaagacggtgggctgcttacgaagttcctaagcaaggagggggcccgatccctaaagagacatcgagccaaagagaaaaggtctcgctttccctgacaaaactagatgcttgctga

SEQ ID NO: 25455 - DNA, 249 bp, Zea mays
  Peptide Sequence Number=SeqID_67234
atgccgcaagaagcgtcagatgtaatctctcaaggtctcatctggtttctgtcgatgggtcttgaggtcccacgggttgcctgggcacatttaacgagcaaccaaaagatcaccctcttcaatggcatcttcatttgtttgtacatggcccaactaagtggagctaatgatgctaagatacttgaagtggccaatgagagcttctgtaacaagcccggtgaaagagacttcaagctggagcatatatag

SEQ ID NO: 25456 - DNA, 129 bp, Zea mays
  Peptide Sequence Number=SeqID_67235
atggcggcggcggaggtaaggcaggggggacgcaagttagcctacgcccctgacgacctgatgatggtgggctcctacttccgcagtctcttggtgctatggcgcttgaaacctgaggagtgggtgtag

SEQ ID NO: 25457 - DNA, 201 bp, Zea mays
  Peptide Sequence Number=SeqID_67236
atgggcaaggataaaaagggtcgaggttcgccacgtcgctccggcgacaagcggagcggtggaagtggcggcagcgacgacggcaagggcggcgacaagggcggcggtggaggcagtggcgacagcaggagcgacgacggtggcaagggcggcggcagcggcagcggcagcaaggccaatggcaaagcaccattggcttaa

SEQ ID NO: 25458 - DNA, 201 bp, Zea mays
  Peptide Sequence Number=SeqID_67237
atggcggcgcaccggacagcctacagtgcatgtccggtggcacaccggactgtccggtaccttcggacttgggctaaaagcatgtacgatgtaaaaagcatgatcgtgacgaaggttggaattgctccgaagctacgcgcaggggagcttcgactaaatggcggaaaaaggaaccgacttaaagggaaaaaggctatctag

SEQ ID NO: 25459 - DNA, 381 bp, Zea mays
  Peptide Sequence Number=SeqID_67238
atgcggggcccaccgtcagtctcacccaacgcgtccacttgcttccacatgtggctgactggtgggggccccgggtcagactctctcccttgcgctgctcgtaacaacctcaccaacgcgacgcgcgaagatctcgctggcgagccaaccgcgcggactccttcctcgccttgcactataagagcatgttccccagtacccgtacttccccttgaccatacctcggaaccagaaaagaaaaacccaaaccaccagcactcgtgggagctcgggggcgagaaatcgagtagcgtcgccgcgttaatttctcggaacgccaccgtcctgattccagaggaggtgcaattggtgttcgcgggacatcggtggacaagcctctag

SEQ ID NO: 25460 - DNA, 1773 bp, Zea mays
  Peptide Sequence Number=SeqID_67239
atgggcctggcggtgaagcgcgtcttcctcctcgtgctcctcctgctcagcttcgaggtcctggagggggctctcctccgcctcgtgacccacgaggtcagtgccgtggcagtgacccgtgatgccggtcctgggttcgtctccaggttcaggatgctgctggcaggactggaccgtcatgggtcgcgacacccacaccggagacatcgaaagggttctgcacctgcagctccagcacctgcaccggcaccggcaccggcaccggcaccggcaccggcaccggctccagcaccggttcaggttcaggaaggaagagctgctccgactccgactcccgctcctcctcctcctcctccccacgagagccatagactaagaaaccccagccacattgccccagtgaggagcgtggcgcgcaggctgggaggtggaggtcacgccaggctccccacagctgccgtcgtcgccctggctgttgccggagcgtgtctgcttctcctcggagttgcaatggcggcagcagcagcagcagcgtcactcaggcgatcgaggaagctccacaaaaagcccttcaagctgttctctcatggatcgagagctcacaggccaacttgtgtcaccgtcaaggttagctcgcatcctagtgcagatctgctttgcccggcctctgctgtacagtcccaggactacccatccctcaaggaatctacagagtctaagaccttacctgttcttcccactccatcaataagtgcagagctgatcataggcgaatacgctctgaaaaccagcaccaacttgcagtctgatgaagctgctgatgactccttccgctcgttgccctcttctcattcatcaggtgcctccattacggagtcgccactgcaaatctgtgataaacctatcacagatccgtctccgcccgattcaccttctagctcatcgtaccgatcactgtcaccagactgtagatctcctttctgcccaaagaccactttcacagctcctagtgccatttgccatcttccagaaaaccaaaacgaggagaaaactgcaacggctactgacaactcaggacatcctgaagctctaaaggtcgagcaggccaatgcaaagatcaggtatctaccgtcaggatgtaattccaattcctgtgcttcagaggccacaccctccgaaacaaatccagcgtccagggtttcaaatacagacgtcaatttagatccaaaggaatcgatgcggaacgaagcaaagtccaaagcgcccggagcaacaagtacgcccaaaacaccaccaccccctccaccgccaaccaagcctacttcaagtcttaataaaggccagagctctggccagcctccgttgccacctccactgccggttcagttacaagtcggcacagatgggttaccccttccaaggctgaaacctctgcactgggacaaacatacgttatgcagatttgatgaacagatgatcgagtcattgtttgcatacaactttcaagggcaaacaaaaaacgaggaccccaagagcaagattctagctaccagcaaacatgtcatcgagcaccacaagcttcaaaatactaccatactcttgaagaccttaaacgctagcactgaacaagtctgcagctctataacggaaggtgctggactgtccacccaacaactggaagcgctggtcaagatgagaccgtccgaggaagaggagatgtcctacttgattatggcggggataccaacatgtggatccaacgaatcaagctga

SEQ ID NO: 25461 - DNA, 300 bp, Zea mays
  Peptide Sequence Number=SeqID_67240
atgactctcagcggtgttgggagcgacagtccgatcgaggccaaggatgtcacgtccattgagttgaccatcgggacaaagacccttgatgctttctttgtagttgaagtagaaggaaattactttgtcatcctagagtgggtctctaatattgtgccagtggagaaggagtcagaaaccttggagaggaccaacaaggacttgggaaaggccaatgggctgaggaggaggatcaagggcgtccacaacagcaaggacatcaagtccgactcgactgcgattccatctcgggttccatga

SEQ ID NO: 25462 - DNA, 1851 bp, Zea mays
  Peptide Sequence Number=SeqID_67241
atggggtcggtgccgccggcagagggggacaggcgccagccccagcagcagccacacgtggtgatgatcccgtacccggcgcagggccatgtcacgccgatgctgcagctggccaagctactccacacacgcggattccacgtcaccttcgtcaacaacgagttcaaccaccgtcgccacctgcgcgcgcgggggccgggcgcgctccacggcgcgccggggttccgcttcaccgccattgacgacggccttccgccctccgacgccgacgccacccaggacgtccccaagctctgctactccaccatgaccacctgcctaccccggttcagggacctaattgtcaggaccaatgccgaggccgaggccgagggacgccccgccgtgacgtgcgtcgtcgccgacagcatcatgagcttcggcctccgcgccgcgcgggagctcggtctccgctgcgccacgttctggaccgccagcgcctgcggcttcattggctactactactaccgccacctcgtcgcacggggtatcgtcccgcttaagaatgaagcgcagctcaccgacggttacctggacaccgtcgtcgactggatcccttgcgcgcccaaggacctgcagctccgggacttcccgagctttgtgcgcaccacggacccggacgacatcatgctcaacttcttcatccacgaggtagaggcgatgtcgcaggcgtcggcggtggtcatcaacaccttcgatgatctcgacgcgacgctgcttcacgccatggcgaagctcctgtcccggcccatctacaccgtgggcccgctcctgctgacggtgcgaaacaacgtccccgcggacagccccgtcgcggccatcgggtccaacctatggaaggaacaagaggcgccgctccggtggctcgacggccgcgcgccgcgctcggtcgtgtacatcaacttcgggagcgtcacggtgatgtccaacgagcagctggtcgagttcgcgtgggggctggccaacaccggctacaccttcctctggaacgtgcgcccggacctcgtcaagggcggcgactccgccggcgcggggctgccaccggagtttctggccgcgacggagggccggagcatgctgtcgacgtggtgcccgcaggcagaggtgctggagcacgaggccgtggggttgttcttgacgcactccgggtggaactccacgattgagagcatctgtggcggcgtgcccatggtgtgctggcccttcttcgctgagcagcagaccaactgccggtacaagcgcaccgagtggggcatcgggatggagatcggtaatgacgtccggcggggcgaggtgaaggcgctcatacgggaggccatggagggggagaaagggcgggacatgcgccgccgcgtcacggagcttaaggggagcgccgtggccgcggcgaagctcaacggacgctctatgcgcaacgtggacaggttcatcgatgagcacaggcccatatcttttacaacattcatatctccgtcttcaattctgagaaaattgacagggttatctgcctctcgccgccccttccttcccgctgcccctccctccccgccgacactcccctcagccgccgagaactccaagcgcacctggaggacaccattcgatgcctacgccgtgttagcttctaggaggaagggaaggaagcaggacgacacaagaggaagagaagacttggaagaggggaagaagataggttcacttgccttgtcatccttgtttgtgctaatagtaccccgccttgagcaccagcttgtccccaagcaggcgctgatggaaagcgctgccggagagcctccagatcttcccaggtag

SEQ ID NO: 25463 - DNA, 216 bp, Zea mays
  Peptide Sequence Number=SeqID_67242
atgtcgatgtcaggagagggagcagcaggactcttcctcgccacctcagcagaaggtggagtctatgaggcgcctttcctttatgccctagctggaggcgcctctgcaccaccacagggcaccccatctgctggaggagcccccgacggagatgacgacagtggcagcttagaccacaacatggagctttcggaggagcaggagccggaaggatag

SEQ ID NO: 25464 - DNA, 666 bp, Zea mays
  Peptide Sequence Number=SeqID_67243
atggggattagtagctatcatggcacacaacttctaccacagaacaccaagccgagaaggacctatcccgtaggccacaacgatcccatccagctcctcctcgcaaccaaatctgtcgtctctaccgacgccgcagccagcatcatcggagggttccgcacaccctcgatgaatacggacatcactgcatcaacgaagctagagtacccggtcgtggaccagaacccgacctttaccaaggtggtcgacaacttctctgtgctcgattacatgcacctctccaccatcttcgcgatctccatcattgttggttacctctccagctcacctcccctcctagaccactccccttatagatcccctcccctcgtagatccccacccaaacctaatctcccacttcaaccctatcagtagctcggacccacgcttgtcgtctagggatcaagccggggatccggggtccgtcgatggtcacgggtgggcctatcggggtcatgggagggttcgtgtacgcctactagaactcagttggctgcctaatgggattcttccccaacgaagtcgaggtcgcgcgctaccagcacaagctatagcgaggatccagcttaactgcatctctctttttgcagctgttatgtccttttctttcatgacctcgtattag

SEQ ID NO: 25465 - DNA, 1110 bp, Zea mays
  Peptide Sequence Number=SeqID_67244
atggacgttgagaccttccacgacggcatcgtggcggtggtcctcgtccaggctggcgagtcggcgccggtgggcgcgcccatcgcgctgctcgcggagtcagaggaggaggtgccgctcgctctcgccaaggctcaggagctctccaacgggcagccgcagcaggcgcctcctgctccgacggaggatgccgcagcgacgccgccccctccttctgctccggccactgctcccacgccggtggccgtggatgtcgaggcggctgccggaatccagccgaagtcaaagcccgctcctgctgctgctgcgccaccacctgtggctgcaccttcagtgggtgcggtgcctcaatcggcagttctaccaccggttcctggcgcgactgttgttccattcactaccatgcaggctgcagtgagcaagaacatggtggagagtctggcagtgccagcattccgcgttgggtaccccattattactgataaactcgacgagctgtatgaaaaggttaagccaaagggagtgacaatgacagtgctgctggcgaaggctgcagccatggctcttgcacagcaccctgttgtcaatgctagctgcagggatggaaagagcttcacatacaacagtaacatcaacattgcagtggctgtggcaattgatggtggccttattacacctgttcttcaggatgctgacaagctggatatatatttgctctcgcaaaattggaaggatctagtgaagaaagcacgagcaaaacagctccaaccaaatgagtacagctctgggacttttacactgtccaacctgggtatgtttggtgtagatcggtttgatgcaatccttccacctggccagggagctattatggctgttggagcctcgaaacctacagttgtggctgataaagatggtttctttagcgtcaagagcaaaatgctgattgttctggactatactggcaatatttcgccagaattgtggctatggcatagtggacatagagtcaatgtcactgctgatcacaggattgtatatggggctgatttggcagcattcctacaaacttttgcaaaggttattgaggatcctgagagcttaactttgtga

SEQ ID NO: 25466 - DNA, 351 bp, Zea mays
  Peptide Sequence Number=SeqID_67245
atggtggagctcagcgccggcatgaagatctcccggatcttggcgcgcaccaccatccgcccgcgctgcggctgcctccagcgcatgcccgccagcaccgctgcggcacggagccgggtgggcagggtagaggcggagagcgagagggatgcgggggccgtcgccattggagaagaatgttcgacgtcggaggcggaggcggggaggagtggagggctttggctggtttggtatagggtggtggaaagcagagaggatggcggagaaagcaaggcgaggatggctttgcaaactccgatgaagctgtcatggaccgggctttatcttactgtggcccacctaggtcattaa

SEQ ID NO: 25467 - DNA, 241 bp, Zea mays
  Peptide Sequence Number=SeqID_67246
cgtcgacttcgacacgaagcgacagaagagggaccactaccgcagcatcaaccacgtcaccgtcaccggtgcagtcgtgctggaccttcacaaagtcttagttaacaacggctgccagacggatatcattttcctccacgccttcgaccgcatgggcatcagccatagcttgcttaaaccttcggacaaccccctatatggcttcggcggcaaggacacctttcctgtcagcaaaatatag

SEQ ID NO: 25468 - DNA, 633 bp, Zea mays
  Peptide Sequence Number=SeqID_67247
atgggtgaaaatagattgttgtcattacgagaattggatgaatcatcatcagatgatgatgatcatgtcatactttgtgccgcacaaatcattcaaagttattctcaagtgcgtagacagccaggaggctctgttcctggtcgtgcatacatataccgggatagagaagcggggcacgcgagaatgtaccaagattaccttgctgaaaatccaacttatggcccgaacttgtttcgacggaggttcaggatgaatcgaccactatttcttcgcatactgaatgatgtggaacaacatgatgattacttcgagcagaagagaaatgcagctcatcaacatggactaagttgttttcaaaaggttactgcagttttccgtatgctaacttatggagtagcagctgatgctatagatgagtatgtacgcattggagaaagtactacactggaaagtctacgaaggtttgttaaagctgtaatagatgtttttggagatgagtacttaaggtcacccaatgaaaaagatattgaacggttacttgcacttggtaatgaaagaggttttcctggtggaagaactgtccgtcttcgttgcaaggtcaattttccgggcatcatcatacaccaacaataa

SEQ ID NO: 25469 - DNA, 144 bp, Zea mays
  Peptide Sequence Number=SeqID_67248
atggaggccattgttggacaccaactgacatccattctcgatcttcttgaggatgacttgtcacacccgggttctaggggtccaaaacccgggcgcgaaataatcaccaggttcgagaaccactcaattcggagttacggttaa

SEQ ID NO: 25470 - DNA, 129 bp, Zea mays
  Peptide Sequence Number=SeqID_67249
atggctgacaaggtagagttcgccggtctcatggcgaggaaattgagggaaccaaagtgtatgggtcactgtaaagactctggtgctgaggtctctagaccggagttgaccagaccggcgagtcaatga

SEQ ID NO: 25471 - DNA, 213 bp, Zea mays
  Peptide Sequence Number=SeqID_67250
atggaggacgaggacgaggtccggcggtggacggcggccaatatccagttcgtgtttagccggatccgtgggcaaccgaaagcgagaggcggaaagattttagtccctaaaacaaatgaccctaataatggacgtgaccttgacgaccagtatttaaaatggctatcctatcctaccaaggttaacacgtactatcgtcaacaggagtattaa

SEQ ID NO: 25472 - DNA, 216 bp, Zea mays
  Peptide Sequence Number=SeqID_67251
atggcggattcaccccccccatctcctgtcgcctcagcccacgccgccatctctcctgctctcccgcgcctctacgactcggagctcttctttgggcagccgaggacgacacggagtcctagattcgtgacccatcaactccccgcctgtccagtgtccaggttcattccacacggatgggccaagttggcgaggagtaatggcgcaaccatttga

SEQ ID NO: 25473 - DNA, 1209 bp, Zea mays
  Peptide Sequence Number=SeqID_67252
atggatattgctaccaagttcgcctctggccaagaggcggttgaggccatcttccggaaggacaagcagccccagagccgcccaccggaagatgtccccgaggcgtcaactcagtgcggcgccaagaagaaaggcaagaagaagtcgcaagcgaaacgcgacgccaccgacgcggaccttgtcgccgccgccgagtacaagaaccctcggaaacctcctggaggtgccaacctcttcgacagatgctcaaggagccgtgcccctatcatcaggggcccgtcaagcacacccttgaggagtgcgccatgcttcggcgccatctttcacaaggccggaccacccgcggagggtggcagggctcgcgacgacgacaagaaggaagatcaccaggcaggagagttccccgaggtccgcgactgcttcatgatctacggtgggcaagcggcgaatgccttggctcggcaccgcaagcaagagcgtcgggaggtctgttcggtaaaggtggcggcgccagtctacctagactggtccgacaagcccatcaccttcgaccgagacgaccaccccgaccgcgtgccgagcccggggaaatacccgctcattgtcgaccccgtcatcggcgacgtcaggctcaccaaggtcctcatggacggaggcaccagcctcaacatcatctacaccgagaccctcgggctcctgcgggtcgatctgtcctcggtccgggcaggcgctgcgcctttccacgggatcatccccgggaaacgcgtccagcccctcggacaactcgatctacccgtctgctttgggacgccctccaacttccgaagggagaccctcacgttcgaggtggtcgggttccgaggaacctaccacgccgtgctggggagaccatgctacgccaagttcatggccgtccccaactacacctacctcaagctcaagatgccgggccccaatggggtcatcaccgtcggccccatgtaccgacacgcgtacgaatgcgacgtggagtgcgtggagtacgtcgaggccctcgctgaatccgaggccctcatcaccgacctagagagcctctctaaggaggcgccagacgtgaagcgccacgccggcaacttcgagccagcggagacggttaaatccgtccctctcgaccccagcagcgacgcctccaagcagacccggatcggctccgagctcgatcccaaatag

SEQ ID NO: 25474 - DNA, 369 bp, Zea mays
  Peptide Sequence Number=SeqID_67253
atgggctcagtcgcgccactcctccaactcagtccctgttgcgcggacgtgtgggtcgcgcccacctcgcgctcctccaccgagttcaccgcaagtccgcaacagacaaccccaatcccgcgctgcctgtttgtctcaccgctggatgggcccggaaggtcggacttcccttccaccccgagatttgcgcgtgcctatgaactactccgccgagctcgtcgggtggttggggtcgccgtgaccggactctcccctttctgcgcctcgggcgatataaattccccggtgcacccaaccctcaacctcggtctagaattctatcctcgctgtcgtcaccacgtgggttgtgttagtgtggagccgtgctga

SEQ ID NO: 25475 - DNA, 222 bp, Zea mays
  Peptide Sequence Number=SeqID_67254
atgccccaagtggtgcgcactccggggaccggagccaacgtcaaccgtgcgcacgcccagcacggcacccgcctcgtccactacctctgcttcgacgtcctcctcatgtcacagctaatggtcgttggggcgagggaggcagaggcggtggggcagcgcgtgggaatgcgagaggaggcgggcgagtggtacaagaggcagtggcgtggcggacctttttag

SEQ ID NO: 25476 - DNA, 252 bp, Zea mays
  Peptide Sequence Number=SeqID_67255
atggcgagtcggagcaccctggcagcggctcccttcaatcacctggctacattcatccggccgaacgacggcgcccaggttcctcacggtccggagcaccggaacaggatctccgcgccgcagagtgagggggaggaggagagctgggcgcggaacgatggatggctggacgcgacggaggaggaaggagaagatggacctggggctcaagccgagtccgcgcggatggcgagatccacgccgagttactag

SEQ ID NO: 25477 - DNA, 507 bp, Zea mays
  Peptide Sequence Number=SeqID_67256
atgacctggatggatgtgctagcttggcttgggctcgtttccacggggccggtctgctttatatcgtgggtgcggaggcgatcagccgatcacaggaagcttcctggaaggaacctgaagtcttatgtcatgtttggcatggcttcaactccacaaatttctgctctactccttaactccaagtggagtaggtttcacgtggagttggagctggctaataggagtttaccatgcagggtgttcataactccactgagcaaacttgtccacgctatggccatcttgaacgagcaccggcgcggaggaggcggacccagggcagatatgggtgtcatggttaaggacaagacgaaggtcgttggcatcaggaaggggctagagaagggaggcgtcgtggtgacgacgagtgtcagcgccgagttcaaaagcgccaagtcaatggtgacaatacgcatgtgggcgagcaagatggtcaagtccatcgctagcttggaactccccatctag

SEQ ID NO: 25478 - DNA, 144 bp, Zea mays
  Peptide Sequence Number=SeqID_67257
atggccaagtcgaagaaccacacggcgcacaaccagtcgttcaaggcgcacaagaacggcattaagaaacccaagcgccaccgccagacctccaccaagggggtgaaatccatccaggttgtgaagttggttcctggatgctaa

SEQ ID NO: 25479 - DNA, 729 bp, Zea mays
  Peptide Sequence Number=SeqID_67258
atggtgagagctgtctcattaagtcaccaggttacggattcaaagcagcctttctgcatttgtgggaggaatgtttgccttggtttatctcttctccagatcccactcatgtggaagcctccaaccctggagaatgctcgtgtaatggtcctagctgctacaaacaggccttctgagctagatgaggccatcctaaggcgctttactcagatatttgagattggaattcccgtccagagtgaaaggaacaagatacttcaggttgtgttgaagggagaaaatgtcgagcctaatgttgattacgatcacattgcaagattgtgcgagggctttactggatcagacatcctagaggtgtgcaagcaggcagcattctaccctatcagggagctattggacaatgagagaaacgggaggaaattagataaacctagacctttgagacaatcagacttggagagagccttatcaacatctagaaagtgcaagaaggctgcaagttcaggactgcagtcacccttgtgggttcggccgacagattcagaagacgatcaggctgcgttgcgatatatccatgactccatgagctgttgtatgttgcacgcccgcccgtcatggcgtgtacgagcagctctgcagctgcttgctcttaaggcacacgtctacacgatggttgatggatatctcatcaacgaccgacaccttgctggtgttgagcaccaaatttga

SEQ ID NO: 25480 - DNA, 399 bp, Zea mays
  Peptide Sequence Number=SeqID_67259
atggtctcgcgaactaacgcacctaagccaaatctgagctaccctagacgtgctagagattcaagcgaaacatgggaaagagaactcaccgagggcggtggtaaacaccgagctgaccacgacgccacattcctcccgcgacggcggattcgcttcccccgacaagcacttggcgaattggcgactgaggttaaacggcgaagaggtggggaaggaggagactcggcccgatcccttataagcatgcgggcgacggactcgggcacaacgcccacagccgcgaagatcgcaatggcgcccgtggagctcggcatggttgttgaggacagcgacccgactgacgcggcccacacgttagtggaaccagtcaccgcgccgcgcaacgcttcggacacgagg

SEQ ID NO: 25481 - DNA, 324 bp, Zea mays
  Peptide Sequence Number=SeqID_67260
atgaccacctcgcaggcgacctcatcgtacccctggataaggttctcgaagaccacagacgaggcacctcgccaaggcacggaggtcaaccctagtgcaaaattgggcaacgaccaaggaaatagtggccccacagtgaatgccaaggtccacaaagttctaaacatggctcggaatgtcgagcgggcactgcaggcgagttgctccacatgcacggatgcttcggttcatgaatcgacctcccagcacagttccaccaactcagcattctgccctactcagaacataaagagaaacattagtctcaacgcccctgagaggtag

SEQ ID NO: 25482 - DNA, 453 bp, Zea mays
  Peptide Sequence Number=SeqID_67261
atggttgcctttggtgcaatccatgctcagacactgtccggtgcaccaggccgtacacttccaaaccagccgctctcggaaattcagcaggcgcactccactataattcaccagactgtccggtgcgcaccggactgtccggtgagcaagcggagcaacggctccctgcgcgccaacgatcgactgtgcagagctacaatagtgaacagtgtcgcggcagaagtcagagcgcagaagtcagaggccaccggactgtccggtgtggcaccagactgtttggtgcagcaagacgacaaacggcttcaacggtcaactgctctgaaccctaacggttgcgctgacgtggcgcacagcggacagtgcacagtgactgttcgttggggcactggactgtccggtgcacccatcgccagcagcctttgccaacggctaggaagtggtagggggctataa

SEQ ID NO: 25483 - DNA, 222 bp, Zea mays
  Peptide Sequence Number=SeqID_67262
atggggaccccgttgacggattctttgtcgagtgctggccagcagacactcggcaaagctttaactatctcctttggtaagccttacacttcacatgagccccactgtcaaggacagatactacaagatgaggagcatgaaggatgtcgcgatgggttcgtgagaggtctaggacgtcgtctcccagtcaactacggttgttggattgttgtcttcgtatga

SEQ ID NO: 25484 - DNA, 246 bp, Zea mays
  Peptide Sequence Number=SeqID_67263
atgggccatggcgtgcggggggacgcggcgttctgcagcgaggactgcagggacgagcagaaggacatggacgaggcgctccacgcggcggcgcggcgccaccgcctccttcgctctccgtcggcgtcctcctcctcgcaggcggcagctgaggccgcggcgtcgaccaggccgccgcccgtgatgcgccgccgccccaccatcgccaacctcgccgcgcgcaacccgcccgtggcagccagctag

SEQ ID NO: 25485 - DNA, 129 bp, Zea mays
  Peptide Sequence Number=SeqID_67264
atggcaagaggtcgacgccgtgtcattgacgccgacctcttagaaaatagccgcacggccaacatacgtggtgcgttgtttcatgaagatgttagcttaaaactcattaagttgcatgcgcttatgtag

SEQ ID NO: 25486 - DNA, 534 bp, Zea mays
  Peptide Sequence Number=SeqID_67265
aaaccacaaagcgcagccacctcgccccgctcgcctctccacctcgtcttcgtgccattcctcgagcgcagccacttcgccccgctcgcggccaaagcggcctcctccgcagccgccggtacagagcacgaggtcgccgccaccaccacggccgccatcgtcaccacggcacacttcgcggccctcgcaccggcgtccgtgccagtccacgcggcgccgctccgctgccccggcgggtacgaggacttctccctcctcccggacgacgcctccgccgcgccgaccttcttcgccgccgccgaggccgcccttgcgccggcgctcaccgccgccatccgcgcccaccacgggatggaggcagggctgcgagttcttggccagggttgggagcagccgaagaccggtggacgcgaccgaggttcaaaagcgagttggagaaaggcctcgagtccgaaacaccgcgcacgcgtcggcgcgcacgcgccaccgtacgcgggaagcgcggagagggcttcaaaacgggtcaggttttaa

SEQ ID NO: 25487 - DNA, 225 bp, Zea mays
  Peptide Sequence Number=SeqID_67266
atgaaggacggcaagccagggaaggtggcaatggttcaatacctcgtgtcccgctcgcgaccgtgtcaaggaaaggctgcggcagcggagcggacggtgacgtgcagacggtggagcatcccttgcatcgtctccctttgcccgtggggaaggttgcgcgagggctgttattaccagatagctagtcagatagatggtcctgaaaacaagggtacacataactag

SEQ ID NO: 25488 - DNA, 345 bp, Zea mays
  Peptide Sequence Number=SeqID_67267
atggcgagcgacgtgcccatgaccccggagctcgagcagatcgacggagagatccacgatatcttccgcgccctccatgggggagttttgtcgctatcaggggagtgggaacttgttgctaccatctactcatggtggctggaaaaatcaagaactgaggagactatcggggagacagtgggggagttttgtcgctatcaggggagtgggaactcatcatggtctgtggggttgccagtggaggcttgtctccgcggtggtcgtggtggagtttcctcaccagtgtctcttcagcggctggagatgtttgcccatgtgggtggtgggctggcggcacgagattga

SEQ ID NO: 25489 - DNA, 603 bp, Zea mays
  Peptide Sequence Number=SeqID_67268
atggacacttcactatgccaatgctaccccatacccaacctagaggatggcgacggtggtgtcgtgtgcattgatggcttggtgcctacaggaagctccgtctcgcccgaccccagggctcgtactcaacctcgactccggaagacggtctcggcctcgcccgaccccagggctcggactcaacctcgactccggaagacggtctccgcctcgcccaaccccagggctcggactccaccccgacctcggaagacggtctccgcctcgcccgaccccagggctcggactcaacctcgactccggaagacggtctccgcctcgcccgaccccagggctcggactccacctcgacctcggaagacggtctctgcctcgcccgaccctagggctcggactcaacctcgactccggaagacggtctccgcctcgcccgaccccagggctcggactcagcctcgaccttggaggaatcaccgcctcgcccgaccttgggctcggaccgaccacgttacaggagggcccatcattaccctacccctagctagctcaggctacagggaacaagaccggcgtcccatctggctcgccccggtaaacaagtaa

SEQ ID NO: 25490 - DNA, 2079 bp, Zea mays
  Peptide Sequence Number=SeqID_67269
atgtgcgggctgctcattcacaagcagaagcaacaatccagcctgtccgtgctgataagccaggcatatcaactgggtgtttgccaagaaatgaaactcttagttttgcatttgagatactctgaagtgcagaataagcttcattctgagtttacaacagacagtaatatgggaaaggcagtcaatcgtcatgggttgaagccacttcagatgtatgtaaagaagacaaacaccacatttggttctgctaacaagccggttggttcaattggtgttcctgaatgtcctgtagggaagaatagaattgagctagacaaagcttctattttagcatcgccaacttctacttggtcccattcatcagctcaaaaacctatagcttctgctcatttgcatcaaatgagagcaccacatgaatccatccttggtaagaagcctaacatatcagttgagttgcatcaagtgaaagtaccacatgaaaccatccttgatgagaagtctagcatatcagttgagttagtgagagtaccacatgagtccatccttagtaaaaagcctagcccatcagctgagcatgcatcaagtagggcgcatgattctgaagtttgtggcatcaattataatccaacatgtcagcaattcaaatcttctgaagcccagaataagctccactcttgctctaatgtcggtgatagcagtgggaggttaggaaatgaatataagaccaataaagagcaaccatatgcagaatgtataaatattttcacaacttcagcaagcaatgaaataaatccgtctactagaacttttgataattctaacggaagtactttgagatatccaaaacaatctttgtcagcatcgtcaagctctaaattgcttcagagtgcaaaggtgaatggctcaaatctgatgttatcggatcatatatctttacttgctgataatttgcatcaggatggagcaacaaccatttttggtaagaatagcacatcatttcagtgcactgccaaaagtagaacttttgtttttggtgctagtagtggccagtaccatcagacatatcagcaatcccagtcttctctgctatcagagcaacataattcaggtactagtatggagcatggtcattctgactcaataaattcgcatagaggcagcgctgcttcgccatcagtagagcataatggtgttccttttgcacaaacacgaacattctccagtggctcagcttttgaaggtttggatgatatttgcaatggttttactacactgaatatttctgaatgccctcaaggaactactgagaccagggctcaagatccacctactaatggtccttcaatgtgcatgctagataattatgaacatcctgtagtttttcgcgagaacagatcaacttttgacttggattctaaccccagctgctatcagaatcactctagtgatcctcaaagtggccaacctcctttcagcgactatatttggcaccaacctaatctgtccagtgatatgcaaagctcctctgagctctctggagataagccaagacatctgccaaattctactgagcctaaagttggaataatattgcaagctttgggcatattgaagactgagaagatattcccaacagaaactaacattgcagactgtatatgttacggagagctgaatttaacaggttttgatgttaagaaggctcttgaacttgccattcgccatgaagctgtcgttatgaagaaattactaaacgacatgccgttatttgttgcaaaagacgagagcctctggaaatgcgtgaacgtaacaaataccaaatcaaagaatcccatagaggagctaggaacagtttataactacatttcatctccagacggccgctctgcaatgatgaattctcagtcaaggtaccaagctgcaatgatcttgaagaggtcgtgcatgcagcagtgtgcactgggcgacattctccaggttctgcatatcgttgtagttctaaagaaatggctcgtgcctcattcttcaggctggcagccgctgtccttaaaacgcaacagcggatcctgcaactactga

SEQ ID NO: 25491 - DNA, 378 bp, Zea mays
  Peptide Sequence Number=SeqID_67270
atggcccctttcacaatcctagatgctaaagatggggtcgtttctgatttcctgagcctcaccatgatgtttccgaattttagtgcagacttgaatgggacaactggcgatatggttgattttcaatctacaggggatgcagggaatggcgcaaccatcaccgagatgggtaacccggttcctgagccatcctacgaggaatctgttctttcagcagaagaggctagattatggagtgttgctactatgaattgcttagatttcgatgcctggaccacagttgttgaggagacggacaaaaatgttgaggttatgactaaccataataattgttatgcatactacaagattacttgtgttctgactgccaccatgtag

SEQ ID NO: 25492 - DNA, 465 bp, Zea mays
  Peptide Sequence Number=SeqID_67271
atggcgaggggaaaggagctgcttgctgctgggcggggagagcgagctcggctagggctgcagacagccatgggagcagccgtgagggagatgtttttttttcccggggaccgacgagcagggagaacgaggacgccggcaaggggaacgcacagccagccacctgcgctggggagctgggaaagatggcaaccaacaaagggacaagatgctcggaggggcacgcgttcaaggagctgctgggcgtggccgagcagcctggccctgagatgggaggcgaggaggaagatgcaccaggaagtgggcgagctcgagcaaggagagcatgcggcgaagaagaggccgatggccacgggctggggcgcggcttgctgtggacaggaagcgagagataaggctgacagggagagatgcgtaccacttgaagagataaggctggggtggtatgaaggagaccccgtatag

SEQ ID NO: 25493 - DNA, 681 bp, Zea mays
  Peptide Sequence Number=SeqID_67272
atggcagcaaaggtcaatgggactgggaccggtaacaatatgttcgattctgataatgacagtgagaattattataatgaaagtgagtctgattatgaacatgaaagtgaatacaattctgaatatgagaatgagaactctgaaggtgcttctgaagatataatattcaagaaaaaacatgcatcttttaaaggagatagacagtcgcatcgagtcaggccacaaaagaagctaaaatccatgaaccatgaagttgacaccttaaccagatctaataatgaagaggagagggagaactctgaaggtgcttttgaagaagaaaacacaagagaaaatatggtattcatgaaaaagcatgcatcgtttaaaggagatagacagttgcatcgagtcaggccacgaaagaagctgaaatccatgaaccatgaagttggtaccttaaatggagctgataatgaagagaggagggacacttgcaggccacatattcagaacaataatatggacaccttaaccagagctgataatgaagaggagagggacacttgcagggcacatattcagaataattatatggatacctacacaagtgctgataatgaagagcggagggactcttgtagggcacatattcagaacaataatatggatgctgcaaaaattggtatgatacaaatataa

SEQ ID NO: 25494 - DNA, 1245 bp, Zea mays
  Peptide Sequence Number=SeqID_67273
atgactgtggtgtcatccttccccctgggggggatcatccagtgccgagaggcctcgagtaggattgcaaagtgggcggtggagatcatgggcgagacaatctcgttcgctcctcggaaggccatcaagtcccaagtcttagcggactttgtggctgaatgggtcgacacccagcttccagcagctccgatccaaccggaactctggaccatgtttttcgatgggtcgctgatgaagacaggagcgggcgcgtgcctgctcttcatatcgcccctcgggaagcacctccgctacgtgctgcgcctccatttcccggcgtccaacaacgtggccaagtacgaggctctggttaacgagttgcgcatcgccatcgagctaggggtccggcgcctcgacgctcgtggcgactcgcagcttgtcatcgaccaagtcatgaagaactccaattaccgcgacccgaagatggaagcctactgcgacgaggttcggtgcctggaggacaagttctacgggctcgagctcaaccacatcgctcgacgatacaacgagactgcggacgagctggctaagatagcctcgggacgaacaacggttcctccggtcgtcttctccctagacctacatcaaccctccgtcaagaccgacgacacgcccgagctcgaggaggcctcggcccagcccgaggcaccctcagcccccgaggcacctcgagccctcgttggaaacgccttccgacaaggtttctactggccaaccgcggtggccgacgccactaggattgtacgcacctgccaagggtgtcaattctacgcgaggcagacgcacctgcccgctcaggccctgcaaacaattcccatcacctggctatttgctgtgtggggtctggacctcgtcggtcccttgcagaaggcacccgggggcttcacgcacctgctggtcgctatcaacaaattctccaagtggattgaggcggaggcgttcttcaccaacatcatccatcgcttcggggtcccgaactccatcatcactgacaacggcacccagttcactggcagaaagttcctggacttctgcgagaaccaccacatccgggtggactgggccgccgtagcccaccccatgacgaatgggcagtgggatcctgaaaacgacggagtacacgtaagcgacaaggccgaccgagccgagggactcctacgcctccgggatacggatacctcactcatcaccttctgcgataagtaa

SEQ ID NO: 25495 - DNA, 282 bp, Zea mays
  Peptide Sequence Number=SeqID_67274
atggccaacacctccagtgctatgatcatcttcgatgctgaggaggttttccacttcagaattttctccttcattgccaaccgaaagggagtcctgcatcgcatcgtggatgtgggaagggaaatccctgaggcatgcaccatcagctcagccgagaaggggtcctcgccaacctcaaagacgaccccaaccgtggctatagtcaggcctcaaacaaccaccacacgaaccatgccaatgaacagagagcctcagtgtaacaacctgaatttgggggtataa

SEQ ID NO: 25496 - DNA, 747 bp, Zea mays
  Peptide Sequence Number=SeqID_67275
atggaccaggtgcattcgttgttcatcgaggccgatcgagatctggacgctaagacatcacccttcgataggtccggggaggagctaggacctgcttccttggttgacttcgatcgggaggttttccatgttgaggacgtgccttcgaagcaatttgctagcgcactaattgatcagatgtgtggtcctcatggtcgttctgcggttacggagagggctggtcgggcgatggagcaggcacagagggatgaggagattgaagacttggaaagcttggagggctcattggctacgttggacaatgctagtgttgaaacgggcatggaggagcagtcttcacgggtaggggctattgctggcgagtcgagcgttgtggagacttcgcaccattctgccaacgatggtcgaagtgatggaaattttggtttcgtgaacaagggaaagggtattgttgaggttgctgagtgtgttacgccactgtcctactggagcccatcattttgtagtgacagggaccttttctttgacccagaaacgtccgagagcgaagaaggtttggatttcttcgcaaagatggacgacgagtcttctaaagaggactcggatttctttgttgtgctagaaattgcgtctacgatgaaggctgacgcaggcgacgaagttagacatgggttctcatcgagctttgccgacgagggcgctgagtgggatccccgatccttgccgtatctgggagttagagcttag

SEQ ID NO: 25497 - DNA, 855 bp, Zea mays
  Peptide Sequence Number=SeqID_67276
atggcgggcacggtgaccggtcccggggtcgacgtcgaccctctccacgccgctgctcaagtccgagagcgacatcgcggggtccaccaacctcatatggagttcgccgttctggtggtgaagatcaattccaacatgatcaacttcggttctctgctcttgattgatagctaccaccggatcattggactgctagctctgttaaggctttataaaatgatagatttaaagagctatttcagtcaagcttctagtggaagtagaccaagcactcgcgctagtggagtttgcaataaaaccggaatacaagttggagttcgagagaataatagtgaagatgccaatggtgaaaatgttaatggtcaagtcgaaggtataaatcagttcaacccggatcacatcatttctgatctaggacttagtattccaatcgatttttttgctcctaatattagagatgatgttataagggctttcatagctaaaggtccgactcaaccaattggtcataactttcctcagtcacatgacaaaaggagctttcaaaaacattgctatagacaacatagttggttggaaatagtgtggagaagaataaggcttattgcttctattgttacctttttaagcacgatcgaatggatcataaattttgccatgatgcatttacaaaagttggcttctcacaatggagaaatgtttatacggtatttccaaaacatgttggtgggcctaatagcatacacaatactgcagcaacaacattccaggatttttgtaacaacaagaaacatcattatcaagacctggagatacaagatggggatctcattacaagactttgctccgtattga

SEQ ID NO: 25498 - DNA, 192 bp, Zea mays
  Peptide Sequence Number=SeqID_67277
atggggtgcacctttgtcgccttcttcttgctgctgttggaggagcgaggccccgtgggggttggcgctctccagtcgtcgctcggcttcaaggattttcatcatgcagcccggctgcagtccctcaccaatgggtttgagacggctcttaacgagtctgtcaagaactgcaaggcgtgccgaggcggctga

SEQ ID NO: 25499 - DNA, 135 bp, Zea mays
  Peptide Sequence Number=SeqID_67278
atgttgccgactctgatcttaactgatttggaggagttggaggttgccaaatggacagatgcaagtggaaaaaatagcgagaaaaggtacatgataagcatcaaggaatggaaaagagggggcttcaagggctag

SEQ ID NO: 25500 - DNA, 431 bp, Zea mays
  Peptide Sequence Number=SeqID_67279
atggggtccgacgattcgacggtggcctcgaccggagggaatacgaagacagcgagcagggaaggagcaccggcagagggctgggccgagctggagccggcgctgggggctgggggctgggcgagatctaagctgggggaagcatcggctatggaggaacacggaagcaaaggcacggtggctatggaaaagggagacgaggacgacggagcggtggagcttgaggctggccctacagtgagctacatcagggaccaaggcgagaccgcgggcgggcgagttccatggttaggagggtgcgcggccagcctggaggagcaagagctggtgcgagctgcacgcgtgggacgaagacgtgagggagagaggcgcactgaagatagagagaagagggtcggctggggaagaagcctgtgcacgtgggagataag

SEQ ID NO: 25501 - DNA, 204 bp, Zea mays
  Peptide Sequence Number=SeqID_67280
atggatcttggcgcttgtcgtggtgctacttgtgcactagcctttgttcaaattaggttgggttacgaactacgcgacgtcatcggcctatcagaagatgtcaccaacgatgctctagagggcctagaggatgactttggtgtagccactgaggccgcattcaatcttcttctgctgaaagacatttcaatggttcccccttag

SEQ ID NO: 25502 - DNA, 521 bp, Zea mays
  Peptide Sequence Number=SeqID_67281
ctgcgctcggatcggacgcggttgtacatccctgccacccttacctcttcgaccaagaggtggcagagtcggtggtccccttttggatgctttgcggaggctcccgcgaccgtgggctcaccgcgcccggagtcattgccgctttccaccataggagagcgctgccgctgctggagaggcgcatgtgcctggatgagatgacgcccaaggcctccgtggagagttcccggatggcgtcgactgccctctccaccgacgagctcctcaagcgggtcaaggggatagtggggaaggcggattacaccgccccatcccgatgcgcctcgagcggggctatgtatctctacctgaagcgcaaggcgggctcaccaatcttgacccccatgaaggccgtgaaaacagacgcggggtcgtcagccggggctgtggcacacccaatcttctgggttgatgccgatcgggaggctcttcaacggggtgccaaggcggtgaggcttgccttggagagacagtcgggataa

SEQ ID NO: 25503 - DNA, 2121 bp, Zea mays
  Peptide Sequence Number=SeqID_67282
atgacttcttcggcggcggccgcggctgctgccgcccaggtggcgggaggaggtggaggcggcgagggagatgccgccgctgcggcgcgaggcggaggcggaacggaggacggcatgtacacggagctgtggaacctctgcgccggcccgctggtcacggtgcccagggtcggggacaaggtgtactacttcccgcagggccatatcgagcaggtggaggcgtcgaccaaccaggtggctgagcagcacatgcaattttacgatctcccgtggaagatcctgtgtgaggtcatgaacgttgaattgaaggctgagccagacaatgatgaggtttatgcccagctcactctgctacctgaatcaaagcagccagaggagaatggctctagtgaggagatgcctgcttcacctcctgctgcacttgcaaggccacgcgtgcactccttctgcaagacattgacagcctctgataccagcactcatggtggattctcggtgctgcggcgccatgcagatgagtgtcttccgccactggatatgacccgtcaacctccaacacaagagcttgtagccaaggacctgcatggtgtggaatggcgctttcgccacatattcagaggtcaaccacgaaggcatcttttgcagagtggctggagtgtttttgttagtgccaaacgtcttgttgctggcgatgccttcatctttctaaggacaagtccagctgagtttgttgttccctgtgatcgctatatggaatcactgaaacgaaattaccctatagggatgagatttaaaatgaggtttgaaggtgaagaggctccagaacaaaggttcactgggaccattgttggaaatgtggatcctgatcaagctggatgggctgaatctaaatggcgttacctcaaggtgaggtgggatgaagcttcctccattccacgtcctgaaagggtttctccctggcaaatagaacctgcagtcagccctccccctatcaacccacttccagtgcacagacccaagagacctcgctctaatgctgtagcttctctgcccgagtcttcagctccaacaaaagaagctgctccaaaggtcacattagagactcaacaacatgccctgcaaaggcccttgcagacccaggataatgtggccccgaaaagtgtttttggtgataacagtgaattggactctgctcataagtcctccctgcgaccgtcaggttttgatctggacaagagcaccattggcatgcagaggaagctgggttcagatatttggatgcgaatgaacagacctgatggttacagtgaaatgttatcgggatatcaaccacctaatgaaggtgcacggaattcgcagggtttctgttctttacctgatcagattgccgctggacgtcctaatttctggcacactgtaaacgctcattaccaagaccagcaaggcaatcacaatctgttccctggttcatggtccatgatgccttcaagtactggctttgggatgaacagacagagctatccaatgatccaggaagtcggtgggatgtctcagagttgtacaaacaccaagtttgggaatggagtttatgctgcactacctggccgaggcattgatcgatacccatctggatggtttgggcacacgacacccggtggtcgcgtggacgatgcccagccacgcgtgattaagcctcaacctttggtccttgctcacggcgaagctctgaaaatgaagggcaactcgtgcaagctttttggaatccatctcgacagcccagccaaatctgaacctttgaagtctccgccaagcgttgccacaccggcagctgagaagtggatggcagacggaatcgacgcagacaaaagccctgagccgcacaagacgccaaagcaactcggtgctacacaggtggatcctgtcccagagagatgcccacaagcttcaaggggcacacagtgcaaatcacaaggcgggtcgactaggagctgcaagaaggtccacaagcaaggaatggcgctgggcaggtccgtggaccttaccaagttcaacggctacacggagctggtggcggagctggacgagatgttcgacttcaacggcgagctgaaagggctgtag

SEQ ID NO: 25504 - DNA, 2343 bp, Zea mays
  Peptide Sequence Number=SeqID_67283
atgacaggggagaagaaaatgttctcctcctacgagaaaaaccaagatccccaaagagctatcacattcggggttggaaaccaaggtgtcactgtctttagaagaagtgatgattcaatagcatttaagggagtgttagagggtcagctatacttggtagattttgatagagctgaactcaacacttgcttaattgctaagactaacatgggttggctctggcactgccgactagcccatgttgggatgaagaatcttcacaagcttctaaagggagagcacattttaggattaacaaatgttcattttgagaaagacaggatttgtagcgcatgccaagcagggaagcaagttggtgctcaccatccacacaagaacatcatgacgaccgacaggccactggagctcctacacatggatctattcggcccgatagcttacataagcatcggcaggagtaagtactgtctagttattgtggatgattattctcgcttcacttgggtattctttttacaggaaaaatctcatacccaagagaccttaaagggattcttgagacgtgctcaaaatgagttcgccttgaggatcaaaaagattagaagcgacaatgggacggagttcaagaactctcaaattgaaggcttccttgaggaggagggcatcaagcatgagttctcttctccctacactccacaacaaaatggtgtagtggagaggaagaatagaactctattggacatggcaagaaccatgcttgatgagtacaagacttcggatcggttttgggccgaggcggtcaacaccgcttgctacgccatcaaccggttgtatctacaccgaatcctcaagaaaacatcatacgaactcctaaccggatatgattcaaacacaagggcatatagagtctttaacaagtccactggacaagttgaagtttcttgtgacgttgtgtttgatgagtctaacggctctcaagtagagcaagttgatcttgatgagataggtgttgaagaggctccatgcatcgcgctaaggaacatgtccattggggatatgtgtcctaaggaatccgaagagcctccaaaagcacaagatcaaccatcctcctccacgcaagcatctccaccaactcaaaatgaggatgaggctcaagttgatgaaggagacgatcaagcaagtgagccacctcaagatgacggcaatgatcaagggggagatgcaaatgatcaagacaaggaggatgaagaatcaaggccgccacacccaagagtccaccaagcaatccaacgagattaccccgtcgacaccatcctcggcgacattcataagggtgtaactaccagatctcgtgttgcacatttttgtgagcattactcttttgtttcctatattgagccacacagggtagaggaagcactccaagattcggattgggtggtggcgatgcaagaggagctcaacaacttcactaggaatgaggtatggcatttagttccacatcctaatcaaaatgttgtaggaaccaaatgggttttccgcaacaagcaagacgagcatggtgtggtgacaaggaacaaagctcgacttgtggccaagggatactcccaagtcgaaggtttggatttcggtgaaacctatgcactcgtagctaggcttgagtcaatttgtatattattggcctatgctacttaccatggcttcaagctttatcaaatggacgtgaagagtgccttcctcaatggaccaatcaaggaagaggtctatgttgagcaacctcccggctttgaagatagtgagtaccctaaccatgtatacaaactctctaaggcgctttatgggctcaagcaagccccaagagcatggtatgaatgccttagagattttcttatcactaatggattcaaagtcggaaaggccgatcctacactctttaccaaaacacttgaaaatgatttgtttgtatgccaaatttatgttgatgatattatatttgggtctactaacgaatctacatgtgaagagtttagtaggatcatgacacaaaaattcgagatgtctatgatgggggagttgaagtacttcttaggatttcaagtgaagcaactccaagagggcaccttcctaagccaaacaaagtatactcaagatattctaagcaagtttgggatgaaggatgccaaacccatcaagacacccatgggaaccgatgggcatctcgacctcgacgaaggagcccagatgggtcggcgcgagacggagcgcgaaggggggaaaggagacgggcgtgagaggcgtaaggagaggatccaggtgtacaatggtggtgtagcagagtgctaa

SEQ ID NO: 25505 - DNA, 333 bp, Zea mays
  Peptide Sequence Number=SeqID_67284
atggcgacgagctcggggaatatgcgacgcagggacgtcatgaaatcacagggaaaaagagatgcggccatggaagctccaagccggcgcggcactggagatccggccggacgccatggagatggggccgagaagggggcgcggtctgagccaacagagggagcgagggcgagcagagggatggccggtagcgctgggaagaggccgagcgccataaggaagaacctcggcgcgcaggattttatccaatgcttaagcggcaatagaggagcggcgcaagaagataagaacgacggctgcgatctcaccggcggaaagcgtagatatttctaa

SEQ ID NO: 25506 - DNA, 600 bp, Zea mays
  Peptide Sequence Number=SeqID_67285
atgggagttgcggtgttcgcggagcgctttgtcgtttgtggtttcccctacttcagaggcttcatcccaggagacgggttgtgcaggatcccattccctagcttcatggtgacaccttcttgttggcgctgtacatggcaatcccgctgtcgcttttggtgccaccagagaagatttcttcccggatgggtccgcgaggcggtgcaagatgccttcctgatctgcaatgaaggagatggatcagaagtggaagatcactccaacattgaaggtgatcgtggtgttgaagatgatgccttcctacgtggcgcgccagctgtcggtgtttgtgacccgaccgtgcaccacagggttacccacgtgatgcttttgggtaggacgtcatcgttgattgcgactcgatggtacatgaagaagcacttcgatgttgcacaagggtttatacagcttgcagccctgcatatccaaggtcttgatcaccttctcacccgagttatcgccgaatgcttagctcctcaggtgcttagaactgcactacctgagatatcaatgcttctgaagcgcttaactcaaatgttggtctttatcttcttggattag

SEQ ID NO: 25507 - DNA, 225 bp, Zea mays
  Peptide Sequence Number=SeqID_67286
atggccttgctgcccccggagctagggctgtcgcaccacaatttctcgccgggagccagatctccagcgcggaccctctctcttccgtgggaagaaacacctacaccactggcctggagagccgaattgcacttctctggtgatccctccatcgtagggtgcaacggcgccgccctaatgcttggtgctgtattggggctggtatgtgagccatccatctcgtga

SEQ ID NO: 25508 - DNA, 1560 bp, Zea mays
  Peptide Sequence Number=SeqID_67287
atggctgccccaacactaactacagatggtcctcgcctcggccagcaggagatgaagaagatgtctccctccttccatccaactctgtggggagatttctttctttcttacgaggcgccgaccgaggcacaggaagctgaaatgcgacaaagggctgaagtgctgagggaagaagtgagaaacatgattaaaggttcacatgatgtgccagaaatagtggaccttattatcaccctgcagcgactaaatctggactaccactacgaggatgagataaatgaaaagttggctgttgtttacaactccaattatgatggtgatgtatttctaaatttcaaagaccaatatggaaattttattgaggtagataccaggagcttgttaagcttatacaatgcagcatacctgaggattcatggagagacagtgcttgatgaggcaatttcttttactacgagatgccttcaagatagattagaacatttggaatcaccaatagcagaggaagtgtcgtctgcccttgataccccactttttagaagggttggaactttggaaatgaaggattacattcctatctacgaaaaggacgctaaacaaaacaaatcaatattagagtttgcgaaactgaacttcaaccttctacagcttctttattcatcagagctcaaagagtgcacaacctggtggaaagaactccgcgtcgaatcaaacttgagttttgtgagggatagaatagtagaggtgtacttttggatgagtgggggatgctatgatcctcaatattctcattctcgaattatacttacaaagattgttgctttcatcacgattctagatgatacccttgactcacatgctaattcttatgagagtatgcaacttgcagaagcagtcgaaaggtgggatgaaagtgcagtctcactactcccagaatacatgaaggatttctacatgtatttgttgaagacattttcatcgtttgagaatgagttaggaccagacaagagctaccgagtgaaggaattagttcgggaatataccaaggaaataaaatggcgtgatgaggattatgtccccaaaacattgaaagaacacctaaaagtttcactcataagcattggaggtacactggtgctgtgttccgcgtttgttggaatgggtgatgtagtaacaaagaagatcatggaatgggttatgagtgatgctgaacttgttaagtcttttggtatatttgtacggctctccaatgatattgtatcaaccaagcgtgaacaaagagagaagcattgtgtctccactgttcagtgttacatgaagcagcatgaactaacaatggatgaagcatgtgagcagataaaagaacttacagaagattcatggaagttcatgattgaacaaggccttgcactaaaagaatacccgataattgtgccacgaaccgtactagagtttgcacgaactgtagactacatgtacaaggaagctgataagtacactgtctcccatacaatcaaagacatgttaacatcgctttatgtgaagccggtactcatgtga

SEQ ID NO: 25509 - DNA, 333 bp, Zea mays
  Peptide Sequence Number=SeqID_67288
atggggagcggtaggccgcggatttggcgaagcactactgcggcagcgctcggcggtccacttcttcacctggtggtgcgaatttctacacctgacggcgtctgggtcaatgaggagggtccccggatgaccggtgggttttataggcggacgggctttacaactgcccagatctacaattttttaaggaaggaggcaaaggcctctaggcctcttagggctataaatagagcctctaggcgcctccattctatacccaagtactccaagagcacaccaacactccgactctctacaacaaagcgttctagtgatttagtgagatccgagtga

SEQ ID NO: 25510 - DNA, 99 bp, Zea mays
  Peptide Sequence Number=SeqID_67289
atgactatgccacctcctccacctatccgcagaaagaaccgactccacaatttagttggcccacacctgtacctcaggtccctccaggaaacttgctaa

SEQ ID NO: 25511 - DNA, 723 bp, Zea mays
  Peptide Sequence Number=SeqID_67290
atgccggtcagaggcgtgccccctgattccgttctcagggtcattggcgacggtgacaacgatcaaagttcaaaggcactgcttggatgtcctagccccctcttccagcaacacgcaatgcccgcagccatagctgcacctactagcctagccatgaaggagttctcgtacgaggaggtggaggcggcgacgggcgggttcgcggccaagaacctggtgggaaagggcagccacggcagcatgtacagggccaggctgacggaagaaggcggcaggacggtcgtcgtcgccgtgaagcggtcgtcgcacgcgcagggggaggccaagctcggcaacttgatcgccgtgctatcggccgcgccgcgccacccaggagtgatcggcatcgtcggggtttcgtcgtccgccgccgccgcagcgccagggccacgactgcctccactgctcgtcatggagttcatgcccaacgggtcgctgcacgacctgctgcactggtcgccgaggccgccgtcatggccgcaccgcgtggagatcgcgctggatgtggcgcgcgtcgtgcgcagagtggagggcaccgcccaccgaagaggcgtcgtaggttgggctgtaggcggtaggcgtcgtaggctaggctgcacaatgggccgcaccaaccgttgggccgcacgaaccactgggctgcataaaccgctcggacacaggcactgctatggtgttatttga

SEQ ID NO: 25512 - DNA, 178 bp, Zea mays
  Peptide Sequence Number=SeqID_67291
ggattctggaatggttattcaggagggagagggatctgtgccagagaaggacaccactgatgccgaagctaagactgttgatgccgaagctgacagtgatgatgaagaggatgatgacattttgagttcgagcaagcctagccatattgaatttggcaaatctactgtgaagccctaa

SEQ ID NO: 25513 - DNA, 189 bp, Zea mays
  Peptide Sequence Number=SeqID_67292
atggcgtacaagttctccaacctggccatctgcaaggccgtcgtcggcggcgggaggaagaagacgtcacgaattgtaagggtagatggaggcggctcgacggttgtgagcatcgggcgccgctgcaacgacatgggcgaggaaggcgacctgacgtgtgggccccatctggaagcgatgcagacttaa

SEQ ID NO: 25514 - DNA, 315 bp, Zea mays
  Peptide Sequence Number=SeqID_67293
atggcccccaagagagcgaattcgaaggccaccgcttccatcgatgatgcaacaaaggcgacccttctggctaaaaagaaaggcaaggctcccattgcagacaacattcctcaggacgcctttgacgatgaggcagtcaacagcaaaaggcaataccaagacaatctacctacggcggagggcaccgcgcacacatgtagctctgagggggtacctcaggcaccaccgccaggcttcatccacccagaaggagaagacatcatcgaagacgatgaaatcataggcatttcagccgaagatcaactcaagttgtga

SEQ ID NO: 25515 - DNA, 258 bp, Zea mays
  Peptide Sequence Number=SeqID_67294
atgactaagccgaggaggccgaccacggtgcttggcggcccggtggagatctatcgccatggtgtcagcgcggaggtcggcgaagctgttagcggacaacctggcgtaccgggcccactggcatcatcacaaaggggaagaccggtatgcgtcagaagaggccgacgagtggggacagtggcgcagcgaccgttggcagaacagctggtgcgtgggcatgaggtcgcgactgacagtcgggccccatccatcaggtga

SEQ ID NO: 25516 - DNA, 854 bp, Zea mays
  Peptide Sequence Number=SeqID_67295
tttattttggagcaactctgcaatctgatttgcccagtgaaaccagagcctgtttatcttttgatactgaacaaggcacatactcaagaagagttcatcaggggttctatgacaaagaacccatactccagtgtggatgttggccctctaatgcgggatgtgaaaaataaaatatgtaaccagcttgatttaattggacttttggaggatgattatggtatggaattattagttggtggtagtataatctcacttgatctgagcatttcccaagtctatgagcaagtatggaggaagcaccatggtcaaactcaacattgtttgtccaatgtcagcgcaataactggtgcttcatctatcagagattgcccaccaatgacagtgacctacagactgcagggtttagatggtgaagctactgagcctatgattaaagagctggaagaggaaagggaggaatcacaagatcctgaaatcgagtttgctatagcaggtgctgttagggaatgtggaggccttgagattattttgagcatgattcagagcctgcatgatgatgagttcaggtctaatcaagaagagttgacttctgttcttaaccttctaaaatattgttgcaaaatccgtgaaaataggtgtgcactgttatgtctgggtgctttgggtttgcttcttgagacagctagacgcgcattttctgcggacgcaatggaacctgctgaaggtgccaaaaaatcaaacaagcaacaaaggaatgaggagatggtggcaaggatcctgccgtacttgacctatggggaaccaacagctatggaagctcttattcaacattttgagccctaccttagggactg

SEQ ID NO: 25517 - DNA, 2689 bp, Zea mays
  Peptide Sequence Number=SeqID_67296
gaaagatgctaatcataatgcacaaaaagcagagactactgatctaggaggttctacgaggactagctcacagtctccagatatgaaaaagaaccggaaggctgatgatggttctgaaggttcctcagaaaagtcgtgcatggacatggaacaggttgtagagatgttcagtgataaggaaggtgacatgttgaaaaactttatcaacatattcttactagaatggaactcagcaggtgtccgtcatgaggctaaatgtgttctatttggagtgtggtaccatgcaaaaaaccgacttagggagacaatgctatcgattctgctacagaaggtaatacatcttcctttatatggacaaaacattgttgagtacactgacctcatcacctgtttacttgggaaagtgaacgacttcagtgcaaagcagaatcactctgaacttgtgaataaatgtttgacatctgaggtcataagctgcatctttgacacactccattctcagaatgagctattggcaaatcatccaaattcacgtatatacaacacattgagttgcttagtggagtttgatggctattacttagagagtgagccttgtgttacctgcagctgccctgatgttccgtattcaaggacgaagcttgaaaccctcaagtctgagacaaaatttactgacaacagaattataataaaatgcactggaagctttactatacagtcagttacaatgaacgtttatgatgctcgtaagtctaaatcggtcaaagtacttaacctgtattacaacaacaggcctgtgactgacttatcagaattgaagaataattggactctttggaagcgtgctaagagctgccatcttacatttaatcagacagaattgaaggttgaatttcccattccgattacagcatgcaatttcatgattgaacttgattcattttatgagaatcttcaagcttcttcccttgagtcactgcaatgcccacggtgtagcaggtctgtcactgataaacatggcatatgtagtaattgccatgaaaatgcatatcagtgccggcagtgtagaaatattaactatgaaaatcttgactcttttctctgcaatgagtgtggatacagcaaatatggtcgttttgaattccacttcatggcaaaacctagtttttcatttgacaacatggaaaatgatgatgacatgagaaaaggattggcagcaatagagtcagagtcagaaaatgctcataggcggtaccagcaactgatgggatttaaaaagcctctcatcaaacttgtgtcaagcataggtgaacaggaggtagactcgcagcagaaggatgctgtccagcagatgatggtgtccttgcctgggcccacatgcaaggtaaatcgcaagattgcacttcttggtgttctatatggtgaaaaatgcaaagccgcttttgattctgtgagcaaaagtgttcagacattgcaagggctccgccgtgttttaatgacatatctacaccaaaaaagttctagtgacaccaatgcattaccagcattttcaataccaaggtctccaaatagttgttatgggtgtagcaccacgtttgttacacaatgcttagagttattacaagtgctttcaaaacatgaaaactgcaggaagcagcttataagtgctggagttttgtcagagttatttgaaaacaacattcatcagggccctaggacagcacgcactcttgctagggctgtgctatcttcgttttctgaaagtgatgaagatgcagttcatgaattgaacaacttgattcagaagaaagtgatgtattgccttgagcaccatcgttccatggacattgcacaatcaacacgagaagacttactgctgctatcagagacttgtgctcttgtggatgagttttgggaggcacgattacgtgtcacctttcaactgttgttctcttctattaaggttggagcaaaacatcctgcaatttcggaacatattattcttccttgtttgaggataatttctcaggcttgcacgcctccaaaatctgattgtggggacaaagagtcaggtttgggagtatctagcttgacgttgcactctaagaatgatgatacaactggtaacacagcatctaataaccccaatactaagattcagtcagatatatctggaaaaatttatgatggaagtcgaagagaccaggatattccacttttgagctattctgaatgggagggcggtgcgtcatatttagatttcgtccggaggcagtacaaagtatcccaggcagtgaaaggatctgctcagaagacacgccatgattcatataagtctgactatctggttctcaaatatggactcagatggaagcgtcgtgcatgtttgaagtcaagtaagagtgacttctcaaaatttgccttgggctactgggtatcagacttgatcttgagttcgtgttcccagtcaataagatctgagatttgcactctcataagcttgctatgcccatctaactctcctagacaatttcagttattgaacttgctcatgtcactacttcctcgaacactctcagctggtgaaagtgcagcagagtactttgagttactagggacaatgattgattcagagtcttctcgtctattcctaactgttcgtggttgtttgacacattatgttctttga

SEQ ID NO: 25518 - DNA, 192 bp, Zea mays
  Peptide Sequence Number=SeqID_67297
atgggagtaggcacgacagactccaacgtttgcgccaacggaatccgcccgagtcttgcggcgctcagagcagaggtgggagagtggaggcttggcacgattccacggctgactaggtgggcccatgtgaaagagagatcgcgcttggctgttaaaggtgctgacatgtggagccccaggatcccaatttaa

SEQ ID NO: 25519 - DNA, 420 bp, Zea mays
  Peptide Sequence Number=SeqID_67298
atgggcaagagcaagaaatgcggaagctcgtcccaccactccggtgacaagaggaaacgtgagccgacgcctccctcggaggacttcggcgactcggagtactcgaaggagttttcctccaagtccgagagatctccagtctacacctctcccctggcgttatccaaggattcagatgactcccaggggatcgtcgccgaggtgtggacgtacattcgagccattgagcgctccgggctcgagggctcggatgagtcggaggtctcctcggacgaggagaactcctctaactcgtccgaggaggggagcagcggggacggcgacgacgaggacgacggcgatggcggtaagggcgacggcggcgacggcaaggacgacgacggcagcagcagggccagttgcaaggcgccactggcttaa

SEQ ID NO: 25520 - DNA, 159 bp, Zea mays
  Peptide Sequence Number=SeqID_67299
atggcggctcgaagctcaagggtagacttcacaaatgagaacttgtatcctgctggggtggagttcggcctcctgctcccgagcgatgtagcccctacagtgtcgtttgcagggtcgtgcaccgccgtacccctggttcctgtagctattctgaaatag

SEQ ID NO: 25521 - DNA, 1989 bp, Zea mays
  Peptide Sequence Number=SeqID_67300
atgccgagcatagaaatatctccgacccctgcgccatttaactcatccccccttcttgttgcctcgcttcgtgctccccccttcccacactcccgtcccaaaaccctaaacccagcgccgccgccgccgccgacgcggaagcggtacagccatgtacgccgtcctccgccgcgcggcgccccttcggcggcgcgccgtgtccgcgctcgcgaccgcgctgctccagcagcagccggcggcgctggatgcggtggcccggcgggccccgctccctgcggccgcatggtttccactcttattcccgcgtggctggggttccgggagacgggggccgcaggggcggccgcgcgcgcggagttcgcggcggacaacgggtcgttctacgaggaggacaagagggcggcggccggcggcggcgcagcggcggaggggctcgagattgccaagcttgggatctcgtccaagatcgtcgaaaggctcgccagcaagggcatcaccaagctgttccccatccagagagctgtccttgagccagcaatgcaaggaagggacatggttggccgtgccaaaactgggactggtaaaactttggcatttggaatccccataatggatgcaattatccgccacaacgagaagtacaagcctggtaagtttcccttggctattgttttggcgccaacaagagaacttgcaaaacaggttgagagggagttccttgattcctcccctttggaaacactatgtgtatatggtgggactccaattatgcagcaaataaggaaacttaattatggcgttgatgtggtcattgggacacctggacgtgtgattgatctgctaaaaagaggttctcttagtttggcagagatccgttttgttgttcttgatgaagcagaccagatgttgtctgttgggtttgatctagatgttgagacaattttggagagggtgcctccgcaacgtcagacattgatgttctctgcaacaatgccaacatggatacggaagctcacacagaagtacctcaacaatcctgtcacagttgaccttgttggtgaggatgaccagaagcttgctgaaggaattagtcttctcgctgtctcttcggagaaccgtgaaaaaccagctgtccttggggaattgattaaggaacatgccaaaggtggtaagtgcattgtttttacacaaacaaaaagggatgcagatagattgtcacacaatatgagtcgaagtttccagtgtgaggctcttcatggggatatctctcaatcccaaagagagagaacactggcaggatttcgagatgggaggtttaatatattgattgctactgatgtcgctgctcgaggattggatatcccaaatgtagatctggtgatacattttgaattgccaaactcgtcagagttgtttgttcacagatctggccgaactggccgtgctgggaagaagggcactgcaattgtgatgtacaactatgaccaaagtagagctgtacgggtcattgaacgtgacgttggatgcaagtttacagagctgccaaaaattactgttgatggatctgacttgctgagtggtggatttgactccttcggtggcgggtatagcggttcaaactatgggcgctcaggtggattcggtggacgtggtggttttggccgatcaggcggtggcggcggatatggcaattctggatttggtcactcaagcggtggatatggacgttctggtggtggaggattcggtgactcagggtttggtggtcggtcaggtggcggtggaggattcggtgactctggattcggtggccaatcaggcggcggtggaggattcggcgactcagggtttggccgcacaagcggtggtgggtcaggttttggtcgttctggtggtttcggcgattctggttccggccggttcggtggcggtttcggcggttctggctcgggtggtttcggtggctttggcgacaagaactcacggtag

SEQ ID NO: 25522 - DNA, 1548 bp, Zea mays
  Peptide Sequence Number=SeqID_67301
atgtcgggagatcacgccaagaaggagatggagaccggcggaaagcccactacaagccacgggagcacttcatcggaagagtcccgtaccaagaggagggagaagaagaagagctcctccaacaaagggaaggagaagaaatcttcttctctccacaaagaaaagaaggaaaaatcttcttcccagaagccacatcgaagcggagacaagcaaaagaggatgaggaaagtggtctactacgagaccgacacttcatcaacatcgacctccgactccgatgcgccctccgtaacttctaaacgccaagagcgggataaggattatgatgaggatgaggtggcccaaatcgagcacttcaactcacaagcaacaacgatactcctcgcctctttaagtagagaggagtataacaaagttcaagggttgaagagcgccaaggaggtttgggatgtgctcaaaaccgcgcacgagggagatgagcttacaaagatcaccaagcgggaaacgatcgagggggagctcgttcggttccggcttcgcaaaggggaggagccacaacacatgtacaaccggctcaagaccttggtgaaccaagtgcgcaacctcgggagcgtaaagtgggatgaccatgaagtggttaaggttattctaagatctcttattttccttaaccctactcaagttcaattaattcgtggtaatcctagatatactaaaatgacccccgaggaagtaatcgagcattttgtaagttttgagtgcatgatcgaaggctcgaggaagatcaacgagcttgatgatccctccacatccgaagctcaacccgtcgcattcaaggcgacggaggacaagaaggaggagtctacaccaagtcgacaaccaatagacgcctccaagctcgacaatgaggaaatggcgctcgtcatcaagagcttccgccaaatcctcaagcaaaggagagggaaagactacaagtcccgctccaagaaggtttgctacaagtgtggtaagcccggtcattttattgctaaatgtccattatcaagtgatagtgacaggggcgatgacaagaaggggagaagaaaggagaagaagaggtactacaagaaaaagggtggcgatgcccatgtttgtcgggagtgggattccgacgaaagctcaagcgactcctccgacgacgaggacgccgccaacatcgccgtcaccaagggacttctcttccccaacgtcggccacaagtgcctcatggcaaaggacggcaaacggaagaaggaaaaatctcaaacccaagagaccttaaagggattcttaagacgggctcaaaatgagttcggcttaaggatcaagaaaataagaagcgacaacgggacggagttcaagaactctcaaatcgaaggctttcttgaggaggagggcatcaagcatgagttctcttctccctacacgccacaacaaaatggtgtagtggagaggaagaatcgaactctattggacatggcaagaaccatgcttgatgagtacaagacttcggatcggttttgggcctag

SEQ ID NO: 25523 - DNA, 1425 bp, Zea mays
  Peptide Sequence Number=SeqID_67302
atggtaaggcacccaacgtcatcatatactgcagagctgacgtattacttaagagccttttgccatactcagtactgtgtcaaccactacgacaatgggcaacccctgatcagggggctcgagtatgtgaccaaaccctcagccctggccttggccacaaagtcgattggccatcagtatttaggactcagaaatccagatgagctagctatagttgccgtggaggagcaaactaatactaatttagaagaggagggtccgacacaaggcaatgatggcagcaatgtaagtgctcctgcccatgaacaatttgctacagaatgtcatagtgttgatgagcaatttgtttatagcacggatatttatgatccaaaaaattggaataggcttgataacaaagctagagacatactagtggagaaggggcctataagagaagagaatcttgtattcccaaaggatggcaactcaagacatttttcatatgcccactactttagaaaaatgaaaaatggagagttaattgacaggaaatgctgttgtaaaagttcattggcacacaattgttttggaggttggaggcatatcaatgacagactgaaagattatgaaacaagtgtggagcatatcaccaatatgaatacttggaatgaattgagagctagattggccaaagcacaaacaactgacaaagagatacaagaagaaatcaagagggagaaagaacgcttaaggcaagttttattgagactagttgccattgtaaaattccttggtaaacgttgcttggcttttagaggatctaatgagcaactatacaatgatcaaaatggtaatttttatgcttgtgtggagatgattgctaaatttgatgtggtcatgcaggaccaccttaggcgtattaaaaacaaagagactcattatcactatccgagtcataaaattcaggatgagttgatttatcttatggcttctaatattatagaatctatcataaaggttgttaaagatgccaaatatttctctattatccttgattgtaccccagacgtgagtcatcaagagcaaatgacattattgcttcgatgtgttgaaatgtgtggcagcagcataaatatccaagagtattttctgggtttcttgaaggtcgatgacacatcaggcttagggttgtttaatgtactgactgattccatcaagttatttggtcttaatattgatgatattaggggtcaaggttatgacaattgctctaatatgaaaggaaagcatcagggagtgcaaagacgattgcttaatattaatccaagagctttatatatgccatgtgcttgtcatagtctcaatcttacactttgcttaatatttgaagaactccagacattcaagagtatatttgggtttttattgagctcgacaacatag

SEQ ID NO: 25524 - DNA, 339 bp, Zea mays
  Peptide Sequence Number=SeqID_67303
atgtctgtagtaagcccatatattaatttgaagagcaggaccaatcacctggtgctgcttccagctgagaagacaacgaaatggttggggaacagaaacctgccagtgcgggcaatgcatactgccggtaaaagcacccgtcgctcatctcggccgtatgttcctggtgatgacagcagtccgcatggttcaagacagaggaaccctggaaaggaaccatcaaagctgagcacagtcccaaacatcgtcctgacaccacctctgaaagtatatatagagccgaaattgtatgggagggatcttgtgatgaatagcatggtggggattgagccggtttaa

SEQ ID NO: 25525 - DNA, 462 bp, Zea mays
  Peptide Sequence Number=SeqID_67304
atgggcaaggaaaaaaagggcagagttcgtcgcgtcgctccggcgacaagcggaagcgtgaaccaagtcctccctcgaaggactttggtgactccgagtactcggaggagggggtctcctctgagtccaaggggtcgcctatctacgcctccgccatcgtcgtccgatgactcggacgactcccaggggatagccgccgaggtgtggacatacatccggtccatcgagtgtgccgggctcgagggctcggatgagtcggaggtctcctcagacgaggagaactctgccgactcgtctgaggaagggagcgacggcgatgacgaaggcgacgacagtggcggcgatggcagcggaggtggcggtgacgaaggcggcagcaacggcaataagggcgacgatgaaggcagcggcgacggcggcagcagcagcagcaaggccagtggcaaagcgccactggcttaa

SEQ ID NO: 25526 - DNA, 2720 bp, Zea mays
  Peptide Sequence Number=SeqID_67305
acacggtagtgagcgggcagtggtttggcatagacaagatcacgtatgaatatcaggacagtgtttcttggaagaaccaagaagatcctgcaccaggtcctttctcctatcacgcagatcttgttacgatgagccaatatgtgtcaatatggaatcactcggaagtttactggcaatctgggaactggacaggcaaagcattcacgtccatccctggaatgccactaaagagtgactacatatatgacttcgttaacaacagtcgcgagcttaagtttcggtggactacgaaggatgtgtcagtaatcacaagagtaattctaagcaataatggccaactacaacgtctcacatggtccaatgattcggaggaatggataacagggtggtattttcctgcagctctatgtgacgtatattctgtatgcgggccttttggagtctgcaggacaggttctgatgagcaatgcttctgcttgccaggtttcagaccagcttcctcaagaagttggcgtcttggagcatggagtcaaggatgtgttaggcaaacagatatccaatgtgctgagtcaaatatatcaagtgccataaaggagagtgatgcgtttctcaagatcactaacatcaagttttcacaaaacccagtaaaactgaaagtccaaagcatggaggggtgcagatctatatgcttgagtaattgctcttgcactgcatatgcacacaagcaggattgcaatatctggaatagtgaactctgggatcttaaacaactacctaatggtaatactgatggttcagatatgtatatacgtcttgcagcatctgatcatgtagttcaagatagcgaaaaaaaggcacaccatctgaggctaattgtgctatttgcagtgctgggtagtatttttatggcactatgtgctcttagcataacagttaagatgtttcaaaggacttcatctagaaaggcattctcagataattactctctcgtcgtctatgattactcgtttttgcggcactgcacaaagaacttttcagatagagtggggcaaggtagctttggttcagtgttcaaaggattgctcccagactccaaaccgatagctgtcaagaagcttcaaggcatgaaacaaggagagaagcaatttcacaccgaggtgagggctttagggaaaattcaccataacaatctagtccacctcattgggttctgcttgagaggggctgaaaggatgttggtgtatgactttatggtgaatggatctttagatgctcatctcttcaaggatgaaaagatattggattggaacaccagatttttaattattctaggtgttgcaaagggattacagtatctccatgatgaatgtcaggagtgcatcatacattgtgatataaagcctgaaaacgtacttcttgatgtaaacttcagtccgaaactggctgactttggtctggcgaagcttatggaaagacattttagcagggccttgacaactatgagaggaacagcagggtatcttgcaccagagtggattggaggtctgcccataacaccaaaagcagatgtgtacagctatggaatgatgctatttgagatcatttcgggcagaaggaattcagaattgatggagagcggagccataaggtactttccagtgtgggccgcaataaggataagtgaaggtgacatttctgaaattttggatcccagactaagtgccgtgaattttcaagagctagagagagcatgcaaggttgcatgctggtgcattcaggacaatgaggctcacaggccaaccatgcgacagatagttcaaatcctgcaggacattcaagatgtcagcgcggccccagtaccgccacatcacctgaagcaacaccttcgacttcacgttgcaaagccccaccttcacacgcataccagacgccgagaagcgaaaacaacaatcgagggtgatgtcgtggccgagaagaactttaataacgacaccttcagtaagcgagtgatgtctaggacactaccgtcgcttgtccaagatggaccgaactttcatcgaaagaagacagtgttgaagaatgcgacgccctcaacaggagaagcggcgtccacaagcatcaccgtcgccgagactttcgcccaagaaatccccagcacatcgtcatgccaagacctagggacaaagcatgcagctttcgctgtcatcctaacatctcgcacaaaccctttagaggggcatcgacacgccggctgccgcagcagccgcaaagctgcgatgatcaccatcctctctggctgggcacacagattgggcacacagaaccgggcaacacctggccacgtgcgccacactgtcgcgcgcgcgccagagccgatgccgactgtcggccaccgaagccaaccagcaccaccaccctgcgccaggccctgccgctgccggccaacgccaccccggcgctgtcgtatgcaaccaaacgagaggacctatcgccgccattttggccggttgcgcagccctgccgacacaccccgccagaccactggacgcgtcctctccgcccgcgcccctccccgagcgtcgacgtccaagccctgcacgagctacgagccctcacgaggcgccaactcgcgccaccacaccaccaaagggcccagccgttgccatcctggcggcctgctcgatggcagcatagtgggagaggggagggatggggagaag

SEQ ID NO: 25527 - DNA, 1041 bp, Zea mays
  Peptide Sequence Number=SeqID_67306
atgatcttctcctccacattcctcgtcctcatgtacgccaagttctgccaaccatccggctcatcctccacaaacggcgcagccgcagcagcggtgtgcagcgtcggagtccccaagcaggtcatccagtcgctgcccttcttccggttcgccaccctccgtggggcgcgccaggggatggagtgctccgtctgcctcgcccgcttcgacgacgccgacctcctccgcctcctgccgcgctgccgccacgccttccacctccactgcgtcgaccgctggctccagtccaacgctagctgcccgctctgccggaccagcgtcgacgccgaccacgccacgctcggcctcaagtacccctccagcgcgcgcatcgtcttcggcggcgacgcgctgtcttctggacgcttcgacgacgctgctggtgctgggacggggagcggccgcgacctcctcgacatcttcgtggagcgcgtgcccggaccgtacattaagaagacgatatcatcatcgccgccgccgccggggctggacaggcacaagcaccgcatcatcgtgtccgacgtgttgttcaggagccggtggagcgagctcaactccgcagaccttatcgcgctcgacacggagatgctgcgctccgtgtccagcggccgctttgtgttcccgccagagtacaacaacgagatgatagcagcagcagcagcagaggaggaggaggaggaggacgacggtatcatgccgacggcgatggggaggaagcggctgctggagcctgtcgacgacgtggtggacgacgacctactaggtgacgggtgcagaagcggcttcgccgtgtcggcctcggcgtccgcggcgaggatgatatcctccggggtgcgctccatgtcggagatcgtgagtctgtcgagggagcggctgtcggaggaggacaatcggcggtggctgacgatcgcacggcggacggcgcggtggttcgccgccgggcgcgccagcagagggaatgaggaagagcaccgagctgtccacgtcgtggatgacgtgtag

SEQ ID NO: 25528 - DNA, 564 bp, Zea mays
  Peptide Sequence Number=SeqID_67307
atgttcgggccacgtgaatgtgtaacaccctatgtcatttgcggtgttgagtattggattgctctgagtttgcagattacaggtagttgtggaggtgaattaaagagttcctatcgatctaaaggattgccattgatattttacagattgtgtttccagaaaattcagatatatgcacctagtgggtgcgcccaatgggacttcagcaactcaaagctctccgatgagaggactcctccgccgtcccctggctccctgtcattcgtttgcatagacgacttcatgaggctatcgacaggggagagggcttacctccgaggcatcgatcgggtcatccttgatggctcggatgagtccgaggaggaggagcacgacgacgggtatgacggcggtgatgaaggcgacgtggttggcaaggtcggtagctgcggcagtaagggaaaggacggtgacagcaacaacaacaaaggtggtcgcgacggtggtagcagcgacagcaacaatggagactgtggcggtggtaaggtagcagcagtgacggcgtcaatggcatggcagccatga

SEQ ID NO: 25529 - DNA, 213 bp, Zea mays
  Peptide Sequence Number=SeqID_67308
atggaagaaagcgtggtagtagtggtggaaggagaggaggaggtcacgccttctcatatttatagaagaggattacatgataaaggaggattacatgataaggactctgtaacaaacataggagaaaaaggaggcgcagctccacaagaccaggagagaatatggagtcccctaaactacctttctatagatggatataaattatatctctaa

SEQ ID NO: 25530 - DNA, 354 bp, Zea mays
  Peptide Sequence Number=SeqID_67309
atgtccggtgcaccagaggactccaactcgaactcgccaccttcgggaatttccagaggccacttcgctataattcaccggactgtccggtgtacaccggacagtgtccggtgctccaagggaggtcgtcctcatgaactcgccagcctcgggttttcactccagccgctccgctataattcaccggactgtccggtgtgcaccgggactgtccggtgcatctgcggggcaactgctacttcacgcgccaatggctacctgcagcgcattttattggcgcgccagcgccgcgcattagcatgcacgcccatgctgctcaccgacactctacagtacatgtcggtgcgccactga

SEQ ID NO: 25531 - DNA, 309 bp, Zea mays
  Peptide Sequence Number=SeqID_67310
atggtcgagcttcagaaactggagagcatgcaatggacaattcaccagattgcaattttgtcattccaaaaggcaaatcaaagtgggattgataataacctcgatcgtgcaaaattggggaaattgggagacctaagaaattcatggaacatgctctctaagcaatacaaggaagaatatgagaaatgcatagaagaatcgaagtcactagattatgataaactgtataaaggtctggaggtgctagctgaccttgacaagcatgcaaattctagggttatcatacctctcattggttctcccttgtaa

SEQ ID NO: 25532 - DNA, 289 bp, Zea mays
  Peptide Sequence Number=SeqID_67311
aaccttggagccaacacgcctcgaccagcagcaaatgtttgtgtgaccatcagtgacctcaagaccgaagaaaggaagcaaaagctttccaggtataggaagaagaagatcaagcggaactttggcaggaagatcaaggaaggctctggcagacagccagccaagagtgcgagggagatttgccaagatcgaagaatgcgacctgctgaagccaagcaagtagatccaagcttctgtcctatgtatccacatggtttgcagcataaaatagttgctaaaggatctcaag

SEQ ID NO: 25533 - DNA, 285 bp, Zea mays
  Peptide Sequence Number=SeqID_67312
atggaggcggtggcggtcctactcctagatccggtggaggcgatagaggggagaggagcgcgggtggcgacagacgcgggcgcatcacgagcgggatgttttcacgagggtgcgccgagcgatgcggaggtgaaggcgagtgaggcgggtgggcgttggaggcgaaggcgtgcgggcatcggagacatggatattgacgctgactttttgaaagtcacctataggggggtgaataggcgaaatcagaaatttataaacttaagcgcacactacaagccggggtag

SEQ ID NO: 25534 - DNA, 1050 bp, Zea mays
  Peptide Sequence Number=SeqID_67313
atggccgctgccacagccgccgccgccgcgctcgcctccccggcgggcctctccacatcgctggcgcgccgcggcctcgtcagcttcgcacccgcgctccgccccggccctgaccgcagctctcgcgccgtcgccctcctcggtgtacgaactcatgtcacggctgttgatcaagccattgtaaaaggtgatacaaagttggaaggtcctgtggttgttgttactggtgcttccagggggattggaaaagccactgcattggctcttggaaaagcaggctgcaaggtcttggtgaattatgctcgatcttcaaaggaggctgaagaagtctccaaggagattgaagcatctggaggccaggccattacctttggaggagatgtttccaaagaggctgatgttgaatctatgataaaagtggctgttgatacatggggaacgattgatgtactagtaaataatgcaggaatcacacgggacacattgttgatgagaatgaagaaatcacagtggcaagatgtgattgatttgaatcttacaggcgttttcctttgcacgcagggaagaattatcaatatagcatcggttgttggtcttactggtaatgctggacaagctaattatgctgctgccaaggctggggttattgggttcacaaaaacagttgctagggagtatgccagcagaaatattaatgcaaacgttatcgctcctggatttattgcttcagatatgactgctgaacttggtgaagagttagagaagaaaattctgtcaactattcctttagcccttagaaaagctaggtttgaatctgagacttctgttgaagttggagacgggaaaaggcttgcccaacggggaaaaaatagggatattgtcccattgcatcactcatctggaactaattggtgtactctacacaaatttctagggcgctatggtcggccagaggatgtagcaggcctggtggaattcttagccctcagccctgctgcaagctacatcactggacaggtcctcaccatcgatggaggaatggtaatgtaa

SEQ ID NO: 25535 - DNA, 1689 bp, Zea mays
  Peptide Sequence Number=SeqID_67314
atgggtgacgccgctactgccgccgccgccactctcggcctgacctggcccaacgccgccgtcgaactgcctcagatcagctttgcagctaaggacagcgaattctcggactgggacggcgacatactcgcggtcgccgtgacggacaaggacgtgcaggtgcagccccacgtctcgggctccgagttcgagaacgccgtcctgaggaggctcgacgtccagctcggcggcctcctgcgggccgcggcggcagaggaggagttcgccggcaggcccgggcagtcggtggttctccgcgtgcgggggcagcggttcaagcgggtggctctcgtcggtttcgccgcccgcgaccgcgaccgcgacgccgggtgcctgcatggcctaggcgaatccgtcgcgtcagttgccagggctgctcgggccaccagcgccgccatccttgtcgccgaccccgctgtggtccgaccggagtccaggctgaatgctgccgcggcaattgcttctggaactgtgcttggactgtacgaggacaacagatacaagtccgagtgggaaaaggtgcatctgaaacaggtagacctgattgggctgggatctgggccggagctggaccagaaacttcgccatgctaaccgtctttcgtcaggggtcatgcttgcgagagatcttgtgaactctcctgccaatgtccttacccctggtgctctcgcggaggcggcggcgaagatcgcttcgacgtacagcgacgtgttcacagccacgatactagatgcggcgaaatgcagggaactgaagatgggctcgtacctggcagtcgcagcggcctctgagacaaacccgccttactttatccacctgtgttacaaaccccgcggtggtgacgtcaggaggaagctggctcttgttgggaaaggcataacatttgacagcggcggctacaacatcaaggccgtaccggtcgccaccatcgagctcatgaaaaaggacatgggaggcgcggcggcggtgtttggtgcagcagaggttttgggacagatcaagccgcctggagtcgaggtccacttcatatctgccgcgtctgaaaatatgatcagtggctcaggcatgagacccggcgacatcgtgactgcttccaatggaaagaccatcgaggtagataacacggatgcggaggggaggcttacactggctgacgctttggtctatgcttgtaaccaaggtgttgacaagattattgatctggcgacgttaacgggtgctattcgtgtcgcgcttgggcccagcatcgctggtaatatgactatccttgaccaccggtgctccacccctgggccctggcctccgctagctaataattctactaggattctaacgccaagcgacgagctagcggaggaattcgcggccgcctacgaggtctccggggagaagttctggaggctgccgatggaggagagctactgggagtccatggagtccagcatcgccgatatgctctgcgccggccctttgcagccccaggccggcgctatcactgccgcactgttcctcaaacactttgtcgatgacaaggttcagtggatgcacatcgacatcgccggcacggtctggagcaacaagaagcgggcgggtactggcttcggagtcaccaccctggtggagtgggttctcagcaactcgtcgtcctga

SEQ ID NO: 25536 - DNA, 240 bp, Zea mays
  Peptide Sequence Number=SeqID_67315
atggaaatcgaatgcttccgcttccagccttctacttccacttccttccaccgccggcggagaagaaagaacgaggcgcgcctgatggcaaagtggatccaaatccaagtgggcctggccctgacatgggccttgtgggtcatgctagattacgggccgacagagccacgccacatgtgtgtctccgaggcgagaatcctccggtcgggtgacgaaatgcatcgtcctgataaggagtag

SEQ ID NO: 25537 - DNA, 675 bp, Zea mays
  Peptide Sequence Number=SeqID_67316
atggcggcggaggggaagaggaagggcgtcccggcgctagggtggtggctgatgctagtcggctccctccgcctcgcctccgtttggttcggcttcttcgacatctgggcgctccgcgttgccgtcttctcgcagacggagaggtccatctgtgtggggtacggaattacggatctcatgccacccggtcacggttctagcctgatctgtgccgcgcatttttttatgaagatcgggagatccaacaaggaggctcctgtgtctccttcccgcgggattcatgagtttgagctggacaaatctgttactggagcgatacaggatgacaagattaagatcgcgcttatttctgccttgactgatgttcatggccgtacttttggtgtctggactcttttgacctgcaccctgtgcttcctttgcgcactgaacctggaaaataggcctctgtacctggccaccttcctatcattcatctacgctctcggtcatttcctcacggaatacttgatataccacaccatggctgcagcaaatctgagcacagttggcttctttgcaggcttgtcatttaaaccttttcaggatcttatcagtaccttacttttgcaccttctgcgatgcaatgcagcatttatcagttcgaggcttccagctttcaatgttgcaaaatag

SEQ ID NO: 25538 - DNA, 850 bp, Zea mays
  Peptide Sequence Number=SeqID_67317
cagagcatggacgcgggagaggtgcggcactggaacgaggacgtcaaacggcgtctccatccacgtcgccgagcggggccccgaggatgggcccgcggtgctcataatccacggcttcccggagctctggctctcgtggcgccaccagatggccgcgctcggccgcccgcgggtgttcgtggtggggcacgactggggcgcgcaggtggcgtggcacctctgcctgttccggccggaccgggtgcgcgccgccgccgttctaggaataccgtactacgctcgacaagctcaccccatcatggaggtcttcgcggcgtttggcgatggcttttacataaatcagtttcaggagcccggaagagctgaagccgcattcgctcaatacgatgttgcaactgtactaaagaagttctactccattgaaatagatgaactcactgctcctcctggagtggagatcatagactttctcgaggcatctccatcaccacttccttggctcagcgaggaagaactgggccagtacgccgaaaagtttcggaagtctgggttcactggacccctcaactactaccgcatgtgggagacgaattggagacttcttgcaccctggaacgaggccaagattacagtgcccgtcaagttcatagctggtgataaggacatcggtgtccagtcctttggggttgagaagtacatcaagagtggggaattcaagtccactgtcccagatcttgaagtcgcggtcattgaaggccaccattttctccagcaagaacaggccgagagggtgaattcggagataatttcctacctcgtcaggtttactagccaggaggcatcatcttga

SEQ ID NO: 25539 - DNA, 372 bp, Zea mays
  Peptide Sequence Number=SeqID_67318
atggcaagcgggctacgcagcggcgaggccaagcctcggcggtttgatctcaccatgtcaaggaggacgaggcggccagcggcagcaaccgtggagcgactgggattcctccagccggtggagctgatcgaggacgaggccgtcgacggcgccgccaccggaggcaccacggaagggaacactcctgctgctggtgttcgtgaatttgcacaactacaaggagctgcagcaggcgaggcaacgcggcgggctggacaggtgccggcgggacggagggtgatcggaatggtgcgccgctacgtgaaggtccggtccatcaagcccaagcgtgcgtcgccgtcggcggagaagtgcgcttcacctgtatgctga

SEQ ID NO: 25540 - DNA, 2392 bp, Zea mays
  Peptide Sequence Number=SeqID_67319
atggccgtgaccggtgacaatgcgtcagcgactcgcttggcggtggagctcggtagagggggactgttgggtgggtacggtgctatggtgtccactctttgctcacctccacccttgccctgcttccttctcttcgccatcgtcctctccttcgcgtccggcgatgatggcggtcgcgcggcggcactggagctggacacgcaggctgcctacctcgccaagatgaaggaagagttcccggggccgggcatgtcgaggtggtgggacttcacgtcgccggcgccggactactgcagcttccgcggcgtcgcctgcgacccgtcgggcaacgtcacgggcatcgacgtcacgtcgtggcgcctcgtcggccggctcccgccgggcgtctgcgcggcgctccccgcgctccgggagctccggatggcgtgcaacgacgtccgcggcgggttcccgctgggcgtgctcaactgcacctccctggaggtgctcaacctcagcttctccggcgtgtctggcgccgtgccccgcgacctgtccccgctgcgcgcgctgcgggtgctcgacctgtccaacaacctcttcaccggcgcgttcccgaccggcaacttcctcaccggccgcatcccggagtcgctggcgcgcctcacgaacctgcggttcctggagctctactacaacgagctggagggcggcatccccgccgagctcgccaatctcacgcagctcactgacatcgacctgtccgagaaccgcctcacggggcccatcccggagtcgctgtgcgcgctgcgcggcttgcgcgtgctccagctctacaccaaccgcctcacgggccccatcccggccgtgctcggcaactccacgcagctgcgcatcctctccctgtaccgcaaccagctcaccggcgggatccccgccgacctcggccgctactcggacctcaacgtcatcgaggtgtcggagaaccagctgacggggccgctgccgccgtacgcctgcgccaacggccacctccagtacatcctggtgctcagcaacctgctgaccgggcccatcccgccggcgtacgccgagtgcacgccgctgctccggttccgggtgagcaacaaccacctggagggcgacgtgccgccgggcatcttcggcctcccgcacgcctccatcctcgacctcagctacaaccacttcaccggcgccgtggcggccacggtagcgggcgccgcgaacctgacgtcgctgttcgcgtccaacaaccggatgtccggcgagctgccgccggagatcgccggcgcgtgggggctggtgaaggtcgacctgagcaacaacctcatcgccgggcccatcccggagtccgtgggcctgctgtcgaggctcaaccagctgtccctgcaggggaacctgctgaacgggtccatcccggagacgctcgcggggctcaggacgctgaacctcatcaaggagggcctgctggagagcgtggcggggaacccggggctgtgcgtggcgttccggctgaacctgacggacccggcgctgccgctgtgcccgcggccgagcctgcggcgcgggctggccggagacgtgtgggtggtgggcgtgtgcgcgctggcgtgcgccgtggcgacgctggcgctggcgcggcggtgggtgctgcgggcgcggcggtacgcggggcaggacaaggggctggcgtcgtcgtctccggcgtcgagcgagtcgtacgacgtgacgagcttccataagctgagcttcgaccagcacgagatcctggaggcgctgatcgacaagaacatcgtggggcacggcggctccgggaccgtgtacaagatcgagctcagcggcggcgagctggtggcggtgaagaagctgtgggtgtcgtcgaagcggcggctgcgtgggccgagcagcaagcaggtggactgggcggcggtgaccagcaccaccaccaacagcggagacagcgacggcggatggctgggcgaccgcgagctccgcacggaggtggagacgctgggcagcatccggcacaagaacatcgtgaagctctactgctgctactcgggcgccgactgcaacctgctggtgtacgagtacatgccgaacggcaacctatgggaggcgctgcacggctgctacctgctgctggactggccgacgcgccaccgcgtggcgctcggcgtggcgcaggggctcgcctacctccaccacgacctcctcttccccatcgtccaccgcgacatcaagtcctccaacatcctcctcgacgccgacttcgagcccaaggtcgccgacttcggcatcgccaaggtgctccaggcgcgcgggcgtggcggcgctgaccgagacgcctccaccaccaccatcgccggcacctacggctacctggcgccag

SEQ ID NO: 25541 - DNA, 900 bp, Zea mays
  Peptide Sequence Number=SeqID_67320
atgtacatgacgattgttgaacgcgtctatgagtcctcgcggcacaaagggaaaaaggtggccgcgccccgcggcgacggacggcgcatcggcctcgccgctgcacaacgccggagacgatacgacggcggctacgggatgacggtcttccacttcctcaactgcgccttcctcaccttcgggcctcacgtcgtctactactccgccacgcccctgtcagagtatgatacaatcggcacttctataaaagcagctgctgtttatcttggaactgcgcttgtaaagcttgtttgcttggcaacattgctcaaagtacctgagaatgatagctttgacccctatcaggagttaatgaaagtttttattggattcatagatgtagctggactgtattttgctttgacccagctgacccacagaaacatctctcagaatcataagttccaggctgttggtcttggttgggcttttgctgattcagttttgcaccgactggcacctctctggattggggcaagagggcttgaatttacatgggagtacatatttcaaggacttgaagcgaatgctaatcttgtgatgaccctctcccttgctgcattggggtccttgatgtggcttaggaagaacaagcctaggactttggttccaataatttatgcatgtgctctgctcttggcaacaatgccatctatcaccagtcgtattgttcactgggctcaacatgctcaaacattgcagctacttgaggaggtcattggagtggcagacaccaaaggtggttggcttcgagctcttctcctcccttgttatggctttcatcagctggcagctgttctcggcttgtcagagaccgataacattttacttagaacatctgttgtaacttgtgagctgtag

SEQ ID NO: 25542 - DNA, 231 bp, Zea mays
  Peptide Sequence Number=SeqID_67321
ggtgagcaagatgcgaaagttgagtctgccgaagaagaggctcggactagtataccccaggatgctgagcttccagctctcccaaacaaggatctcaacagaaggaggctcaatcttagcgagatatctcttaaagatgttgcagccaatgcggttccatatgaagagggtgaccgcgccgccgccataaacggcgctaggctgtcaacgagaactttaaaccttgattga

SEQ ID NO: 25543 - DNA, 129 bp, Zea mays
  Peptide Sequence Number=SeqID_67322
atgccgcaggcccgcaagaacatcgcaaaactaaccgctgtcaccgggcccccttgttttgcagatgtacaggacagtgaagagcacagacagatcgttgcacatagctacagatcatggacttcgtag

SEQ ID NO: 25544 - DNA, 147 bp, Zea mays
  Peptide Sequence Number=SeqID_67323
atgagagagagagcatcagcggatgatggctctggggctacggatgcggacgaggacaagcagaatgctctggagttcgatgtcgcgcaccatggagttgcaaagcgccggagttcgacgctgcctattcgctgtatcgttttctaa

SEQ ID NO: 25545 - DNA, 210 bp, Zea mays
  Peptide Sequence Number=SeqID_67324
atgggggtagatttattaccgcgaattgatgactcgaggacgctggccatggccacagccactgcgtggcacgcggtcaacggcgacgtccttggacccggtgcagacgacggcgattttgtcacggtggacgcgcagggaggaagtggaggaggaaatgctggcaacatggaggactttgaggagtttcaggactacgatgagttctag

SEQ ID NO: 25546 - DNA, 252 bp, Zea mays
  Peptide Sequence Number=SeqID_67325
atggctgagtggttgatagctccggtcttgaaaaccggtatagttctaggaactatcgagggttcgagaatgaacagtcctgggccaattgcagcccagagcgggctggccactggcgggctgttcttggtgacgcggctgaccgaattgggggaaattggtgattctccggctagggtggctactcgagggtgggagcgggtgctacggcttcgcaatttagagacgaaggacggagctcagttgatttga

SEQ ID NO: 25547 - DNA, 279 bp, Zea mays
  Peptide Sequence Number=SeqID_67326
atggtcgccctaaggactatagacccctactcttaccttgaccttagagtcttttcaaaagttggtcatcttgaccaactctatgatggcccgtatcaggtgcactgcacgtcagtccagtcacctggagagactgcatcgtctcctgcacgaggagcaggagcgccgacgccaggagcaggagcagcaggactcttccccctcgcctcgcgggaggtggagtctgagaggtcgccttcccttgcacctcagccagagatgccccctacaccaccttag

SEQ ID NO: 25548 - DNA, 309 bp, Zea mays
  Peptide Sequence Number=SeqID_67327
atggtcgtcaatgggggccagggcatagtgctcgctctgccaagaattaggagcagcgatatcatgggacgatgctctgcgatcgggcatgagacgcttccagcacaagtactacaacctgttcacctgcaattgcactcgtttgtggcgagctacctgaaccggcttgcctacaatggctccatggagtggaatgtattgaacgtggctgcccttgtctggtttcatggccgatgggtggatagaatgagtactattctagcaatcgagcagatcatcagaaatccagaattatcaataactatctaa

SEQ ID NO: 25549 - DNA, 825 bp, Zea mays
  Peptide Sequence Number=SeqID_67328
atggatccaagcttggctggcgaccagggagaggtagcagcagtgggaagccagctggagaccgcggccgccatcggggctagaggcagagcgctgtgcgtccgggggcttgtgtccgccgagcagggagccagacggccggagaggaagcagagagaggaagagcagcggctgttgtggaggaaacagggagaagaagatgggggtgtcggcttcttgaggagagggatgacggccaagttcaccaccagcgccgacgccccggcctcggtgcggctctccgcagcagcgcaggcggctgcgatccagccctcctccccgcgcttcttctgctcctcgctggccgggaccaacccgacctcccccgcatcaccattgccgggggctgggcgcgagcagaatggggtgggtgaagcgggagtgcgcgagcacggcgaaggagagcgggaagacgaggcaggcggtgagcagcgcgaaggcgcgcagagccacgcgcgggatcgacgccgagacgcggaccagctcctctgcgctcagcgccgcgaggtcgctcgactccaggtccatcgccgccggcgggatgctgcttgtgtcggtcggcccggttggttcgaggagcagaggatgaactccatggctgcgcgcgcggccgccctagccttcgcggcgacggcgacggatctggaccgcggctggggtgtggccgcccccgggagggaagggatgagcctcccggggggcgacggcggctggtgtgggtggcggctgggggctagtgtgtcggctggcggctgtggtgtagagaggaaagaaaccctcctctga

SEQ ID NO: 25550 - DNA, 336 bp, Zea mays
  Peptide Sequence Number=SeqID_67329
atggctcgttccgctcccactttcgtcgctgtttttctcctagtcctcgtgcttctcaccatggacgcggcgcagggtcaacagccgttcccgctgtccaccgatccatccgacgcggatgctctgcacgctgtgttccggcagtggagactggagggcggcgcggcgatggaggacccgtgcaggaagggcgtctggtcagagtcgtccggaataaacgcgtccgtcgaatgcaactgcctcccctcaaggaaatgtgagtgggcacgggaacatctcggcgatcccgcgggagctattcaatttgacagaactggtctctctggatttaagtaa

SEQ ID NO: 25551 - DNA, 945 bp, Zea mays
  Peptide Sequence Number=SeqID_67330
atgtcgggagcatctgccaagagggagatcgagaccggcggcgacaagtccgcaagctcgaggagaacccattcgagggagtccgcccacaagcacaaggaggaatcctcttcctccatcaagtcacaacggagaggtgacaagaagaagaagatgaagaaagtggtctactacgagaccgactcctcgtcacccttcacctccgctatcctcgcatttccaaatgaagctccgcctcgcccgaccccagggctcggcccccgtctcggcctcggacgacgaactccgcttcgcccgaccctagggctcggactcagcctcggctccggaagacgacgaactccgctttgcccgaccccagggctcggactcagcctcggctccggaagacgacgaactccgcttcgcccgaccccagggatcggactcagcctcggctccaaaagacgacgaactccgcctcccccgaccctagggctcggactcggccttagccccggaagacgacgaactccgcttcgcccgaccccagggctcggactcgggctgagccccggaagacgacgaactctgcttcgcccgaccccagggctcggactcgggctcagccccggaagacgacgaactccgcttcgcccgaccccagggctcgaactcaggctcagctccggaagacgacgaactccgcttcgcccgaccccagggctcggactcagccctagcctcagccgacggtctccgcctcatccgacccaggggctcggactcgacctcggcctcggaagacagactcgacctcgacctcggaggagcctccacctcgcccaacctagggctcagaccgaccacgtcacaagaggcgccatcattaccctaccccaagctgactcaggctacagggaacaagaccggcgtcccatctggctcgccccgccaaacaagtaa

SEQ ID NO: 25552 - DNA, 2103 bp, Zea mays
  Peptide Sequence Number=SeqID_67331
atggccgccgcggcagctaccaaggtcaccgcggcggcagcagcctccgcagtgttccgtagcaacaaggagctcacccgcctcgcgcggtcgggccagctggcggcggcgcgccgcctcttcgacgccatgcctctccgcaacaccgtcacctacaacgccatgctctccgcgctcgcgcgccacgggcgtatcgacgaggctcgggctctcttcgacgggatgcccggcagaaacactgtctcctggaacgcgatgatcgcggccctctcggatcacggccgcgtcgcggacgcccggagcctcttcgaccggatgcctgtccgggacgagttctcgtggacggtgatggtctcctgctacgcgcgcgggggggatctcgagctcgcccgggacgtgctggaccgaatgcctggtgacaagtgcacggcctgctacaacgccatgatctccgggtacgccaagaacggcaggttcgacgatgcaatgaagctgctgcgggagatgccggctccggaccttgtttcatggaattcagcactagcggggctcactcagagtggggaaatggtgcgggcagttcaattcttcgacgaaatggtgaaggacatgacgtcctggaatttgatgctggcgggttttgtgcgaactggagatttgaatgcggcctctagcttctttgcaaagattgaatcacctaatgtcatctcttgggtgaccttgctcaatgggtattgccgtgcggggaggattgctgatgctagggacctgttcgacagaatgcctgagcgaaatgttgtggcttggaacgtgatgcttgatgggtatgtgcatctctcgcccatagaagaggcctgtaaactgttcgatgagatgccaattaagaactcaatctcatggacaacaataataagcggattagcacgagctgggaaactccaggaagcgaaggatcttctcgacaagatgtctttcaactgtgtggcagcaaagactgcgttgatgcatggttatttacaacgcaacatggctgatgatgctcgtcggatttttgatggaatggaggtgcatgacacagtgtgttggaataccatgatctctggttatgtccaatgtggaatacttgaagaggcaatgttgttattccagcgaatgccgaataaggatatggtttcctggaacaccatgattgctggctatgctcaggatggccaaatgcacaaggcaatcggtattttcaggaggatgaacaggagaaatacggtatcttggaactcagttatctctggatttgttcagaatgatcgctttgttgatgcactccatcatttcatgcttatgagaaggggcacaaatagggctgactggtctacctatgcaagctgtctcagagcatgtgcaaacctggctgttttgcatgttgggaggcaactccacaatcttcttgttaggagtggccatatcaacgattcatttgctggaaatgccttgatttccacatatgcgaagtgtggaaggatattggaagcaaagcaaatctttgatgagatggtatacaaggatattgtttcatggaatgcgttgattgatggctatgcttctaacggtcaagggactgaagcaatcgcagtcttcagggaaatggaagccaatggtgtgagacctgatgaagtcacatttgttggtatcttgtcagcttgcagtcatgccgggttgattgatgaaggattgttttttttctactcaatgacaaaagagtacttactgaagccagtcgctgagcactatgcttgcatggtagacttgcttggaagggctgggaaactgaacgaggcatttgaacttgtgcaaggaatgcagatccaaccaaatgctggcgtctggggtgcattgcttggagcatgccacatgcacaagaaccatgaacttgcacagctggcagctgagaggttgtctgaattggaacctcgcaaggcctcaaattatgtgctgctgtcaaacatcagtgccgaagcaggtaagtgggacgaatctgaaaaggctcgggcttcaatcaaagagaagggagtaaataagccaccaggtttagctggatcaacatag

SEQ ID NO: 25553 - DNA, 255 bp, Zea mays
  Peptide Sequence Number=SeqID_67332
atgcctaaggtatgcgacctgtattgcgacggtggaatggatacagacaagtggtgtgatgcccaggttggccactacataatcatcgatgcctctgcattgggtgtcaactatgcccgtgagctatgggagaacaggaggaaacctttcactgctgaattcatcgagttggatccttctgatgtagactctccctctatgccttccaacacaaacaaatgcgctaagttgctggcacgcagtctttcgagctga

SEQ ID NO: 25554 - DNA, 141 bp, Zea mays
  Peptide Sequence Number=SeqID_67333
atgaattgtcttctaggcactattggtttcttttaccctgactaccctcgtggggtttacgagacgaagaagaggaaaaagcaacttacaaaggctatgcccgagactatggagctacccgtcattgaggagactacctag

SEQ ID NO: 25555 - DNA, 1161 bp, Zea mays
  Peptide Sequence Number=SeqID_67334
atgtacttcgatgggtcgctgatgaaaacaggagccagcgcgggcctgctcttcatctcacccctcgggaagcacctccgctacgtgctgcgcctccatttcccggtgtcaaacaacgtggtcgagtatgaggctctggttaatgggttgcgcatcaccatcgagctaggggttcggcgcctcgacgctcgtggcgactcgcagctagtcattgaccaagtcatgaagaactcccactgccgcgaccggaagatggaggcctactgcgacgaagttcggcgcctggaagacgagttctacgggctcgagctcaaccacatcgctcgacggtacaacgagactgcggatgagctggctaaaatagcctcggggcggacaacggttcccccggacgtcttctccagagacatacatcaacccttcgtcaagactgatgacacgtccaagcccgaggaggcctcggcccagcccgaggtatcctcggccgccaaggaaggcacccgggggcttctcgcacctgctggtcgtcatcgacaaattctccaagtggatcgaggtccgaccctaacaagcatcaggtccgagcaggcggtggcgttcttcaccaacatcatccatcgctttggggtcccgaactccatcatcaccgacaatggcacccagttcactggaaagaagttcctggacttctgcgaggaccaccacatccgtgtggactgggccgccgtagctcaccccatgacgaatgggcaggtggagcgcgccaacggcatgattctgcagggacttaaactgaggatctacaacgacctcaacaagttctacaagcgatggatgaaagagctaccctcggtggtctggagtctgaggacgacgccaagccaagccacaggtttctcgccgttctttctagtctatggggccgaggctatcttgcccacagacttagaatacggttccccgaggacaaaggcgtacgatgaccgaagcaaccagaccagccgagaagactcactggaccagctggaagaggctcgggacatggccttactacactcggcgcggtatcagcagtctctgcgacgctaccacgcccgaggggtccgaccccgaggcttccaggtgggagacttgatacttcggttgcggcaggacgcctga

SEQ ID NO: 25556 - DNA, 123 bp, Zea mays
  Peptide Sequence Number=SeqID_67335
atggccggaggtgtattagatgacttgggccacttacccaaagtgaagatgaccgcagagttggtcatccacggcgagggcgatccgcagcccttacggaggtcggagaggattgtgcgatga

SEQ ID NO: 25557 - DNA, 291 bp, Zea mays
  Peptide Sequence Number=SeqID_67336
atggagaataagtatttcaccccaatcaaagatgatctacttatcgttgggtactataatgttcttctagctacttcgacgaggtcggtgggaaggatgaagtacctctgcccgctctatagcgcactggccaagtgctctagcgaggagaagatgttggcccagaggatcttctcgaatgcgcaagagttctaccacccaatagcttggagtgttgtggagatcattttgtcgaagcacatcaaagcaagccaagactcttgcttagaccaactccaacagatatcgtaa

SEQ ID NO: 25558 - DNA, 303 bp, Zea mays
  Peptide Sequence Number=SeqID_67337
atgttgttggcacaacatggaggtcattatcatcacgctgatgctattttttatcatgtgtggactctcactaatttcaaagtagcgatactgctggccagaattttgggaatagtatggctccaacatctactcgcaaagatctttggaacaggtgaccaacaacacgacgatgaatccgaggcaacgaccacgcatggtgatgaatcccacacgacgaccacgcatggtgatgaatctcagacgacgaccatgtatggtgatgaatcccagacgatgaccacgtatggtgatgaatcctag

SEQ ID NO: 25559 - DNA, 261 bp, Zea mays
  Peptide Sequence Number=SeqID_67338
atgggatgcagccaagctagcgaagcacggacgacaataatgaactgtgtcttctcctgccaggggcctcagccctatgaacgtcagatacctctcttttttatggccatgttcttctccactgtacgcaccggcaaggtgaatgagttgagaaattcatggcactgcgggtggtggccagtgaagattgccctcttcatggtagctcgtggtgctagggagggatcaaatgactcgggtgggaagtgggacaaggagtga

SEQ ID NO: 25560 - DNA, 768 bp, Zea mays
  Peptide Sequence Number=SeqID_67339
atggcgtgtgggatggcggcgcgcaggctattgggagcaggcggcggcggtagtggagatggaggaaaacgaatgaagtggaggaaggagatggttaccggtattaaatacctcggcaccaagatccatggcgccgagctcggcgccaagatccacgacgccgagctgtctgccacgtcagctcgccaagtattggttgagcaaggccaatcaatattgggtcttccgcccacggtggaacaacaacattatttgaataactcactggccgccagagttcataacctagtgctagtgatcgaaggaatacgagaatatattacagagaaaaggatagatagtttcacagccgccaagcaaatcacggatgacgatgaactgtgtcttctcctgccactgtcagggcctcagccctatgaacgtcagatacttgtatgcggctatcttcctccagctggcgaacctgtctgcgtgctcttttttatggccatgttcttctccactgtacgcaccggcaaggtgaatgagttgagaaatttatggcactgcgggtggtggccagtgaagattgccctcttcatggatatttcttgtagttcagctcataagttttatgagatttatcacaaggctgaactacaaattgtgccaaaccaattaccaaggaaggtacctcgtggtgtttgggatctctatcttttgccaacattggctctacgggggtggataaaaattcatgattgtcaagctcagacattactggcttga

SEQ ID NO: 25561 - DNA, 537 bp, Zea mays
  Peptide Sequence Number=SeqID_67340
atggtgcacgacgccccagccctagacttcgccgacgacgacgggcagtcccaaatcgcggtggcgccattaccgcatgcggctcaccggagccccagcaccccattcttcgattcgtcggagccacacgcgaggacgaacagtgcgaaggtaggagaggcatccttacctcgattaacacggtgttgcccactgtccaccaagtgcggcggagaccgttgtctggtgaagaattccggccgtactggcggccaactccagcgccaaacggatgtgcctgccctctcccggtctagggaatctcttgggcacaacactaagggtgcggtcgacggtgagtcgggattcacctgcggcaggtctctgtttcctctcaggcggcgacagtcgtgggggctatactggtgcgaaatcctcagaacagggggaaagggaggacgacggttgggttcttatcaatccctggggtttgtttgggcctggcgcaagaatcgcgcggagctgtggcacgttcggtcctctagcaggtgcgactga

SEQ ID NO: 25562 - DNA, 542 bp, Zea mays
  Peptide Sequence Number=SeqID_67341
atgccctcgcccccgacttcgccccgccgcagacgcagctgccaccagcaccatccgccgcccccgcccccgcctcggcccacctcctgccccgcccgccgtcccagccccgaatccagatactcgtcaagtacctggttccacaacgcagcaagacgcacgggcgtagtgaggagctcctcggccgctggttgcgggcccgccgggccccacaggacagcgtcgtcgtcacaaccaaagggagcaacaaccctcagatcctacccgtacttcagttgcttttcagtaaggattctcagttgcttccaaagctactgacactgcagaacttgtataatttgttgtgccaaaattttgattctggattggcagaatgctgccatcatgagagaatcagcttgctggcttatagcccaatggcaatgggtatactttcaggaaagtatcacttatctgataactgtggtccactagacgcaagaatgaatcttttcaaagggagatactctaaaggtgaatcccggtacaaaatgcatttgtaa

SEQ ID NO: 25563 - DNA, 381 bp, Zea mays
  Peptide Sequence Number=SeqID_67342
atgtatgagtatccattgggtatggaatacccgtcaggtcggggtatgagtttggaattatacccgtctacaggatgggatttggtaccattgccatctctaagtacgacgccgttcctgaggcgggcctgcgaggcgcggctggcggtgggtgtggcgccccggaacatgctgcggacgcttgaggtcgccgagctgagctccagcgccgcgctcatggagcgcgccatgggggcggtcgtggagcacgccgaggaggtcgtgttctcggcggagtacgagcggttcgccgcccggaacgcggggctgtgcgtcgagatcacccgcgcgctgctggccaggatgccgacggcggcgaggagtgacggcgcccgtgcttag

SEQ ID NO: 25564 - DNA, 249 bp, Zea mays
  Peptide Sequence Number=SeqID_67343
atgcagtggcaaaagcagaacgcgtgttggaagtccaagcgcaagcccatcccgggaagctgcctgtcggatgtcgatgaacgcgtgttggaagtccaagcgcagaacgcgtgttggaagtccaagcgcaagtccatgcagtggcaaaagcagaacgagtcaatgtcttgctcatcgtgctcgccgtgtttcacaacttatgcatttacatattgtgccgtctcgtcactcgaaactgaagcaagctag

SEQ ID NO: 25565 - DNA, 249 bp, Zea mays
  Peptide Sequence Number=SeqID_67344
atggcggcctctctgtccgttctccctgttgcgcatgttgcctcggtggtcaccggccggtgggccctcgcgttcagatccgtccccaacccagcttcgcaacaacctccgctgcgtacgctgtttcgggaccatggggtgggcgaagttccaccgtcgtgggccggcgtcgaggctcccataccagtcctgggcgcttcaccgactcaccggatggattgcgtggtccctgcgggcgggactggatga

SEQ ID NO: 25566 - DNA, 276 bp, Zea mays
  Peptide Sequence Number=SeqID_67345
atggtggtgatgaaaaacgccaatataaatacctctaaaatcggtactatagaggttgtgtgtactagtgtaaactcacgttcttgcttgcatcatcttgcgagtaaaataattgctgcaagagaaatgcatggacgcttctttgagcggcgacacactgcgctccatattgcaatcggtgattgggcactcaaagaggacgtcgtcgtccctccaaaggtaccagaaaagatcatgtctcaggcgtcaaatccctccaaagaggtcatgacctga

SEQ ID NO: 25567 - DNA, 138 bp, Zea mays
  Peptide Sequence Number=SeqID_67346
atggtcggtacggaccacgtcagggacgagcgacgtgcgtgccgtggtcaagggcattcgcggggaagagatagaagatggagggcatttctgcaatttgtcagtggcacaaaagaacaatcaaatagggaattttag

SEQ ID NO: 25568 - DNA, 339 bp, Zea mays
  Peptide Sequence Number=SeqID_67347
atggagacgagcaaagggagcattggtgaccatgggagcaacctcgacagggcgcgactgccatggacgagctggagggagctccggccgggctccggggagaaggccgagctagggccgggcgcgcgcagggaagaagctccatggcgagcggacgccggagcgcgcggtccaaggttgttgataaggatggccgctagagaagagctcgatggtcacagagtgggacgcggtagcctggtgaccggtggtccagttgaagacaacgcccaggaatatcaagggaagaggacagctaggcggctgaaaaatctaaaggagaaagagcggcatggataa

SEQ ID NO: 25569 - DNA, 696 bp, Zea mays
  Peptide Sequence Number=SeqID_67348
atggggtcacgcctaatcgaaactggtagaccccgtacctgcaatatctccaccaaggagagctacccctcgatagagccgaagctcggcgactggcgcggcgcgccaagtcgttcgtcttggattgtacgcacctgccaagggtgtcaattctacgcaaggcagacgcacctgcccactcaggccctgcaaacaatacccatcacctggccgtttgctgtgtggggtctggacctcgttggtcccttgcagaaggcacccgggggttacatgcacctgctggtcgccatcgacaaattctccaagtggatcgaggtcagacccctaaatagcatcaggtccgaacaggaagtggtgttcttcaccaacttcatccatcgctttggggtcccgaactccatcatcaccgacaacggcacccagttcactggcagaaagttcctagacttctgcgaggaccaccacatccgggtggactgggccgccgtagctcaccccatgacgaatgggcaggtagagcgtgccaacggcatgattctgcaaggactcgagccacggatctacaacgacctcaacaaattcggcaggcgatggatgaaggaactcccctcggtggtctggagtctgagaacgacgccaagccgagccatgggcttcacgccgttctttctagtctatggggccgaggctatctag

SEQ ID NO: 25570 - DNA, 2620 bp, Zea mays
  Peptide Sequence Number=SeqID_67349
atggttctcctgctcctgggctgctctcctgcatcgtcgcgcccagactgctctccagcttccagttccacactgagtctgttggtttcggcttggcaggagaagatgcagcaccgccggacagaaaatggtcaggctattcctgcagaaacctttgcccgtccaggcttgtgccagattgcaacagtggcagccattgacagtgcttcagttcctctgaagtttgacaacccttcagatgatgtcagcacagggatgatgatgaggggtatgaccgccaaaaacttcgatccagttcgctactctggtagatggtttgagggagtgtattcttttgatgagaaggcacgctcaatccaggtggatacattctgtgtccacggtggacctgatggatacatcaccggcattcggggcagggtgcaatgcctatctgaagaggacattgcaagtgctgagacagatcttgagaggcaggagatggtccgtgggaaatgctttctccggttccccacactgccattcatacccaaggaaccctatgatgtccttgcaacagactatgacaattatgcaattgtgtctggagctaaggatacaagctttattcagatatactcaagaacacccaaccccgggccagaattcattgacaagtacaagtcttatgttgccaacttcggctatgacccaagcaagatcaaggacactcctcaagactgcgagtacatgtcctcagaccagattgcgctgatgatgtcgatgcccgggatgaatgaggccttgacgaatcagttcccagacctcaagctaaaggcaccggtcgcacttaacccattcacaagcgtgtttgataccctgaagaagttgcttgaactgtacttcaaaacagggaacgccaaggctgctggcttcacgccttcgcatgttcatggcagcaatagaagaagggttgggaacttgtttgtgggcaacagaacgaatgagcaggtcgagaggaagctaacgatggcgattttatgtccggagaggcccgccgctcgccgtcaccaacaccacccgcagccggtgcttgaagccatcaccagtacgccggcccgagggagggagcacgtgcgctcgatcggccagctgaacggcgtgcccacggtcggctggtctcctactctcctggagctgggtcggcggcacacgcgcagccagagccgccctgggctccatcggtaccgtgggcctccgaacacgtggcccacaagcgaagaagcatgggcctctattctgaaggcgacgttccctcgcgttaattgtggtttaggttccgttccccaattttacttgacgctccctcctccctcctccctctctcttgtcttctcccttgcggcgatccggattccgccgcaacggcccctctcgccttctccctcgcggcgctcgatccctccggattggcgcgtggaggggacagtggggtcgactggtcacgatgtccccgctgtgaagttcgtatatatgcagatggcaggatcagctggttcaacaaaactagtaaagatggcatcagaagggaacaaagacgtacctcatgaagctttgaccgtggatcactcatcgatttcgggttcaaagcgcaagcgtggccgcccaaggaaatatgagtatcctgtaaatgaactaccacagaaggtacagcccatccagagcgccccacctcttcttcactgcacacaagatggctcaagtctggccagccatgcatctggtggcggtgctcatggtaattggtccgctcaacctaggaattcagctaatgcttctcttcaaggtaattctggcaaagatgactttcttggcaagcattttgtgggcaagctgaccaagaaagttcctgggttttcgctcattacggtaaaagtgaaggacaatcaggtgctcaaaggttgggttccagatgaaattaatctccgcccaataacacctaaggatgaccttgccccagagctacccatgctgcgaccgagtcaagttcgaaagcgagcatcagcgatccatatgcaacctgctcttcctgtgccaatgcacttggagaatgttacacttgcaaagcctctgcagatgaggagacctgttgagaaaactattgctaagcatgctgatgctgaacttgtgatcccacaatcatcagtttctgcagtgccaataaaatttgtttgtcctgcctcggtaccatgcaagcaactggctaatcaaaatgagtttactggaaataagtctgttgatgaggttcagaaagattcggaatctccaaatgtaaccaaggaatcaccagtgaaagctgaaaaaccaaacattgctcttgtggatgtagtggccaaggattctctaggggaagggcaacaacttaatgatcaagtaacggatgtagttagggatttttctggtcaaactcaaaatgttgatgtgacaatgtctgatgagatcaagatagcatcaggtgccagagataagccaaattctgcaaattgtgaacagcagagttctaaggaaccatcagacatcacagaacaatctgagcagctcaagacagagaccgatgtccagaaaggagttgatgcctcag

SEQ ID NO: 25571 - DNA, 243 bp, Zea mays
  Peptide Sequence Number=SeqID_67350
atggacggcgccgccgccctaggcggcggcggcggcggtttcgccttcctggggcgggccatgagagagagagagagagagaggggggtggaggggaggagcccacccgaaaaaggcaaaggcaagcggggaaaggaccaaggggcgcaggcaagcagccgtgtcccgtactcccgtgtgactcggactcgcttcgggccggagacgatatatcggtacggtatgtacgcgaaggccaagtag

SEQ ID NO: 25572 - DNA, 333 bp, Zea mays
  Peptide Sequence Number=SeqID_67351
atggagatagaattggtcaagtgcgagtgctgtggcctgaaggaggactgcacccctcactacattgccagcgtgagatcaggcttccatggccaatggttgtgtgggctgtgttgtgaggcggtcagagatgaagcatgcaggaggaaggctcacccagtggctgggaacgtcttcacttgtggcggcgtccttcctcggtggcgcgtagggcgtggtggcggcctccagcagtgcgcgagcgtgctcctccctcggcggcagcgcggcccgctcgcggtggcatggcggcggcgcgggtggcgcgcagggtgtggtggcggcctccagtag

SEQ ID NO: 25573 - DNA, 546 bp, Zea mays
  Peptide Sequence Number=SeqID_67352
atgagtgtggagaagtgctgtagaacagtggtctgcggggagctgctgccacaacaatgtctatggaggaagaagcctacaagggtaacttcgagggggagctgcgtcagcagtggggagcggtggagctggggtgcagcagagctaaggacgcccgatagaagttgcagcgacgatgcaagagacatggtgttggagagcagtggtggtcaactggaggcgaggcgggaggagttggaggcgcacgcgcacctcacggacaagggtgtgcacgccgacggggacgtcgtccagcggctcgtgatcgaggaggcgtggcccggctgctgccagctcttcgagtggcgcgagaagggcgctgtcactggcgtcaagatgcagggccgagggcgcgtgcggggcgttcagcacggcgggcgcagtggggtggagggcgccaacttcctcgcctcggggaagctcctcgacctcagcgagcagcagctggtcgactgcgagagacggggagagcagagagcccgtgccgtgatacgtcgtccatcatga

SEQ ID NO: 25574 - DNA, 210 bp, Zea mays
  Peptide Sequence Number=SeqID_67353
atggcgtccagcggcggcgcggccaggcttgggatggaaacaaaggggaacacacggacagcgcaggcaccctccacctcctggacctcaattggatcgcgtcgcgctctcctggaggttggaggatcggcgcgtggagttggggagaagcaagcaggaatccatgcgagtttcaaaaagctgggagatatatcaaggctaataaagtag

SEQ ID NO: 25575 - DNA, 420 bp, Zea mays
  Peptide Sequence Number=SeqID_67354
atgaaggggaagacggtgatgttcgtgggcgactcgctggggcgcaaccagtgggagtcgctcgtctgcctgctgcacgccgccgcgctgcagtcgccgacgcagctcgtctccgtggaccctttgtacacgtacaagttcctggagtaccaggtgacggtatccttctaccgcgcgccgtacctggtggacatcgacgtggtccaggggaagcaggtgctgatgctggacgacatctacgagaacgccgagtcatggcgcgacgccgacgtgctctccttcaactccggcctctggtggacgcacaccggctcgatgcaggggtgggactacatgggcgagtctgggcgatactacgaggacatggaccgcacggtggcgttccagcgcggcgcatggagcacggagcactggcagtag

SEQ ID NO: 25576 - DNA, 825 bp, Zea mays
  Peptide Sequence Number=SeqID_67355
atggggcgaccgagcctgaacggcaaacggctcgcgagggtgactcgagcatggtttgacactttgttacatgtgcacgttgtttttgccaaggttcttgatggaaatatgttagcaacagcagctggccagttgaggacctttgacacttccagcaacaaaaagattaaaaaattatctggacatttcattgggaagcgctatattgccatttggaagctggacagcgggaaaacccagagctcaaactgtatcctgtcgatggagcagccagcaatatttttggactgtaaatgttcagacgaaggagaagtacacattttggctatttctaagattggtgcctgctatttctggtctgcaaacgatgtggatgacctgcgtaataagaagccgaccaagatcatattagctgagtcatctgtgtcaacagttcatcaggcattctccatatttgccgcaaaacttcaaggagtggatggacctaattctgcccatgtcctactggcttatgggtctgtagcgaaaccatcttttgataaacttttggtttgttatggtacggatattaatttgggcatttctcaagatggagttctcttgccaaatactcaaagcaccatgacaaataaaggccaatctgtgaaaaaacaagaaactgtcactgctctagaccgagccaatgctgaagatgctgtccttcctcttccaaagctccatacacaagaaaataaaaggaaacatggtgtaagaaaacccagtggtgatgtcaagcctgaggttcatagtgacctcaccagtcaccgctacaagatctattcataa

SEQ ID NO: 25577 - DNA, 744 bp, Zea mays
  Peptide Sequence Number=SeqID_67356
cgctgctgcctcgcccccgccgcgtcgtcgcgggtccccggcttcgcttgctgctgcgcttccagcgtcatggacgggggatccggcaatgcctccagcggcggagcggcggtgtgctgctactacgcgctcctcggcgtccgcaagagcgcctccgccaccgacatacgcaccgcgtaccggaggctcgcgatgaagtggcacccggaccggtgggccagcgatcccggcgcggccggcgaggccaagcggcggttccagcggatccaggaggcctactcagttttatcggacaaggggaagaaggccatgtacgacgccgggctcttcgatcccctcgacgacgacgaccaggatttctccgacttcatgcaggagatgctggtgatgatggataacgtgaaaaacgagaagccggacacgctagaggacctgcagaagatgctggcggacatcgtgaacggcgacggcggggacggcgtaggcgggcgcgtgccgccggcgccgccggacgttgctcggcgaacgcgcgtcgcgccccacccgcagccgcagcaggcgctggtcgattgtgtaagctaccggccgcgccgccgcaataactgtcggtcgtggccgggcgctgtcagctgcatggtgtaccgagtcgacagggcacgtggccctgtcagctgcatggtgtcactgggccgacgacggttccaattgcagctaccactacgaagtacgaacgcgcacttgtaa

SEQ ID NO: 25578 - DNA, 297 bp, Zea mays
  Peptide Sequence Number=SeqID_67357
atggcggattcaacgggaacgcggcgatctctccgagcaattcgcggcgccgcaacagacgcgactcgcctatatcgccgagccgcgggtccccctctcttccccttcccatttgcgctacacgcgacccgtgagatagagcaccgagaggcgaatttgggcgggattgaagtcgctgcggggttctgcttcctcgccggcgtccaacttctcgaggcagcaccagagggtggcgcctgggcggagggattgggtgcgggccttgggcggtgttggcgtctaccaggacgacgttaa

SEQ ID NO: 25579 - DNA, 204 bp, Zea mays
  Peptide Sequence Number=SeqID_67358
atgacgggagagaagcagatgttctcttcctacgtcaagaacaaggattcccacgacacgatcaacattggagatggtgtaacacctcaaaatttccattttgagatttatgaaaacttctccaaaaagatcaccgcaaagccgctcctcaacatcgacggcctcactgatgccctgaaccgaggtgagatattctccatgtag

SEQ ID NO: 25580 - DNA, 240 bp, Zea mays
  Peptide Sequence Number=SeqID_67359
atggcgctgcttctgggcttggcgctcgccttctgcctcaccgtcctctccatccagtcctccttctacgccgccctaggcaggaggctggatctggacgccgacgacgtgcgcgacctcgcggggttccagtcccgcgtccagcagtgtgtggtccatatggatagtccgactgatctcggtatctctgataggctgtcgttcattgctcaaaacttttgtgcccgttgttatctctga

SEQ ID NO: 25581 - DNA, 138 bp, Zea mays
  Peptide Sequence Number=SeqID_67360
atgaggtggccggcatccatgggacagagcctgtgcgtggtggcctggctttattctttgggtattgaccaggtcttggtttaccatgacttgttagggaagctgcaacactcacatcatgccaaggcaaatgtttaa

SEQ ID NO: 25582 - DNA, 165 bp, Zea mays
  Peptide Sequence Number=SeqID_67361
atgattcaaaacaacaaacatctgatctctattgtccctgacgatttcaacgacacagatcttaagcatcgaagggtagaggacatcgaccacggcgaggcacggttctgcggtggggatcctgcttcagcgagcaattccccgatgtcggatgcccctccgtag

SEQ ID NO: 25583 - DNA, 369 bp, Zea mays
  Peptide Sequence Number=SeqID_67362
atggcgaactcagtaatgggcgcaacgccggcgcgggggcaccagagggcgcagaacgcggcggggtggcctaacgccggcgcggggcaccagagggcacataacgcggcggggtggcctaacggcggcgcggatcaactccggcgagcaattacgtggacactagggcgactcaggggcgcttgggcgacgtcggggacgcggggaagcctcgggtcgacggtggcggactccggctgcacgaggaagactccgggcgttacatcagacagcccgaccgtgtcgagggacgccgatctgctaagcagggacgacattggtggtattttccctagatatgagttcatcgtcataccatataatggctag

SEQ ID NO: 25584 - DNA, 360 bp, Zea mays
  Peptide Sequence Number=SeqID_67363
atgaggggaagtcttatgttgggtgctggttttgatcattggggaacggaggcatctgttatggctcctataatctcgcttaggcattttggtacggccatcgtcccacggctttcgctgagggcggaggtgttggtttggaactctagatggtctctatgcgatggtcatttccaacattcgcacagtgaggaccctagggaaaagccgcgtattgagaccctgccagttcaccttggaagtgatcaatggggagtcgcgatccttgggcagaaagggaatcacggctcatgggtaaagtgtgcaacctctgcagagtgttatgaaactgatatattgagagcacctagaggggggtga

SEQ ID NO: 25585 - DNA, 906 bp, Zea mays
  Peptide Sequence Number=SeqID_67364
atgccgtcgcttcgagcggtgatggtgcacggcggcggcgaaaaggacggcggcggctccacggacggcgtgccgcccccgtgcgcgcataccctggtgagcctcctccgggcgcggtcgcagcgcagcgccaaggccgacgagaaggtggagtgggtgcggtcgcagctcgtcggcagcgacgcggagttcgagacgccgttcggccgccgcgcgctcctctacgccgaccacaccgcgtccggccgtagcctccgctacatcgaggactacatcgtcaagcacgtcctgccctttctacgggaacacgcacacggaggacagctacgtgggcagcaagacgacgcggatggcgaggaaggcggcgagctacatcaagcgagcctggccgacgtcgtgcaggtcggcgcgggcgccgacgacggcctcgtcgacctggccgcgctgcgccgcgcgctggggtcgcctgagtactctagccggcccatgctgggatccttctcggcgtgcagcaacgtcaccggcgtgctcaccgacacccgcgccatcgctcgcctcatgcaccagcacggcgccttcacctgcttcgacttcgccgccagcgggccctacgtggacatcgacatgcggtccggggagatggacggctacgacgcggtgttcctcagcccgcacaagttcgtcggcgggccgggcacgccggggatcctgctcatgaaccgggcgctctaccgcctcgccggcatgccgccgtccacctgcggcggcggcaccgtcgcctacgtcaacgggttcagcgaggaggtgaggccaaaaccgccgaattgggctagctcatacagtactgctactgtacttatttgtccatgcatgcaaattccaaattgggcgctgccaaccatttaa

SEQ ID NO: 25586 - DNA, 204 bp, Zea mays
  Peptide Sequence Number=SeqID_67365
atggggtccaggcacagtgcttgctctgccgaggctgggtgccgaggttctttcgttttgcttttgttagtcacccctcttcggggagaggtggtgatgaggatgatggtttttgattatgattatggtaatgataagtggtattctttccatttggaaaaggtaaagaagaatttcgtcgaggcggatctcaacgagttctag

SEQ ID NO: 25587 - DNA, 1101 bp, Zea mays
  Peptide Sequence Number=SeqID_67366
atggtgttcggcggcacacgtatcccccaattgcagatggtcggggttggagttcccagtggcggagttgaaccgcgaggtggaggtccaccacgaccaccgatgttagctcgttctagggacgattcggatccactagcagcttcgacgttcagatgcagtggccatctctctccatccatggatttccaggcggctgacaatgggtatttttccagcccgatggttgatgatactaatcttgaagatttggataataataacaatgcatacgctgaccagcaatcccaatcaatgcaagtcaatcgtgcagtcccctctacaagaccaaaccataaaagatcaaagaattttagtgaccatgaagatgaagttttggtttcagcgtggttgaatattagtttggatcctgtggtaggcaaggataaaaaaggtggaaggtattggtctcgtatctgtgattatttccatgaacacaagacttgttcatcaaagcgtaccataaattctcttaatgcaccggttgcagaggcatgtgctttatacaagtccgaggatgaacatcagaaatcatttcagttcatgcattgctggaataagctaagaacacaaccaaaatggctatgtaaaagaaatgaaatgtatgctgctaaaatcttgaacaagagacataagttaaattcaaatggtgatggtagtggatggattccaagtgaaataggagaaggtgaggttcaaggtgtagaggataatcaattgacaaggcctattggaaagaaacaatctaaagcaacactgctacaagagaagaagaaaagtgtgacaataacattggaaaatatgtggtcacaaaagcaagaaactgatatggagaaagagctcaaaaaagaggagaggttcagtaaagcctttgcacttgaacaagagcgagttgccaatgaaaaagaacttgtggaggtgaggaagcaggaggttcaattgcagaaacaaagagacgaagagaggattatgactatggatcttagtggattgacagaagagcaacagacttactacatgaagttgcgggctaagattttggaccaactttctgatgcttag

SEQ ID NO: 25588 - DNA, 473 bp, Zea mays
  Peptide Sequence Number=SeqID_67367
caccacctgccgctgaagagctgacagaggccggcaccgaggaacggaaacaatcgccaccgccacaccagacgccgggtgctgctcctgggccgaagactcctcccccgtggtcgtggcagccgccggtccctgtctcgcctccttctccggcgccggcgccgcctcatggtgcagaggaacagccgaagaagaggcagaagcaaccgcaaccgcaagagaccaacgccacgaaacgggcggaagagctaggcggtggagcgagaggcacgaaggtggtggacaaagccgctagggatgagaagcgacccaagaaggacagccaagctggggcatcgccagcggtgccgagtcacgctcagacgacggagaccgtgaggccggagccggcgcggcagctgctggtgaacgctgcggcggcggtggccgtgctcgctggggtcatcgcggccgtatggcgcaccttgcaatga

SEQ ID NO: 25589 - DNA, 948 bp, Zea mays
  Peptide Sequence Number=SeqID_67368
atggaccgggctttcacccaaggaagccagtgctggggagtgcgacgccctcaacaggggaagcgacgcccatggacatcaccgtcgccgaggctttcgtccaagaagtcccctagcacaaacatcaagccaagaccccgggacaacgcaggctacctccgccaacgtcgctgccctgacatcccgcccaaaccctcccagagggacatcgacatgcttgctaccgcaaaagttgtgttggatgccacccccaccggccgggcacacggaatcgggcaccaccttgcggcgagtgccccactgccacaggccagtgtcgctgcaccccctgacgacaactcggcggccgcgagcacacagcccctgcaacctctcccctcccgagccgccaggagcaccgtgcaagagggccgcaaaatcctcccaaagagccagccaaccggcaggccgatggcactgccgaccggcgctagcaccgaagctcacgccctgccccgtgacagcacgtgccacggcgcacagcggagcagccacgggtcgtgtaggacgcggacacctggcgggcgagcacgccaccgccgagagacacgcacacgccgccagcgggctagtccgccccgcccctgtccgccacctgcggcgtccacgtgggcgcacagcaccgccacggccaccaagaccatgtcccgagcgcggatccgggcgctcgcgacgccaacaagcggatgcctcgctgccaccgtcttaggggtccgcgcgagcatcccggtctgcctaggggtggatcttccaggtgcactcgatgatgctgccattacagagtcattagaactacacaaaattaagagccgccaatgggcgattttcaaaacatctgcaataaagggagaggggctcttcgaaggtttggactggctcagtaacacgctcaaatctggaagcagctaa

SEQ ID NO: 25590 - DNA, 234 bp, Zea mays
  Peptide Sequence Number=SeqID_67369
atggaggtagatctggggaagggaagtagagaagtgagctggcgcgcgcgagtaccgaaagacgagaacgacggctccgcgaccggggcgggggctggggagaaaaccggaagggcgatggtaccttcggacttggatcctttgaacttggatcaaaaccatagtgtgaagaagtacaaggaatatgaaggatggcgcagagccgaagctatacgcaggagagcttcgacatga

SEQ ID NO: 25591 - DNA, 390 bp, Zea mays
  Peptide Sequence Number=SeqID_67370
atgggcatcgtgtttacgcggctcttctcgtcggtcttcggtaaccgcgaggctcgcatcctcgtcctcggcctggacaatgctggcaagaccaccatactctatagactgcaaatgggagaggtcgtctccacgatcccgacaattggattcaacgttgagacggtgcagtacaacaacatcaagttccaagtatgggatcttggggaaatgcttctccagattgaagcagaggttcatattctctctgcggttcggaagtgcatggttgatgatgttggacaggtcaccactcctgtgccccatggcgtgctggtggatagccccaagcccccaataggctttgcttcatcggcatggcttcttggtggggcctatatgattacttga

SEQ ID NO: 25592 - DNA, 177 bp, Zea mays
  Peptide Sequence Number=SeqID_67371
atggcaagaaatattaaatcttggccaaataaggccaagggagaaagcgacaaagggacacaacttcaacagtctgaaggtgatgcaacagatgaaatggatgaggacaatgatgatgaatctggatctgctgaagttgcagatgcaggcttccatttggatgatgatttggtttag

SEQ ID NO: 25593 - DNA, 1641 bp, Zea mays
  Peptide Sequence Number=SeqID_67372
tatgacgttcttagattcgtcgcgctcgcgccgtccgcggccggcccggggctggccgtcgcggggaaggacctcggcctgttcaacacgtcggacaacgcgggcaacgggaccacgagcgaggtcgtcgccgtcgagctcgacacggcgctggacgtggagttcgacgacatcaacaacaaccacgtcggcgtcgacgtccacaccctcaggtctgttgcgtccaagcccgcggggtacgtcgacgctgccaccggcgggtccgtcgacgtcgccctggccagcgggaggctcctgcaggtgtggatcgagtacgacggcgcgaccacgcggctcgaagtgaccgtgtcgccggccggtgtcggcgtgcccaggccgcgcgtcccgctcgtgtcttgcgaggtcgacctctcgtcggcggtggccgaccagacgtacgtcgggttctcggccgcgaacggcgccgcctcgagctcgcactacgtcctaggctggagcttccgactcggcggcggccgcgcgccggacctcgacctgtccaagctgccgcggcccccgccgccgtctggggggcacaagaaggcgacggagctgccgctgctcctaacgctcatcatcatcgtcgtcgtggtgctcctcgtggacctgtacgccgcgaccaggggtttccgcgacgtcatcggtgtcggcggcttcggcgtagtgtaccgcggcgtgcacccgcggccgggcggcgtcgaggtggccgtcaagaaggtgtcccacgactcgcggcagggcctgcgggagttcgtctcggagatcgccagcatgagccggctgcgccaccgcaacctggtccagctcctaggctactgccggcggcggggcgagctgttgctcgtctatgactacatggtcaacggcagcctcgacaggcacctgttcggcgccggcaacgagccgactctgagctgggagcagcgcgccaagatcgtccgggacgtcgccgccgggctgctgtacctgcatgaggggtgggagcaggtggtggtgcaccgcgacatcaaggccagcaacgtcctcctcgacgccgacatgaacggcaggctcagcgacttcggtctcgcgcggctctacgaccacggcagcgagtcgcggacgacgcgcgtcatcgggacgctggggtacctcgcgccggagatgatcaagacgggcaaggccacgcccagcgccgacgtggcctgcggccggaggcccatggagtcactcggcaacaatggcgaccccgcggggcttgtcgacagcgtccttgagcgctggaagaccgggaggatcaaagacgccagggaccctaggatcggcatgtgcgacgaggacgatctcgagctggtcctcaagctcggtttgctgtgctcgcacccggaccctcgctgccgcccaagcatgaggcaggtggtgcagatactggaaggcgctgcgtcgttgccgtcgacgccgccggaagatctaggcggcgctggcggcaggatatttggacactacgagacgttcgatgaattcgtcaacgtgttcccgacgacgttcgatatcaccaccgtcacgacgccgtcaccttgttcgccttccagcgccgaccgccagcagctaatctccgcctga

SEQ ID NO: 25594 - DNA, 357 bp, Zea mays
  Peptide Sequence Number=SeqID_67373
atgtccggtgcaccagaggactccaacgcaaactcaccaccttcgggaatttccagaggccactccgctataattcaccggactgtccggtgtacaccggacagtgtccggtgctccaagggagaggggcctcaggaactcgccagcttcgggaatctccaacggctagtccactataattcaccggactgtccggtgcaaccccggggcaacggctattcggcgccaacggctatgggcgcagaagtcaggcgcgcccatactggcgcaccggacaatgaacaggagatgtccggtgtgcaccggacatccagaagggcccacaagtcagaagctccaacggccttcgttccttag

SEQ ID NO: 25595 - DNA, 210 bp, Zea mays
  Peptide Sequence Number=SeqID_67374
atggacccgaacctcggcgtcatcatcattggcgccgaggtaacgcacaacgacgccagtaccattggcgcccctatgcgttacctcgacgccaataatgatggcgccgagcaggatgaagagtcccaagattcttatggctcccttctctttgttttgaagaaatacgggcagggcatctcagggcactgtcatccatatcatgcctaa

SEQ ID NO: 25596 - DNA, 546 bp, Zea mays
  Peptide Sequence Number=SeqID_67375
atgtcaacagccaagacacgggcagttgctgtctcaattaagcggaccatctcgtttgtaactgttcttagttcaagtagcccctgtatcttcttcataacatcagatggtcagttatggttagtgggactgattgcaatatcacatggtactcatagcttaaattctacacaggtcttgaaaccagctacaaagcagaagttgcgttttgagggagattcgtacaagaaggcattggcggagttcctgcaggctgtgccagcgtttctgggcggtaaatgcagctgcctgcgatgtgagagtcctcgtgatgattcagtgatacaggcaggggaagggagcaagaagcagccccgcttggtcagcgttgatgacgggtcacctgtcacagacttggacttcgacttggatgaagaagagatcccatcaccttatagctgcgataacgccatcagggctgtgataatcgacctgctgatggtgtgcatcttcgtcgcgtttctggctgggatgatcgaccctgcatccgttccagccaatgcctga

SEQ ID NO: 25597 - DNA, 162 bp, Zea mays
  Peptide Sequence Number=SeqID_67376
atggtcacaaggaggcggtgcgatacatgtaggcggccccgtggagacgttgtccctgccgtggaggtcgtcctcgcgacccagcagccgccagcccaacccagatctctactgcaacgtcatcctaggccatggagggggtttcatcggctcaagaaatag

SEQ ID NO: 25598 - DNA, 135 bp, Zea mays
  Peptide Sequence Number=SeqID_67377
atggcgcatggtcgtcttccttctcgcaggaacctagatcttgccctcgaggggagagatcttaggatgctccggggtcgacaagccacctgggacatccctagacgacggttttaccctacagttgtatattga

SEQ ID NO: 25599 - DNA, 927 bp, Zea mays
  Peptide Sequence Number=SeqID_67378
atgaacaagatcaaaggcctgagtagccctggatgtggaagtggaaaaaggaagatgagagtgacggtcgagctggcaggcatggcagagatgcccagaggaaccccgactacaagagatattggagcgactggagagctgggacatcatgtcaggtccaggccacaaagctgccccgacaagctggtcgtcgtggagaaggacgttcacatgcacgggacctgggacaggagccgcgacggaggtaggagttccctgaggcgaaaccagaggggcagaggatggtgggaccccatagaaggatgtcagggggttgggaaggagagcgcagccggctggggaaaggccgacatgcgcgccaacggggagaagggtgctcggggggccagcggcagcgacgtgctggtggggaagacggcggtagctgctcgcgagtgtccagcactggcttccagcacaaacaggcggacgacgacgcaggtaggcacaggccagccggagagagcaaccgagtgggggaggacgagcccggctggccggacggcggcgcagggtggcacgggccggccggggagagcagctaagcgggggaaggcaggagaggacgccggccagcagtttgtcgagctcctcctcgtggcggatggccaggagcacgaggaggcgagacgaacgcgggaggggcgcgataggccccgccgggagagctgtcgcggccctagtggcaggcgtcagctgggacggaggagcagcaggcgcgaccctactggtggctcggagagcacccaggcgcggacgttgacgtcagccgctgagggcttcagtggtggcggcgcggagtgcacccaggcgcggacgaagcaggcgtggccctgctggcggagcagcatgaggccgacgggaggcaggggcgccgacggctggaag

SEQ ID NO: 25600 - DNA, 1182 bp, Zea mays
  Peptide Sequence Number=SeqID_67379
atggcagctgtacctttggctgttacaatgaataaaaaagagcatgtgattgatatggaaaaggctgataattttgttgaggaccaactgcatcctccgcagccgatggcactgcggactgaaaaagtcactgtcaatcccagtgtacgtacaagaaggggaagagtaccttcagttgaaaaggtggaatcgacgactactgtcaagtccttttccattgcatcccttcaacaatataccaatagtttcagtgaggaaaatatcataagagacagcaggtttggtaaggtgtatctggcaaagcttcctgatggagagctactggaaattttgaagattgactcttctaactcaaaagtgccagtagatgcctttcttgagctagttgtgaggatttctgaactgaggcatcctaacatacttggtcttgttggatactgtgcggagtttgagcagcgattacttgtctatgagtactgtagcaagatgaccctacatgatgaacttcgtcatgtggatgactcaagcaagccattatcgtggaatgctcgcctccaagttgcttcagaggcagcaaaagcattgcaacatcttcatgacggttgccaaccaccagttgtacaccagaattttgaaccctctgttgttctgctcaacagcaccttagttgtgcatatttctgaatgtggccttgcatcactagcatcaaaatcagtttctcagttgtctggacacaccttattccattatgaagcacctgaagtgcatgaatctggatcagtaagcgatcgaagtgatgtttacagcttcggtgtagttatgttggagcttctaacaggacgtaaaccttatgacagttcgtatccacgagctgaacaacatctagtacgatgggccacttctcaactctatgatattgatgccataacgaagatggttgatccttccattcgaggacaatgttctgataaggcattatcccgttttgctgacattattagccgctgcattcagcatgaaccagaattcaggccaccaatgtctgaagttgtccaagacttaactcgcatgatgcctttgacgaccattgatgcggtagtaggatattttggccaatgcaaaatgggtggaacacagtggcaggatgcagagactgcaccacgttttgtccactgccagtaa

SEQ ID NO: 25601 - DNA, 1683 bp, Zea mays
  Peptide Sequence Number=SeqID_67380
atgttgaaacgactcaaggaaaaacttattgcttatgaccatttagaaggcgatcctggtttagaaggtggtaaaaactccccaatatttacagacatcttgaacatggtatgtggttgcgttgataacacatcctctgacagtactgttctccaagtcttgaaagtgcttctcaatgctgttgcttcaaataggtttagagttcatggagagccattgcttggggtcattagagtatgctataacattgctcttaatagcaagagccctgtgaaccaggctacctcaaaggctatgttaacccagatgatcagcattgtattcaggagaatggaatctgagcaggtttctgtattgcctgcaagctctgtggttaaagatacaccttcatctatcacaaatgaatctgaaaatggagaaatatctaccgatggccaagatgaggaaaaagttactccgggagatgcattgtctatgaatcggccttctgaagcacctccaacatctgttgaagagcttcagaatcttgctggtggagcagatattaaggtattgcattggttccatctaattacaagagatcttttacaggggctggaagctgttctagacaaggctgttgaacttgaagatgggaagaaagtgtcacgtggaattgacctggacactgtgaacataatacagcgggatgcactattgctctttcgaactctttgcaagatgagcatgaaagaagaaagtgatgaagttgctaccaagacaaggctgctatcacttgaaactgctccagttctgttgctccgttttagagagagtctgaagggggaaattggtgtcttctttcctctgatagttttaaggtctttggatagctctgatagctccctcagccagaaggctagtgttcttaggatgttggagaaagtttgcaaagatccccaaatgcttgcagatgtgtttgtgaactatgactgtgatcttgagggaccaaatctttttgaacgcacggttagtgcactctcaagaatagcacaagggtctcaaattgctgatactaactccattgtgtcatcccagacagtttctgtaaaaggctcgtctctccagtgtttggtgagtattctgaagtcattggctgtttgggagcaacttcgaagatattccttaaagcaagggagcattgttgaatctcatgaaggggatgcttcaaggagcgtgacaactgatgagatgaagagccaagaggatgttcggaatcagtttgagagagccaaagctcataagtcgacactggaggctgcaatctcagagtttaatcgtaaaccaactaaagggattgaatatttgttgtcaaataaattgatagaaaataaggcatcatctgtagctcagtttctcaagagcaacccgggcctggataaggttatgattggtgagtacttgggacagcatgaggagttccctcttgctgtgatgcatgcctatgttgactccatgaagttttcaggattgaagtttgatgctgcaattcgtgagttcctgaaaggatttcgccttcccggtgaggcacagaagatagatcgcataatggaaaagtttgctgagcggtactgtgctgataatcctgagcttttcaaaaatgcagatactgcttatgttcttgcttatgctgttataatgtga

SEQ ID NO: 25602 - DNA, 231 bp, Zea mays
  Peptide Sequence Number=SeqID_67381
atgggcaacccggggcgctcgcggcagttgtcagcgctggttgcttccgccgccatcttgctgtcactgtccgcgttgccaatttgtcggccctacacctacgagcaagatgtgtttgcgataaacggcttgtacacggcacttggagcaccacagctgcctaattggacttcaaatggtggtgacccctgcaatgaaggctggcaaggtcactcaatagcaatcatttga

SEQ ID NO: 25603 - DNA, 189 bp, Zea mays
  Peptide Sequence Number=SeqID_67382
atggcggaggagaaccagagcaggataaatgatcttatccatggatggggcatcgattacaagtttgggtattgtgctcagggtgacaggacaaagaacattggcgtagttgatagtgaatttatagttcaccgaggagtgcagacattaggaggttctacaataacaaagggttgggagatgtattaa

SEQ ID NO: 25604 - DNA, 111 bp, Zea mays
  Peptide Sequence Number=SeqID_67383
atggcgactcctctttgccgtcttgcgaaggagaggatgaggcgggtatatgatcctaagcgttcatttattcgatggatggctggatgcaaagatcatcgtgtctcataa

SEQ ID NO: 25605 - DNA, 1104 bp, Zea mays
  Peptide Sequence Number=SeqID_67384
atggtgttcacgccgctgctggcgtccacgtgcgtcggcacgctcgagttccgctccgtcgtcgagcccgtcagccgcatccagtcggcgctcgccacccgccccggctcctacttcttcctcgcctcctgcaccggcgtcgacaccaaggcgcacgaggtgtactgcgaggccgcgtccagcgacggacagctgccctgccacccgtaccggttcaaggtcgcctacgacaagctggtgatcgcgagcggcgccgagccgctcaccttcaacatcaagggtgtccaggagcatgccatcttcctccgcgaggtgagccacgcgcaggagatccgcaggaagctgctcgctaatctcatgctggccgagaatccaggcttgtctgcggaagagaaggagcggctcctgcactgcgtggtggtcggcggaggacccaccggcgtcgagttcagcggcgagctcagcgacttcatcacacgcgacgtgcgccagaggtacgcgcacgtcaaggactacgtcaagatcaccctcatcgagtatggagttaatctggtgcgaggcattgtgaaggaggtgaaggccacggagatcaccctgagcgatggcacccgcgtgccctacggcctgctggtctggtccacgggcgtcggcccgtcggagttcgtcaggtccctgcaccttcccaagtccccaggcgggagggtcggcgtggacgagtggctccgcgtgcccacggcgccggacgtgttcgcgctgggcgactgcgcgggtttcctggaggggaccggcaagccggtgctcccggcgttggcccaggtcgcggagcgggagggccggtacctggcgcggctgctcgggaggatcgcggcgcagaacggcggcaaggcgcactgcgccggcaaggccgacctcggggagccgttcgtgtacaagcacatcggcagcatggcgtccgtcggccggtacaaggcgctcgtcgacctcagggagaacaaggcactgccgctgagcccttcaatctcccctctgactcaccagtgcaacgcaaaatgtggcatgagattagtgccgagatttgacaagtcggttctcatgaagtcatga

SEQ ID NO: 25606 - DNA, 2208 bp, Zea mays
  Peptide Sequence Number=SeqID_67385
atgcgggcgcgatgtaccagcggtggcatgaaccatgtgttcggcgaacacatcggccgcacggtcgaggcctacgtcgatgacatcgtagtcaagacgaggaaagcctccgacctcctttccgaccttgaagtaacattccgatgtctcaaggcgaagggcgtcaagctcaatcccgaaaagtgtgttttcggggtgccccgaggcatgctcttggggttcatcgtctccgagcggggcatcgaagccaacccggagaagatcgcagctatcaccagcatggggcccatcaaggacttgaaaggcgtacagagggtcatgggatgcctcgcggctctgagccgcttcatctcacgcctcggcgaaagaggtctacctctgtaccgcctcttaaggaaggccgagtgcttcacttggacccctgaggctgaggaagccctcgggaacctgaaggcgctcctcacgaaggcgcctatcttggtacccccagctgccggagaagccctcttggtctacgtcgccgcgaccactcaggtggttagcgccgcgattgtggtcgagaggcaagaagaggggcatgcattgcccgttcagaggccagtttacttcgtcagcaaggtactgtccgaaaccaagatccgctacccacaagttcagaagctgctgtacacggtgatcctaacgcggcggaagctgcgacactacttcgagtctcacccggtaactgtggtgtcatccttccccctgggggagatcatccagtgccgggaggcctcgggtaggattgcaaagtgggcggtggaaatcatgggcgagacgatctcgttcgctcctcggaaggccatcaagtcccaggtcttggcggacttcatagctgaatgggtcgacacccagctaccgacagctccgatccagccggagctctggaccatgttcttcgacgggtcgctgatgaagacaagagccggcgcaggcctactcttcatctcgcccctcgggaagcacctacgctacgtgctacgcctccatttcccggcgtccaacaatgtggccgagtatgaggctctggtcaacgggttgcggatcgccatcgagctaggggtccgatgcctcgacgctcgcggtgactcgcagctcgtcatcgaccaagtcatgaagaactcccactgccacgacctgaagatggaggcctactgcgatgaggttcggtgcctggaagacaagttctacgggctcgagctcaaccacatcgcccggcgctacaacgagactgcggacgagctggctaaaatagcctcggggcaaacgacggttcccccggacgtcttctcccgggatctgcatcaaccctccgtcaagatcgacgacacgcccgagcccgaggcgccctcggcccagcccgaggcaccctcagcccagcccgagggaccctcggctcagttcgaggcaccctcggctcggcccgaggcatcctcggttcagcccgagaaggcacccgggggctacacgcacctgctggtcgccatcgacaaattctccaagtggattgaggtccggcccctaaacagcatcagaaagttcttggacttctgcgaggatcatcacatccgggtggactgggccgccgtggctcatcccatgtcaaatgggcaagtagagcgtgccaacggcatgattctacaagggctcaagcctcggatctacaacgacctcaacaagttcggcaagcgatggatgaaggaactcccctcggtggtctggagtctgaggacaacgccaagccgagccacgggcttcacgccgttcttcctagtctacggggccgaggccgtcttgcccacagacctggaatacggctccccaaggacgatggcctacaccgaccaaagcaaccaagctagccgagaagactcgctggaccagctggaggaggctcaggataaggccttactacactcggcgcgataccagcagtccctgcgacgctaccacgcccgaggggtccggtcccgagacctccaggtgggcgacctggtgcttcggctgcgacaagacgcccgagggcggcacaagctcacgcctccctgggaggggccgttcgtcatcgccaaagttctgaagcccggaacatacaagctggccaacagtcaaggcgaggtctacaacaacgcttggaacatccaacagctacgtcgcttctacccttaa

SEQ ID NO: 25607 - DNA, 486 bp, Zea mays
  Peptide Sequence Number=SeqID_67386
atggccgttggccggcggctggaggagaggagcggccgggctaccaggccagtgcttcactttgtggtgctctttggtggctctcttcttgcataccgcgttgcagattttctaggaaggagaaaagaattgatcaccgctgctgcattatatatttttggtgccttagtctctggagttgcccctgattatttttctctactcagaggtcgttccctgtatgggattggtattggtttgtgcggataccttgtaggaagtcttgaaattgacaatgtaagaggatggcggtacatgtttggtcttagcgctccgcttgcagctgttatggctattggtatgtggactttactatcttcaccaagatggctacttctcagggcagttcaaggaaatgcttctgttgacgccttttcggagcgccaaacactcaacaagaaccggcggcggtgctctctggtcaggcgcggacggtccgcggcatag

SEQ ID NO: 25608 - DNA, 645 bp, Zea mays
  Peptide Sequence Number=SeqID_67387
atgcgaggtcgtttcccaagggtgaggttcttcttgtcccttcttggggctcccttgaatcggggtactggcggtcgcaaaggccaaacttggggcatcttcaacgcgaaccctgagaaggaagaacttggggtgcctgccgcgtcgcccttgttcatgcaagcagtgggagtcgtcaccagttttccccctgagaaggttgctgccaaacttgacttctttaagaggactcttggttgttctgagtctgaggtttcgaatgcagtgtccaagatgccacaaatactagcattgtctgaggcgactcttcttcgcaagatcgagttcctggtcaatgagggggcgatagagccacagtatattatgcaaaggcctatcctgctcgcattcagcttggagaagcggctagtgccccggtatcgtgtcatcaaagtgctgcagggaaagggattgctgaatagcaacatgagcctttcctcattagcttctcttgcagaagaaaccttcaagtccaagttcgtcgactgccacaaggactgtgttcctggccttgcagatgcttatgctgcagcttgtgctagtattgtgccctcgacagtgtggatgctcattggctgctgtccactctgcaattttgatttctga

SEQ ID NO: 25609 - DNA, 1402 bp, Zea mays
  Peptide Sequence Number=SeqID_67388
gccgcgcgtcccgctcgtgtcttgcgaggtcgacctctcgtcggcggagaccgaccagacgtacgtcgggttctcggccgcgaacggcgccgcctcgagctcgcactacgtcctaggctggagcttccgactcggcggcggccgcgcgccggacctcgacctgtccaagctgccgcggcccccgccgccgtctggggggcacaagaaggcgacggagctgccgctgctcctaacgctcatcatcctcgtcgtcgtggtgctcctcgtggtgtcagctgccgtcacagtactcgtggtctggcgccgtcggaggttcaccgaggagcaggaggactgggaggtcgagtacggccctcaccgggtcagctacaaggacctgtacgccgcgaccaggggtttccgcgacgtcatcggtgtcggcggcttcggcgtagtgtaccgcggcgtgcacccgcggccgggcggcgtcgaggtggccgtcaagaaggtgtcccacgactcgcggcagggcctgcgggagttcgtctcggagatcgccagcatgagccggctgcgccaccgcaacctggtccagctcctaggctactgccggcggcggggcgagctgttgctcgtctatgactacatggtcaacggcagcctcgacaggcacctgttcggcgccggcaacgagccgactctgagctgggagcagcgcgccaagatcgtccgggacgtcgccgccgggctgctgtacctgcatgaggggtgggagcaggtggtggtgcaccgcgacatcaaggccagcaacgtcctcctcgacgccgacatgaacggcaggctcagcgacttcggtctcgcgcggctctacgaccacggcagcgagtcgcggacgacgcgcgtcatcgggacgctggggtacctcgcgccggagatgatcaagacgggcaaggccacgcccagcgccgacgtgttcgccttcggcgccttcctgctcgaggtggcctgcggccggaggcccatggagtcactcggcaacaatggcgaccccgcggggcttgtcgacagcgtccttgagcgctggaagaccgggaggatcaaagacgccagggaccctaggatcggcatgtgcgacgaggacgatctcgagctggtcctcaagctcggtttgctgtgctcgcacccggaccctcgctgccgcccaagcatgaggcaggtggtgcagatactggaaggcgctgcgtcgttgccgtcgacgccgccggaagatctaggcggcgctggcggcaggatatttggacactacgagacgttcgatgaattcgtcaacgtgttcccgacgacgttcgatatcaccaccgtcacgacgccgtcaccttgttcgccttccagcgccgaccgccagcagctaatctccgcctga

SEQ ID NO: 25610 - DNA, 189 bp, Zea mays
  Peptide Sequence Number=SeqID_67389
atggtcattcaaggcaaggacccatatgatgaggaaatgagacgcagacatcagttgtcacacctcgcgatgccgtactcaggggttggaggtccggagctgaccatgctgggtagaacaacatttgatctatacggaggacaccatatggatatccatatgagtatagaggagggtgtggataagtaa

SEQ ID NO: 25611 - DNA, 2049 bp, Zea mays
  Peptide Sequence Number=SeqID_67390
atgccagcggccgctctcgccgtgcgggtggccgccgtcctgctcctcctcgcccgaggcggatccggatcggcgcccggggagttcgtgctcagtggcttcgcgagcggcaacgtcacgaccagcggcgcggccgtcgtcacctcctccggcctcctgcagctcaccaacgcgaccaacgaggtgttcgggcacggcttctaccccgtgccgctccgcttcaaggacgcctcctccacgccgcgctccttctccaccaccttcgtgttcgccatggtgccgcggcacgacgacgcgcacggccacgggatcgccttcgcgctggcgccgtcgccgaccgtgcccggcgcggtggccgggaagaacctcggcctgttcaacacgtccgacgacacggggaaggccaggagcggggtcgtcgccgtcgagctcgacacggccaaggacgaggagtttagcgacatcaacgacaaccacgtcggcatcgacgtcaacagcctggtgtccgtgagctcagcgccggcggcgtacgtcgacgccggcagcctagtcaacatcagcctggtcagcggggagcccctgcaggcgtgggtcgagtacgacggcgcgagcatgcgcctggaggtgacggtggcgccggcgcgcaagcccaggccggctgtcccgctcgtgtcttccatcgtcaacctctcgtcggccgtggccgacgacacgtacgtcgggttcacggcggcgaacggcgcggcctccacctctcactacgttcttggctggagtttccgcctaggcgacggacgcgcgacggacctcgacgcctcgaagctgccgccggtcccatcgtccaagaagaagacgtcgcggctaaacttggtcacgctgtccctcgttgtcgtcgtggcactcctcttagcgtcggtggcagtcgcagctctcgtggtcaggcaccggcggttcgccgaggagcaagaggactgggagatacagtacgggcctcaccggatcagctacaaggacctgcacgcggccacgagggggttccgcgacgccatcggccaaggcggcttcggccgcgtgtaccacggcgtgctacagcggccggtgaacgccgaggttgccgtcaagaaggtgtcccacgactcccggcaagggctgcgcgagttcgtgtccgagatcgcgagcatgagccggctgcgccaccgcaacctggtgcagctcctcgggtactgccggcggcggggcgagctggtactcgtctacgactacatggtcaacggcagcctcgacaggcacctgttcgacgccggcaagccggcgctgagctgggagcagcgcggcaagatcgtccgcgacgtcgccgccgggctgctgtacctgcacgagggatgggagcaggtggtggtgcaccgcgacatcaagtccgccaacgtgctcctcgacgccgacatgaacggcaagctcagcgacttcggcctcgcgcggctgtacgaccacggcagcaacccgcagacgacgcacgtcatcgggacgctggggtacctcgcgccggagatgagcaagacggggaaggccaccacaagcaccgacgtgttcgcgttcggcgccttcctgctcgaggtggcgtgcgggcggcggcccatggagcgcgacgacgaccttgattcgcccgggctcgtcgacctcgtcctcgagtgctggaaggccgggaggatcgtggaagccagggacaaaaggatcggcaagtgcgacgaggccgacgtcgagctggtgctcaaactcggcctgctctgttcgcaccctgacccccggtgccggccgagcatgaggcaggcggtgcagatgctggaaggcgcagcgccggtgccagagacaccgcccaaagatctagccagcaacagcaggttgttctacggatacagcgagtctttcgacgagttcgccaccatgttcccggcgacgtcggaggtcaccagcgtcaccacgcagccgtcttcctcacactccaccggcgaggggcagcaggtctcctccgaacaaatcaccaacgtatag

SEQ ID NO: 25612 - DNA, 2130 bp, Zea mays
  Peptide Sequence Number=SeqID_67391
atggagagggacgcggttctggaggacgcggcggcgggggatggggaggagcaggaccaggaccaggaagaggtggtggtgccgatcggagcgcagaagcacgatccggcgtggaagcactgcgtcatggtgcgctccgacggccggatgcgcctcaatgtgccccgcgacgtgcaggacaccatgctccgcagcctcgccgccgtcgctgccaagaagatgcagcgcaagctcgccgccgccagcacgacgcccgcctctgtctctacggctagcgggggtaccggcagccccatccacatgatctcgctcaacgaggtgctcgacttcgaggccgtgccgctcgaggagcagaggcctccggttccggagggcagcattagggggagtaccagcggtaagaagaagaggaagcaggtgacctacgcccctgctccgccacttataccccagatccggccgcagcatgttcggtctacccctcagaacaatcttcttcacgggctgcagcatgttccgcctactcctcagaccaaccctcttcatcaggttgtcatggcagtgaacgcagtgacaccagcagagcatttcgaacatgctgccccctcggagaaggagcatgtttccgtggcagttgggaggttcttgtatgacgccggtgtgccattggaagcggtgaactcggtctacttccaaccgatgctcgaggccattgcggcggcaggggggaggcctgagacgctctcgtaccatgactttcgcggtcacattcttaagaggtcactcgacgacgtgacggctcgcttggagttcttcagggggtcatggaccaggacgggctgctcggtgttggctgacgagtggatcactgataaaggcagaaccttgataaacttctccgtgtattgcccggaaggtactatgttcctcaagtcggtggatgcaaccagcatcgtcacatcttcagatgcactgtacgagctactaaaaagtgcagtcgaggaaattggcgagaaaaaagttgtccaggttatcacaaacaattctgaggtccatgcagctgccggaaaaaagctaggtgaaacattccccacattgttctggtctccatgcactttccagtgtgttgatggcatgctcgaagatttcagtaaggtggaggcaattagtgagataataagtaatgcaaaggccattacgggatttgtctacaacagcgcatatgcgttgaatctgatgaagaagtatctgcaagggaaggatctgctggttcctgcggagactcgtgcggctatgaactttgtgacgttgaagaatatgtacggtttgagggaggctttgcaagctatggtcaactcggatgaatggatagacttgttgccaaagaaaggagggattgaagcaagcaatcttgttaataatttgcagttttggaactcctgtgctgccgtcgttcacatcactgagcaacttgtgcaccttcttaagctagtcggtaaccccaagaggccttctatgggttatgtatatgctggactgtacaaggcaaaagcagcaatcaaaaaagagctggtgagtaagaacgattacatggtttactggaatattatcgactggaggtgggacaaccagacaccacagccacttcattcagctggtttcttcctgaaccctctattttttgatggaattcgaggtgacatatcaaatggaatattctcaggaatgctagactgcatagaaaggctgaaattggaaacttgtaagcctattgcatcctttgatcgcggtaatcataaggatatctttggcctggtaacaaagcatgaatggattaaccgattgagtgatatttttgatagacaacaacacaaggcgaaagcgtttgatcctctctctgtggactacatagacgtagtcgatgattgggctgtggatagacctgcaatgttctctggcccagctgagcagccaaactggatggagattaatcaatcaggcaaccgaatgacatcaagggaaccaactgaagatgaattcgaatccttcattgaaggagttgatgacgaaatgatccaaggtgctgcacagggcttccatgaagatggtgatgatcctgcttgtggctga

SEQ ID NO: 25613 - DNA, 120 bp, Zea mays
  Peptide Sequence Number=SeqID_67392
atggcaaattacggcctgttgagacggaaatgggccggtgacgtgtacattaagtacgtggaggacaagaccattgcccattttgctggtggcaaaaatgccccaacgttcttcggctaa

SEQ ID NO: 25614 - DNA, 480 bp, Zea mays
  Peptide Sequence Number=SeqID_67393
atggcccataaatgcacagcgcggacccccctgtatctccctaccgtgagttctaccctactcgtgctcgaggacaccatcgccggccaccacagcaaagtgaggggagctcgggttccgccgtgggagattgtgcactcaccggtttacgccgcggactcgttcgccgccgtggtcagagcttcaccgcaagcgattcgtggtaagcactccttccccagcttcacgtatgtctccactttgtatatctacctcgggggaaccttttgggctcggaatcaagggttggctgtgtccggtgatgccgccgccgtggagaccttggttgccgcgcgcgccgctgtcttcggaccgtggaaggcgatggcctcctggccgttggatcgaccactagcgggcaggattatagcagaggtaggaggcgcgccctatctgttgatctggtcaccaacggttgtgatcgtgcgctggtttatatga

SEQ ID NO: 25615 - DNA, 438 bp, Zea mays
  Peptide Sequence Number=SeqID_67394
atgtggaggcttaaaggcatggtcagatcagaccagcaacggatcgacctttgcttccgtgcagatggagcagatgctactgcagcagtattaattccccaccttaacaaccttgtgcaacagaccatgtttcagcaggatgtaatcatgaacctacttagtaacttgcaacaggatgagaaagttgatagaacacagcctggaatatcttctcaagtccgaacgatggagaatggtaaagtggctgatacagctaactctgagaaggaacggtcattacttgttaaaatttcagaattacagtctaggatgataacactgactgatgaactaattgcagctaagacaaaacatgttcagttgcagcaagagctaaatgctttgtactaccgagaagaaattgaggatgttagggatgaggatatcgaagaaacatag

SEQ ID NO: 25616 - DNA, 1809 bp, Zea mays
  Peptide Sequence Number=SeqID_67395
atggggaggaacggtagcgtgaggcgctcggcgttttcgggcgccgcgggtgctgccgcggggccgccgtccttctctgtgaatcccgccgactaccggttgatggaggaggtggggtacggtgcgcacgccgtcgtgtaccgcgcgatcttcctcccgactaagggtgttgtcgcggtcaagtgcctggatctcgatcagctcaataacaacatcgatgaaatacaaagggaggctcaaataatgagcttgatagaccatcctaatgtcatcagggcttactgctcatttgttgtggagcacagcctctgggtgataatgccattcatgacagagggttcttgtttacacttaatgaagatctcataccaggaaggttttgatgagccgatcattggctccattctcaaggaaactcttaaggctctggattaccttcaccggcagggtcaaatacatcgtgatgtcaaggctggtaatatccttatcgatggtgctggggtagtgaagcttggagactttggtgtttctgcttgtatgtttgatagaggtgataggcaaagatctaggaatacatttgtaggaacaccatgctggatggctccagaagtgctccaacctggcactggatataatttcaaagctgacatatggtcatttggaatcactgctcttgaactagcacatggccatgctccattttctaaataccctcctatgaaggttcttctcatgaccctccagaatgcaccacctggtcttgattatgaacgtgacaaaagattctcaaagtcatttaaagaaatggttgcaatgtgcttggtcaaagatcaaacaaagagaccaacagctgagaagttgcttaagcattcatttttcaaaaatgcaaagcctccagagttgactattaagagtatcttatctggtttacctcctctctgggaccgtgtaaaggctctccagcttaaagatgaagcacaattggctttgaagaaaatgccttcttctgaacaggaggccctctccctgattcatgatgacgagcctcctgaaataaaagaagatgaggacattgcaagaaacattgaggttgaaaaggttgaagcaaaatgcaatggaatatctgtatgtaactgtcaccttttggcccttcaacaggacttgtcttcacggaaccatttgggaaagtcatttgcaaatgagtgcaattccaggcagcgagcttttgtcaccactttaaaatcggatggaaacagacccaccacgaatgaagcttttgattttgattttgattttagcgaggctgccactacaagaagggctgatggacatgaaagaaacataagagagaatgattcattgccctctacagcaaagcgagatccagagtcgaatcattggacaagtgacgttgggcagagacaactgtcttctggtgggagcaatagctcaacagctgaaaggggctatggttttgagagggatgcagttgtgcaaacaatacctgaaaaacaaagaagtgaggcgagaaaaacagcaagccttagtggtccactttcactgccaactcgtgcttctgcaaatagtctgtcagctcctattcgatcttcaggaggttttgtagattcatcaggtgacaagtccaaacgaagtgtagtagagattaaaggccgcttttcagtgacatctgagaatgtcgatcttgcaaaggttcaggaaggtccacttagtagcctctcacggaaatcaccagaggtgaggttgctgccatttagatcacagttcccattcacaagggttcactgctaa

SEQ ID NO: 25617 - DNA, 153 bp, Zea mays
  Peptide Sequence Number=SeqID_67396
atgctggtggcgggaaggcacagttgcggcacggagcagcggaaggcacagcagaaggcacagagctgcacggcacagttgcggcagaaggctggggagtgctggcggcgcaaggcggaaggaaggagcggtgctggcggcagacacaggtga

SEQ ID NO: 25618 - DNA, 282 bp, Zea mays
  Peptide Sequence Number=SeqID_67397
atggagcgaagcccgcccacctcgggggctcgccgcctcggggatgggggccacggcgagggtaaccacaccgtcggtgtcaacccccttcgcacaagtcatggcaataggaacatgcaaagacttcagatatcaagaccgatagcggtgaaggaccggttgaaccgcccctatgaccggttcaaccgcctggggcaggctgacagtcactatgccagtcagactggcagactgcagctgcagctaaagaagctcagctcagctgaagttcagctcagctga

SEQ ID NO: 25619 - DNA, 263 bp, Zea mays
  Peptide Sequence Number=SeqID_67398
atgcagcgcccacgcgccggcctccctgtcgtgctgcgccatgtctgccactcctccacagtcgtccacggccaaggcggttgcggctgccgctgggactcgccgactcctctgtctcggccaccctcacccgcgctcagcaggatgaagttgacgtccgccaagccaaggaaaaaggccagcgccgctgccctggagcgccagcaagcctacgacgcagctcttgcccgcctcgccaggcagaagaggaggcccgcgctgct

SEQ ID NO: 25620 - DNA, 258 bp, Zea mays
  Peptide Sequence Number=SeqID_67399
atgtggtggtgccatcgccattggtcacagacggtttgtcttcctcggggtcagggggtagatcgtctggaccaggagcgcgtatcgctcacacgcggcaaaaaggtggcaatggctaggaattggttggtggctataaatacaacccaaccacatccatttaatacatccaaggattccattcatacacattcgatacaagagcaagaactccactcaaagacacactcaaaactccaaagatcctccaagtgttag

SEQ ID NO: 25621 - DNA, 147 bp, Zea mays
  Peptide Sequence Number=SeqID_67400
atgccgccaatgccggaaatctcgcgggtggcccaacaaaacatcgcagatctcgcggctggctccgagtcggactttggccgctaccctgggtataaaactcgtgcggccccctctcgacatctatctcaacgaatcaagctattg

SEQ ID NO: 25622 - DNA, 189 bp, Zea mays
  Peptide Sequence Number=SeqID_67401
atggcgctgatggaatctattcgtcttctgatggcactcttggagatggtctttgtcaagcaagctccctgtttagtctccaagggacaggaacatggagtggactcctcgttctatgggctttgggcagttcaaaatctgagagagcttcccaaagatgaagatagtcaattagagctccaactgtga

SEQ ID NO: 25623 - DNA, 612 bp, Zea mays
  Peptide Sequence Number=SeqID_67402
atggatgacgaggtgctcaacgacgaaggtgtcgtgtgctccgccgacttctcttgtgtctggacttcgctagtactaggttggcttatctttgaaaacgacgccacacaagttcaccaccttgcctccacgcaagtcgaacatctggagcaccagcggtgcgctcctgtcctccagcttggaagggtgtggcttcgtcgtcttgatatggctacgcacccaaatgtcctcaagaacgagacatcaagtttccttagctccatgccatgcctcgaagggcgttatgcccttcagaactcagtcgacgtccggttcgccttcatcatgctccatgctaatgtcgacgatggtctgattccattgttccacgacctcattttactggagcgagtagggtgtgatgaagggttgtgcatacacacaggatctgctgcacagtttctatcaaaaacaacagcatgtgcaagcgcagacatagaaacatgtcgcaggagtaacaataaaagtgagatgcaccataaagttgatctccaacacggtaagggcaacatacataagaatttcatttaccagtacttgaaacttcaaattgagagggatataagcaattaa

SEQ ID NO: 25624 - DNA, 906 bp, Zea mays
  Peptide Sequence Number=SeqID_67403
atgggtcgggcgccgtgctgcgacaagacgagtgtgaagcgggggccgtggtcgcccgaggaggacgacctgctgcgcagctacgtccagaaccacggcacgggcggcaactggatcgcgctcccgcacaaagcagggctcaaccggtgcggcaagagctgccggctgcggtggctcaactacctgcgccccgacatcaagcacggcggctacacggagcaggaggaccgggtcatctgctccctctacagctccatcggggagcagaactactggaacaccaagctcaagaagaaggcgatcgccatgcagcagcagcagcagcagcagcaagagtactaccagcagcagcacagctcaggaggccgcggccgccgcgccgccgccgccgccgccgctccccgaagccaatgcgcctccgtgcagccgtcgcccgcgtccgcctcgtccgccgtcaccaccgcgagcgccagcgacgcgtgcagcttcggggccatgtacccctccccgtcggcgctgcaggccgctccggtgctcgcgcgctacgacagcacggcggcggcgccagcaccactgtctctgccgcagcaggcgtcttcgctcgccgccgagttcgtccctcccgcgccaccacccgtcggcgccagctgggccggcgggctgcccctcgacgacatgttcctgcccgagctcctcggggacagcgagttcccgcccggcgacggcgacttcttcggcgccggggccggggccgggctcctcgccccgctgctgctgcaggacagatttccagcggcgtccctgcaggagctctccgcgtgctacttccccacgcgcggccggagaagggggggcggccgcggaccacgcccatgccagccgcgcggctctgcacagctgacatga

SEQ ID NO: 25625 - DNA, 573 bp, Zea mays
  Peptide Sequence Number=SeqID_67404
atggcgtccctcctctcctcccccgacgattccaagtcgctgtccgtcaccacctcatcgctcttcctctcctccatcgcctctctcccctcttcccatgccttctccatcttcacctccgcctccacgcctcttccccctgtcccggtctctgtgcctcccgccgcactcatcccgggctcccgcttccttgtcgatgccttccgccatgccggaaacttctctgtcgcctacttcctctcgcacttccactccgaccactacagtggcctcggcccttcctggcgccgcggccttgtattctgctccgcgccaaccgcacgcctcgtctcatccgtgctctctgtcccgcctcaacttgtcgtctccctcgatatcggtgtccgtatcaccgttgatgggtggggcgtcaccgccgtggacgccaatcattgtcccggtgccgttcagttcctcttcgcctctcctgggccgagagccgagagatatgtgcacaccggggagacttcgccctacttccagccgaattttgtgaaattgaaggagatcatgatggagagagggataaactga

SEQ ID NO: 25626 - DNA, 261 bp, Zea mays
  Peptide Sequence Number=SeqID_67405
atggcgcaacctgggcagcgaggaggcggaggctctgcgccaggttccgcgcgtcgtcgtgcaccttggtcaccccgcgcactaggtcggcgtcagctgcaggtcgtcgggaaggaggaccagaggaggtgcggcgggccctcggggcgcacggccagcaggaccccaagggtcaacatatatagacagacaggaggggaggaaaccctagggctgccgcctacaggagggtggcggcaggacagggaaaaaacctcctaa

SEQ ID NO: 25627 - DNA, 801 bp, Zea mays
  Peptide Sequence Number=SeqID_67406
atggagtccgcgctcgcggcgtccgccgtctcgctctcgtccccgctcctcgacgccgtcatgcgccgcttccgcttcgcgcacggggacccgctccgcgcgctatcgctcctctccctcgccgccgaccgtggcggcatcgcgccgtcgccttacgccatcgacaccgcgctctacgtgctcggccgggcccgccgcttcccgcacatgtggaacctcgtcgcgaacacgcgccgcatatgtccggacgccctcaccccgcgcaccgccatgatcgtcctcggccgcgtcgccaaggagaagagcatgtccgacgcgcgcaacgtcttccacgcgctcaagtacgagttccgagtgaaccgccacaccttcaacatcctcctctctggctggaagtcggccgaggacgccgaggcgttcgtcaccgaaatgcgggagctcggggtggagcctgacctggtgacctacaacagcttgatcgactgccactgcaagaaccgggacgtgcagaaggcctacaagctgctcgacgaaatgcggcacaaagacatttcccctgatattatcacttacacaagcttgattggcggactggggttgattggccaacccgacaaggcaaaagatttgctcaaggagatgttgtgccaccggtatgggaaggtggcactggcacttgagctatggagcgatatggtcagcagcagctttggatcattaacgctgtggattgccaaagagtccaacactctgttgaaagcaggcctagtaatggtgatgcagctgacgctgatatattga

SEQ ID NO: 25628 - DNA, 684 bp, Zea mays
  Peptide Sequence Number=SeqID_67407
atggccggttacgagcagcgcgtcgttgccgtcatcatggtcggcggccccaccaaagggacgcggttccggccgctgtcgctgaacgtgcccaagccgctcttccctatcgccggccagcccatggtgcaccaccccatctccgcctgcagccggatccccaacctggcacagatataccttatcgggttctacgacgagcgggaattcgcgctatatgtctcgtctatctccaacgagctcaggatccctgtcagtgtttggctgggtgcgttagggagatttaagagagccgtgtcattgacagggtctctggccaatttaaattttaggtacctgcgagaggataagcctcacgggtcagctggagggctctacatctttagagattacatcatggaagacagcccgtcacacatagttctgcttaactgcgacgtctgttctagcttcccccttccagacatgctgggtgtcgcctcgccttacgctttaccgctaaaatgtaaaaaggggttgatcgtcttatgtcgccttaccgctttaataaccatatgtcttggcaccctattcggacaaattctatcgactaatgggagggatttaaaacgtcaattcatcaacaactttggtgtggcttgtgaccgggagaagacttggtatgaccttggacaaattctttag

SEQ ID NO: 25629 - DNA, 270 bp, Zea mays
  Peptide Sequence Number=SeqID_67408
atgaagaagaagaaggacaacctcttagccggctctaccgtcggaaccaaagcttgtgacaactcggccaccagtatcgagctacacaaaaactcaaccttcgctcctctgaagtggccttccttcaagtggtcaacgagatatttgtttcagacgattgaatcctcagttcctcctgacacattgtgccctttggagtatctcaccaagaactcaatcgtcctcacctatgggactttaagactaagtcctcagctcctcctgacatga

SEQ ID NO: 25630 - DNA, 351 bp, Zea mays
  Peptide Sequence Number=SeqID_67409
atgaaggatgccttgactaaaaatggctgggtaaatgatatctcgggaagcatatcagctcaatttctatctgagtacttcatggtctgggacctgattcaaggcttccaacttcgcccaggagtttcagaccaacaccgctggaccccttctgcctctaaatctgcttatcatcgtttctttgaggggatggtcacctttgaaccagcagcaagggatcgggtacgggtagttaaaattcgggacagatacaggacgggaccagataataattcaggcggatttgctttgggcttggccgcttgggcacgtattgataatgggccattggactttgggccagcactgtag

SEQ ID NO: 25631 - DNA, 384 bp, Zea mays
  Peptide Sequence Number=SeqID_67410
atgtctttgagatgctctggattatatctttctcggttccgccgtacctctcctcatcttttagcctcaggagatggcaaaagaactgccactattgtaggcgatgtgtatatccatccatctgccaaggtgcatcctacttcaaagattggccccaatgtttctatatcagcaaatgcgcgcgttggagctggtgccaggcttatcaattgcataattctagatggtgttgaaattatgggcgaaggtgatcaaaatgccaaacttggcattactattcttggtgaagccgttgatgttgaagatgaagtagtgatagttaacagcatcgtgctcccaaataaaactctcaatgtcagtgtccaagaggagatcatcctataa

SEQ ID NO: 25632 - DNA, 540 bp, Zea mays
  Peptide Sequence Number=SeqID_67411
atgggcgagttgaactacttccttgggttccaagtgaagaacctcaaggatggtaccttcatctcccaaacgaagtacactcaagatcttctcaagcggtttgggatgaaggacgccaagcccgcgaagacacctatgggaaccgacggccatgtcgacctcaacaaaggagtcttaaagagagaagtgcaaaacaaagagaagccgaagtccagctcagtctggcacaccgaactgtccggtggtgcaccgaacagtgtccggtgcgctaggctggactccggtgaaaaggccgctctcgagaaaaatcggcggcgtacggctataattcaccggaccgtccggtggtgcaccggactgtccggtgagccaacggtcgccagcgcaatggtcggctacacaatccgcgggcgacgcgtggcccgcaccaacggtcggcaggaggcaccggacagtgtccggtgcgccaactgccccggaaatgcaacggtcatctgcgccagaaaaggaaggagatctgcaccggaccgtctacagtga

SEQ ID NO: 25633 - DNA, 186 bp, Zea mays
  Peptide Sequence Number=SeqID_67412
atgacaaggtgcatacgaacaaatggctatgccacggtaggagacttgcacgttctcaatgaactttctaggctccgaacggccagccgcgacgctgattgggtccccaaggcgatgattcgctttaggaacctcgactttgtcctctacggtaatgaggagagggtcagggccctggaagcctga

SEQ ID NO: 25634 - DNA, 141 bp, Zea mays
  Peptide Sequence Number=SeqID_67413
atggccgtgatgggttcaacatcggaaaagatgtacctttgcgaggtgaggaagcgacaaacttttgttgcttctgttctaaggtggtaccgaaggaagaacaccaggaatgaagttgcgggaggaaaggatcctccataa

SEQ ID NO: 25635 - DNA, 426 bp, Zea mays
  Peptide Sequence Number=SeqID_67414
atgggcaagaacaagaaggatggtagttctttgcatcacttcggcgacaaacgcaagcgtgagccgactcccccctcggaggacttcggcgactcggagtactcggaggaggtgttctcctccgagtccgagggttcatcggctcctgcctctcccccggcgtcgtctgatgactcagacgactcccaggggatcgccgcagagggctcggatgagtcggagtactcctcggacgaggagaactcctcggactcgttcgaggagggcagcggcgacgatggcggtgacggcgacgacgacggaggcgatggtgatggcggtggaggcgacgacaagagcggtgacggcggcggcaaaggtggcagcggcgacggtggtggcggcagcaagggcagcagcaggggcaataacaaggccagtggctag

SEQ ID NO: 25636 - DNA, 246 bp, Zea mays
  Peptide Sequence Number=SeqID_67415
ggcaccacgcccacgctccagtactccacggaccacggctccaactcggcagctcgcaagacagaccaagtcccgccgccggccgcccgcgtccaggcagccgccagcccgctagccgcccgcgtccaaggctccaggcaaccgccactccaccagccgtctcccaggtacgccgccgctgcagatgtcttcgtcggcaggggacgtatcatcctctccggagacgaccaactcagacaccgcaag

SEQ ID NO: 25637 - DNA, 246 bp, Zea mays
  Peptide Sequence Number=SeqID_67416
atggcctacgagattagtgagatcaaaaagattggcataggtctggtggggtttggcatcctattctcattccttggtgttatccttttcttcgataggggcttgttagctctgggtaatcttttcacaaagaaggcaaaccttaagtggttatgggcctcctatccaggccttcctgtatcaaataccaatcattggttggattctgcagtacccattccagctgcttggtcagttgaggcgtaa

SEQ ID NO: 25638 - DNA, 1294 bp, Zea mays
  Peptide Sequence Number=SeqID_67417
aatctcagtaccaattgctattctgaagcggcatcaggttgctgcaaaaaaccttgtcctcgcgggtgtcaagtctgtaaccttgcatgatgatggcaaagtcgagctatgggacttgtcaagcaatttcttcctctcagagaaggatattgggcaaaaccgtgctcaagcttgtgttccaaagctacaggagcttaacaatgctgtcatcatctctaccataactggtgatttaaccaaggagcagctttctaactttcaggcctggtgcagtggtgagatctcacagagtcaccaggccacagcttgcacactccataacctgagaattctggagctggcgctctctcaggctgtggtcttcactgatatcagcatagaaaaagcagttgagtttgatgattactgtcatagccaccagccaccaattgctttcattaagtcagaagtttgtggcctttttggcagtgttttctgtgattttggtcctgcgtttactgttttggatgttgatggtgaggaaccacatacaggaattgtggcatcaatcagcaatgacaatccagcacttatttcttgtgtggatgatgagcgtctggagttccaggatggtgatctagttgttttctctgaagtgcatggaatgaccgaacttaatgatggaaaaccaagaaagattaagaatgcaagaccttattcttttactctagaagaagacaccacctcatatggcacttatattagaggtggtattgtcactcaggtgaagccaccgaaggttcttaaattcaaaaccttgaaggaggcaatcaaggagccaggagaatttctcatgagtgatttctccaagttcgaccgcccacctcttttgcatttggccttccaagctttggacaagtttaggactgaattgacacgattccctattgctgggtcagctgatgatgcacagaagctgatagatcttgctattggtattaatgaaactctgggtgagagtaagcttgaagaaattgacaagaagctcttgcagcatttcgcaagtggttccagggctgttttgaatcctatgtctgcaatgtttggtggtattgtaggtcaggaggttgttaaagcatgctcagggaaattccatccactttaccagttcttctacttcgattctgtggaatctctgccagttgaaccgttggagcctagtgatctgaagccagagaacagtagatatgatgcacaaattagtgtctttggggctcagcttcaaaagaaactggagcagtcaaaaatcttcatg

SEQ ID NO: 25639 - DNA, 498 bp, Zea mays
  Peptide Sequence Number=SeqID_67418
atggccggcagcggcagcggcagcccgccctgcgcatcgtgcaagctgctgcggcggcggtgcacgcaggagtgcgtgttcgcaccctacttccctcccgatgacccccacaagttcgccatcgtccataaggtcttcggagccagcaatgtcagcaagatgctgcagcagcaggtctcccagctccaggtgcagctcgccctcgccaaggccgagatcctctgcgtccagatgcagcacgacgagtcagctgcagcttctgccgcgccagcaccggcaaagcaacaacaactctatcaccaccaccagcagcagcagacgatggagtgcgaggcttacggcagcctgctcgtgcagaatggtctgatgatgaacacgttgggcagcgctggtgcagctcatcagcagcagcagatgctgggtggcttcggctctgcggggaacactgcaatggcgctgcaggaggcgtgcctcaagaaagagaccctttgggcatga

SEQ ID NO: 25640 - DNA, 996 bp, Zea mays
  Peptide Sequence Number=SeqID_67419
atgatgcttagggtttccccgtccccggccgccgcggtgccaacccagctctccggtgcgcccgcgacccctgctcccgtcgtcagggtggcggcgccgcgcggcgtcgcctcgccggccgctggcgccgcgtgcagggccgcgggcaaggggaaggaggtgctcagcggggtcgtgttccagcccttcgaggagatcaagggggagctcgccctcgtgccccagtccccagacaagtcgctcgcgcgccacaagttcgtcgatgactgcgaggccgccctcaacgagcagatcaactccactaaccgaataacaaatgtctccatacgacaccaatttgactctggaacctctctctctggccgtgcagcgtggagtacaacgcctcgtatgcataccactccctcttcgcctacttcgaccgcgacaacgtggctctcaaaggatttgccaagtcagtcgtcgcctctcgccaccaagttcggctatccataccgattttacgttttcctctctaacgatgatgtggttcttccaggttcttcaagggaatccagcgacgaggagagggagcacgctgaaaagctcatggagtaccaggtatcatttgaccctctggtccgttccattctgctacatgccaatacgtgctgtgcggtactgacgggacaatgcgcctgccagaacaaacgtggaggcagggtgaggctccaatcgattgtgacgcctttaaccgagtttgaccaccctgagaaaggagatgctctgtacgctatggagctggctctggccctggaaaagctggtcaatgagaagctgcacaacctgcatggtgtggcaacaaggtgcaatgatcctcagctgacagacttcatcgagagtgagttcctcgaggagcaggtggaagccataaacaagatctccaagtatgtcgcccagctgaggagagtgggcaaggggcacggggtgtggcacttcgatcagatggctgcttga

SEQ ID NO: 25641 - DNA, 1152 bp, Zea mays
  Peptide Sequence Number=SeqID_67420
atggtctcgtcctccttccctgacgccgacgcctacggcaacggcgactccgacggcctcgacttccccgtcgaccccaaccccaaccccgtcttctcctccccggccgctgccgcggcccccgggtccgctggcgcggctggggagcggcgccagctgttccagcgcctgtggacggacgaggacgagatcgtgatcctgcgcgccttcgcggagttcacggcgcagcgtggcacctccttcgcgtcgcaccagtacgacaccacccccttctacgaggacatgcgccgccgcctcaacaccggcttcaccaagaaccagctcgccgagaagatccgccgcctcaagcgcaagtaccgtaactgcgtcgagcgcctccgcgtcgccggctccggcttcaccttccgctccccgcacgagcaggccatctttgagatcgcccgcaccatctggcgccccgcctccgacaagcacggccgcgactccgacgacgagggcggcggcggcaacgtccacgacgccaccttcgcccccttcgccatcgacgccgccgccaacggtgagtccgccaagtcttccaggccacgccgtggccggcgccgccgcacgggcgacttccccgccgacgcggtcgcgctgccgccggcgcccatgccgatgcaggtgatgaccgaggacgcgctcccgtcgttcccgcaggcgactgcggcggcggtcatgaacgggggctgcggcctcatcgtggacccagcctctggtctgccaaccgcgctgtcatcagctgcggcggcggcaacggccgtgtccggcggcagcaccacggagaaccccatcctcacggcgctgttcaaggagatggtacgcgcgatgctgagcgtcgtcggcagcggcggtggcaccacggcacttcaggggctggagccaccgcccccctatcgcgggggtgccgatggaaggggagaagtggcggcagcagcggatccgggagctggaggtgtacctgcgtcggatggacctgctgcaggaccaggccagggcggcgctggaggaactcaggctcgagcagcagtagaacaaggtgttttcgtctgtaatcctgattttctgtctgcgctgcagactagccgcgcgtcgtcgttcttatttatatag

SEQ ID NO: 25642 - DNA, 1200 bp, Zea mays
  Peptide Sequence Number=SeqID_67421
atgggtacggaggagatggaggcggtcatcatcgccggtgtccttcggcgggcttccgctgatgtgacgcttgcctctgtggaggacggcctcgaggtggaggcgtcctgcggctcccgcatcatcgcggacacgcacattgcctcctgcgctgaccaagtgttcgatcttgtggctctcccaggaggaatgcctggttcagtgcgattgagagacagtgacatccttcagaggatcacagttagacaggctgaggagaaaagattgtatggtgctatatgtgctgcaccggcggttgttctagtgccgtggggtctccacaggagaaaaaagatcacctgtcacccatcttttataggagatctccctgcattccgggcagttgaatcaaatgttcaggtttcaggagagcttactacaagtcgtgggccagggacaacatttcagttcgctttatcatttgttgagcaattgtttgggcttcgtgcagctgaagatatggacaagattttgtgcaatcaaacaagccttaaggattggatgctccaaggacaaaccctggggcgcatgatggcacagactcatgacggtcttgaaaggagtgcagaagtcaatgagcttgagtggtcttgtggtcgcaatcctgatgtccttattccaattgcaaatgggtgtgaagagttggaaatcataattctggttgatattttaagacgggcaaagataaatgttgtattagcttcagttgaaaaatatccagctgttcttggatctcaaaggatgaagattgttgctgataaaagcattatgagtgcctctgattcgatatatgatctaattattcttcctggaggacctgctggggctgagcagctgcacaggtccagaattctgaagaagttactcaaacaacaaatgcaagctggcaggatgtatggaggggtttgttctgctctgaaggttctgcagcaagaaggtttactcgaggataaaacagtgacagctcatcatgctgtagccagtgagctcacgtgccaagttatagaccaacccaatgttgtgatcgacggaaatttgatcactggtaaggggcttgggacagttgttgattttgccctagctatcatcaggaaattttttggccatggacgagccaaagctgtggcgaatggaatagtttttgagtaccctaagagctaa

SEQ ID NO: 25643 - DNA, 459 bp, Zea mays
  Peptide Sequence Number=SeqID_67422
atgcctcttcccctatccctgtcgccacctctcctcccgctcccggatttgcccctctccgctcggctcctcaccgccgagggctcctcactcgcactcccaccccgctctctaaacccccatgtgggtgagtcgtcgtcgacgtgccagggtgcgcgatcgctcctcctcgcgctgcacgagcacaaccatctgcaggcgccggacccgttgctcccaaggcatggcagcagcgagcgtgcgacacctccatgtctccacagatccagcaccatgcttaggcgaccatggcgaggttgtcgaggacaatggtccgagatcgcgcgaatcatggagctggatgaggacgccgttaccaccggggaggatgacgattcagtgcttctggacataaaaattgagaggcaatatatctgccactatgagaactttggcaaggtatttatcatcccaaagtaa

SEQ ID NO: 25644 - DNA, 2487 bp, Zea mays
  Peptide Sequence Number=SeqID_67423
atggaggatgctcgccgcccggatgcccaatctcctgcaaccccaagaatgtcactagccgccgccgtcgccaccgctctcgccgttctcgcgtacagctgcacggcagccgatccagacaccgtctccgcgcggcgaccgctacggggcaacggcacggtggtctcggcgcagggcaagttcgagctgggcctcttcagccccggcgcctccggccggttctacctcggcatctggtacaagaacgtccccgtgcagaccgtcatctgggtcgccaaccgcgccagccccctctctagcgccgcctccgccgagctccgggtgtcccccgacgacggcaacctcgagctcgtcgggctcatccagaactccgcctcgccggccgtcgcgtggtcgtccaacatgtcgctgtcgccgtcgacgtcgccgtcgccgtcgccggggtcgaacatcgcggtgatgcgcgacgacgggaacctggtgctcctgggcggggacgactcctcaaccgtgctgtggcagagcttcgaccacccgacggacacgctggtgccgtacgcgtggctcggggagaacaaggtgacgggcgaataccagacgctcacgtcgtggcgcgacgccgaggacccggccccggggatgttcacggacacggtggaccgcaacggcagcagcgagttcttcctcctctggaacggctcccgcgcctactggcgcagcggcgtctggacgggcagcgtcttcgccaacctccccgaggccgtcaacaacgtgctcttcaaccagacgtacgtcgacacgccggcgtaccgccgcgtcaccagcgtgctctacgacaacgccaccatcacgcgcatggtgctcgacctcaccggccagaccaagcagtacatctgggtccccggcagccagagctggcagttcttctgggccgcgcccaccgtccagtgcgacgtctactcgctgtgcggcgcctttggggtctgtagccggagaagccagccgccgtgccagtgcccgcgtgggttcgctccggcggcggagcgtgactgggggctcagcgactggagcgctggctgccaacgaagcgcgcctctgctctgcggagggaacggtcggccaacggacgacggcttcctggagctgccggacatgaagctcccggatgatccgctcgccgtgagcgtgcggaccagagcagagtgcgagtcagcctgcttaaacaactgctcctgccaggcgtacgccttctccggcgacggtagctgcgccgtctggaacgacggcttccgcaacctcgagcagctgtatgctgatgccggcaactcctccgcggcaaccctgtacctccggctgccggagtctgagctacacggtgcaaagaggaagagcaggaggctgtggcttgttcttgggatcattttagcctgtcttgcagcgttgggcgcatcggcactggtcgcatgggtgcttctatccaggaggaaacgacgacggtcagaaatggcggatcaattaaagggctcctcgctgcaggtctacagctgcggcgacctccgcgccgccacgaagaacttctcggagatgctgggcggcggaggcttcggcacggtgtaccgcggcgtcttgaacggtggcaccgaggtggccgtcaagaagctggaggggctccggcagggtgacaagcagttccggacggaggtgagcacgctggggctcatcaagcacgtcaacctcgtccagctcctcggcttctgctcctccggcgacgagaagatgctcgtgtacgagtacatgcgcaacggctcgctggacgcctacctcttcggcggcagcggacggcagcggccgagctggcgcgaccgctgcggcatcatggtcggcatcgccagggggctggcctacctgcacgagggctgccgcgagtgcatcatccactgcgacgtgaagcccgagaacatactgctcgatggggacctgtgccccaagatcgccgacttcgggatggcgaagctcgtgggtagggacttcagccgtgtgctgaccacgatgcggggcaccattgggtacctcgcgccggagtggatctccgggctgcccatcagcgccaaggccgacgtgtacagcttcgggatgctgctcttcgagctcatctcggggcgccgcaatgccgacgcgggccacggcagcgacgcggatgaaggggatgcaggcggtcagcagcgtccgccgtccacgttcttcccggtctgggcagcatccagggtcgtggcaggggacatggccgcggtggcggacccgcggctgcgcggcgatgtggtcgagggggagctggagcgcgcctgcagagtggcgtgctggtgcattcaggaccaggaggcgcaccggccagccatggcgcaggtcgtgcaggcgctcgagggcgtagtcgacgtccagatgccgccagtgccccgggtgctccagcatctcgcgacgatgacatga

SEQ ID NO: 25645 - DNA, 321 bp, Zea mays
  Peptide Sequence Number=SeqID_67424
atgtccggtgcaccagaggactccaactcgaactcgccaccttcgggaatttccagaggcactcgcgctataattcaccggactgtccggtgctccaaggaagagcggcctcaggaactcgccagcttcggaaaaacgcagcgggcgctccgctataattcaccggacatgtccggtgtacaccagactgtccggtgtaacagcggggcaacggctatttcggcgccaacggctacctacaacgcatttattgcacgtcagcgcgcgcagaggtctggcgtgcccatactggcgcaccggacactctacagtacttgtccg

SEQ ID NO: 25646 - DNA, 1296 bp, Zea mays
  Peptide Sequence Number=SeqID_67425
atgagggactttaaaatcgcaaaacaagagcaagacatcggattctatgctggatttgttggggcaacctatttccttgccagaaccgtcagttctgtgccatggggcatatttgctgacaagtatggaaggaagccctgcattgtgatcagcatcatctcagtgattgtgttcagcacactctttggccttagcacaagttactggatggccattgtgactagggggctgcttgggttgctttgtggtatactgggaccaatcaaggcctatgctacggaagtctgcaggaaagagcaccaagctctagcaatgtctgttgttacatcatcaagagcaatagctcttgttgttggaccagctattggagggtttctagcacagcctgcagagaagtacccaaatattttctccaatggatccatatttgggaggtttccatacttcctcccaggccttgtcatatcgatactagcagcaggatcatgtattgcatgcatttggcttccagaaacgctgcactttcatgataatgaaaaggtagaagctattgatgaaatggaggcacaagttggtgactctaacttagaagttggaaaagctaaagaatctggttgcacgtctacaaagaacctgctaaagaactggcaactgatgtcagcagtaatcctctactgtatcttttgtctccatgacacagcttatcttgagacattttcactctgggcagtgagcagcagaaaattccggggcctgagtttgacatcccaggatgttggcattgtgctagctgtctcaggtattggtgtgctcgtataccaacttgctgtttatcctttcattgtcaagtattttggaccagttaggccgctacgtccctctgtggtcttgtctatacttgtcctcgcaatgtatcccttcatggccaaactacaagggctggagctcaagttgctcatcaacatagcttcgcttttagagaatgtgttctctacttatgcatatgcgaacaaaataggctacagttactactgcgtgcaatattttgcaaaacaccgcagtgacaatttctatgaaacatgtgcagacacaagaacacagaggtattgcgaatggcatctcagtgacactgatgtcattgttcaaaggttttcgtggactcagaagcacatgactgggctgttattaccaggtgaccagatcctgttcttggtgataaactcggtgtcgataatcggattaatttttacgttcaagccatttttctctatgtcagatgcattgaggcgttcataa

SEQ ID NO: 25647 - DNA, 1032 bp, Zea mays
  Peptide Sequence Number=SeqID_67426
atgcaggcggcgtgcaactgcaccacgggcacataccccttcgacttcgacgcatccagcatggaggcccaggcccacacgtcatgtaaccggcgcgccggttactacgtgcgaaaaactgcaccgccacttgcgccagtactgcgccttctcgactgcagaaccggtgccgcgactcggggcaaccccgcgcatggcccaacagtgccaaccaagcacatcgatcacgggtcagtcagcagcaggagaaggcgcgacgaccgaaatggccaaaagtgggccgacagtaatggcggcagcaggcgggcggaagcagcagtcaaatcgtctgcaggctcatgtcccctcctggagcaggaccgggaaaggggatatttcgaaagggatccttctccgcgaaggaagcgggccccgagccctcttactgatcaggggttcgaaggctggcccctcggaagggttcgacagccgcctcagaccactcgggctccgcacccactactgatcaggggttcgaaggctggcccctcgaagggtttcgacagccgccccagaacacgcagagcgagggatgactctgggtacgtccgatacatggccgaggctcgggctacgctcccgagaggagtcaaaccactcctccgaggcctcgggggctacacccggcaggaaaacaacgccgcctgccccgctccgactgctgtgccacccgccagggtgaggctgacagcagtcgagtccaggctcaggcgccacaggaagctccgcctcgcccgaccccagggctcggcccccgcctcggcctcggaaggtggtctccgcctcgcccgaccccagggctcggcctcaacctcgacctcggaaggcggtctccgcctcgcccgacaccagggctcggactcaacctcgacctcgggcggaatcacatccttgcctgaccccggcctcggcctcaggaggagtctctgcctcgcccgaccttgggctcggaccgaccacgccacagggggtacatcattaccctacctgtaa

SEQ ID NO: 25648 - DNA, 1191 bp, Zea mays
  Peptide Sequence Number=SeqID_67427
atggcgtctcactctcatcggtcccggtctcccacggcgccctgtcccagctgggggcacgcccacgcgccgcggtgccggcggcggctcgtccgggcactgctgctcgtagcggcgctggcgctggcggcggcaggtggtggtggtcgtggctccgcggccgccgccgccgccgccacccagcagaggatcccggccatcttcatgttcggcgactccatcgtggacccgggcaacaacaacaaccggctgacggaggccaaggccaacttcccgccgtacgggcaggacttccccggcggcgtcgccacggggaggttctccaacggcttggtccccggggacctcctaggtacctgtttagacttcaatgctactgcgcagctttccaagctgggcatcaaggagctgctgccgccgttcatcggcaccgacctgcagctcgaggacctgctcaccggcgtggcccttcgcctgcggcggcagtggctacgatccgctcacacgaccctgtcgagcgccgaccagctccagctgttccaggactacaaggataagctggcggccctggccggggaggaggagatggagcgggtcgtctcgcaggccgtctacttcacggtgatgggggcaaacgacatcgtaaacaactacttcatcctccccatcagacgccaccagtacgacctctcgtcctacgtcgacttcctcgtctcctcggcgatcaacttcacaaggactctgaacgacatgggagctcagaggatagcgttcctcggcgtgccgccactaggatgctgcccgtcacagatcacgctcgcggggagcccgtcgcgccagtgcgatcctgctaggaaccaggcgtcggagctgtacaactccagggtctccaaggagatagagcgcctcaacgcggagcgaagcggttcaggctccaagttcgtctacgtcgacatatactacaacttgctcgacctcatccagaatccagcttcgtacggtttcaaggacgtgagcgagggttgctgcggcagcacggtgctgaacgccgccatcttcatcgcgtaccacagcgcgtgccccaacgcgcccgactacatattctgggacggattccaccccacgcagaaggcatacgacatcgtggtggacaagctcatccagcagaactccaagtacctgatgatgtga

SEQ ID NO: 25649 - DNA, 318 bp, Zea mays
  Peptide Sequence Number=SeqID_67428
atggcattagcgtggaaaaacaggacccagcaaccacggcgtctgaacaaggtactctgcatgtctgttcaacaagcaagcagaagcaaggttgctgtcgtgcccatcgagttggagaaggcaaaggagccaccgctccacctgtacaaaccaaaggagccttacacggccacgatcgtctctgtcgagaggcttgtaggacccagagctcctggcgaaacatgccacgttgtcattgatcatggcggcaatgttccgtactgggaaggacagagttacggcgtcattcctcctgtgattttgcgcagagaagattag

SEQ ID NO: 25650 - DNA, 2088 bp, Zea mays
  Peptide Sequence Number=SeqID_67429
atgcgcgaggaggtgcggagctcggcggcggcggcccccgacccgccgcccgggaggtcggcctcgccaccgcccacacccgtcgccagttctgctggtgcctcgtcgccccctgcacaaactaatgtagctagcatagactggctagacagtgaccaagtgtccaaagcaggatcctctcatattgctccgccgacgtctcggcctgcgcttagtactaatgctaatggagctgccatggactgccttcaatcatcatgcagaccatgggaacgaggcgacctgcttcgtcggctggctacttttaagccttcgacttgggcttctaagccgaaggctgctagttcactggcttgtgctcgaagaggctgggtgaacattgacatggacaagattgagtgtgaatcatgtggtgcacatcttatatttattgcattgacatcctggtcccctgctgaagagctgaactatattgagttggttggacacttggacttgatattggctgaacttgtgcttattacgtctaattgtgtttatagtgcattctcaatccaggacatctgtgccactttatcattggatgttataagtgctggggaagcttttgctgagcagcttgatgcttcacaccagaataattgtccctggagaggaaatagctgtgctgatagcttggtccagttccacctgaccccgtcagctcttgttggtggttttaaagatcgctgtgatggattgttgcagttcacgtctcttcctgctattgccttatctgcaattgagagtatgaagctaactagaagcgttcaaattgatcgagtcttatcccagtcagtcacagttttgtctggggagctgggctacagaacagacagtacaactggaattgatatcgcccaacaagatgaaacctgctgttactctcaagcacagaagcttattagcgtttgtggatgggagcctagatggcttcctaatgttcaagattgggaagagaattcgacacgctctgccagaaatgcaggctcagctgaaccagatggccaattccattcccaatttcctgagcatcatcaaaattcaaactctgtgtcaattaagaaagacaaggggaaaggaaggaagcctgtgttggtccgcggtattagtgcgacaagtgggatcaatggactggtcactgaaggagcagagagagaaaatattgagggacgtgatgaggcaggtattgttgagggtaagtctctgtcaaatgctcaagtcgacttaaatctgacaatggcaggaggtttgccgtcaaacaattctgcattgcccccgatgcctggacatcttaactatggtggaatgggaagagatctaattattgggcaacccactggaagtgagcttggtggccgtgcagcctcaattgaatctcgggggcctagttcgagaaaacgtaacctggaggaaggtgggagcacagctgacaaaccaataagcaggcttcagcctgctgacagcattgagggaaccgtcattgaccgtgattgtgatgaagttgatgacgccgcacaagattctggtgctaggagcaaaaggtctcgttgttttaatctttttgatattaatcgcccatcttcttcaggagctggtcccagcagaaatttaagtttcgacctggatatagatgttaataggtttgatacatctaatgctgaggttccatccgcccttcgcaacccatttccaagggactctatgagggaatcttctgttattgcaatggatacagttcacggcatggaagaaaattcaatggagagtgtcgaataccatccatgtgatgttgatgatgttaataagccttctagtgcactcaggagtggtttaatgagtgacacgttggatccgaattatagcaaccaagcacagcaaagcagttttgtacagcctgctgctgaaactgaaagcaatgcaagagagataggagggagtagtatgaatggaggggaagaagtcctcaatgctgaaacaacccctgcatttgctagagatcaacttagcctgggagttagcgggggggagtgtcgggatgggtgctag

SEQ ID NO: 25651 - DNA, 228 bp, Zea mays
  Peptide Sequence Number=SeqID_67430
atggatccatacaagcaccgcccgtctagtgggagcaactccagcttctggaccaccaactccggcgcccccgtctggaacaacaactctgccctcaccgtcggacagcgagtcgctgtcgaaccattacgttacttaagggaaagaaagcacattcccggtccaatcctccttgaggattatcatctaatagccccttgctcagttcgacagagaacgtatccctga

SEQ ID NO: 25652 - DNA, 183 bp, Zea mays
  Peptide Sequence Number=SeqID_67431
atggcggtaccggcgcacaaggatccccaacgcgccgcccctctcgatatttcgaagatggctgctgtggttgagggccctggacacacaagcgctagcggtgaagaggatggcaagtggggcccgattatcggtgagagtacgggggagggttggctgctgggccggtgggagtgggtttag

SEQ ID NO: 25653 - DNA, 135 bp, Zea mays
  Peptide Sequence Number=SeqID_67432
atgagcgtggctggcccggtcgtcccgcaccacgggctggcggccgcatgggcggcgagggtccctctgttcaatcaaggcggcagcggcgacaaccgagattgtgtagctaagaattggatgaaggcgagctag

SEQ ID NO: 25654 - DNA, 318 bp, Zea mays
  Peptide Sequence Number=SeqID_67433
atggactggcctctccggcgaagcaggcttcgattcctcgctcggggagcttcactaaggttcatgcttcggaggtcagcattttgtactgttggacttcgaacttcattgggcgcaccgaaggcgcacccaatgggtgtagcccccgagcttcgagtggatttttgcaaacaatccgctcaaaggtcttcacttcaattgactggagtcccaatgggtgtcgggttacgtgagacggcgtcagccgcctggcatgtcttcagacggtttgaattgcatattgaatttttgagattcggtggctatggtaggaggtga

SEQ ID NO: 25655 - DNA, 576 bp, Zea mays
  Peptide Sequence Number=SeqID_67434
atgaagcctctgagatggttactggatggatctagagctatgagcttcctcaaatttccgccttcatgttgttggaatctatacctagtgcaaagcaaaaatatgtcaacagctgcagggtgtcatactgatgaactgaaccgtcattccggacgaaccacagtaaccaggccaagggaagagaagccggttgcagaagctggagttgatgaggaccagaagctaaggagaaagccatcgggagaggaagctgaatccgaaagtgccaaacactcaacaaaaaccgtggcggtgctctctggtcaggcgcggacggtccgcggccaggggcctaacggaggcagcatcgtggtggttatgggcgacagcaggaggaggaccttatttcgggtacaatcctgcacaaacgaacaaggcgtgagtgacatggttccagtcaatcggttagctgctgccgttccaggaggcagcatcgtggtggttatgggcgacagcaggaggagcagcatcgtggttggtcttggtcatgccttcttgttgcagctgaatatgggaatgctgtggtcagacaaatag

SEQ ID NO: 25656 - DNA, 2073 bp, Zea mays
  Peptide Sequence Number=SeqID_67435
atggcgttctccgccgcctcgtcggcggcggccgcggcagcgtaccccagaactacgcttccactgcggcggcggccgggcctcttggccctcctcctccttctcctttgcttcctctccttccaggtcgtgatccatgtgccctccgccagatcagcggtgtcgctgtggctcttctcgggtcaccgagccgaacgcgggactcgcgagaactgccctggctgcagcaagttacaggatgtggataaagctgaaaagactatcgcgtacactgaccagcatggtcggatcaagctattcaaagttaccgccagagaattcggttcgtcctctatctgggagaacccgtggttgcccagagatagccagccgcaagaggttgccggggatcatctactcgccagtggatcagaaaccaccaatctttcaagtgctgaaactctggcaactacaattgtcgatccgattaaattacggcgacaggtatttcgccgtagaagaaaggagcggagggttcaggagctgcttcagatggataagaagattgaacttcagatgcggaatgcagcaataaatagctcaaggaactttaacaataaagttagaggaagctacaacatatggaggcaggagttccgccttgttaatacagactcaacactaaggctcatgaaagatcagataataatggccaagttgtatgccactattgcactctcccagaaagaaccagacatgtacgcgttgctcatgaagcgcataaaagaaagccaaacatctatcggagatgcacttatcgacagtgaactcgattctagcagtgccttagagagagcaaaagcaatggggcatgtgttatcttcggctagagatgttctgtacagctcgggtgaggtgtcaagaaaattgcgtgttatgttgcagtcgacagaactaaatatcgacgcagtgaagaaacaaaactcatttctggttcagcatgctgcaaagacagtacccatgcccttgcactgcctacatatgcagctgacaactgattattattttcgtgattatgtgaccaaggaacattttgacgatgatgctttgaaggcgggacaatataaagaaaagcttgaggatttgtcactctaccactatgctatattttctgataatgtgcttgcggcctcggtagttgtcaaatcaactgtggcaaatgccaatgaaccagagaagcacgtgttccacattgtcactgatagacttaattttgcagccatgaagatgtggttcattactcatcctcctcaactggcaactgttcatgtggagaacatagacaatttcaaatggcttaattcctcatactgttctgttcttcggcaactggagtcagctcgcctcaaagaatattacttcaaagcacacgatccgtcgtcactctctgatggaaatgagaatctgaaatacaggaaccccaaatatttgtccatgctcaaccatttgaggttctacatgccagagattcacccaaagcttgagaagatactgtttcttgatgatgatgttgttgtacagaaggatttaacacccctttgggatgttgatcttaaagggatggtaaatggcgctgtggaaacctgtaaagagagtttccatcgctttgacacttatctcaacttctcacacccaaagatctcagagaacttcgatccacacgcttgtgggtgggctttcgggatgaacatgtttgacctgaaggagtggaagaagcgaaatatcactggaatataccattattggcaagatttgaatgaggaccgtaagctgtggaagctgggtacgctgcctccaggtttaattactttctacaacctgacatacccgttgaatcgtacttggcatgtcttgggcctgggctatgatccagctgttgacattgctgagatcgacaacgctgcggtagttcattacaacgggaattataagccctggcttgaccttgccatttccaagtacaagccattctggtccaagtatgtagatgttgacaactcgcacgttcggcgttgctatgagggcaaacaatga

SEQ ID NO: 25657 - DNA, 423 bp, Zea mays
  Peptide Sequence Number=SeqID_67436
atggcgccttctgttgacgtggtcggtccgtgccctaggttgggcgatgtggaggctcctccgagatcgaggtcgagtctgtcttccgagaccgaggtcgagtccgagcccctgggtcgggcgaggcggagaccgtcggctgaggccagggctgagtccgagccctggggtcgagcgaaacggagttcgtcgtcttccggggctgagcccgagtctgagccctgggtcgggcggagcggagttcgccgtcttccggggctgagcccgagttcgagccctgggtcgggcgaagcggagtttcctatggtgcctgaggccgggcctgactgcctgtcagcctcattctgtcgagcgacacagcagtcggagcggcacaggcggcgctatccttctgtcagaccggtcagtggagcggcgaagtga

SEQ ID NO: 25658 - DNA, 210 bp, Zea mays
  Peptide Sequence Number=SeqID_67437
atgacctatggtgccaagattatggtcgcggaattgaaggagctcggagagatggatgcacccgttgttggcttctttaaaattagggaggaaggcaatgatatgcggtcgcttctggagcttgtgaaggagcttcgtcctcggtggatgaaattgtatgtgcgggacatgcatcatacagtttttactcgccatggagaccaaaagtag

SEQ ID NO: 25659 - DNA, 267 bp, Zea mays
  Peptide Sequence Number=SeqID_67438
atgcgatccaagcgcaagagctcaaaagaacacggcaaatctctctcgctagtcactaaaggcttgagtggaattggagaggatttgatctctttgtatgtgtctagaattgaatgcctagctctttctgaagtcaatttcctcgggaggatttcgcaccccaatctcgtcagactcctgggctactccatggacgacaacgagctactgctcgtgtacgagttcatggcgaaaggggagcttggagaaccacctgttccgaagtga

SEQ ID NO: 25660 - DNA, 243 bp, Zea mays
  Peptide Sequence Number=SeqID_67439
atgccctcaattcaggtcgaactccaccgggactcgtgtaattgctcgccggacttcggcttccaccatgtgccgtggagagctcggttcccctcttcgaatcgcgagttaggggcgacaatcgccgggggcgcatgctccggcaatgacgccgccgtccctagtctgtgcgacgccgtgcttactcatgcagggctgcgggatgtctacgccgtcagatgcaaattggacgatcacgattag

SEQ ID NO: 25661 - DNA, 231 bp, Zea mays
  Peptide Sequence Number=SeqID_67440
atgacctcactaaccttccgtgaagctcctcgactcactggatcaaactctaccaccgtgtacaggcggagcttctcgccgccgacgagcttgcccgcctgcgcacgaggccagaacagctccgaccaccataggcgacgagccgaccatcgacgtgaccctcgtgacctccctgaggtcgccgaccaccccaccggaactttaccgtcgccggagattctagggggttaa

SEQ ID NO: 25662 - DNA, 492 bp, Zea mays
  Peptide Sequence Number=SeqID_67441
atggcggtgtggtcggggcgagcagcggctagggcgtcccacagcgagctcgcgcgcagggaacaaatgcagcttgccggaggcaggaagccaaccgattttccatgggaggtgagcgcaggggtgctgctggccgtggagcaggggaggaagggcgtcatccctggaaaaggcagcaggggaaagggcgccatgggagggagctggaaaaattctgggcgccatccatggggtgagctgctgctcgccagcaaggagcagggaagggcgctgcgcagtagagcgaagaggagcaggggcgtcggcatggatgctctgcgcatgcacaggaaaacagaggggaggagagggacgagctggataagcagcccatgggggagaagggcgcagggaggtgggggctgctgctcggcgccggccagaggtagaaggggcatgcgcccatggatcagctcctgcgtgctcaacagagggtgggagagctgtgcgtga

SEQ ID NO: 25663 - DNA, 381 bp, Zea mays
  Peptide Sequence Number=SeqID_67442
atggtcagcgacgtcggggaggcgggcgagctcgtcagcgtcgagaagttcggcctatacacagaggtagagttcgatccagtgagtcggggagcttcgcagaagttcggtgttgtcgtgggtgcaaggaatttgggaatggctcaccttgtagttcggtccacatgctgcggcgggtggccaaagtccggtgaggtcgatctcactgttccggtggggcagggccttggctcaagcttgggaaggcttcacggcctctctgggaagctatccaaggactcgggcgaggttgggggtctacgagaatggctggccacggcggccgtgctcgggcggtggtggcgggcggtggtgcttgctctttgcggcgaactccggtga

SEQ ID NO: 25664 - DNA, 228 bp, Zea mays
  Peptide Sequence Number=SeqID_67443
atggcagccgtccagcggagctctgccccagcccggagctctccctgccgagtccctcttcatccccagccggtttcctgcgcgcgtgctccagtctgcttcaagctctcggcgtccatctccctgtgcactcctctcagccgcgcctgtctttcttcctctctgcaccaagccatggagctcgccggcctgcagctcccctctgattttttccccggctacgggtag

SEQ ID NO: 25665 - DNA, 792 bp, Zea mays
  Peptide Sequence Number=SeqID_67444
atggtgcaagtcccaggcaacctctgcctcctcttgcagcggtgcagccagccagggtacaatgatgatatgcacggccttcccgcagacaagagggtaccctatgagccagcatatctatctgttatatctattttaattatgtttaagaaagcccggctgtatgagccaggccggcgggagcctggctccagagacacgactaatttgcccgcgcctgcagagtctggtccagggtgctttaagtatcgtgcgagcctaacttcacatctgcatgcagctatttcactattacattgcaaccatcagtatcatgtagacttcgatatatgtcacgattcgcatggtctcgtcattggagagcacgtgccacatctgtcggtagaagttccctcgtacatcgtggatgatgagctggacgacgttatggcgccgtcatcggatgcgatgccccagaataactcgagagtcatcggcgttggcgacgaccatgaggtccccctgtttgatgatggacagcgcgatgcagccgctctagaccgtgtccaagcggtgggctgcgctggagcttgccgaacacagcggcgcatgcggccacataggactgcttccagaggtggaactggtagtgccaagcttcttctcgtcgacgatgagcgacgccaacgcgagcgcctcctgctagtggtgtttgttcggggttttgaagtaagaaatatggattcatctttggcaatggtttatgaaaatgtctcacaagtcagatccatggaaaaatattacggagaataa

SEQ ID NO: 25666 - DNA, 252 bp, Zea mays
  Peptide Sequence Number=SeqID_67445
atgggattcgactgggaacgtacctactatgatgtctggtgtttgctggactacttcaccctccagatggttcaacctcccatggttgtagcgcgtctgaacacaattgtctgctccttgctgagaattgacttcctcccggttgactattctggcgatactgttgctgattctgagggtactgcctctgaaattgctactaaggcggacgctgggtctgctgctgatatccctgagggtgattctgcttaa

SEQ ID NO: 25667 - DNA, 270 bp, Zea mays
  Peptide Sequence Number=SeqID_67446
atggtggcgcgcccccggtggctcggtctgcgcgaccagcaagcggcgcggcccgccggcgtggtggcccgcagccagccggcgcgaccagccaacgcgcggcggctcggcgcggccacccggtgcggctcgcctagtgcgtctggcgcggccctcgcgcacgtcggcgcggcccatcgcgattcgtttctgagcttcgaggaatcaacattcaagctttggcgaccaaatgatccagttcttcaagttctacgagatcgaagaccctga

SEQ ID NO: 25668 - DNA, 444 bp, Zea mays
  Peptide Sequence Number=SeqID_67447
atgactggtattcattcatgcgtcacgcttggacttttgccttgtgtcaagccgaagggaaaaggcttgggagggactgggaagaagccgagcataaatgatgcattatcgagggggtctgatcagcgaagatggctggcgctgagagatggcggagctcgaggtagtggtgtgatggtcggtgtgactggagcgatggggaagctcggaaacgggtcttggagcctccttgtgcactctagaagctccgatcaggggtcgacgatgatgtccacgacgagcaaaggcggtgcgatgcgagggcggagcttgggacgacgacacgacgagagctcgagaacacgaacagggagcgatgcttggcttgcggcaatgatgaacggggcctttggattttatagagagggagaggggttgggcaatcgcggcaaggatggaaggtga

SEQ ID NO: 25669 - DNA, 282 bp, Zea mays
  Peptide Sequence Number=SeqID_67448
atggccaccgctgcgtctgcggcctcaccgctactcaatgggagccgaaggctgcgcggctccgccatcgcggactcaggctacagcgccgaggcaccggcctccaccggcgcgcagctgtacgcggactgcgtcgtggtgggcggcggcatcagtggcctctgcaccgcgcaggcgctgtccaggcggcacggcgtcggggacgtgcttgtcacggaggcccgcgcccgctccggcggcaacatcaccccggtcgagcgacccgaggaagggtacctttga

SEQ ID NO: 25670 - DNA, 570 bp, Zea mays
  Peptide Sequence Number=SeqID_67449
atggacgccgccgcacgcccggccattgtcatcgacaacggcacagggctcccacaccttgcaggacgtgtacgactcgctggacgcgcccgacgactactacatggtggcctgcacgctgttcatccacgtcgccaagtccgcctccaccctcatccgctacgccggctccagcggagcctcgccgacgcccaacatgaccgagccgccggccggctgggcgactgggcctggtccatcaaccaggccaggtcgttccgatggaacctgacggccagtgtcgcacgccccaacctgcagggctcctaccactatgaccagatcaacatcacccgcaccatcaaggtcatggtctcccgtggccacatcgacggcaagctccactatggcttcaacgacatctcccacagggacaccgagacccccctcaagttcgccgagtacttcaacgtcactcacggggtgttcagctacaaccagatgggcaacgtgccccccgccgtcaatgggccactccatgtcatccccaacgtcatcacagccgagttgcatctatttgatcaattctag

SEQ ID NO: 25671 - DNA, 879 bp, Zea mays
  Peptide Sequence Number=SeqID_67450
atgcagtctgaagcatggaatggatacagaaagccaccatcagaacaaaagtactctgaggatgtcggtcatatccaccaaggactcaatttcgagcccaccagggaggagctggatagcttatcgaaagcgtgtagccgactttgggagctcgatatgaaccgtatcgttcctggtaaggactacataatcgactgtggcgaggggaagaaagtttatcagaagggtgatatggcatccgaaagcttgttcagctggctaggcgacgatgtgctaagaaaacccacctactcacgtttttgcgcacttctggataactataacccccaccaggataagcacgaagaaatagcttttgttgaagagatcgccagaacatcgccaattaagtacttgcaccggtacttagtgcagaagggggttgtgcctcaggactatgaggacttcaagaaaatgctgacatccctatggtttgatttgtatggaagaggtggcaactctagctgctctactgcctttgagcatgtgtttgttggtgagatcaaaggaccgggacaaggggaaagtgagttttacttggaagaagccaagggaaatgtggattaccaaggttatatatttccaaggcgccgtggtgaatcgcctgattcagagatacagctgctgattgttcagtttgagtggcatggcgtgctgaaatcagtatccaacacgttgattggcgtcagtcctaagttcgaggttgcactctacacgttgtgcttttttgttggaggggaagataaccgcgtcgatattggcccatacagtgtgaacgtcaagtgctaccgattagggaataacaaaattggatcaacctttcccattgcagagaactga

SEQ ID NO: 25672 - DNA, 270 bp, Zea mays
  Peptide Sequence Number=SeqID_67451
atgaatctcgaccccaagtacaatgaccagcagctccgggccacggtattgtttcttcttttctggccttctctttttggttgcttgtgccctgttgcgttcgttaatttgtgctggtcgtgggtgaccacaggtgagaagatagatgaagctagagctgccggagctgatatcgtaggtggagaagatttgattgaacaaataaaaggaggatttatggagtttgacaaattgattgcatcacctgatatgatgcctaagataaaatag

SEQ ID NO: 25673 - DNA, 123 bp, Zea mays
  Peptide Sequence Number=SeqID_67452
atgtggttgctacagtcatatatgagcctgagaatctgtcagacgacggaagatgcatacagacttgcagaagtgcagagtcagattaatccccatccatcggcggttatccgttgtatttga

SEQ ID NO: 25674 - DNA, 375 bp, Zea mays
  Peptide Sequence Number=SeqID_67453
atggcggtgagctccaaggacagccgggagcggccgcggcaaggcgtggattggtggaccttcggagtcttcctctacgagctagtcaacgtccgcacgcccttcaagggccacactaaggaggtcaccctcaagaacatcctctccaagcaggccacttaccctcagctggacggcgaggccgacgcctcccagtcccagttgcgggacctcgtggggcgactgctggagcgcgacccacgccaccgcatgggtgccacgcgcggcgccaccaagatcaagcggcacccgttcttcaccggtgtggacttggcgctcatccggtgcgtggcgccaccggtggtggcggagccagactatcacacccggttttag

SEQ ID NO: 25675 - DNA, 438 bp, Zea mays
  Peptide Sequence Number=SeqID_67454
atgggtcaagcccataaaatatccaacaggttcagcgcgtgtgaagcagcagatggctacgactctttcagctcattggatcatgtcctcgtgggctcgcccaagctagcatgccatggtgtttgtcttcaatcttcctcctcatttggggcaggctacagtttgatttgtgcacagtggcggagcgcaaccaagaaacgaggtatggaggtatggctggaggaagatagagggctggacattgccgcactcgcacggtattttttgtgtgttggagaagggggagccaggagggttgccgacttgccgcaacgacgcgagcacgacgacaccgaggagggccgtggcccgaggccgatggtcgtacgacgcaatgacgcatgccggtggcccgaggaggtcgtggacctggagactggagagggtgaagtgctgtga

SEQ ID NO: 25676 - DNA, 189 bp, Zea mays
  Peptide Sequence Number=SeqID_67455
atgggctatagccctaggactatgatttttggcggaggggaggatatcttggcctgtgtgcccaatgctggtgaagctagaattgtgaggaatattgcccgaagcattgggttcctagagattgagacagcgccgagcaagcttaaaaaatggaaactttcacaaagcttgacttacacaagcatcaag

SEQ ID NO: 25677 - DNA, 198 bp, Zea mays
  Peptide Sequence Number=SeqID_67456
atgacgaaggttgatgctttgccaaagattatggaacttgacagaaggcaagagtccaagcgtgacgcacaagtgaatacaagtcaacgtgaacagtatgggggtactattcatctatttataggcacaaggcacaacctgtgtaagattacattcatgccctttacgtttactattgacttaaggacaatccaatga

SEQ ID NO: 25678 - DNA, 138 bp, Zea mays
  Peptide Sequence Number=SeqID_67457
atggccggtacggaccacgtcagggatgatctgcgtgtgcgttgtggtcaggggcattcgcggggaagagatagaagatggagggcatttctgcaatttgtcagtggcacagaggaacagttaaataaagaattttag

SEQ ID NO: 25679 - DNA, 468 bp, Zea mays
  Peptide Sequence Number=SeqID_67458
atgggcacccgcacccgtgagcttgaagagcgagtggaggtccaggataacaccattgaagtcctagagaaccaactccacgacctacagattgagctggatgaggtaaatgcccacatggagatgcatcaccaggagatgcagcagggcatggagatagacgaggacatcgaggaggaggaggaccccgaagagctagatccagcatctcgcttggactccatcaacttagctcactctgccaaggtcagattagccgcccagcaactccgtggacacgctaggacatggtgggatcatttcctcgccatgcaatcaacagacctcatggtgacatgcgatgaatttaaggaagactgtattgtggctcacagggcagagaagaaaaggaaagcatctatggcaagaccctcagctcagcctcagtgcttcaagattgtctccaataatcacagcaaaggcccttag

SEQ ID NO: 25680 - DNA, 168 bp, Zea mays
  Peptide Sequence Number=SeqID_67459
atggcctcgacacgaagtactaccctcgtcgttcgaccggcagtgctggagatgtctgagaataggcgcagaggtgcgaggcgtgctcagccagagcagcaggcaccccaagaggaggcagccccacatcagcatttgccaccaccacccctgatgaccattgagtag

SEQ ID NO: 25681 - DNA, 267 bp, Zea mays
  Peptide Sequence Number=SeqID_67460
atgagcgagtttgagaacatttcaagatttgaatttttgggatgctacaataatgttcggcatggccaaatccgtgcagagctccaaatcgacggccaccaggacaagctaagacaatcggacctggcgacaactgcgagctggagcgttggtgagctcggcagatgcgaccaaggaaattggcgagcgcacgcgggggcgagctccatgcccagcaagaccgacatggccacccggaaggagcctttggaatgcggccaagactag

SEQ ID NO: 25682 - DNA, 315 bp, Zea mays
  Peptide Sequence Number=SeqID_67461
atggccatagctccagcttgccccatctcccatggagcgctccttctctgctccatcttccccagctccgaccgcgcccctggtccctgctctagcttgccctctctagcaccgctcgctggtgacagcagggccgaccgttggcagctccccgtcatcccttgctcggccccagctcgatctccctcggtcgtgctcgctccggccacgggcgccgtcgctgagctcgaccctgccatggtgctggctgccgtagcacttgccccctgctctatgccccagtccctagtgcccaaccgccgtcgtcaccagtag

SEQ ID NO: 25683 - DNA, 348 bp, Zea mays
  Peptide Sequence Number=SeqID_67462
atggcgcccgaggctagacttagctgctgtcagcctcactctgtcgagtggcatagcagtcggagcggcgcaggcagcgctgttttcctatcaggtcgagcgcgcgtcaggataaggtgtcaggcgatccttgcattaaatgctcctgcgatacggtcggctggcgtggcgatctggccaaggttgcttctccgcgaagactgggcctcgggcgagccgaagctttgtgctaatgggggttaccagctgagattaggagtcttgggggtacccctaattatggtccccgacagatataatgatcttcgggcgaaggttatgaaggacataccttcatcatcgaaatga

SEQ ID NO: 25684 - DNA, 216 bp, Zea mays
  Peptide Sequence Number=SeqID_67463
atggatccggaggtcgactggggcttgagggggagctcggcgtccatggagaagaggagtacccaggcgctggtgctggcgtgcgtgaggaggagcagcgaggtagagctgctgtttttaaagagggtgttggctgcagccattggcggacaggggcggcagctgcagagctctgcacatgtcagtctgcttgcacgtgatgcaggacggctttag

SEQ ID NO: 25685 - DNA, 1719 bp, Zea mays
  Peptide Sequence Number=SeqID_67464
atggagaaggctcaaaatttgccaactgagctaatggctcaagttcttcggatgactcaatacagccctcttggtttatatgaacttgttgataagatatatgctagtctgctggaagaagtatttgagggaatagaattacatgctaataaggatggtaatgtggcaccttgcaagattttgaagattttagattctggtggcacaaagatgtgtgaagttggttggattcggaagggtaaggctataaccaacacatcagtaatcaaagctgcagatctgttttaccggagggcacctgttagcaggaatacgctgaagttttttattagagatgctacgtcacaaagtaatccatgggttatccatgagaatcttgccaaaaaatttggcataaccatcgagccccctgatagtgtaatgaagaaagggagaaaaagacaagagaatgaaactgttgaagatggaaggaaaaagctcaagacagatgaagaacatgcttatgtgctgattaagtatccaatagatgatctgctagtaaggcccaatgcagatgatccgtctttatttaagagacctcttctggctacagattttagagtaccaagatgttctgtgggagatctccttatggtatgggacttctgctcgtcttttgggagggctctgaatctgtccccatttccgctaacagatctggagaatgcaatttgccacaaagaaagcaatgttcttcttgtggaaatacatgcagctttgtttcacttgcttatgaaggatgaaggtgactatttcactgttccgcagaacaagaaacagaagttaaaggtaagttcagtaacatgggctgagtatctatgtgacttcttggaaatgacaaaaaatgaagaactatccactaacattgcaacagtaagaaggggatattatggtcttattgacactaatataaagcttaagatccttcgggaactagtggaagaagctattgaaacctctgccataagggagatactaagtgatcgtgtggaccagaaacaagtccttaatgcaacaaaaagagagaacaccagaaaggacaaaaaagagcaaaatctgaacactgaaattgccatgaaaaatgaggagaatcagacagatgctgtgcaaggtggccatgaaggtgtagatgagctggttaggagaaaagaagaaaatgacaagagtaatatttctcggggtaggacagaagtgaaacgacacatggtacagcaccttgagacggagatcgagaaattatccatccgttccagccctcttggtaaagacagacagtacagtaggtactggtttttcaagcgtgaaggaagactttttgttgaaactgcagattccagagaatggggttactacagcactaaggaagagcttgatgcgctcatggactcattgaatgtcaaaggtataagggagagagctttgaaacggcaactagagaagttctatagtaagataaggctttctgctttcgtgacctgtgatgtcttggtaatcagtgtacttgtacttggaggcttacaaggtgtttgtaatgccctagagaaacgatcaaaagacatcgcaaacaagacgttacttgaagagggtgtgctgcgccgttccacacgtgtccgggcccagccaaaggacaatccgtccatggcattcctcaagtatgtcaacaagtggagggataactga

SEQ ID NO: 25686 - DNA, 636 bp, Zea mays
  Peptide Sequence Number=SeqID_67465
atggactccgcctcgcccgaccccagggctcagactcaaccacgacttagaagacgacgaactccgcctcgcccgaccctgggctcggactcagcctcggctctggaagacgacgaactccgcctcgcccgaccccagggctcggactcagcctcggctccggaagacgatggactccgcctcgcccgaccccaggcctcggactcaacctcgacctcggaggaatcgccacctcgcccaaactcgggtccggaccggccacggcgccagggggccatcattaccctgcccctagctagctcaggctacgaggaacaagaccggcgtcccatctggctcgccccagtaaacaaccggagcgctgcgaggccgatgctgctcccaccgctccggtcgcggcgtggccgacgcgcggcctccgcttgcgaggtgagggcgggcctgcacgggctcgactccgtcggtgggccccaccttcaggccgcgctggagcacgccgaggcggcgctatacacactcgctgacgccgcggacgccgccgtgggcgcgggggccgacgcaggccaggctgtggcggtccaaaagaacagcggctggttcggcttcatctccgaggccctcgaggtcatgctcaag

SEQ ID NO: 25687 - DNA, 1287 bp, Zea mays
  Peptide Sequence Number=SeqID_67466
atgcagccggggcccacctcgccgccgcacgaatccccctcgccgccgcacgaggtgacgccacaggaggagcccgcgaccctgcccctgcccggcgaggaggcccagccccagggccaggctgacgacggcgacgcggtcaaagcggcggcgggagcccgggaggaccggaacgacaggagcggcgccaccgcatccgcccgggggaggaagaggcggaggcgcggcggcacctcctccacctccccctcgcccttcccgtcccctgccgccgccgcggggacgacgcggggggtcgtcatggtcaagcgggacctgctcgcgcgctgcatgacgtgcccgctctgccgccgcctcctccgcgacgccaccaccatctccgagtgcctccacacgttttgcagaaagtgtatatatcagaagtttgatgatgaggaagtagaatgctgcccagtatgtaaaattgatcttggctgcacacctactgagaagcttagagccgatcacagcttacaagatgtaagatcaaaactttttccattcaaaagaaagaagattaatgcagaagaagtttcatctagtatttcacttcccactaaaattaaagaaagatctatctcttcattagtcgtcgatacgcctaaagtaaaaccaacaggcttgactggacggcgaacaagagcagttgccagaaaagctgctgctgtcgccactgccactgtcaccttgcatgaacttcgtccagttattgaagatcctgtgaaaaaggaaattgatagttgtgacagccatcctcatgattcaaatttgcctgctagttcaagcaaagcaccacaaataagaagacagatatcacctaacgtggaggcatctaaccgttcctccaacaaagataccgaaggtgatagtaacgatgagctggcagataagtctgagctctggcgtcctttaaattgtttagtagaagctgccaacaggacaaaatcctttaggtcaagttcacagagtccagttgttaagggagagcaacccaatggctctacgagtagtacatttgctagcaaagcaaaggcaagggagaatctggagaagtccaaaattcaggatgacaaaaaagatgttcccatgccaccagtgctgccaaaaagaagagctcaaggtactgcgcggaagaagagagatcgtcttcaagctccaactgatgtgaagcctgatgctgcagttgcacagaatgcaaagaagttcagctccatatggttttcattgattgcctcatttgaccagtaa

SEQ ID NO: 25688 - DNA, 927 bp, Zea mays
  Peptide Sequence Number=SeqID_67467
atggagagcagtggaggtggaggatggctggctgctagtgctggtcttgggcgctggcagagtggagccgcagaggatggctggctggtcttgggtgcagatctgctgtggggtaggcggccagcggtggcgcaggttatgaactgtcctaatatgagcgagctatcactgtgcttcacagaacatagtagtgattgtaccaatctgattactttgatggatggcctaggtcgtacatgtcctaacttggaaaaaatgcacatatcatcaaaacaattatctaatgaagctgtatgtgctctagagaatgctaatctcaggggactgttcatgctatccctgattctaggttcaaaaataactgatgcagctgttgcatctattgttcggtcatgtgcaagcttggagttacttgatttaagtggatctagcattagtgacaatggtgttgggatgatatgtaaagcataccctcgtactttatcaaggctgctccttgctctttgcccaaatgtgaccacacgtgggatccagctagccacagcacagttgccatgtcttcaactcatggactgtggaatgagcctatgtgctaatgtgaagaatgaaaaagagggtccatattttggtgaaatcaatggaggtattagaattattcgaaaactgtccatcttaaagaggcaacctattcaccaaaagcttattataaagcatgggaatttgaagaagctcagcctgtggggctgttctgcattagatgctctatatctaaattgtccagagttaaatgatctcaatcttaactcttgcacaaatctacatccagaattacttgccccagaacgtctgcttcttcagtgcccaaatttaaagaatgtctatgcatccggatgccaagatatgttgattggagcaatcagaaatcag

SEQ ID NO: 25689 - DNA, 312 bp, Zea mays
  Peptide Sequence Number=SeqID_67468
atggctttcgaaaatgttaatgaagtaaggaaagaggaggagagggaggccgtgcggtggcgatgtcctatttgggcggaggcacagccccacagcacggtgccgggcagccggccgccgtgggtgcagaactacatacaaaagaaggtagcagtggtagtaggcagagaaagaatagatgagccggcagagggaaaatgtgctgccgtcccacctgctcctaccgctggagctgctggactgcacgtctcgccggcctgtgatgcctctgcactgctacctgtgcctggctggagaacaggacacacgtag

SEQ ID NO: 25690 - DNA, 402 bp, Zea mays
  Peptide Sequence Number=SeqID_67469
atgcagcagggcgacggcacggaggcgcaggtgacgtgggaggaccagcagaacatcaaccgcttcggtcgcctcaacaaccgcctccacgagctccaggacgagatcaagctcgcgaagattttggcatattatgagaaggagacgaatgagaaccttgatgatgctgggaatgaactcatcttgtcggatgaagacgttgtacgcttccaaattggggaagtgtttgctcacatgccaagggatgacgtcgagactaggctggagcagatgaaagaggatgcggctaagaagctggagaggttagaggaggaaaaggaatccatcctggcccagatggccgagctgaagaagatactgtacgggaagttcaaggatgccatcaacctggaggaagattag

SEQ ID NO: 25691 - DNA, 249 bp, Zea mays
  Peptide Sequence Number=SeqID_67470
atggcagtggccggattggcgccctcaccggcgcccgcgctgctccggaggttcccgtgctctgcgcctccctgggcgccctcgcccttccgcccccgccgcccccgccgcggccgctccatgatgtcgccgttcactggcgccagaagggggatgagtgagccaaatattgtctgttctgtaatttgcctctgcacccatagcccgcaggatggagctattgctttttggtggtggtgtttttgctga

SEQ ID NO: 25692 - DNA, 777 bp, Zea mays
  Peptide Sequence Number=SeqID_67471
gagttggattctcctatccaatcagaaagcagtggcatcgcaagtagcaacggtggagctagagagggccccgcagagcagcgcgacgacagggcagctgggcaggcagagctgagctcatgcgggagcggccggctgaactcaaaactcttcatccctgacactgtgcagctagccctcgcctcgcgcagcagcaaaggagctatatcagctgcctctgcctgcttcgctcgttcccatatagagccttcgttccggccggcctctcgatcggtgctccgccgccgccaccgtaccgtcgtcacacgccgcgcgcgcgacgtcgtcgtctcagctagtagccgacactgtcaagcgcgcgcgccgggctcgtgcggtttctctgggccgatggggaggcacactggtgctggaattcactgctccgtccctctcgctctgacggtagtagtgctgctgctgctcgcctccgtctcagtgagtcatggcatcagaccagctcctgttgctggggcgaatggactggtgcatgactcgacggcagagatggtcgtcgtcgccacagcaccgtcagctcctgcgcaggggaggcagatgagcaggggcggcaagaaggacgacgacggcgacgacaacgtgctgctgcgggaggaggtggtgcgcgcgacggggtcgagcctcccggactgctcgcacgcgtgcggggcgtgctcgccgtgcagccgcgtcatggtcagcttcaagtgctccgccgccgagccgctgccgtgccccatg

SEQ ID NO: 25693 - DNA, 1558 bp, Zea mays
  Peptide Sequence Number=SeqID_67472
agaagacgcattgagcggtgcggaggacctgaggccggagtccgtgaggtgtgaggggccagagtccgctgagggggcgcatcgcttaacgcgaaaggacgaagcagcgagaacttacctggagggaatcacggatgcgctcaacatgactgacgaaatgctgagcgcccgctcgttctcgaggcagctcatggaccagatttatctagccaaaacatatgtcgtcgttgccaaggaggccaacaacctgcagtttgtggcggagcttagtgcccaggtacggcgggcgcagagcatccttgcgcatgctgcagcctatgggggcacggtgatggagcaggaagcagagaaggcgatcagggatatgtcggtgctgctcttccaggcgcagcagcttcggtacgacagcagtatcacaatcatgaagttgaaaggccagattcagtccctagaggagaagtcgaaagttgaggtggagaaaagcacaaaatatggccagattgctgctgaggacctcccaaagggactttattgccttggtgtccggttaaccatggaatggtttaagagtcccgagcttcagaggaagttttcggataggagcccagcagtgcagagcaatctgagggataacagcctctatcatttttgtgtcttctcagacaacatccttgctgtttcagttgttgttaattctacggctataaactcgaggcaccctgacaaggttgtttttcacttagtgactgatgagttgaactatgctccgatgaaggcatggtttggcatgaatgactacagaggggtcactgtggagatacaaaaggtggaggactttacctggctcaatgcatcgtatgttcccgttcttaaacagctacagaatgctgctacacagaagttctacttctctggcagtggtagtcgtggaacaccaattaaattcaggaacccaaagtacttatcaatgcttaaccacttgaggttttatattccagaaatatatcctgaattgcagaaggtggtatttcttgatgatgatatcgttgttcagaaggacctatcagaattgtttactatcaacctcaatggcaatgtgatgggtgctgtagagacttgcatggagacattccacagatttcataagtatcttaaccattcccatcctctaatccgtgctcattttgaccctgatgcttgcggctgggcatttggtatgaacgtgcttgatctggttgaatggaggaacaagaatgtgacaggcatatatcattattggcaggagcgcaatgctgatcatactctatggaagcttgggtctttaccacctggacttcttgctttctatggcttggttgaagcattggatcccaaatggcatgtcttgggacttggctacacaaatgtggatcttgctactatcaaggaaggtgcagtactgcactacaatggaaatatgaagccatggctcaaaatcggaatggagaagtacaagagcttttgggataactatgtggactattcacaccctttgattcagcagtgcttcatgcgttga

SEQ ID NO: 25694 - DNA, 396 bp, Zea mays
  Peptide Sequence Number=SeqID_67473
atggtcatcttcaagagaacaaaggtgatgccaatgagcaatcagatgatactcccagagggaagccattcagataaatccgagcttcaacaggggaaccaaacactgatagacaaccaggaagccagcaaagaagaatcagacagcacaagacaggtggagaaccctcaagatgaggccagcaaccacagcagagaaagtaaagtgctggagaaggaaaatgagaaagaaataaatcgtgagggcacgagctcagaagtcagcttgagtgaagccagccagaacaaaacgcaagcagtggaacctgttgttgaccccacggatgtaaaccccagcacatccacaaataatgagagaagagaaacaagcaagagacatagaaaggagaaggtctag

SEQ ID NO: 25695 - DNA, 249 bp, Zea mays
  Peptide Sequence Number=SeqID_67474
atggcaagtgcgggcggcccaaaaggaaaggcggccccggcgagcgagcactttgggcaaagcggagggaggctgacagatgattggcatggcgatgggtggcggtggcgcgctgagaggacgtacgttgagcagcagcgagtcagcgacacgtacgttcgtgcacagggtaagttcgccgtgtgccgatctactcgatcggcagctttgatagctagccggccgcaccacgtgcaattttttaattga

SEQ ID NO: 25696 - DNA, 2730 bp, Zea mays
  Peptide Sequence Number=SeqID_67475
atgcccgacataccgagggatgtcgccgagcactcgctggatattcgggccggggcccgacccgtcaggcagcctctgcgccgattcgacgaggagaagcgcagagtgattggcgaagagatccacaagctaatggcagcagggttcatcaaagaggtattccatcccgaatggcttgccaaccctgtgcttgtgaggaagaaaggggggaaatggcggatgtgtgtagactacactggtctcaacaaagcatgtccgaaggttccctaccctctccctcgcatcgatcaaatcgtggattccaccgctgggtgcgaaaccctgtccttcctcgatgcctactcagggtatcaccagatccggatgaaagagtccgaccagctcacgacttctttcatcacgccgttcggcatgtactgctatgtcaccatgccgttcggtttgaggaatgcgggcgcgacgtaccagcggtgcatgaaccatgtgttcggcgaacacatcggtcgcacagtcgaggcctatgtcgatgacatcgtagtcaagacaaggaaggcttccgacctcctctccgaccttgaagcgacattccgatgtctcaaggcgaaaggagtcaagctcaatcctgagaagtgtgtcttcggggtgccccgaggcatgctcctggggttcatcgtctccgagcgaggcatcgaagccaacccggagaagatcgcggccatcaccagcatgggacccatcaaggacttaaaaggcgtacagagggtcatgggatgcctcgcggccctgagccgcttcatctcacgcctcggcgaaagaggtctgcctctgtaccgcctcttaaggaaggccgagtgtttcgcttggacccctgaggccgaggaagccctcaggaacctgaaggcgctccttaccaaggcgcctgtcttggtgcccccagctgatggagaagccctcttggtctacgtcgccgcgaccactcaggtggttagcgccgcgattgtggtcgagaggcaagaggaagggcatgcactgcccgttcagaggccggtctacttcgtcagcgaagtgctgtccgagaccaagatccgctacccacaagttcagaagctgctgtatgctgtgatcctgacgaggcggaagttacgacactacttcgagtctcatccggtaactgtggtgtcatccttccccctgggggagatcatccagtgccgagaggcctcgggcaggatcgcaaagtgcgcggtggaaatcatgggcgaaacaatctcgttcgcccctcggaaggccatcaagtcccaggtgttggcggacttcgtggccgaatgggtcgacacccagctgccgacggctccgatccaaccggagctctggaccatgtttttcgacgggtcgctgatgaggacaggagccggcgcgggcctgctcttcatctcgccccttggaaagcacctgcgctacgtgctgcgcctccattttccggcgtccaacaatgtggccgagtacgaagctctggtcaacgggttgcggatcgccatcgagctaggggtcagacgcctcgacgcccgcggtgattcgcagctcgtcatcgaccaagtcatgaagaactcccactgccgcgacccgaagatggaggcctactgcgatgaggttcggcgcctggaggacaagttcttcgggctcgagctcaaccacatcgctcggcgcttcaacgagactgcagacgagctggctaaaatagcctcggggcgaacgacggtccccccggacgtcttctcccgggatctgcatcgaccctctatcaagatcgacgacgcgcccgagcccgaggcgccctcggctcaggccgaggtgccctcggcacagcccgaggcaccctcggctcagcccgaggtaccctcggcccccgagggagaggcactgggcgtcgaggaagagcagaatggggccacgcctaatcgagattggcaggccccgtacctgcaatatctccgtcgaggagagctaccccccgaccaagtcgaggctcggcgggtagcgcgacgcgccaagtcgttcgtcttgctgggcgatgaagaggagctctaccatcgcagcccctcgggcatcctccagccatgcgtctccatcgccgaaggtcaggaactactgcaagaaatacactcgggggcttgcggccatcatgcagcgcctcgagcccttgtcgggaatgctttccggcaaggcttctactggccaacggcggtggctgacgccactagaattgtccgcacctgcgaagggtgccaattctatgcgaagcagacccacctgcccgctcaggctctgcagacgatacccatcacctggcccttcgttgtatggggtctggacctcgtcggtcccttgcagaaggcgcccgggggctacacgcacctgctggtcgccatcgacaaattctccaagtggatcgaagtccgacccctgagcagcatcaggtccgagcaggcggtggcgttcttcaccaacatcatccatcgcttcggggtcccaaactccatcatcaccgacaacggtacccagttcaccggcaaaaaattcttggatttttgcgaggatcaccatatccgggtggactgggccgccgtggctcatcccatgtcgaatgggcaagtagagcgtgccaacggcatgattctacaagggctcaagcctcggatctacaacggcctcaacaagttcggcaagtga

SEQ ID NO: 25697 - DNA, 345 bp, Zea mays
  Peptide Sequence Number=SeqID_67476
atgaggaggaaagtggatgaactggaagccaaaacatctgccctaagtattgagagggcagaattgaaaaacaagctcatggattcagaaactaccaccacatatcttaccaacacccagaaagaattggaagcagctcttgtggagaaagagagccatatcaaccaaatgaaagagagtgcagctgctgcaaacacagaccagacaacaactataaaggaactcctgcagcagaaagaagctgggcctgagcttgacaaatccgaaagtacagtgattcgattcctgctacatcagaagaatatttcaacagtatacaatttcagaagagcaggaccccattga

SEQ ID NO: 25698 - DNA, 264 bp, Zea mays
  Peptide Sequence Number=SeqID_67477
atgtcctttgtatctgagtaccctatcgagtcgatcgaagatccatttgatcaggatgactggagcacttatgccaaactcactgatgagattggacagaaagtgcagattgtaggagatgatcttctcgttaccaaccccacctcctatgcacaagatgcagttttaaacgttacctgcttggcctatgctgtacagagggtcgccaaggccatcaatgagaagacctacaatgctctcctcttgaagttcagtgacatttaa

SEQ ID NO: 25699 - DNA, 402 bp, Zea mays
  Peptide Sequence Number=SeqID_67478
atggaatccagaaaaattgagtacaaggaatgtagagaacaaaggggagattgttgggtgtgtcctctacagccggtcaatagagactggattgggcttaacccaactatcgtttctttaatcggacccttgatcgggagggcccacgctaacctcggttggagcccccagacacacgacgctatatataggactaaggggtcgcaggaaagactaacgctagtacctcgccccaaaaccctagtcctcagatgcccccatcgcctaggcgtcggagtgtttggaaacgcgacaacctacagcggctcggatcccgatgcctgctgcttctctgcaaggcgacggtatgaagatagcaacagcaacaaaggtaagttaatcacccgagaacagacagtttag

SEQ ID NO: 25700 - DNA, 156 bp, Zea mays
  Peptide Sequence Number=SeqID_67479
atgctgctcggtggtgaggacatgcacaggttcccgatctacctgatgttcccggctgactccacctatagcgaggaggatgtgtccaactacttcaggaagctgcagcacgcgcaccatggcggagccgagttcgccgggttcattgccttttga

SEQ ID NO: 25701 - DNA, 1764 bp, Zea mays
  Peptide Sequence Number=SeqID_67480
atggggactcggccgcggggggtcgtcctcgcgccatgggcggtggtgctggtgctggtgctcgcgcttcgtctggcaggcgcgtcgcatgtgatccaccgcagcctggaggccgaggcggcgccgtcggtcccggcctccattgtcagccccctgctcaggacggggtaccatttccagccgccaatgaactggatcaacgctccgctgtactacaaaggatggtatcacctgttctaccagtacaaccccaagggcgcggtatggggcaacatcgtgtgggcgcactcggtgtcgcgcgacctgatcaactgggtggcgctggagcccgccatctaccccagcatcccgtccgacaagtacggctgctggtcgggctcggcgacgatcctggaggacggcacgccggcgatcctgtacacggggatcgaccgggcggacatcaactaccaggtgcaggtgctggcgctccccaaggacgcgtccgacccgctgctccgcgagtgggagaagccggaggagtacaacccggtggcgacgccggcggccggcggcatcaacgcgacgcagttccgcgacccgacgacggcgtggcggcacgcggggcactggcggatgctggtgggcagcgtgcgcggcgcgcgcgggatggcgctggtgtaccggagccgggacttcaggaagtggaccaaggccaagcacccgctgcactcggcggcgctgacggggatgtgggagtgccccgacttcttcccggtgtccgggccggggctgcaggccggcctcgacacctccgcgcccggaaggaagtacgtgctcaagagcagcctggacctcacccgctacgactactacaccatcgggtcgtacgacggcggcaaggaccggtactaccccgacgaccccgccggcgactaccaccaccgcctgcgctacgactacggcaactactacgcgtccaagacgttctacgaccccgtggagcgccgccgcgtgctgctcgggtgggccaacgagtccgacagcgtcaccgacgacaaggccaagggctgggccggcatccatgcgatcccaaggaagatctggctggaccccaccgggaagcagctgctgcagtggcccatccacgaggtcgagaagctcagggggaaggccgtcagtgtggacgccaagctggtcaagcccggcgaccattttgaggtcacaggcatcgcaacttatcaggctgacgtggaggtgagcttcgagctggagctggaggcggggacgagcctgctggagaaggcggaggcgttcgacccggcgtacgacgacgacgcgcagaagctgtgcggagtcaagggcgcggacgccaggggcggcgtggggccattcggcctctgggtgctggcctccgccgacctgcaggagcggacggccgtcttcttcagggtgttcagggacggacacggcaagcccaaggtgctcatgtgcaccgaccccaccaagtcgtctcttagtccggatctgtacaagccgaccttcgcgggcttcgtcgacgccgacatctccagcggcaagatcacccttagaagcttgatcgatcggtccgtggtcgagagcttcggcgcgggaggcaagacgtgcatcctgtcacgggtgtacccgtccatcgccgtcgggaaggacgctcacctctacgttttcaacaacggcgaggtggacgtcacggtgtccggcctgaccgcctgggagatgaagaaaccgctgatgaacggcgcctga

SEQ ID NO: 25702 - DNA, 438 bp, Zea mays
  Peptide Sequence Number=SeqID_67481
atgggcaagagcaagaaaggtggcagctcttcgcatcactcgggcgacaagcacaagcgcgagccgactcctccctcggaggacttcggcgactcggaatactcggaggaggagttctcctccgagtccgagggctctccggctcctgcctctcccccggcgtcgtctaatgattcagacgactcccagggaatcgccgcggaggtatggacctacatccgggccgtcgagcgtgtcgggctcgagggctcggatgagtcggagtactcctcagatgaggaggattcctctgacttgtccgaggagggcagcggcggcgacggtggcagtggcagcggcagcggcaagggcggtgacggcagctgcaagggcggcggcggcgacggcggcagcggcagcaagggcagcagcaagggcagcaaaaaggccagtggctag

SEQ ID NO: 25703 - DNA, 579 bp, Zea mays
  Peptide Sequence Number=SeqID_67482
atgccgagcagccgcgcgcagagccggaccagaagcccaagcaccgaagcaggacgccgctccctgcccttttccctgcctgacgcccgcgaccgcgctcccagcagccgcctggcccgcgcacccgcctcgcgcatcccgcgcaatgcgcgtgccgagccccctgcaccccgaccctggccgagcagccccgcccccgagcagcacccacgacaggagccccacccgacccgagccgctggacgccaagacaccgagccgccggcccctgccgcgctctgccctaaggccgacgccacccgcgcgcagcgcccgaccgcaccagcgcccctgtccagagacccgcccacgccaaccgacgcgccaggcagccgtgcaccatgcccgacggtgcgctgcaagcccgaagaccgaccgacgcccaaggacaccgaagcatcgcgacgtccgttcttctccctgcgttatggaccttcaagacaaccgtttcttcctcgccattactccttaccgccatcaatggcagccatgaagccacccgttgtttctctccccttccccggtgccctctctctataa

SEQ ID NO: 25704 - DNA, 495 bp, Zea mays
  Peptide Sequence Number=SeqID_67483
atgcccccttcaccaccacagggaattccggctgcaggaggagaccctgaaagagacggagacgacaatgacgacagtggtagttcgagccacaacacggagctcttggaggagaaggagccagagggatggatcgctagacccatcactcgtggcaccgctcgcggttgtcacttccacaacactctcgacctgaagtactaccctcgttgttcggccggtagtgttggaggtgtgattgtctcactagttggtgagggcaatcccatgctaaacaatatggtcaacctggtcgttgtgctcaacaccgagctggaccacgcccttgacgagttgggcaaggcttgtgcgaagattcggaactgcgtgctgagcgtgcagcacgccactatcaggatggtggttccctcgctcctgtcgagattcagcacccttaccacttgccgccccgtggttgcttttcttatggcactcctgactgcaggacccagatag

SEQ ID NO: 25705 - DNA, 1512 bp, Zea mays
  Peptide Sequence Number=SeqID_67484
atggccgtgtaccgccgggtcgtggacaacatcctcgccgtcgtggcggtgccggtcgccgcggccgcgctggtcgccgcggcgcggttcgggccgccggaggaactggccggccggctcggtgaggtgcgacccgcgcacctcttcctcgccgcgttcgtcccggccgcggctgccacggtgtacctcatgctgcggccgcgggcggtgtacctggtggactacgcctgcttccgcacggcgtccaactgccgcgtccccttctccaccttcctggagcacgcgaagcagcctgtcaggggttgcaccctcaaccttataaaccatgctatcacactctcaccacacaatgtgggactattcccaacagtgccggtgctcaacgagcgcagcatccggttcatgaccaagctgctggagcgctcggggctcggggaggagacgtgcctgccccccgcgcaccactacatcccgccctacaagtactgcaccatcgacgcggcgcgcggcgaggtggacctcgtcgtcttctcgacgctcgacgacctgttcgccaagacgggcgtcagccccggcgccatcgacatcgtcgtcgccaactgcagcctcttctgccccacgccgtccttggtcgacatgatcataaacaggtacgggctgcgcagcgacgtccgcagcgtgcacctctccggcatggggtgcagcgccgggctcatctccgtggggctcgccaggaacctcctccaggtcgctccggaaggcacgcacgcgctggtcgtctccacggagaccatcacgcccaactactacgtcggcagcgagcgtgccatgctccttcccaactgcctcttccgcataggcggcgccgcggcgttgctgtccaactccccggccaaggccaggttccgcctcaagcacgtcgtgcgcacgctcaccggcgcgcaggacaacgcgtacacgtgcgtgttccagcaggaggacgacagcggcaacgtcgggatcaacctgaacaaggacctgatgaccatcgccgggaacgcgctcaaggccaacatcaccgccatgggacccctcgtcctcccggcctcggagcagctcctgttcgccctctccttcatcgcgcggaaggtgctcagcggcaagttcaagccgtacatccccgacttccgcaccgccttcgaccacttctgcatccacgcgggcggccgcgccgtcatcgacgagctgcagcgcagcctcaaactgtcggacgagcaggtagaggcgtccaggatggcgttgcaccggttcgggaacacgtccagcagctcgctgtggtacgagctagcgtacatcgaggccaaggggcggatgcggaggggtgaccgagtctggatgattggttttgggtccggtttcaagtgcaacagcgcggcgtgggagtgcatcgcgcccgcggcggacgcgcagggaccctgggcaacgtccatccacaggtacccggtggacattccagacgtgctcaagcactaa

SEQ ID NO: 25706 - DNA, 324 bp, Zea mays
  Peptide Sequence Number=SeqID_67485
atggcgggttctgacgcgtcgcggggaggccggggtcgctggggcggctgctggcggcttcgggcgtcgggcttcggtctgctggggcggcgtggaagctcctggcggctggtggagcgtcgggcgtcgggctcgcagacgcagcggcgtgctcggcctggacggctgggcttggctgcagggtcgggcttggtgcttcggtgtgcgggcggcttccggtccatggcgcagtcgggcagggcgaggcggctggcgtgcagtagagaggcagggaggaggagagagcggcggctggagaccaggggcggctaccgtttagggtag

SEQ ID NO: 25707 - DNA, 219 bp, Zea mays
  Peptide Sequence Number=SeqID_67486
atggcgcggtttggccggctccggaatccagggcgcgttttgttgccgattcaaaccacccgagctacagacggaatccggtgcgacaacttggctacgatggcggcgattgttatggtccgccgcgaggaagatggacccgacgagatggccccaccaatcagggaagaaattgctggctcgtggggattgcgaggctggcggggtggccccacatga

SEQ ID NO: 25708 - DNA, 942 bp, Zea mays
  Peptide Sequence Number=SeqID_67487
atgggaagtaaagacggcaccggtgacatatcggaagcccaaggctatgctgccgacattgattccatcagggaggcgcaggcccgcattgcgccgtacgttcacaggacgcccgttatgtcgtcgacgtccatcgatgccatggtggggaagaagctcttcttcaagtgcgagtgcttccagaaagcgggcgcattcaagatccgaggtgcttcgaattcgatattcgcacttgacgatgagcaggtatcaaagggcgttgtgacacatagcagatgcgacatcagtagaacagaaagtgggaaccatgccgctgctgtggctttggctgcaaagctgcgtggcatacctgcgcacattgtcattccaagaaatgcaccagcgtgtaaggttgaaaatgttaagcgctacggtggtcatattatttggagcgatgccagcattgaatcgagagaatatgtttgtaaaagagtccaggaggagaccggcgctgttcttattcatcccttcaatagtaaatacactatcagacaaaatggtcagggtacagtatcccttgaacttttggagcaagtccctgaaattgacacaataattgttcccattagtggtggtggtttaatttctggtgtggcccttgctgcaaaggccataaacccttcgatacgcattctagcagcagaaccaaaaggcctgtggtgcgtgaacttggtggacgatgttatcgttgtggatgacactgccattgtggacgccatgaaaatgtgctatgagatcctgaaggtggctgttgagcccagtggcgcaattggcctggccgcagcactgtccgacgagtttaagcaaagctctgcttggcacgagagcagcaagatagggataattgtttctggagggaatgttgaccttggcactctctggcagtctatgtacaaacactga

SEQ ID NO: 25709 - DNA, 303 bp, Zea mays
  Peptide Sequence Number=SeqID_67488
atgcagacggcatacaactgcaccaaggggacgcaccctttcgacttcgacgcgtccagcatggaggcccaggcccacacgtcatgtaaccgacgcgccggttactacgtgcgagaaactgcaccgccacttgcgccagtgtcgtgcatcctcgaccgcggaatcggtgccgtgactcgaggcaaccctgcgcacggcccagcagtgccaacccaggcatgccggtcacggggacctggaaaggggatactccgaaagggatccttccccgcgaaggaagcgggccccgagccctcctactga

SEQ ID NO: 25710 - DNA, 402 bp, Zea mays
  Peptide Sequence Number=SeqID_67489
atggcggcgagcactcgagccctctttctctcctgtttccacggcggcggcggcgccgaggtgagccgccacctcgcgctgcggccgcggtacccgtccaatccgcggcgccctaggtcggccgtggtagccggcgaaggaggtgaaggcggaggaagcggtggtgatctggaggccgcgaaagggacggcggatagggacgaggaggagaaagtgtcggtgttcgcggtgacgggaatgacgtgtgccgcctgcgcggggtcggtggagaaggccgtgaagcggctcccgggcatccatgacgccgccgtcgacgtcctcgggggacgcgcgcaggtcgtcttctatcccgccttcgtgtcgaactctaaattagaacatcttatgcagatcgctatgtga

SEQ ID NO: 25711 - DNA, 1877 bp, Zea mays
  Peptide Sequence Number=SeqID_67490
cgctaattattactctggccatgttccagccatgcctgctcgccaacgcctccagctccactggaggtgtgcatctagggtcccagcaagcggccctcctccagtggaagtccaccctacggagcagctcagcgtcgctggattcatggcgggccgggaccagcccgtgcagcagcaactggacgggcgttgtttgcggcgccgtggcgcaccgtggtcgccgcgccacgcctcaggcggtggtccgcatcgacctgccgaacgccggtgtcgacgggcgcctcggtgcgctcaacttctcggcgctcccgttcctccgatacatcgacctcagctacaacagccttcgcggtgagatccctcggtccatcgcctcattaccggagctctcccaccttgacctcaccggcaacaggctccatgggcacgtaccacgggagatgggcagcatgggaagcctgaccgtgctgttgctctccctgaacaacctcacaggaaccatccctgcgtccattggcaacctaactaggctagttcagcttaccatccacaaaacctcgctcatagggtccatcccggaggagctcagcaagctcaccagcctagagtatttgcagctaagtggcgacttactgagcggccggataccggaaagccttggcaacctgaccaaagctaagcctcctgcgcctttacgacaaccagctatcagtaggaaccagctcgtaggccgtatcccaccgagcctggggaaccttagcgcactctacgaaatctggatgtacgagaacgagctggcaggctcagtcccagctgaaattggcgctttggcgggcctgcagacgctgcatttagccgagaatctcatttcaggtccagtccctgaaactctcaccggcctcacgaatctgaacatgctccagatcttcagcaacaagctctccggtcctctgcctctagggttttcaaaccttagcaagctggaagtgctcgatcttgccaataactctttctcgggagacttgccctctgggttctgcaatcaggggaacctcatacagttcactgtctccttgaacatcaaagatctgggcctcgagcatcacctgaccatcttcgacgtgtccagcaacatgaaccaattctcaggcaacatcccgcctgaattcggtcggatgagcagcttacagtaccttgatatacagctgaacagccttagtgggccgataccgcaggagcttggcagctgcactcagctgctgttcttgcggatcaatggcaacaggttgaccgggcatctgccggtaacccttggaagcctgtggaagctgcagattgtgttggatgtcagcagcaacgaactcacgggtgagctaccgccgcagcttgggaacctggtgatgttggagctcttaaacctctcccacaacaacttcagtggcagcataccttcctccttctccagcatggctagcttgtcaacccttgacgtcacatacaacgacttggaaggccctcttccaacggggcggctgttttcaaatgcctcgtcaccagtaacatggttcctccacaacaatggcctctgcggaaatctcaccgggcttccagcatgctcttcacctccaacaatagggtaccaccacaacagtcgaaggaggaggactcgcatcttggttgcaacgaccatttctgttcccttgtgcatgctcaccgttctttttggaatcattgtgatcatccgcagaagcgataaaccacacaagcaggcaacaacgacgaccacagctggtagaggtgatgtgttttcggtgtggaattttgatggaagactagcattgaggacatcgttcgggcgacagaaaactcagcgagag

SEQ ID NO: 25712 - DNA, 1447 bp, Zea mays
  Peptide Sequence Number=SeqID_67491
atggcttaacggattttggagaacaaatcgtcttgaaggtactatcacaaaagtggaatttgttgctgttttagtctattggattgcatctgcacactttgctacagatcagcaatctgttcctctagaggagcagaacccagaggaccttactcttttgtctcgtttctcatatacaaactggcaattaactgactggtgtctttctcagcgatacacttcatgtactaacgataccatgattgattctgataagcatacatggcagatatgtacatgctcagaaaactcagttccactgtctggtattccagaatctcaagctgatgctcagattgatacagatacaggtcacaggcagacagatgttgattctactgcagatgtattgagtatgtcggatggagataattcatgcatagccaaagaatcagaaacaggaactagtgcatcaagcatctcaaatgagggtccacaggacaatgcaacatctagaaaaaagtttaggaaagatgggacaaaggaatgtggagtagccgcaacagcattgatccctatccacagtccaaatgaacatgaattcttcccggagcagtatgttgtggataaagtcacaaatgatgttggtgttgatgattcttctgaaccaaggcgtgtgggtcttgttagaggtgttaatgctaaggaccgaacagcaactgtgtcatggtttaagcctcctctacatccagaggagccaaaggagatcgcatgtaacgaaattgtgagtgtatatgaactggatgtccatccagattatgattattgctatggagatattgttgtccgcttgccgcctgttaaaccggtaattgagtcaaccaatagcaaggaacaaatggaactggataagacgttagattcctcggaaggatttgctgcttcatattctgcaccccctgatactagtgcagacgaacagctttcacagaaggaatcctgcttgcagtttacaagcctctcttgggctggaaatatagttggctttcaagacggtgagattgaagtcatttggggtgatggatcgatttctaaggttggtcctcatgaaatatatgttgttggtcgtgaagatgatggtgcctcactagatgatggaacagcctctgatggttctagctgggagactgttgatgacaacgaaatggatgtacttcatgattctgcaaagggtgattcgcaaaatgtacctgagaatagcattggaagggaaaatggttcattcagctcccaggatggaagttctgttgcaactggtcccctttcagttgcttttgagtttgtgacccgactggcgagtgatctctttgctcgaggtagaaggcatttagatggatcatcagatgctatggatgaagttgagtctcactggtctaatgagatttcagaaattggtgatgacatttga

SEQ ID NO: 25713 - DNA, 594 bp, Zea mays
  Peptide Sequence Number=SeqID_67492
atggctaatcccactcaaattggtgatatgacaagttttaacatatttaggaaggtacaggtggaaaaaagtgggtcaaaaaggtacaacaggaattggagcatacttgagaagaacctaccagactatatttatgtcagggtatttgaggatcgcatggatctcttgagagccgtgattgttggagcaagtggaacaccctaccaagatggccttttcttctttgatttccaccttccacttgagtatccgctagtccctccgtcagcatactatcattctggtggtttgcgtgtaaatccaaacctgtatgtggacgggaagcattttgaggattttgtgaagagccacttccgcaagcgtggtcactacatccttaaagcttgccacgcctatttgcaaggaaatgttgttggcactctcaccgacgacgcgtgcaccaccgacagaagcaaagagcactcgagctctgttggcttcaagcttgtactagcaaagattttaccacggttgattacagccctgaaggacactggagctgactgcgaccaatacgagcacctcgggagaacagaaaccgttacagaaagctga

SEQ ID NO: 25714 - DNA, 1797 bp, Zea mays
  Peptide Sequence Number=SeqID_67493
atggtagccgccagagcacaactcgccgctcttctcctcctcgtcgccgccgtctgctctgccaccgggttcaggccgggcgggggcggcccgccgtcggtaacggaggacacccttgagaaggtggccgcctcgctggaaatgtacgtcgacgcgctccctcagatgcctaaggtcctcggctactccatcaagcacggccgccccacgccgactcacctcaccatcgggatgtaccagaaaaagtggaaattccaccgggacctgccgccgacgaccgtgttcgtgttcggcacgtcggtggagagcgcgaccttcccagggcccaccatcgaggcgctgcagggggtcccgctgcaggtgacgtgggacaaccacctccccgaccgccacatcctgccgtgggaccccacggtgcccaccgccatccccaggggcggcggcgtccccacggccgtccacctccacggcggcgtccacccgccgcagtccgacggccacgcctacgcctggttcaccgcgggcttccgggagaggggccccgcgtggacgacgcccacgtacgcgtacccgaacgtgcagtcgcccggcggcgcgctctggtaccacgaccacgcgctcggcctcacgcgcgccaacctcctcgcgggcctcctcggcgcctacgtcgtccggaacccggcggcggaggcgccgctcggcctcccccgcggcgacgccttcgaccgggtgctcgtgctcgcagaccgcagcttctacgccgacggctcgctctacatgaaccgcaccggcgacaacccgggcgtccacccgcagtggcagcccgagtacttcggggaggccgtcaccgtcaacggcaaggcctggccgttcctccgcgtcgcgcgccgccgctaccgcttccgcgtcatcaacgccagcaacgcgcgcttcttcaacctctccctgtccgcctcctccgacggcctgagcctgagcctgatcccgctccacgtcgtcggctccgacaccagctacctgccccggccggtcgccgtgacgcacctcctcgtcgccgcggccgaggcgttcgacgtcgtcgtcgatttctccgagtgcgcggcccccgaggcggagctcgtcaacacggcgccgtacccgtaccccgacggcgacgcgccgaaccacctcaacggcaaggtgatgaagttcgtcgtcgagccggcgagggtgcgggacgacgacgacgactcgagggtgccggcgcggctgctggactacgtcaaggtcgccgaggaggacgcggcgcggaggcggtacatcgtgttgtacgagtacgaggacgaggcgacgggcgacccgacgcacctgtacatcaacgggaagcggctggaggacccggcgacggagacgcctcggccgggctccacggaggtgtgggaggtgatcaacctcacgcaggacaaccacccgctgcacctccacctggccacgttccaagccgtgcgcgcgcgggagctcgacggcctggaggagttcaagcactgcatggagaggctcaacgacgcggtccgctgcgacgtgggccggcacgccgtgggggaggaggtggccgtgccggagcacgagaggacgtggaagaacgtcgtcaagatcgcgccggggttcatgaccacggtggtcgtcaagttcctcatggtagacaccggcaggagctacccgttcgacgccacggccgagccaggatacgtctaccattgccacattttggatcatgaggacaacgccatgattcggccgttgaaactgatcaaatga

SEQ ID NO: 25715 - DNA, 483 bp, Zea mays
  Peptide Sequence Number=SeqID_67494
atggccttcgtccgaagatcattatatccttggggagataatgcttcaatggacgaaggtgtccccatcaataaattgcaggctacttgcgcatcagagggacggggtttggggaagaccattcaaactattgcttttttgtcttctgttattggaaaaggaaatggccatggacaattaacaaacaaaggaaagatgactggtcctgtactcatcctctgccctacttcggtgatccggaactgggaaaatgaattttctgagtgggcagaattctctgttgctgtctatcatggtccaattcgtgatttagtttttggaaaaattgaaactcaaggactggaggtactcattactagttttgacactttcagaattcatgataaggttttatgtggtatctcgtgggaacttgtggttgttgatgaggcacatcgtctcacggggaccataatgcagaataatattgttttctgcaaataa

SEQ ID NO: 25716 - DNA, 126 bp, Zea mays
  Peptide Sequence Number=SeqID_67495
atggggagccccaattctattcgtgaacaagaaagatggttcaaggagaatgatggctctggcgccgtctgccagcggaatggacaggatgcattaaatgctgaggggcacatcgcctgtcagtag

SEQ ID NO: 25717 - DNA, 1923 bp, Zea mays
  Peptide Sequence Number=SeqID_67496
atgacccccaatgagctgcgctacgaggagcccatcgccgacgactgggacaaaccctccaccgcttccaccgacgagcccaacctcgtccacgtgctccgccacggccctccgcggctcgtcgagagccgcctccatgcactccgcgtggcgcaggagctgggtgcccgtccacgtgctggtgggcgagctcgtgtgcttacgagagaagatgatggcgaccaccatccccatgacctcgggctcggtcgtgccgcgctcgtccctgtacctggcctccatcaggctctgcagcacgtcgtcgtccccggctcggatggaggagcgcctgcgcgaccggacgtcctcggcgaagatactctctttgatggcactgacgtcaccaagctgcctaccacctgttcgacttcggggctcacagccgaactcgccatggcgcactacggctcgcatctacccagtgataagggaggttctatcgcgtcgtggcagccggcgccgtcgctggcgctcgcgtgccagcaggcgtcctccgcgcgcggcacgccgaccatggccagcatggggaagatgagcgttggggacctcacggagtctgacctcaaggggaagcgcgtcttcgtgtgcgtcgagatccacgagccacccgacgagaaccagaacagcaccaacgacatcctctccaccttgaacgcaacgcccataggctcctcaccagagagcacgtcgtgctggttcccgtgtgacaacaagagcagcaagcagctgcagctgcagcgtggcgggccatcgttggccgagcgacaacagccaagagcgatgctagcgtgccgagcgatcacgaaaagggtgaagcagcccaaagaagaggagcaggtggcatcagtgccagaggcggcggtcgtcgccgacgtcgagggcaaggaagagtacaactcggtggcgaggttgaccggggtgaactgccgttctgatttcatcatctggaggagtctgttcaacacgtgctgcaggctgtgcaagttgttcacctgccaggagctcaagctcacagatagccagtctgcattgatcttgattgatgctcaagtggtgtttgaggaaatgcagcaaagtgctacctcggttggtgccccgcaggatgccttcaacatgttctgcaacaagactagttctagcaagcaggtggccagagccatctttgtcaaccctgagcatgatctgtaccccaagatcttccacctagagcatctcatctcagggaaggaggacacaactaacaacttctctcgtggctactacactattggaaagggaatggtgctggtagctaacaactttggtgacgacctccttgctcgccgcagtgagatcaagcaaccatggcctccacctcaggagttggcgtgcttgggtttgaatatcatggttgtctctgtgttccttgctgccagtgacctacatgcagtgacatacatatatgcccagtctttgtttgggatcccggtggtgttgcgaacagcagcttgggggcaagctgcatctcaaggagagagaaatgtcaggtcgctgacattgggtagccgcacaccggtcgtgtgcgaggcaacactcaccaacacgattcctggtgtcacacgaatccccacagccagcagcagcgactcgggtggtgcaggggatgggagaagggggtcgcgaggccatggagtcttttatgcctgctcaggacaaccaccccgcctggagatttggctagcaaatccgcggtggcgagcgacgtatcctcaacaaccccatttacgcggagatggtcaacatgacaaccgtgacccaccagccagaggtgcagagctacggcgcgggcgcggagctttccagctggcaagcagaccccacatgtcggcgagcactgagagatga

SEQ ID NO: 25718 - DNA, 336 bp, Zea mays
  Peptide Sequence Number=SeqID_67497
atggcgttgaacacgacgggcgggggaccgccttcccagaacgctgatgagaaattgggtgtcaggtaccaggcccatatggatcaccattgggcagtgcttgaacggacagtgtccaacgatgtcacccccatagaccccaacgaggtgctcgacaaccaccgcgtcggcgagctcatcgccaccttcacgtctgcggccgatgttgccttctccagcaccgccgacgtcgagtgtggcgtggtccatagctacgcggctactaacatcgagatcgacgtcgtggaggctgctgcggcaactcgcgtcgacgcgctggagtcgtggcgtccgtga

SEQ ID NO: 25719 - DNA, 582 bp, Zea mays
  Peptide Sequence Number=SeqID_67498
atgacgacacgtgcaacaactcgggaaacatgcgcaaaccgacgtgctgcgcgcggcgcggatcctgcgacagcgagggagtttgcatatggttcggatgagggggcttaccacgggcaaacggtgacgaacgacatgggctcgactgacgacggcgagacgcagacgcacgacgaaggtgctgcgcaggctcacgacgtcgaggctttggctaggcgatggcgaggaatgcgggctgcgcgacggctgctgcgagatgcgctggacaggcgcgcgacgcggctgggcgcggggcgtgccacgcgggcagcggtgaggcttgggcgagcgtgctgggcccgactgcggcgcgggcaagcgcgaggagagggagataggagtggggcgttaggggagaaggaagaaaactgggcgcgtgcagttctagcagaggcccacggcggacggttgacgagaacctcgcgacgtgggcgtccgtcgcgggaggacagttggagaagaccgcctggcacgcgggatgggcgagcggatcatgggcgcgccgagcggccgggcgagcagcgcagcgggcgagcgcggtag

SEQ ID NO: 25720 - DNA, 207 bp, Zea mays
  Peptide Sequence Number=SeqID_67499
cttgctatgcttttatggagttatttttctgtcgtgttcacggaccctggttctgttccaccaaattggaatcttgattttgatgtggagatgggagaaactgctcctcttgctagctcagagctctgtagccagatgaactcacagcaatctgtggctcttggcaatatgacaaatccaagggttaggtggaagatgtgttcttaa

SEQ ID NO: 25721 - DNA, 363 bp, Zea mays
  Peptide Sequence Number=SeqID_67500
atggcgcggcgcagcgagggcaagaacaccacaacggcagggccctatgcgcggcgactgtccgacggcaacaacgagggcgcggcgaacaacggcggcatagaggcgagggcgaggcatggcgcgcgccgtgcggaagctctcggccgcggccttgctgggcggtttttgagtgaagcgcggcgaggaagacgtcgaggcttcacaactaggactggcgtgggcgagagaaaccagttctcgaagaaagaggagaacgtggaacgaccgaacgactgggtggctggcgcgtccgcgcgacgcgcacgcgcgacgacgtgctgggggccttacacctggaatgtgtgcgtcgtggggagatag

SEQ ID NO: 25722 - DNA, 534 bp, Zea mays
  Peptide Sequence Number=SeqID_67501
atggcggggcggcgaaggagccgccgtgctcgtgcggcaccgcgtcggagatggcgctcatcgagtcgctgcacgtcttcaagcccgacccgacgcgtgacggggcgagcccctcggagaccatcgagcgggccctcgcgcggggcgctggtcgactactacccgctggtcggtcgcctcgccgtttccgagggcgccggaggcctccacgtcgactgcagcgccgagggcgtctggtttatcgaggccgttgtgcggtgccgcctggaggacgtcgactacctcgagtacccactccagatccccaatgacgacctgctgctgcacccgctgccgaggcctacccacgaggaggagagcaagctgatcctactcgtccaggtgacagcgttcgagtgcggcggcttcgtggtgggcttctggttcagccacgcggtggcggacgggctcggcgcggccaagttcatgggcgcggtgggggagctggcgcgcggggtggaccgagtctccgtggcgcccacctccctgctttga

SEQ ID NO: 25723 - DNA, 879 bp, Zea mays
  Peptide Sequence Number=SeqID_67502
atggctgctgctgtcgcagcccctccgtgggcctccttaggccctgacagcccaccaccccttccgactggggatcccacgaaaccggatcagcttcgccgcacatgcgacatgcaacctcctggtcgcatagtgaagtttgaaataggggatgagataggggagctgctgaagacggcgtcgagctctggtggcggcccagcagtggagttttacaccttcctcgagacaactcttgtcactctctctctattgcctcacttcattgccttcttcagtgatgccgagatcccaggaagtcctgcagcacttgcaaccacatttctcacctttggtaattgcattactgttattatatatataaaatgcgctgcatatgagaagaagacaactccacattggatatatgatcttggccggaagaggaattttgctcaggtttttggaaatgacagaaaatattggttcatccctgcatactcagaagaggatttgagaagaactccagctctacagggtctggattatcctttaactttggaagtttggatacaaattacaagtagcaacttttgccatccaattcagctatggttacaaactgcaagtagaaatagcggtgattcatttgagagatttgaatggcgtttgtcgccctcatgtctttcttcttcctctcatgggaagaagataaagctttcacattggcccagtgccatatttgagacatgttcatatgcagccaatatggcctatgagacccgactcgagattcatgagctccgttaccgctctggtcttcctcctcttgaagttcctcgtcctccgctagcttacagtggtatatctagtggtgaggataatattgaagagatttag

SEQ ID NO: 25724 - DNA, 168 bp, Zea mays
  Peptide Sequence Number=SeqID_67503
atgggagacagttctgacggcagggacccacgcgctagtcgctgtgtcacgctgacgaaccgatcccacgggacagcggcagaaggtgcaggcgcacccgtgctggatctaggccacgaggtaaatatacattctaaagaaatgaagcttttgttaaaaacagtttag

SEQ ID NO: 25725 - DNA, 546 bp, Zea mays
  Peptide Sequence Number=SeqID_67504
atggtgtcaccgactccgggagggaaggatgcaagggagggtggcggcaaggcggagtggatgatctacgccttcgtggcgcgcggcaccgcggtgctggcggagtacacggagttcaccggcaacttccccgccatcgccgcgcaatgcctgcagcggctacccgccgggtcgtcctccgccggcaccggccctgacggccgtggcgatgcgccggcacggttcagctacgcctgtgaccgacacacattcaacttcctcttgtaccgcggctacgcctattgtgtagttgcggaggaatccgttccaaagaatgtctcagtggcatttcttgaaaggttaaaagatgacttcatgaagagatatggtggtggtaaagctgacacagctcttgcaaaatgtctaaataaagaatatggacaagttataaagcagcacattcaatatgttcttgatcattcagaggaactagataaaatgttaaaagtgcaagcccaagtttcagaagtgaaaaatataatgttagacagcatagaaaagatttga

SEQ ID NO: 25726 - DNA, 171 bp, Zea mays
  Peptide Sequence Number=SeqID_67505
atggctacgccttcgtcctcctacgatgactgcattgagtgcttcaaggaattccacgccaagaacatcctcctactccagattagcatcatgctcatatgctcaatggtgtcccgtaccggcggtcgatggtattatagcgtgtgtgatatgtttgataatgtcatttag

SEQ ID NO: 25727 - DNA, 510 bp, Zea mays
  Peptide Sequence Number=SeqID_67506
atgaagaggaaccttcgaccattttacacaaagagcttcagccgaaggttgcttcttcccaaaagaccttcggcgacgaagcacaggcccaacaactcccaagaggacttcctaattaaggaaaacaagaagcatgttaaggttaaaaatgcttacgctctagaagtagaaaaatgtgacaaactatctagtgagctaagcactttccatgacattattgccaaccttagaaatgagaatgctagattaattcctaaggttgattcaaatgtttgtgatgattcaaattccaatcttagaaatgataatgttaatttacttactaagattgaagaattgaatgtttctcttgctagccttaaaattgaaaatgaaaatttaattgctaagactaaagacttggatgtttgcaatgttaccatttcggatcttagaactaaaaatgacatattacatgctaagattgttgaattaaattcttgcaaaccgtctacatctaccgttgagcat

SEQ ID NO: 25728 - DNA, 405 bp, Zea mays
  Peptide Sequence Number=SeqID_67507
atggacgtcggcgcggagctgcgcgaggcccaccgcctgacgggccacgccgaccgcgtgtgggcgctcgcttggaaccccgccccgggccccggctccagccccgttctcgcctcctgcagcggcgacaagaccgtccggatctggaagcgcgcccctgacggcgcctggcagtgctcggggcacgacaacgaggtgaagagcgtgtcatggagcccgtctgggtcactgctcgccacatgcagccgggacaagatggtgtggatatgggaggtgctgccagggaacgagttcgagtgtgtctcggtgctgccgggccacacgcaggacgtcaagatggtgcagtggcacccaattcttgacattttggtctccgtcagctatgataattccatcagggtatga

SEQ ID NO: 25729 - DNA, 582 bp, Zea mays
  Peptide Sequence Number=SeqID_67508
atggaaatagttgcatattttcgtcgaacttattttcggtggctattttcatcggtttacgcttattttcgtgggtttttggcccatgaaaaattaggcgtttcctgtagtgaattgccagtggagctctccatagcagccaatacatctttaattgcattggctcgacatggtattttctacacaaagccattcagaataccatttgctgggaaggttggtgatcccctagaaaaggctgctataaagggcttagactggatctacacatctgatgagaaggccatgtccaaaaagcctggtggtcaacctgttcaaattgtgcacagataccattttgcttctcacttgaagagaatgtctattatcgtctgtattcagcagaaattttatgctttcattaagggtgcaccagagaccatccaagagaaattagttgatttacctgctgcatatgtggagacatataagaaatacacacgacaaggttctcgggtcttggctcttgcatataaattgcttcctgagatgccttgtacttccataaaagccctttgccaaaacaaagcaaaaaacttctag

SEQ ID NO: 25730 - DNA, 3031 bp, Zea mays
  Peptide Sequence Number=SeqID_67509
atggacatcgtggtgggtgcgctgtcgggcatagtggacgcgttgccggggaagctcggcgagctgctggagcaggagtatgcgctgctctccggcgtccgcggggatgtcatcttcctcaaggatgagctatcaagcatgcgcgccgccatccactactgcgagtccctcgaccaccacgactcccagaccactggatggatcagcctcgtccgcgaggtcgcctacgacatcgaggactgggttgacctcttcagcatccgcgtccacggcggtgcccaatccacttccgggtttcgtgcctggcttagccgcagcgtggacaagttaacggcgctccccgctcgccacaccatcgcgagcgagctccagggactcaaggagcgcgttcttgagattagccggcagcggaaccgctacaggctgggccaaatggttggcaccacctcgcaacatccccatgatcccagactttctgcgctcttcgtcgaccccggccgcctcgtcggcttcgatgggaaggtggaggacgtgtccaagactgtcatggacgccggaggtagtaatgggctgagaatcgtctccattgtcgggatggccggctcagggaagacgacgctcgcaaatgctgtgtaccggcgtctccaagcagacaacaccttccagtgctctgctttcgtctccatcggaccgaagccggacatggtgaagacagtcaaggatatgctctcaagactcggcgacggccaccgaggaggcgaggacattagccaactcatcccgagggtcagaggaatactggagaagaaaaggtacctcgcttggatcgatgatatatggagtagtgaacaatggggagtaataaggtgttgttttccagacaacagtcttggtagtaggataatcaccacatcaaggaatgatgcgttgcccaccaatcatcattacggttcaagcaaatttgtctacaagatcggcctccttactgacaatgaagccagggagttgtttctgaagaaagctttcagcagccggaatgactgtccacaacatctggtggatgcttttaccaaggttctgagaaggtgtgctggcttgccacttgctgtggttagcgtagctgccaagttagcacacaagcaatcaagagaagaatgggagaagcatggattgaacttgctatacagctcacattcagatgggtcagatgggctgaagcaaatactccatcttagctacagcgatctacagccacaactcaggtcatgtttgctgtacctgagcatatttcctgagaactcagaggttgagacagatcgcctagtgaggcgatggattgccgaaggactcatcgctgcaagcaatgaggatacggcaatcagttccctcaatgagctaattgggagaaacttggtacaaccgttggatctgaaccatgatagtatcccaaggtgttgcagagtccacccagtgatatatgatttcattgtttgcatgtcgatgcaagacaactttgccactgtaacggatgctcaacatgtcccaatcaacaacaaaactgtccgtcggctgtccctgaatttgaagagcaacagcaagcaagatcagcctgcagcacgaaatgagactactgatttgtctcatgctcgctcagtcactgtcttcggtcacgctagtgccacccctcatctgactgatctgaaagtggtgcgtgtgctggatctcgaaggctgcaaaggtcctgtgtgcttggatggcctatgcaagctggtgctgctgaggtacctgagcctcagaggcactgatgtcagtgaactgccagcggcaattggggatctaaggtgcttggagacacttgatgtgaggtcaacgaaggtggaagagcttcctcccagtattgtaaggctgcaaaagctaatgcatttgcttgctgggagtgccaagctgcctgacgggatggataagatgaaagccctgcggtcattgtcatgcgctgctaccacaaagagctctgccaacgtcgtggaagagctcagcaagcaccataacttgagacaactggaactgtattactatgctactgaaacgcctgggaatgagaagcaaatcaagttccccgctgatgggctccagactgtgaaacaactgtgcatccggtgcacatcaccatcggtgacatttgagccccgtgtactgccaaaggtccaagcacttgtcctgagattcgagaaaggccgtgctgatgacacgattggcgtgtctggcttagagcatctgtcgagcctcaagcatttggtacttgagtttgagcagcatgatgcgggtgccatggcgacagttactgcagtgaggatggctgctgaggggctccatctagatcatcaatatataactctaaaggtggatgggaaaaactgcggcgcctgcggccttctcgaatccctctgccgcctccaccgcctccggactccggtgaccggtgagtcggacaacggtgtggtcttcccctccctctgcagcggcgcagtgacgattcccctctgggcctcctgcctcccctcccccatcccacaacggtacaatggctatccggactccggcgtgcccgaaaacctaaccctaatccagatctggtctctcttcctcattcctccctgccctgcccttctctctcgtcggtgtgtcgtggacgactctggtgctccggtgcgcagcgcaggagccagagtcgccgatgcccagcgaggtggttggctggtcgccatggaacttgacgcggtagccgagcacgaggagcacttgttggaaacccataacgaggaagaagatgctgctcaagccctattcggtagtagctctgctgctctccgtcgggatgctgcagcggctccttccagcgatgttgggggaacgggctccagcagtgcgacccgtaccgaggcaagcacgggtaacgaggggcgaacgaggaagagggcctccagttctccagtctgggaggactttgaacaggtgttcaactttgagaatg

SEQ ID NO: 25731 - DNA, 1011 bp, Zea mays
  Peptide Sequence Number=SeqID_67510
atggatggcggccgcatcctcgacccgctgctctcgggcgccatggattccgcctccctcctgcgttctcatcccgctcggccccctcctcgcacagccagccgcatgccgagcatggcggacccgcctccccatccgcaccctaaccacttgctcctcgtggcctccaccatcccattcgtgggagccgcatccacggccgggccagcctccctcatcatcggcccctacttagtaccgttcctcctccccacttccgcctccgcctcgccggccacgctcgcggatctcagccgcgctcgcggatctcagccacgcctaccaatcttgcccagccccgtctactcgcgcaagcgctacttcgtgctcgaggacgccgtgctccgtttcttcaagtccatgtcgtcctccaaacgcgagcccgagtcggctcggggtagggtgatgattgcgcttcctgtcgacgtggctggcctgtgccctaggttgggcgacgtggaggctcctccgaagccggggtcgagtctgtcttccatggccgaggtcgagtccgagcccctgggtcgggcgaggcggaagtcgtcggcagaggccagggcgcccgagtccgagccctgggtcgggcggagtggagttcgccgtcttccagggcttagcccgagtccgagccctgggtcgggcggagcggagttcgtcgtcttccggggccttagcccgagtccgagccctgggtcgggcggagcggagttcgtcgtcttccggggccttagcccgagtccgagccctgggtcgggcggagcggagttcgtcgtcttccggggccttagcccgagtccgagccctgggtcgggcggagcggagttcgccgtcttccggggcttagcccgagtccgagccctgggtcgggcggagcttcctatggcgcctttggcagggcctggcttcctttgcgttaaatgctcctgcggcttggccggtcggtgcggcgatttagtcagggttgcttcttag

SEQ ID NO: 25732 - DNA, 2397 bp, Zea mays
  Peptide Sequence Number=SeqID_67511
atggaggaacccagttccagcaaaccaacagtcaaaagacttatggaggacgagctacgaaagctaaaacagctgaagcttccaaatgatgaggttgagagaatattagctgacctgggacatggtgcctgcctggacaaaagttcagcccaaaacagcaaagcgaagaagggagaccaaaatcacatcagaggtatcaccaccacggctgctccatctggatctttggatcccactgcttccaactgcataaaagaagcagaagaaaatgagcttgaatttgccttggcagatttcttaggacggatccatagaaattgcaacaataatggggagttatgtacggagatgaaagccctaatccaaacaaagattgcagagctagataatcctccgtgcacatttgcttatgagcagcaaacttcacggggtgacgaatatgatactgctggtggcaaacatcgatgtagcagtagtaaaactcagcccaaaaaattcagagatgcgctggagatgctaagctcagacaccgaacttttctttcagaagtcaaattcacgtattttggagagcgcccaaagaaaccaaaacagactgatagggaacaatctagagcccacaaaaatagcagataataccgactccaacaaagatccaaagagtctgaaccagcatgagttggccaccaggagatatggtaaagagagcaggaatatctttttctggaagaaggaaagatcctcaccaaggcagactgcacaaggaaccagtagttctcagccagttaacaaaatagttatactgaagccaaatccaaggagagagatcggccatgctgtggctgttagttcaacccaagctccaaaactaggtgcaaccgagagctcaaaattttcaattaaggaggtcagaaggagattcagaatcgtgactagtgaagctacaaaaggaataccctcagtgtctgaagataacctccaaaaaggtcagcattggctcaacagttcagctttcacaataataaaagataccagacagctcgctgaacagacctcagaagggaaattctcatcttcagttatgaaggattttagatcatcaaacagcggtaggcaaaagaaaagaaaaaatgatgggccaaccgaaaaaaacagtagcataattacgtcatccaaggatgaatctgtcttctatgacgaggccaggaaacatctaacagagattctcaaggacaaaagacaaacaaccaagcagcacccgacacttgagatctcaaggtccttggtgaggatgctttccttccctcagtccagcacatcatcacctaggagtagccctagggcaaaagactgcatttacctctcacctgaagaggcaagcattcgtgccatatacaagtcaaataaagatcttttagaagaagaaagccagtctgggagaatttccagagaatgttgtgcagaacttgacactctgcgcactaaagaaattgacaagctggattgcatgggaaaaaatagcaatgcatggggcaccccagcaaagcaatgcacatataaaccatcacaagatatggtgggagaagcagagccaggacaaaggcatgtcaggacgtttccaagctcccctgagaacgactttgaaaaactggaatgccaagagcccacgactccccgaccgagtgcacagatcgaacagatatcacaattttctcctgatggaaaccacgaaaagcaagaacagccgagccctcaatctgttcttgatgtgttcttcctcgacggtactgacactgaaaacatgatagaatgtgagttgcacaaagatatcttgaggacacgctacaacaccacaggggatggttcagaccaagggattttctgggaggacaagcatccgaggttatgttacataaaggaattgctagagctgtcagaattgtgtgcaaaccagaacttagaggtatggtatctagaagatgaattaatcagcccttgcttgttcgaagaagtacatggaggcaatcaaattgatggtacgaagcttttatttgactgcatttgcgaagctgtgacagaaatccaggacatatactttagaaaccctccatgcctatcttctctcacacacagcataagggcacctcctccagcgggacaaaaccttatctcagaaatcaataagcgtgttgaacgccatcttcactatcgatttccaagcacattagaccagctggttaacatggatcttgaaggtggcagttggatggatcttggatcagaaagcggagaggtcgctgtagtaatatgggactgcacactagatgagcttttggaagaattagtttacgacctgtggatttcaggcttcaatctcgcagccggtaaccatctgtag

SEQ ID NO: 25733 - DNA, 393 bp, Zea mays
  Peptide Sequence Number=SeqID_67512
atggaaaggcatatattgttggtgactggctcatcgacattgaatcctcaagcaggccttcttcaagtgaagaagagaatgatgaaaaagttgccgccatcgctggggatttctcttcaccaccaccatcaccctcatctacttctcacctatgcctcatggctaaaggtgaacggaaggtatcttcgaactcaagtcggcatcacagcagatcaaaataatacgaaggttgatacagcgccgaaggtgaacagtacccccgtcctgttcacgctgatttggcattcgctttttgcgtcacgcttgtactttcatctccttcaagttgaagcatttgagaacaagtccccaacattggcgcccacctccggtgaactcacttccacactctga

SEQ ID NO: 25734 - DNA, 588 bp, Zea mays
  Peptide Sequence Number=SeqID_67513
atgaaccgagaaaggggcagtcatcctttgccccaacacttggcccccgaggggccagttcaacttaatgagttggtcccgaagtctttttcgagagatggccgggatgctgccctcgctcggttgaagtggtcccgtgggggtttttcaaatgtggtcgttggaagcttgcggtatagtccttactcggaggggaattcagctgatgctggggacaaccgagggaaaaaggtgaagacccagtctgaagagggcacctcgaagggaaaggtcatgattgcagcgactcgaaagaggaagatagaggcaaaaggaggtcggtggcataggaaggaccctattccctgggccgccaacgatgtctattttacgtctcatatggctcgtgagttaaaaatctttcctgacagaagaaacattggtgctgttgtgtcaacagtgatgtataaggaccgccaggaggccctgcggaagaagcgaaaggcccctcttcggctggtggacccgcgctgtgacgccaagatttcgcgttctagcgcgaagggagctactccggctgcagtgatgcccctcctgtggcatcagtag

SEQ ID NO: 25735 - DNA, 393 bp, Zea mays
  Peptide Sequence Number=SeqID_67514
atgatgacgaatgctacaatggaagatactaaaatgtatgaggtgtcctctaacaatgacaggaaggcacaagacattttggaagaggtgaactgtgaacaacttgatgctgctgccgaagaggggtgttttgaattgataagggttgctgagatagaaaggaaaattcaatcaatggcaaacaaaattatggacagagcagtggcaacaatggtggaagagattgtcgatcgtgtcttggacgaagatgttaacaatctggctttcgagaaggcatatgcggggatggaaaccactatggttggccacaatgttgcccctactgctattgtaggaggggaccagaatggctatttttacctcacacagacagagaataatggagctatctag

SEQ ID NO: 25736 - DNA, 672 bp, Zea mays
  Peptide Sequence Number=SeqID_67515
atggcgcggcccctgctggtcttcatgcccaacggcgtgttgttgaaggccgccgtgcgcgacgtgtgggccagcaacttcgacgaagagctctccaacctatcggcggttctgccgcgctacccctgcgtgtgcgtggacaccgagttccccggcgcggttcacgactcggacatgccgcggtacatgcgcggcccgcgcgagagctacgagctggtgaagcgtaacgtggacgacctcaagctgctccaggggatggacttcgccatgctgaacgagttcggcatcgacccgaaagacttcgccgccgggttccgccgcagcggcctcgcctgcgggcggctcacctggaccgctttctcgggctcctacgacttcgcctacctcgccaaggcgctcaccggcggccagccgctgccggacacgctggacgtcttcctcgccctggtccgtcggctgttcgggcacagtgtgttcgacgtgaagcacctcgccagatgctgcgccatgcgcggggggctggagcaggtggccaccgcgctcggcgtcaagcgcgccgccggccgcgcgcactgcgccggctccgacagcctgctcaccaccgacgtcctcctgctaatgctgcatcgcttcttcaggaacgtcgatgtgctcgcgcacgccggaaccatc

SEQ ID NO: 25737 - DNA, 825 bp, Zea mays
  Peptide Sequence Number=SeqID_67516
atgccgatgtactccaagtcggaactcatccacgtgccgccaccgccatgcagccgtccccgttacgtcatggcgccacccctggtcttcacgtccatcggcgcgtcgatgaacgccgccgtgcgcgacgtttgggccagcaacttcgacgaagagctctccaacctatcggcggtgctgccgcgctacccctgcgtttgcttggacaccgagttccccggcgcggtacacgactcggacatgccgcggtacatgcgcggcccgcgggagagctacgagctggtgaagcggaacgtagacgacctcaagctgctgcaggtcgggatcgcgctgtcgggccccgccggccggttccccatcgcgtggcagttcaacatccggggcttcgaccccgcgcttcacccgcacgcgccggcctccatcgccatgctccgcgagcaggggatggacttcgccctgctgaacgagttcggcatcgaccccgaagacttcgccgccgggttccgccgcagcggcctcgcctgcgggtggctcagctggaccgccttctcgggctcgtacgacttcgggtacctcgccaaggcgctcaccggcagccagccgctgccggacacgctggacggcttcctcgccctgatgctgcgccttgcgcgggggctggagcaggtggccaccgcgctcggcgtcaagcgcgccgccggccgcgcgcactgcgccggctccgacagcctgctcaccaccgacgtcctcctgctaatgatggatcgcttcttcaggaacgtcgatgtgctcgcgcacgccggaaccatcgtagacctcacctag

SEQ ID NO: 25738 - DNA, 300 bp, Zea mays
  Peptide Sequence Number=SeqID_67517
atggactgtggcgaggtagtgaggtactcgaggatggtggtcgaaaatgatgcatctgcacaagtggagcccggtaatgggggaggctctgctgcaagggctttgaaccaaacgttgtcttctgaagagatgcaggaccagctggagcagttcacgtatgtgatgcaacagaagttcctgtccggtgaagacaccgaacatatggactactcacggatcgataacgatgagatgctggatgaccactggtccagagaagtcaactatgacgcagaggagaagtatttcgaagaagattag

SEQ ID NO: 25739 - DNA, 525 bp, Zea mays
  Peptide Sequence Number=SeqID_67518
atgggctacatggacccggagtgcatggtcactggcaccgcgtgcgccgtgtccgacgtgtacagcttcggagtggtggcgctcgagaccgcctgcggccggcggccggtcgtggtcctgcgagagacgcagcaagggtcagaagccacggcggggcacacgcacctggtgcggtgggtctgggaacactacggccgcggcagggtggtcgacgcggcggacgcgcggctgagcggcgagttcgacaggtcggaggtggagcgcgtcatggtcaccgcgctgtggtgcgcgcatcctgaccgcagcctcaggccgtccatcaggcaggccgtcaacgtgctgcggctcgaggcgccgctgcccatcctgccggcgaagatgccggtcgcgacgttcgtgccacctgcgcacggtctcctgtctgaagcaatggcgatcgtgaccgacagcggcagctccgggagtggcaccacaagctccagcaccgtgttggcaccacaggaatcgtccccgactccccgctga

SEQ ID NO: 25740 - DNA, 1167 bp, Zea mays
  Peptide Sequence Number=SeqID_67519
atggctcttcatcggagcttccttatcttcaccgtcatgtcgtcgtttgccacccttactgcagttgtggtgtgtggccaggtccagcactactacacggcttaccacccttactgctccacgacgggaaactacagcaccggcagtccgtaccaggtcaacctagtgaagctaatgggcgagctcccctcgatcgccctcgccaaccgcggtttccaggtcgacacggccggcgagcaccccagcacggtgttcggcctcgccatgtgctacgcggacaccagctggaccgcgtgccgcccctgcctcgaggccggggccgccggggtgcagcaggcgtgcccgttcggccgggagatgaaggccctatacgacgaggtctgcctcctgcgctactccgaccagcccttcttctcggccgccgacgtcgacgtcgcgttctacgtctggcagaaggactccgtcgtcgccgccgccgacgtgcccgccttcaacgccacgcggtggaggctgatggcgcggctcgccgccgaggctgccgtctcctcgctgcggctggcgaacgggagcgaagcgtacgccgcggaggcggaggactcgcggggagccggcgcccagcaggtcgccgtgcccgtgcacgggctggtgcagtgcaccagggaccttaacgccagcgagtgcaccagatgcctcacgagtttcctcgccggcctgtcgagctcgctccccaactacacctacggcaccgccaagggctatagctgctatatggcttacagggtcggggacaagctggacatcaccattccgccgccggcactagtagcatcgtcgccaccgccgctgccatcaactaccacgtcgcctctgcctgaccgcacgccgacggcagctctggtggccggtgtgtcagttagttctgcggcagtcttcatcgtctccgcgggcgtctcgatttggctcctgctgcggcggcggcgacgcaggcaaaaggcgagagaacaagaactgcgtgcgtttgatggtgactacaactacaacgacgaggaggagcccctgcaagacgaatttgagaaagggacagggccgaggaagttccgctaccgcgagctggccatggtcccgggcttcttctccgacgaggagaagctcggcgaaagaggcttg

SEQ ID NO: 25741 - DNA, 229 bp, Zea mays
  Peptide Sequence Number=SeqID_67520
gcgctgcatagggatcagctcccgaccggacgaagacaccgaacagcaagctgctcaaaggcgcaggcactcgctcggtcgctccgccgatccatccgcgccgcgccgcggcctgcaggacagccaggctgatggaagatgggtgggggtggctgaactggtcagagtacatacatgcggcacgcactggcagcaagatccaatattctcgcagaggactccaaattaa

SEQ ID NO: 25742 - DNA, 228 bp, Zea mays
  Peptide Sequence Number=SeqID_67521
atggagttcgtagcattgattggatgggagctccctctgtgcctctgtgattgctcgtcggtgaagcgcctccgccgcgggtccgtcgttcgccgtgggcagctccgcgtggctcctaacttccggagttttagcgcacggtttgccttcgggctgatcgccggcccatggcgccgctgccgatgctcgaagcgctgccagggtcacggtgggggaatggctggatag

SEQ ID NO: 25743 - DNA, 459 bp, Zea mays
  Peptide Sequence Number=SeqID_67522
atgggcaagaacaacaagcgcaagcgtgagccaactcctccatcggaggattttggtgattcagaatactcagaggaggagttctcctctgagtctgaggggtctccggctcccatccccctgcgtgagtcgtctgacgactcagacgactcccaggggctcgcggcggaggtctggacgtacatccgggccgtcgagcgctccgggctcgagggctcggatgagtcggagtactcctcggatgaggaggactcggacggtggcggcgaggacgaggacgacgacgacgacgacgacgacgaaggcggtggcgacggtgacggcagcggcaggggcgacagcagcggcagcaaggacggcgacggcggcggcagtaggggcgacagcggcggtggcggcagcagcaggggcagcaacaggggcgacagcggcggcggcggcaacagggccagtggctag

SEQ ID NO: 25744 - DNA, 702 bp, Zea mays
  Peptide Sequence Number=SeqID_67523
atggagcccgcggcgatggaccgcatcgccacccgcctctccgccgtcgaggacctctacttcccgtcgtccttcctcggcccgtcccccgccggcaccggggctgcgccccctccctcgccgccgcggcgcagggcggagctccgctccctcctcgcccgcgacgcgccgctcttcctggagcggtacggcgcggcgctgtccgccgacgagctcgccgccttcgacgcgctcagccccgactacgaggtcgactggcacctccgccgcctgcgcgccgccgccgcgggggctcccccgcccgcgtcgcgagtgcggaaccggcgccgcgcgttcctcgaccgcctcgtccgcgagggggagtacttctcggaggacgccatgcgagagcgggagccctacctgcaccacgagtacctcgggaggttccaggacccgctcgggagggccatggcgcggcccggggagaggtggtccgagacgctcatgcgccgcgcggaggaggcggtcatcgtggagaagatccgcggggagcagattaggagaggggttgatccaagcgagtgggtgggtggtggcactgacgagaccatggaggagcaggaagaggaggaggaggaagaagaggaggaggaggacggggaagaagggatgaaggaaaatgggacagaggtcgagaagcagattgcgactgagcaatag

SEQ ID NO: 25745 - DNA, 405 bp, Zea mays
  Peptide Sequence Number=SeqID_67524
atgatggtatacaattacttgagatatctgacatgcgaggtagttgatgctaaagttaccctcctatgcagaatccagcttggacaaccagctactgttaaagttgcagctaacttgattaggttgctagcttatcagaataagaacatgttgcaagctggcatgattgttggaggatgggataagtacgagggaggccaaattttctcagtccctcttggtggaacgatcttgaagcaaccatttgcaattggaggctcaggttccagttatctttatgcacttcttgatcatgaatggaaagagggaatgagccaggaagaggcagagaaatttgtggtgaaggtagtttcccttgctatggcccgtgatggtgctagcggaggggttgtccgtacagttaca

SEQ ID NO: 25746 - DNA, 327 bp, Zea mays
  Peptide Sequence Number=SeqID_67525
atggggagcggccaatgcacgctcggtgttgccaggagaggtcgaacacgtggaggtttgcttctgctcttgtccaagcattcgtttggtcgccttaacgtgcaaatctcggcaaggatcccttgggtgttacaaacaccatatggctttgcatgtaatgaaaagaagaaagtcaagaagaaggctcctagctcaagttcctcaagtgatgatgatgatgatcaagcatcaacatcatccttcgaggatgaagaaacggtccgacgcgtcggaaaggtcgatgatcttctctttaacattgacaggaaaaagcaaagaaagagataa

SEQ ID NO: 25747 - DNA, 342 bp, Zea mays
  Peptide Sequence Number=SeqID_67526
atgggcaaagactgggatggcccctcattaattctgcccgcttgtccctgggcacctgtggcatctgaacttgcacctgaggctgaggtgggggtggctactgctgcacctgctacatcgctgctaaagtctgtccagttgcttggactgcttgtgtctgcatcaggaacattttctcaatggtcatcggtggtggcggtcgcaactgctattgctgagctacatcctcatggggtgcctgctgttctagctgagcatgccatgcacctctgcgcctattcccagacatctgtagaaatcacacacatatatcaaatctatctctgcagtcttttagcataa

SEQ ID NO: 25748 - DNA, 435 bp, Zea mays
  Peptide Sequence Number=SeqID_67527
atgcaggaatcccttgcaggaccgccatcgcagcaaaatcctcccgagggcctccctacactgaccactcccctactgcccttgcccctttcgggtaaggatatcagatctacagtcagccctaagggaccgaaccggtacccttctcccaatcacgcacgtccgattagcaaatcaacggtcacaagatcttcttccccaaggcggcagccaggtcgcatagggccgagccccatcctcccgagcggcgtgagcacccaaggtggccgcgcccggcgatgcccaagcactgaaggcgccagggccggctatttatggttccaggagagggagtcagggaagcgcggcgttggtgatggagagatcgagtctttaggagagggtctcaccggtgctggcaccctgtacgaaccggtcgcgacgccaatagcttga

SEQ ID NO: 25749 - DNA, 330 bp, Zea mays
  Peptide Sequence Number=SeqID_67528
atgatggctgagggggcgacagtgaggaagaagcagaggcgaccgaaggcggggcaggagcaatccggcgagccactattttcaattgatgtccatccacagggaggggaagaagctactgatggtggtggcattggcgtcatggtcactcagtgtgtcaagaggagcaaaagcaagaactcccgggttttgaagacgcagcagacactgccccaagtgatcactaagagtaataagcacaaactctcacttgattcaaccaagcttcatgagatcaatgggtgcacactaattactctctatgtgataatgagaccactaatacagtga

SEQ ID NO: 25750 - DNA, 279 bp, Zea mays
  Peptide Sequence Number=SeqID_67529
atgggtcgcatcgtcgcgatgagcgagatcgggtcggcctaccagacgtgtcagcgtcgtgacgatgacaagtggggtgagggtgtggcgagggtttggggtcagacggcatcacgtgtagggaaggaggcagtggcgggcagcatcatgggcagactggctcggacgtcgtcaaatagaatggggccaaacaaatatatgtggagactggaccaaggtggaggacgggcgagaggactaggccgatatgacaagaagattagaacaaggctgatttag

SEQ ID NO: 25751 - DNA, 339 bp, Zea mays
  Peptide Sequence Number=SeqID_67530
atgacatcttgtgacaatatcatgctaatacaaaataaggtgagcttctttgccgagttacacagacactcgacaaaggctcaaaagcactcggcaaagcctttgcaaagagccacactcggcaaaggctcaaaagcactcgacaaagcctttgcgaagagccacactacgcaaaaagggctccgtgaaccgatcatcgacaacggcctctttggttattactttccatcgggcgctcggcaaagtaaagtcaccatgacgacaacgggtgatggagcctttgtcgagtgcctaggtctgaggcactcgtcgaagaaagctctggtgccccctgcgtag

SEQ ID NO: 25752 - DNA, 159 bp, Zea mays
  Peptide Sequence Number=SeqID_67531
atggagagactgacgtcgcgtctcttctatcttcgcttcaagtccccaacatcgacgcccctgaacacggtcggaccgtccgagcttttgcccggacagtccagcccttacgcagaccgtctgatactgcaccagggctaccgcatggcgccccaataa

SEQ ID NO: 25753 - DNA, 414 bp, Zea mays
  Peptide Sequence Number=SeqID_67532
atggcagcgtacctggctcgacgggcggcacagaagaagtgggtgcacctgctttaccacacaacactcaacttccaccgccacctcttctacgaggaaattagttcccccaatcctcccctctccgcctcccttttgatctcgatctcccttcccgctagtggacgggactggccttgtgttgtctctcccgcgcaggtgtcagatctcctggacaagtttgaggccaaccgccacgtggtaaggcatcctcctgctgatcccttttcgcacacctcttcccattcggctgcagtggggagtgaatctgatgttgaccttgaggagaaggttgatgtgataatatcagaatggatgggctatatgcttctctgtgaggttgttgcacctatcaagatgactttccatatgtaa

SEQ ID NO: 25754 - DNA, 378 bp, Zea mays
  Peptide Sequence Number=SeqID_67533
atgacgtggaggcaacataggggtactctagtggcgcctcaacacaaaatattgtctggtggtggcggcgtcaaggcacaacccgcgagtcctgctagtgttgtcgtcgaacaggcaaaggtcagtgttcgtcgccacctagacaagcctgctggtgacggtgccataggtttaacacaaaccaataaaaagaacaagttagggttcaaaaagaaaggagcaaatgaaaccgaaggctgccctggtctggcgcaccggactgtccggtgcaccagggagatcaactctgaactcctcagcttcgggttttctccaggccactccgctataattcacccgactgtccggtgtagcaccggattgtccgatgtgccatga

SEQ ID NO: 25755 - DNA, 741 bp, Zea mays
  Peptide Sequence Number=SeqID_67534
tgggcccaaccgcgctgcgcccatcgtggtccgaacaggaaccacgtgggacccgttccccgcgcggagaatcccaaggccccacccgccaccaccgcgccagtcgcctcgtgcgctccccgtcccgaacacgtgtcgtcctatcgatgacccgcacaccggctccgtggcacgcgggaagggcgtcgtgccgtaccacgtgggggactcgaccggggaaccgataaacgtggcgcgggccccgccgagagagacgcgcccgatccggccattaaacaagcacacacgggaggcctacaaagacgagaggggagaggagaacggtcaaggctgccgcgcgcatcgtcatcagttcactagtcagtcgaggtcgaggggcggacgaggagctgaggagagagaagcttcaaggagttggggacttgggggttgccgagctgtccgtctttcccctcccctccacccaccagctacctcgggagggcaaggcaaacatctgcggcctcctttcccgaacccgggttggatggagcgggacttcctggccgcgatcggcaaggagcagcagcacccgcgcaaggagaaggcaggcggaggcgcggaggaatcaggtaggctcccccgccctcctttcgccgcctgccgcgctgcgtttcttgatctgtacgcgcgccgtgccgtgctgggttgggttgggttgggctccgctcactccattcgtttcggcgagatgcggcttgg

SEQ ID NO: 25756 - DNA, 453 bp, Zea mays
  Peptide Sequence Number=SeqID_67535
atggcattcatggagcagagggagaaatgggggaggaagaggaacggacgcagtaaagctcctttacttgcgatgaagaacgaacggcgcggggcgtcggtccctgcggggtgtcggggtcgcggctccatgggcagggcgcggtcgggtcctcttggcgcagctgctggcggcttcgactgtgcgcaggggctcggcgggtcgcctgggcgcgaggcagccggggtcttggcgtggcaggggcgcgaggcttgcacgggtcaggtcgcctgggcgcgcggggtcgcgcggttggcagggcacagcaggagcctgggcatggccggcgtcgctcggctggagaaggggcagggcgcgggctgggcgcgcggcgtcctgggcgtggagcagagagcaggagaagggaaggagaaaggtggcggctggggaaacaccaggggcgacggctgctag

SEQ ID NO: 25757 - DNA, 318 bp, Zea mays
  Peptide Sequence Number=SeqID_67536
atggaggaaaggggtcggtctgcccttcttgaggaggaagaaaggcgccgctgggcttctctggctggtgtgctgctggaaacatgcgtcagggaaggggaggaagggctgctactcttgggtgccgagctgaagaaagggaaagtgcagggggctcgaccatggggaggtgctgcgagggggagggacgttcagtccatgcatgggagatgtagggacgcgctggagaggggatggagcagaggggaaaagggaggtcggccatggggaggggagcgaggagggagacgcagggagctcggcggccaccatggctag

SEQ ID NO: 25758 - DNA, 519 bp, Zea mays
  Peptide Sequence Number=SeqID_67537
atggtcaacgtgagcaggtacccttttcccttcttcctcctgtgcctcggcgagctcccctacagcctggtcgtggtcgagccgcccctgcccctgcgccccgacgagtcccccagacgcgaggcccacgcgacggcctacagcctcaggccgtgtgatctgtccagcctgctccgccccctgcgctccctccgatgcacctggccacccgcggtgccgccctgtgctcccggcgcggctgttcgcagccttgcacagcggccttcacggattgcccgtggcagcctgcgcaacagccggcgtggtagcttgcgaggcttgccagcggcagccccggcgtggctcgctcggcgtagcctgcgcgacgtgcccgcggcaaccccagcgcagtctgcgtggcatagctacaacctcgtcgtcgctcgtgttgtatgtcgtgcgcgcagcacgtcgtcgacttgcctcgccgtccgccgtcgtcgcaaggagttccaggacttcgacgagttcgaggattag

SEQ ID NO: 25759 - DNA, 615 bp, Zea mays
  Peptide Sequence Number=SeqID_67538
gcagagccgctgccgcagccgtctctccgatccgcgtgtccgccgctctggcctgctggaaaaggcgaggcgaggccaggcgtgaataaacctcagaggcgaaggacagcagcagttgcattgcatgatccaagtccaaccccaccctggccgctgcagctgcaggctgcagcctgcatgcggttgcgcgaggcccaccacgcccacgagccccaccactgccaccagcccaggcccagctcagcacatcaccaggccagagtccagaccagacaccagaccacacatgccgctagtgggcagtccatcgtccatggctcggttcagatggccctcctgcccctgctgctgctgcgacgaggcttgaagagagttgcaggatggatacggcacagtggagggcaggacagtccccagctcccgcccgccgggccgaggtatctcactgtgcgcagcttttcaacgaacaacagacgcgggatggacggccgtgtcacgcgccaccggggccggacgcagaaagcgttgggaggagaggagcacacggaggaggaggcagctgtgcctgtgcggctgatcggaccagcctccaggtccggcgacagcggctgctag

SEQ ID NO: 25760 - DNA, 321 bp, Zea mays
  Peptide Sequence Number=SeqID_67539
atgaggaagcgtgagcgagagaacccgtgcgggatctgcgggcactaccacaagtacgaggagggggaggtgtgcggcgtctgcggtcaccgcccacctgcagcgtcaccagtaggggccaggcagcaagactcggcgttcccgtccgagatcctcaaggagttcctcttcctcggcagctacgacaacgcctcccgctcggagctcctcaagaccatcggcgtctcgcacatcctcaattgggttagggatatggagataaaatgtcatagatggatttcatggtacgattgggtgaggcaaagatggtggatggcatga

SEQ ID NO: 25761 - DNA, 1284 bp, Zea mays
  Peptide Sequence Number=SeqID_67540
atggcctcgcaactggtggtgcgcctgctcgtgctctgccttctctgcggcgcctctgcagcggcgaagcggcgatacctctccgtcagcatggacgaactgctgagctcctccaaggctcacgtctggacgaagaagccagcttctggtaacaagctcacagtctctgcaagctccgggcttgcaccgaaaaatggcgcgagtgggtcatttgtgcggcacgacatgaaccggctgagcaccctcctccggaggtcctccgtctcatcagctgcacctccatcggctgaccccttccccatccccgggataccgatttcgtatcctccggtggcgcccccagccgaggctccgtcggtgacgatcccggacagcaccgggacctccctggacactctggagttcgtcgtcaccgtcggcttcggcactccggcccagacgtacacggtcatcttcgacaccgggagcgacgtgtcgtggatccagtgcttaccgtgctcggggcactgctacaagcagcacgaccccatcttcgacccgacgaagtcggccacctactcagttgtcccctgcggccacccgcagtgcgctgccgccgacgggtccaagtgcagcaacggcacttgcctctacaaggtcgagtacggcgatggctcgtccagcgcgggggtcctgtcccacgagacgctgtcgctaacctccacgcgggcgctccccgggttcgcgttcgggtgcggccagacaaatcttggggacttcggcgacgtcgacgggctgatcggcctcggccgcggccagctgtcgctgtcctcgcaggccgccgcgtcgttcggcggcaccttctcgtactgcctgccgtccgacaacaccacgcatgggtacctcaccatcggccccactactccggcctccaacgacgacgtgcagtacacggcgatggtacagaagcaagattacccgtccttctacttcgtggagctcgtctccatcgacatcggcggctacatcttgccggtgccaccaacgctgttcacggacgacggcacgttcctcgactccggcaccatcctcacctacctcccgccggaggcgtacactgcgctccgcgaccggttcaagttcaccatgacgcagtacaagccggcgccggcgtacgaccctttcgacacgtgctacgacttcacgggccagagcgcgatcttcataccggccgtgtctttcaagttcagcgacggctccgtgttcgacctcagcttcttcgggatcctcatattcccccgatga

SEQ ID NO: 25762 - DNA, 534 bp, Zea mays
  Peptide Sequence Number=SeqID_67541
atgacaggaccaaatatccaaatggacaaggagaagggtcctaagcttaatgatgatgagtgcgtctctcagctggaattgaaggagaagatacacacgatgactgaagctttcaataagtaccaggactctacgacgacatcctatgagcggcttgatcgatgtgttactgaacttgttacacgcatggacatgatagaggctcgtcccccaccacaaggtccagtcccagccatcggtgcagtagtgctctctactgcggaggacgtcgacgacgacgccgatgttgatgcactgttgcgacggtgcctcgcacgtaatcaacaagctttaatcatcttcttcggtaagccttacacttcgcatgagcccccaccatcaaatgtaagaaaggaaaccgataaaattgacatcatgcagttcaaagttacttatcacaaggacattgtagaaccaacaccgaaaaagaaaaaacgggtacccgaattccgggtacccatatctgacctgaatatccgggtattttctgggtag

SEQ ID NO: 25763 - DNA, 2055 bp, Zea mays
  Peptide Sequence Number=SeqID_67542
atggccgcggcgggccgcagggtcaagctcgacctcttcctcgattcctcccccggggaggcatcacataataatggaataggaggtgaaaaccgtgaccaacagactgtggttcccacttctccatcttcttcagataaaaaggagaatcctctagcattgcttgggcaatatagtgatgatgaagtggaagatgaggaagcagcagatcaacccactggtgaagctaaggggagtccaggagatgctagtgctcagttaactagtcagcgtgcggatatagctggtgataacagtgaggcaaaaattgaaccatcggcttctgtcggtgatcaacaagaagcagcacctcaagctggtgacgttaagaactacacccaaagtgttactgaagaaaacactatagctcctgagccaactgtacaagaagagagtgtgaaagcaactgaatctcttcccgattcatctggcatgcagattgttggtgatgtcggtggaaattggaaagcagtaatgcatgaacagagtaatcagtgttattactggaacacagttactggagaaacttcttgggatataccaaatggattagcttcaggagttgcaactgcatttgttccttctgatgtggactattcaaatgaagctcaaacccatgtccttccccacagcacactggaagcatatccaagtgatatgtctgttgggaacggcacaacttatcctaatttgggaatggcatgtggaagtgcacatgttactcaagatgcttatgcttatgctgctcctatcgccagtaatgagcctttggacattgatcccttgtatcttgcaaaatatggtgatggtttgctgcaaagattggacctgctggaaaggctctgtggctcgaacaaaggtcttgaattgataagaagagaaattgagatacggatgtcggacttaaatgcactttcatcttatggatcttctttgctcccattgtggttgcatgctgaggtgcacctgaagcaactagactcttctatttccaagctggaaatgaactatcatgcagattcagaacctaggaattcaaagacagaggttgctgaacacagggcacctgatgatgctgacttgataacaccctccaatggcgaggctttgaagtatgaagtttgtgctgggattactatcgatgcaaatatgaagattggtaagccagcttcaacgtctcagaattcacaaggtagggataatgcagctgttcctccaaaaattgaatctgacaatgatgaagatatggatgtggaaatggaagttgatgaagataatgtcgaagagcaggcacagtgcagttctgtacctgaaaaggagcatcctccttcagaacagttgagttcatctaatttgccatcatttgaagatcctacacctcctgaggataattctgttcctccacctccgccagaagaggaatggattccacctccaccacctgaacacgaacacgaaccagctcctccagcttccccagaagagccggctgcatcatatgttcaggtggatacaattcctcagccatatatagctcaagaaaatgttggctatacaatttcaggaatggagtattatagtactgaaggtacaaatgccaattactatatgcaagtgagtgagcctcatgtccttcaagcacaacattcttattatgcaccagtatctgggagtggcatatctgtttctgttgatggcacatctattgccccagaatcttattatacctatccttcagtcactgtggctgcaagcgctgtagcagctgaacattctggatactacgcttcatcagtctctgccatttatagcagtgcagcagatatcaaaacaagctcagcttctcttgtttctgcaattagcaattcggatctaaaaaatcatgataatgttatatccaatgatgcaagtattgtgcctttcacccaagctgtagtagcaacatcagctgcaggaacgacatctgttcctgaagttctacacagccttctagcagtactacaaaccagatcaaag

SEQ ID NO: 25764 - DNA, 264 bp, Zea mays
  Peptide Sequence Number=SeqID_67543
atggaacaatttttcagcgagttcgataagccaaactggaaggggctgacaccaagctactcagaggcatctagatgcaatgcattgagggacaaggagattgagaacctggctggcctggagggctccctgaccacccaggacagtggtgggttccgggactgggcctgcgcagataaatttggctcctcagacaaggggaaggaaatcattagggttgccgaatgtgtcacgttgttgactcgctggagttcgtctgagtag

SEQ ID NO: 25765 - DNA, 588 bp, Zea mays
  Peptide Sequence Number=SeqID_67544
atggcttcttcccatatgcttctgtgcgtccttcttctatgcagctacagtttgactgcacttggaggaggcaatgagcagcacggctttgttgtggtgccaacaacaacaggcacgtctacgtcatccaatccagcgtgctcacctgcaccacaggtgacttctgatcccaaccgtgcgtccatgccgctggcgcaccggcacggaccatgcgcgccggccactactagtagctggccgtccctagccgagaggcttcgcagggaccgcgcccgcagggaccatatcacgcgcaaggccaaggcatcagggcgcacgaccacgctgtccgacgtgagtatcccgacgtccctcggcgccgcggtggactcgctggagtacgtcgtcacgctgggcatcggcacgccggccgtccagcagacggtgctcatcgacacaggcagcgacctgtcgtggatgcagtgcaagccctgcaactcctcgtcgtgctacccgcagaaggaccccctgtacgaccccgaccgcgtcgtccacgtacgcgcccgttcccgtgcgactcccaaggcgtgcaaggaccttcgtgcctga

SEQ ID NO: 25766 - DNA, 2160 bp, Zea mays
  Peptide Sequence Number=SeqID_67545
atggctcccgcggacaagcgggtcttcctgctcacgcaacaacgacgacgacaaagcttgggaggccgtcgtccggtccggtggatcggacgcaacagcagtagtgcagcactgctactgcctccactccagtcccaggctcccatctcagagctctcagcggtggcggccggcgaccggcgagctcctccggcatcggatcccctggagtggagcgttgaaccacgctgcgggcctgcattcaccacctccgtgctttccttcgtcttctccgcctcatctgaattcgtggtggtgggcggtgcgtcgctggagggtgggatcttgctaatgcgctggttgctctggtcagtgatggccggtgacattacatgcggatccttgctgcaaaaattgcagtttatatgggatgaagttggagagagtgaggaggaccgtgacaaggtcctttatcagctggatcaggaatgccttgatgtctacaagaggaaagttgaccaagcaactaactctagggatctcctgatccaggcgctggatgactcaaagatagaacttgctaggcttctttctgctctcggagaaaaagctattgcaagaactcctgagaagacaacagggacaatcaagcagcagctagctgctatagcgccaacacttgagcagttgactaaacagaaaaatgaaagaaaaagagagtttgttaatgtacaatcacaaattgatcaaatatgtggtgaaatcgctggcaccatagaggtgggtgagcaaatgacaacaccccaagtcaatgaggatgacttaacacttgagaggcttgaagattttcggtctcagctcaaggatcttgaaaaagagaagagtaataggttggagaaggttcttgattatgtaggcatagtacatgatctttgtaccgtcttggggatggattttctcagcacagtgattgaagttcatcccagtttagatgactccatcggtgacaactgtaagagcattagtaatgatacattgtcaaaacttgacaatacggtagctacacttaatgaagataagaagttgcggctaagcaagcttcaagaactcgctggtcagctctatgatctttgggatctcatggatgcccccaaggaagaaaggcgcatgtttgatcatgtcacctgcaacagatcagcatctgtggatgaagtcacagcacctggatctcttgctctagatttgattgaacaagctgaggttgaggttcaaaggttagaccagctgaaatacagcaagatgaaagaaattgctttcaagaagcaaaccgagctggaagatatctacgctggtgctcatatagtaatagacacagctgctgctcatgagaaaatattggcgctgattgaggcaggtaacattgaaccgtcagaactaattgcggatatggatacccagatagcaaaagcaaaggaagaagcattgagtagaaaagacatccttgataaagtagaaagatggatgtctgcgtgtgaagaagagagctggcttgaagattataaccgggatgacaacaggtataactctagccgaggtgcccacctgaatctgaagcgtgcagaaaaagctcgtattcttgttaacaagattccaggtatgctttatgttccattgattgctgatgtaatgtcttctttcatcctagcacttgttgaaaccctggtgtcgaagaccacagcatgggaggagaaccgtggtctgtcctttatgtatgatggtgtacctcttctagctatgttggatgagtatgctatgctcagacaagaaagggaagaagaaaagaaaagaatgcgggaacaaaagcgctacattgagcagcaactgaacaccgatcatgaagggccatttggatcgcgggtgagtccaaaccggcctgccagttcgaagaaggctgttggcgtaaaggtgaacggcagcgtctcaaacggcactcctccaaacagaaggctctcaatcagtggccaacagaacggtggtggccatggcgtcaggtctggagggaaggatagcaagaaagacacggcgaagacagcatctccagggaacaatgcagttgcagctgctcctgtggacgcggtctcccaaatttctgtcaccgatccggttccgagcacaccatga

SEQ ID NO: 25767 - DNA, 522 bp, Zea mays
  Peptide Sequence Number=SeqID_67546
atggggatggtggaggtgatgctacaacacatggttttgagggtagttgtcggtgtttcgaaccttgctccgacaagtaaacttattatgcatgttttgggcttcgaacggataatagaggggtcggccagcggtggcttccccaggaaggagtcatcagacaaaggacaagtctcgataggtcatgagtgcaccattggccggggggtgcataagttcatccacaaccattctaagtcgactgtccggaacgctgtagattattccggacaggagaagctttttggaaaatcacctacgcgcggaccgtccgagcccttgcggcagaccgtccgcgacaccagggtgaccctcggacagaaccaatgcaagaacacaagtctacactacggacagtccgatggaaaaagcaaggaccttccgagaccaagcgcggaccgtccggcctcaggcgcggaccgtccggggcggaccatccggaccaggggcgcggaccgtccgcggtcggcagaaaaagagtaa

SEQ ID NO: 25768 - DNA, 772 bp, Zea mays
  Peptide Sequence Number=SeqID_67547
gaaaggcggcacctttggcgggcgaagcaggcgacgcttcacctccgccataatgaccgcgtcaaaaaaggctggcccctcggaggggttcaacagccgcctcagagcgctcaggctccgcgcccactactggctggccctcgaagggttcgacagccgcctcagacgcagagcgagggatgaccctgggtacgttcgatacataaccaaggctcgggctacgcttccgagctcactggagacaccatggtcggcgccatccaagggcaacatggcgcttttcccccactcctccttgcgaaaaggtgacgcaggggccgccgcctgcgccgctccgactgctatgccacttgacagagtgaggctgacagcagccaagtccggcctcgggcgccataggaagctccgcctcgcccgaccccagggctcggactcggcctcggccccggaagacgacgaactctgcctcgcccgaccccagggctcggactcggcctcagccccggaagacgacgaactccgcctcgcccgaccccagggctcggcctcggccccagaagacgacgaactccgcctcgcccgaccccatggctcggactcggcctcggccccggaagacgacgaactccgcctcgcccgacccaggggctcggactcgacctcgacctcggaagacagactcgacctcgacctcggaggagcctccgcctcgcccgacccagggctcggaccgaccacgtcacaggaggggccatcattatcctacccctag

SEQ ID NO: 25769 - DNA, 456 bp, Zea mays
  Peptide Sequence Number=SeqID_67548
atggcgaggatgatcagccggccggccgtcctcctctcccccctggccatgatcgtcgtggccgccgccgtcatggcgctggcaccggcgccggtggccgcgaccaagtacaacatcaccaagattctggcgccctacaaggagtactccaagttcaacgacatgctgtccaagacgcgcctcgcgtacgacatcaaccggcgccagaccatcaccgtgctggccgtcgacaactccgccatgtcggcgctcgaccactactcgctgcagaccatccgccacatcctcgagctgcacgttctcgtcgactactacggcgacaagaagctcaagaagctcgcccatggctccaccgcttcctcctccatgttccagttagttgagaaggagattgcgtcgattgaaacctcccatttttcaaactcaattgggagctcctttatgataaagccatga

SEQ ID NO: 25770 - DNA, 486 bp, Zea mays
  Peptide Sequence Number=SeqID_67549
atggaagtctggaagatgtactctgatgggtcattgaagctgcaaggggctagagccaggatcctcttcatcgcccctaaaggagaacaactcaagtacgggctacaagttcttttccctgtgtcgaataacgcagtcgagtatgagaccatgatacatgggttgcacatcgttgtatcccttgggatcaagcggctgatggtatacggggattctctagttgtgataagtcaggtcaacaaagattgggaatgttcaacagaggtcatgaccaagtattgtgtcgcagttcgccagattgaagatatgtttgaaggcccggagttccaccacatgaagagggaccgcaatgtggcagcggatacactgtcaaagcttggttccattagagccccaactcctcaaatgtttttgtgcaagaaatacatcatcccaatattccacaagactcgggagaagagtgcaaagcgactaaggacaacataa

SEQ ID NO: 25771 - DNA, 201 bp, Zea mays
  Peptide Sequence Number=SeqID_67550
atgtggatgccgatgaagcttcaggtcatgcaggactactttcgacgcaaagtgataagatttttgtgccggtcatcgatccatcgcattggaatccgaggaaggtggggcaagatgaagatgcggagccaccggggtggggagaaggcaaagagctatcggcccatcattgagaacgacaggggtgggcaaaaggcatga

SEQ ID NO: 25772 - DNA, 138 bp, Zea mays
  Peptide Sequence Number=SeqID_67551
atggagcttgtctctgagggctttagtgtccatgcgaggacttcctgcggtcaggtcctgttcgtggggaagccatcgtctcccctcgtctggggagaggatcgagaggaatatgacctcaagcctagagccaggtag

SEQ ID NO: 25773 - DNA, 324 bp, Zea mays
  Peptide Sequence Number=SeqID_67552
atgcttctcaagctggaggaggctctcatcaagactaaagagcttcttgaaaagatggccaatgaccatgaggagctaaagtgctctcatgccaatttccaattgagcaacaagtcacaggttcaaaagaaaatgctcataaataaagataggaacaagaggctcaacaagaaagcaaaacaactaaggagaagacatcatgctcaagctcctcaagatatccatggatgcatggtgaagaagcttgagaagggagaaactgcagcatgcaccaaactccaacacaaggatgttcctaaagcaacaaggaagcaagaaaattag

SEQ ID NO: 25774 - DNA, 183 bp, Zea mays
  Peptide Sequence Number=SeqID_67553
atgacgaacctccctcatggcccttatcgccctgaggtgtggctcccgctcctcgaaagagtggacgttactagcggcatcaagaaagggttcttagcgatatgcgtcactgtgccacaccccctcccatcggtccctcaatgggaaggggacccaggacaatgtaacctaaggcccttgtaa

SEQ ID NO: 25775 - DNA, 237 bp, Zea mays
  Peptide Sequence Number=SeqID_67554
atggaggttgctgagggcctctccattgatggcggggctctcaggtggagggggttgggcttccgaggccctcaccattacctgctcgtcaagactcccaaaatggatggtcattttgggggcccatacaatgttgtggccggccattcggagtttggtgaggaagacatcgagaacacacaaggcccctatctagcgcaccaactgtcggagtttcgaaccatctccgacatataa

SEQ ID NO: 25776 - DNA, 1452 bp, Zea mays
  Peptide Sequence Number=SeqID_67555
atggatcgcgatcgctcctcacggcgcactcgcaacgacgacgggcaccaccgatcccgcggccgggacgacgaccggcaccgccgccgtagtcgccacgacaccgaggatcaccagcacgacggtggagacgaggaccgtcgccaccgccgccaccgcgacaaggacggtggcagaggcggcgaggatgaccgccggcaccgtgaccatcacgataaggacgacagccgttgccaccgctaccgtgacggcggtgacgacgatcgccgccgcgggaaccgacgttccgtttccccgtccgagtccccgccaccctcggcgaagcgggaccgctcgtctagccgcccccgggagcttgtcgagcgccgcgactccaccgaccgcgagccgcggtcgccgtcgcggaagagaaaggggcacgagggcggtggcgacggggacgagcccggccgcgaagggggcaagcgggccagggcctccgtagacccgcctccacccaaggaggagaggcctaggcgggagcgccggaggtttgaggatgtcggtgcgaatgggaagaatggtgatgtgagtaagtcgagtaaggaaatctcatctcatgggcagaagggggagttatcaattaacggagattcacagaacggcaatgggcctaatgctggttctcagcaactgctcagtgccgttcctatgccatcttctgttcccattccttcaaagcttaataataagcttggtacatctgttactgctacacaagtttctaaagaagaagcaaaaacttctgtatcagctgtagatgcacaactcttttctaaaggagaagcaaaacctactgatgtttctgttctgccaactagtaccatctctggaacgccggccgtaggtggtgctatcggtattccaggtcttacgaacattcccaatcttgaatctgtgaagcgagcccaagaacttgctgctaagatggggtttcgccaagatccacaatttggtcctcttatcaacttattccctggtacatccactgaagttactgtgccacaaaggcctgcaaaggctcctgttcttcgccttgatgcccaaggtagggaaattgatgagcagggaaacgttatcagcatgacaaagccaacaaatctgagtactctgaaggtcaatataaacaagcagaagaaagaggcttttcaaataatcaagccggacttggactctcttgcaaaatcaagtgttcattttgatgaacggatgggcataaaccaaaagaagctccttcgtcttaaaaggccaggatttcagttcgttgaagagggtaaactcactaggcaggctgaattgcagaaaattaagagtcaatttggtgaagcgcaagctaaagagctcaaagtattgcaagcccagcttgctaaggcaaagacagaagtagacagatccaaacatgaattcttttag

SEQ ID NO: 25777 - DNA, 456 bp, Zea mays
  Peptide Sequence Number=SeqID_67556
atggaagggctgctcacgcttgatgactggaaagaacggagatcagatgtggacaactcagaggacgagcgaaggcggctatccatagggtcactgaagaaaaaggcatttgaatgcatcaaacaagctcacacatttcactcaagaagaggggaaaaagaaaggtttttgaaggctagaaaatttgacacagagaaagcgatccatatgtgggctgagatgctccagtggaggaaagaatctggagcagatacaatactagaggacttcagttttgaagagctagatgatgtgctatgctattatcctcagggctaccatggagttgacaggcagggaagaccagtatacattgagagattagggaaagtggaaccaaataaattgatgcacattactccggttgatcgctacatgaagtatcacgtgcaagagttgagaaacgaatcaagctga

SEQ ID NO: 25778 - DNA, 276 bp, Zea mays
  Peptide Sequence Number=SeqID_67557
atggggggccgagtcatggagaaggtcacgaaagagattaatgctttattgaatggattatgcttaaactacgaaggaaaggatgcttctcatattagcaaagatgtttctgtaaacatacaagacatgaatggtcaggttggacactctaagggctgggatcatgagggtttcgttatggacataaatatacttctcacagagtttggagattttagtgacttctttcaagaagaggagttatattttggtgaggtaggcattctacatccttga

SEQ ID NO: 25779 - DNA, 312 bp, Zea mays
  Peptide Sequence Number=SeqID_67558
atgagggtagcagacatcgctggtgcagctgcacggcgcggggacggcggtcgaagtaggggcaagctaaaaaagaaccgacgagaattaaataatccccgatggcttcggcatagaccgatgggaattattttagccgacggggttattcatgattcctgttgtgtagggctgggcggcgcgacggctggaggaagaaggcaggcttggggcaaagggcggcgcgatggcaaacagggctgggcgaagagcggcacagtgataatagggcagggcagcgaggcgaggtggaataaggtttcatttgtttag

SEQ ID NO: 25780 - DNA, 612 bp, Zea mays
  Peptide Sequence Number=SeqID_67559
atggaggccattgccaaagagcacaagctatccaaaaaccgatttgattggaaaggcaaatcaggccaacactctcacggtgcaactggtcagccggatacgccaaagaagcgagttttggtagattgcacagcagatacaagtgttgcatctcactattatgattggctaaagaaaggaatccatgtcatcactccaaacaagaaagcaaattcagggccacttgacaggtatcttaaacttagaactcttcagcgtgcatcatatactcattacttctatgaagcaactgttggtgctggcctccctatcattagcactctgcgtggtctcctagagacaggtgacaagatattgcgcattgaagggattttcagtggaacgttaagttatatttttaacaacttcgaaggagcaagaacctttagtgatgttgttgctgaagcaaaaaaagcaggatacacagaaccagatccaagagatgatctgtctggtactgatgttgccaggaaggtcataattcttgcaagggaatctggtttggggcttgagctttctgatattcctgtacgaagtcttgtgccagaggcacttaagagcaaagttgaataa

SEQ ID NO: 25781 - DNA, 234 bp, Zea mays
  Peptide Sequence Number=SeqID_67560
atggcgagtctagtgaagaaccaaataaaaaaaaggctgggctacaacaatcccttcttcccaaagccagtccgacagccagccaccgccgtggacgtagccggagccggtgggggtggtggcgtcgacgacgacaaggaagagatgctttatggcgcgtctttgtgcacccacggtgaaacaaccgagccggtgagctccacgcgggagaagacggagagaaactacgcctag

SEQ ID NO: 25782 - DNA, 3627 bp, Zea mays
  Peptide Sequence Number=SeqID_67561
atgggcgccgctcgtacggcggcgccggtctttatgctgctgctgctgctccacctgtcgccgcgcgcggttgctgccgggacaggcgacgaggcagcggcgctgctcgcgttcaagcgcgcctccgtagccgccgaccaggccggcaggctcgcgagctgggcggagcccaactcgacctccggctccgcctcgccgtgcgagtgggccggcgtctcgtgcgtgggcggccacgtccgtgcgctcgacctcagcggcatgtccctcgtcggccgcctccacctagacgagctgctcgcgctcccggcgctccggagcgtcctcctcggtggcaacgccttccacggcgacctcacccaccgggccccgccgcggtgcgcgctcgtggacgtggacctgtcgtcgaacgctctcaacgggacgctgccccgggcgttcctggcgtcctgcagcagcctgcggctgctgaacctgtccggcaacaccttcaccggcggaggcggcttcccgttcgcgtcgtcgctgcggacgctcgacgtgtccaggaacgagctgtcagacgccggcttgctgaactactccctgagtgcctgccacggcattcggcacctgaacctctcggccaaccagctcaccggagagctcccaccacggttcgcgcagtgcagccaggtttctgttcttgatctctcagggaacctcatgtccggcgccctccccggcaggctcttggccacggcgccggccagtttgacacgcctgagcatcgctgggaacaacttctccggggacatctccaggtatcagtttggtggctgtgcaaatctctccgtgcttgatctttcgtacaacagactgagcgccaccatagggttgccaccgagtcttgccaattgccaccacctcagggaactagacatgtctgggaacaagattctgtcgggccgagtaccggagttcctggggggcttccgagcattgcggcgactcggacttgccgggaacaacttcaccgaggaaatcccggatgagctgagcctcctgtgcggaacgctggttcagctagacttgtcaagcaaccaattggttggcggtttgccagcgagcttctcaggatgcagatcgcttgaggtgctcgatctgggtagcaaccagctgtcaggtgactttgtgatcactgtgatcagcaagatctcttctctgcgtgtgctgaggctgccgttcaacaatatcacaggcacaaatcctctgcccacgctagcagctggctgccctttgcttgaagtcattgatctcgggtctaacatgctggaaggagagatcatgcccgagctgtgttcatctttgccatcactcagaaagctgctcctacccaacaactacatcaatggaaccgtgccgccctcactcggcaactgcagtaatctggagtcactggacctcagcttcaacctcatggttggtccgatcacgcctgaagtactgttgcttcctaagcttgttgatttggtcatgtgggcaaacagtctctccggtgagataccagacacgctatgctccaacagcacagcactgaagacactggtcataagctacaacaacataaccggagtgatccctgtctccatcaccaggtgcgtgaatctcatatggctgtcacttgccggcaacagcatgaccgggagtgtccccgccggcttcgggaacctccagaagctcgccattctacagctgcacaggaactcactctctggtcctgtgccagcagagcttggtcgctgcagcaacctcatctggcttgatctcaacagcaacaacttctccggtgcgataccgccgcagctagcagcacaggcagggctcatcactggaggcatggtttctgggaagcagttcgcgttcctgaggaatgaggctggcaacatctgcccaggtgctggagtgctgttcgagttctttgacatccgtccggagcggctggcccagttccctgctgtgcactcgtgtgcctccacgaggatatacactgggatgacagtgtacaccttcaaccaaagtgggagcatgatattccttgatctctcgtacaacagcctcacaggcacaattccggcgagcctggggaacatgacgtatcttgatgtccttaacctggggcataatgaccttaccggtgcaattccagatgcgttcacagggttgaaggcgattggtgtccttgacctctcgcacaatcacctcaccggtgtcatccctgctggactggggtgtttaaatttcctagctgacttcgacgtctccaacaacaacctcactggtgagatacccacgtcagggcagctcagtacatttccagcatcccgttttgagaacaactccggcatctgtggcatccccttggatccttgcacgcacaatgccagcactggaggtgttcctcaaaacccctctaacgtgcggaggaagtttctcgaagagttcgtgctccttgcagtgtcgctcaccgtgctcatggtggccaccttggttgtcactgcatacaagctcaggaggccccgtgggagcaaaactgaagagattcaaactgctgggtatagcgacagccccgcatcgtccaccagtacaagctggaagctttctggttccaaagagccactgagcatcaatctggcgatatttgagaatccgttgaggaaactaacatatgcccacctgcatgaggctaccaatggcttcagctcggaagctcttgttggcacaggaggattcggtgaggtttacaaggctaggctcatggatggcagcgttgtggctgtcaagaagctgatgcatttcacaggccagggcgaccgggagttcactgcagagatggagaccattggcaagatcaaacatcgcaatcttgtgccgttgctaggctactgcaaagttggcgacgaacgtctgcttgtgtacgagtacatgaataatggaagcctggatgtcttgctccatgaaagggacaagactgatgtgggtcttgattgggcaacaaggaagaagattgcagttggctcggcaagaggactggccttcctccaccatagttgcatcccacacatcatacaccgggacatgaagtcaagcaacgtgcttcttgacgataatctcgatgcctacgtatcggatttcggaatggcgcggctcgtgaatgctgttgactcacatctaaccgtgagcaagctcttaggaacacctggttatgtggctcccgagtacttccagtcggttatttgcacaactaagggcgacgtctacagctatggcgttgttcttctggagcttctctcagggaaaaaaccaatcaatccgactgaattcggcgacaataatctcatcgactgggcaaagcagatggttaaggaggaccggtgcagcgagatatttgatcctatattgaccgacacaaaatcctgcgagtcggagctgtaccagtatctggcgattgcttgccagtgcttggacgatcaacctagtcgcagacctacgatgatccaggtcatggcaatgttcagtgagtttcagattgactctggcagcttcttcttggacggcttctcgctcgattcagatagaggaatcatctga

SEQ ID NO: 25783 - DNA, 2964 bp, Zea mays
  Peptide Sequence Number=SeqID_67562
ggtctcaagaacttcagcaaaacagcaagagatatgttaagtagaatgcagaagattgacagtgactattatccagagacgctgcatcagatgtttgttgtgaatgctggtagtggtttcaagctactatggagttctgtgaaaggctttcttgaccctaaaactgcctcgaagatacatgttttgggaacaaagtttcagaacaagcttcttgaagtaatagatgcaagtcaacttcctgaatttttgggggggacatgcacttgtgctgctgtgggaggatgtatgaggtctaacaaaggtccatggaatgatccagatattatgaagtctggcgggaggaccaagtttgagcgatggggcggagttagcccgggcagcgtgccatcctctgggctcccctttcgcgacgacgtgctttcttccagtcctccggccaccgctgcggttcgtcttcagccggagtcccgtccgcctccccttgttcggcgttccaccttccgtacgacgcctcgactccctgcgggggcggatgccgaggggtgggagttggtggagtcgaggagggcgaagcggctgcgtcttcgggcgcttcgggtccgtcgtcatgggccctccccctctgccttcaatggcgtttgcttcaactgcctttcacctcgtcacctggcccgccattgccgcctggattcaagatgtttcaattgcctcgcgctgggccataaagctgcgtcctgtcccagggaccctgccacctctccggtgcctcgagttcattcctccaccgctgtgcaccctgtctgggcgaggcttggcggctcagtggcggccggttcctctgtttggtcgcggcttggtggcacaaaaggcccggggcgccccatctcggtctggggaaggatttcccctcccatggatcgctcggacgtggggaggcagcggctagttcatgctcctaagagggtgtggagaagaaaatttctgccagctttgggggaagacaatcaacaacattcgcagccttcggtcaatggtgcctctggctctccgaggggccggactcgtcgtcgtcattctcgcaagagacttgcccctcctttggaggagggtcacctggttccccatcgtttggagcgcactgcccaggtttcgccctctcccggtgctgctgttcgtccggttcctccttgtatcctgggttggagccatgctatgtcatctgctgaggaagacctgaagaaggcggtggtgatctcggtgatcagcgagcgtacaactgttccaggggaggaggtggcagccctgctcgcgccctggttagaggttgaggaaggttcgcttagtcttcttcgactatctgcgtccagttttctgctgtttcttccttctgtggggctgattcggctcttggaggagaaaaagtcattattgaaagcgtcatccttttcggtgatctgccaacaatggtcaaggttcacaaactcctcaggagggatccttcctttcttggtgaattttcatttggatggcattcctgtgcatgcttgggaggttgccacggtggaacggctgctcaatccctttgcttcggtgttctgcgtgcagtcggacctggatgaccgcacctcttttcgttgttctgcatggtgtgttgatcccgctttgattccagattcaagggagttatggattacagaacccctgcagtcgccagagaatgctggtcaagggttcagaactctaatttatcaagtcaaaattcattggtccttcccttcgtcatctgctgagcttgggccctctctgtcgctgggcgatttgggcgccagagattgggctcgccggagtcccagatcacgttctcctccgggaaatggcagagggcagagtagccgacctcggcgttcagtcatggagaggttgggccctcatattaatgatggttccagtgctagcaacaagcgctgctcgggcatcgaggcagctctggtgcctttggctgcagacttgggtgatattgatgaaggcatttcgaacttggttaaccgtgcgggcctcgaggcgtcttctgtgactgccttggctccggtgccactggttccattaatggcaagagcagacaaggagggagaacatctagtttatgatcatcgtgcgggcctcgagaccccttccttgggtgtctcggctccggtgtacatggctgcatcgtcaccaattgatggagctgctgcggctgaaactctgatctgcgttcaccgtgcgggcctcgaggccccttccttgggtgtttcggctccggggcgctctcatggaatattggatcccaattctgtcagagggggggcgttgtcggttgctgggactgtttccccgcgggctctgcttgtatattctagaagacgccccattctcgcagatgttggggcggactctgtttctgggtcagcagaccgggtggatgctctcgtgcgcagttctccgacgggaaggcaagagctacttgaggggcatgcgggggaagattgctccgctgactgtatctcggcatcggttttggacaccacgacatcggatgttgatctttcgctggtgcaggattttttggccaccatcactaaaccagttgactgcatcttggccagaccagctacccaaaagcggcgacgtaagcagacgccaaaagattttatacctagaagaagcaatagactgaagaaggatggtaggggggcgccttccacagctgtaagaaaaataagagtggatattgctagaaccttggggatatgggctgaccaggagggattggcacaagaagctcttgatgaatatgggcggctgttttctaagcctctaactcaggaccatgtcgctgccttagctgcactgttcggttgggcaattccggagaatgctgatgctgcagattcactgttgggacagagtcccattattgtgtag

SEQ ID NO: 25784 - DNA, 2943 bp, Zea mays
  Peptide Sequence Number=SeqID_67563
atggcctctccacttccacctccacctccacccccacctccctcccacgcccccaaccctcccacctccacccaccacccctgcccctcgccggcctccaccccggaaccggcgaccaacccagaaaactcccttggtgtccctctcgctccacatgtgggccgcctaaaggctcaacgttggagtgatactagtccagtctcatcatctggtgactcctggctggcaccccagtcctataaggaggccctgttagcatatcccttggctcccgcggctcctcccccggcaccaagtgtgaagcctgtctactcggcgaaggcggtggctgattcccttcctgtggtgcaaggccggcgggctggtccccggcatgacgacgacggatggcaagtggtgaggagtaagaggaggcagtttcgcggtgttcaactccctcgtcgagagcccccggtggttctccgaggacggtgtttcaactgcttctcctccggccacctggctgctgtctgccgtcgacccacgcgctgtttccggtgcctcaggcttgggcatcaggctgccaagtgtccaggtcgccttgaagtgcaaaggaagaagactgtgtggcaacgtttggaaaaacaacaatcgaaggtctctgtgtggcagcgcctttcagagcagcgtgaagactcgccagtggcctcgcagcgggctgatccctgtaggcgtcgctcggtgtgggtccagatcagcagacctgaggctgctgcgatgaaggaagatccccctaggatggctgatgatggggagtcacatagaagcctccgttacaaacgaaagagaagacgatccaaacatggaaaaggatcatcaaggtctgtggtcgcccctggccaggcgttatcggcctcgtcagaggatgaggtacctccgtcgactagacagacccctgttcagtgggctggcgatcaaggcgaaaggaactggggggctctttcttcctgtacccttgaattcagtgatgacatggctcgtgaagaagcaaatatgagaagagccctcttcgttacaatagtgggaaccagaccattagtgatggggcctgagatccttgaggaagttgctcacagtttcaacgtcaagttggaggatatgaagattcatcacaccaagccagaggattttcttctgattttacctgacgaagatactgcttcaagggtgcttaatggcggcaagattttaagaggacctcgattcagcctgatattcaagcggtggacgagatgctctcacgcctcatcttcgataatgtcagggctggtagacttggaaatcagagggatcccggagcatgcttgggcactttctacggcaaaaagtattctgattgactcctgcttgatagctgaagtgcaccctgacactttgctcaagcaagatctatcttcgtttgtcgtcaaagtttggtgttttaacccggagaaactccaacgtgactcagttcttcacattattgagcctgggttgcagatgtttgagaaaagatgcctcacatacaagattcaagttagcgtgctgagggcgggttcaagcatcacaccagcggaccccactccatctgtggctggcggaaaatccccaggggatgaagacggaaatggaactcaagatccccaccctcgacgtccaggtggctctcaggtccagaggaggccgttacatcttcgattgggcccacagtcgtcttccggccgcggcaacgaggcgcctgcgcagtcatgcgccttggaggaagtagcgggagatgctgggcgagatctgcatttaacactgggcactgatatgtctccaacgtccgaggtgaggacgctgcaccttcgccaggccccgcagccgtctttgggccgcgatttcgaagcgcccgcgccgccatacgcctcgcgggagaattctggagatactctgcgtgttacgcaattaatgccgctgacgaccgaggagccccttcacgctgaagcgcttccagaggcgtctcctcacattgatggcgcaccttcacaggattttgaagtggcgggacaagtaacgatggagaagagaaacagtccccaaggttgctactctgcggtgcacgaatctggcgggatgacttcccgccttgtgattaatggacctgtaaggttcctcaggccagatccggcccgttgcctggttgggtcgctagagacatctgggcctgttcctgtctcgcctcatgagccggctgggccgctagagacatgcatttccttgcctgtctcgccccaactgtgttctgggccgctgaagacgaacaccctcatgatagtctcgccccaactagtttctggtttccctgagtcaacgtttccaagtgctggcctgcctctacagatgctgggaatggctgggaggatggcagtaacagtccgacacaacgaagcaacaaaggctctcaaggtctactttcgcagaagaactaaggcacaacccctccaaatcagtcagaatgaagagacagaggccagtataattcagacaaacaacacttctcactcggactcaagacttctgaaccaatctttatcagggaaggaagaattcctcagaaaaatcagtaaagcagctgataaaatactgccggctccaaagcaaaccatgaatacctcatcagccccacaatcttctcaggtggctgctcctaggcgcagccgacgcattgcgggggctggggttgagtttaatatgcgagattggggtaataggtctactaaaaaggctatgagagctttgcatatcttatctgatgacaatggtactacccaggaagcactagacgcgtatgcaaagattttcaagcaacctttgtcccataaccaggtagaagctttggcggccctctttggttggacccctcctcctggacttgtttgttag

SEQ ID NO: 25785 - DNA, 375 bp, Zea mays
  Peptide Sequence Number=SeqID_67564
atgagttgtgttttacgcatgtttcccaatctaaccggatcttctatttatggatgcttttatctgcagcgtttggttgaagctaagttgcaagtggtgcagctagatgcaaatctgctaagtataaggcgagctctgttggagaaaggaatagaagcagtactcaggtcaaccttttggcagcaagaaatgaaagggaaagttttcaaattgctttacgcccaaaggtttcatgggcaacttcagggaagctcaatggctatttcaatagctaccttcaaggtgaagtactcacactcgcaggagatggggagccctaccaagtgtaagatccaaataaaggacatgctgctgaggaatagaaagaagcaatag

SEQ ID NO: 25786 - DNA, 321 bp, Zea mays
  Peptide Sequence Number=SeqID_67565
atgggcctaactgatgggattgttaagctcagttatgctggacatattatgctctgtgtagtggtgaatggtcgcatcatcaggaagcgtatccatgtccgcgtggagcatgtgcagccatcccgctgcacagaagagttccgcctgaggaaggtgaagaatgaccagctgaaggcggatgcaaaggagcgcggcgaggtcatcagcaccaagaggcagccgttgggccccaagcctgtcttcatggttgaggggactaccatcgagaccgtcactcccatcccgtacgatgtggtcaatgatcttaagggaggatactag

SEQ ID NO: 25787 - DNA, 417 bp, Zea mays
  Peptide Sequence Number=SeqID_67566
atgggcaagaacaagaaaggtgggagttcttcacaccattccggcaataagcggaagcgcgagccgactcctccctcggaggacttcggcgattccgaatactcggaggaggagttctcttctgagtcagagggttcgtcggtccatgcctctcccccggcgtcgtctgatgactcagacgactcccaggggctcgccgcagagttgtggacctacatccggaccgtcgagcgcaccgggctcgagggctgggatgagtcggaggtctcctcggacgaggagggcggcggtgacggcgatggcgagggcgacgacgatgatggaggcgacgacgatggcgacgacgacgacgagggcggcagaggtgatggtgacggcgtggacggcagcaagggcagcaacaaggccagtggctag

SEQ ID NO: 25788 - DNA, 372 bp, Zea mays
  Peptide Sequence Number=SeqID_67567
atggcctgcaacctggctcagtgcgccaccgccgccgcggcgaccgtcgcgccccgcacccctcgccctgctgcgtccgcgtccgtctccttctccgcgaggaagccggcgggcggcagcctgcggctgcagcggcaggcgtgctgcgagccgtcggtggcgccgtcgcgggcggtgttcgcctgccgggccgcggcgtcggggagcgcggccgacctggcctccgggggcaggaggtcgtccggcgtgccggagtgcggcaccgcgctgcaccgccgcaaggcggtgcaggccagcctctccgcgctcaagagcgcgggcggcaagggcgtcatggttgaacgtgttggtggggcatcgtccaatcgctaa

SEQ ID NO: 25789 - DNA, 486 bp, Zea mays
  Peptide Sequence Number=SeqID_67568
atggagaggttcttctccaacccttcaaacgccccgcgatatattgaagacggtgatgaaatcagaaagtactttgctgcatttcaccttcttgacgacttccccgctgcagtcattgttgatgattttgcagatttcttctccgacaggagctgccaacaaagatatggaattgctagggctcgagatctagcaatggtgcgtgcactagctttgtgccacaatgctattgggcatgcaaatgcaaagcttggaactcttggttattgcaatctattactttctgatgtacatcaaggtgatactccaagattgttgttcatttaccagagatggataaattccatatacacaatccgaggtgacggcaatggatcctacatacttcagaaccttggcagttcagaaactgggtcaaagaaagcaagaaaagctaaatactcaatagcactacaatatcttgttcttgaagagaccagcacctaa

SEQ ID NO: 25790 - DNA, 2178 bp, Zea mays
  Peptide Sequence Number=SeqID_67569
atggcgccggcgtgggagcgcgccaggcgcgcgctcgccaccaggttctgcatgcgctttgcggcgaggcgcgtggtcgtcgaggatgcgccacgtgggatggacgacatagaggcagaggaggaggaggagcaggagcagcagcagcaccaagaggagccggccgaggatgagagggagatgtcgctggccgcggagtccgaggacctggcgtcgtcgtggtctgggagccggagttcagaggtttcgcaagctcctgtattcgtattttggactttcttggtcatcgatcgaactgatattgaatttacatgtgcaatttgcctcagcggcatgaggtccggccgcggccaagcgctattcactgctgaatgctcccacaagttccatttcaactgcatctcctcaaacgtgcagcacggcaacaagatctgcccaatctgccgtgctgtgtggaaggagctgcctttccaggggcatgtggctacatctgctgctgctcatgtggtttggccccagatgagcatgcagtcagtgagtccgctggatgagctcccggtctttggctatcaggatacagcagttatgaacgacgatgagcagatacagcctactgaaacagcagttggtgatgaggctcctcctcctcctcctcctctgcttgagatcacgacgtacactgaattcccagccgtccaggagtccgtggcacacgaggaattcgccatcgtcatccatctcaaggctccgtcgtgggtgagcacccgagcgccactggatctggtgactgtgctcgacgtgagcgggagcatgtcgggccccaagcttgcactcgtcaagcgcgccatgaggttcgtgatcgagaaccttgaccccagcgaccggctctccgtcgtcgccttctcctcggcggcttggaggctgttcccgctccggaggatgaccgcctccggacagcagcagtcgctgcaggctgtcaactgcctcgtcgccgacggcggcaccaacatcgccgacgggctgcggaaggctaccagggtggtgcaggacaggcatgccaggaacccggtctgtagcatcatgctcctctctgacggcgtcgactcccacgtcctcccgccgcggcgcggctcggcgccggactacggccggctcgtcccgcgctccgccctccttcccgggagcgagcaccacgtgccgatccatgcctttggcttcggcatcgaccacgactccagggcgttgcacgccgtggcccagatgtccggcggcaccttctccttcatcgacgtggtggggtcgatccaggacgccttcgcgcagtgcatcggcgggctcctcagcgtcgtggcgcaggagacgacgctcagcgtcgagtgcgccgaccagggcgtgctcctcacgtccatcaagtctggcagctacgccagcggagcggacggtgacggccgcggcgggttcgtcgacgtcggccgcctctacgccgacgaggagagggacttcctcgtcaccgtgcgcgtcccgccgtcacgcgggaccatcgcgctcgtccggccgagctgcacctaccgcgacgcggtcaccacggagatggtgcgggtggggggcgacccggtgacgctgctccgcgcggcgagcccggtgagcgcggcgatgtccctgcaggtggagcgcgagtggcaccgcgtccacgccaccgaggacatggccgcggcgcaggccgccgcagaggagcacgactacgcccgcgcggcttcgatcctcgaggcccgccgccggctgctggagtcgtgcgcgtcgctgtcctcggaccagcagacgcaggcgctggtggccgagctgcgggagatgcaggagcgcgtgctgaacccgcggctgtaccaggggtttggccgcgcctacatcctgtccgggctcagctcccactcgtggcagcgtgccacggcgcgcggtgactccacggagctcacgggcctcgtccacacctaccagacgccgtccatggtcaacatgctcaaccggtcgcaggcgctccagccagaggtagcggaggcgctgacccggtccccgacgatcgcgccgttgcgcagcccagcccccgcctccggctcgcgggggacgcgacgcgggccccggtcgttcaggccggcaaagtccttcactgggcggtcatcgtga

SEQ ID NO: 25791 - DNA, 765 bp, Zea mays
  Peptide Sequence Number=SeqID_67570
atgtccattgactctgctttgcaacaaattgaaggtataatgcaatattttgaaaagtacagaaatgaaggatttcaagttagcttggaaattgcaaagggactagcaactgaaatggctgtacatccatcctttccagtcaaacgccaaggtactagaaagaaacaatttgatgaatctgactgcagtgaagaaatattgcaggctgagaaggatttcgaagtcaattattttctggtcatggttgatatggcaatatcatcattgaaaaacagatttgaagaactccaagtatttaaaactatatttggatttttactaagctccagaaccttgatgtctttggatgataatgagctgacaaattgctgcaataaatttgataaaacatttacttttgataattcatctgatgtggacttgaatgatctaatatctgaattgaagattttacagttgactttaccagatagacaaatgtcagccatggagatttttgagtttgttagagaagtggacagctatcctaatgttgtcattgcttatcgaatcttgtttactatgcctgtgactgttgcatcagcggagagaagtttttcaaagttgaagctactgaagaactatttgaggtcagtaatgtcccaagaaagattaaatggtttggcaaccttgtgtatcgagaagcaactgctggatgatattgatactgactctatcatcactgactttgcatctaggagtgttagaaggaacatttttaagtaa

SEQ ID NO: 25792 - DNA, 462 bp, Zea mays
  Peptide Sequence Number=SeqID_67571
atggctcggcgtctaggacgactttacctctgcgagcagccgcacccccatgagctccgggccgcgacgccatcgagccgttccctgctcggttctcgggtgagtccaccggtgagcacattcatcaacctatcttctacgatcttcgttgtcgttgttggaagccatcgccagcccgcaaccgcacgtctcggccaggccatacgccagctgcgttgtccggtgccattgcttctgcagtccgcgtcgctacgagctcctgtgcgcgtgtgcagcccactcgtcgtgctccgtcgagccccaggctcgcagcccctcctcggtctcgcgccctactgcctgcccccaccggctagcgcccggcacctcgccgtcccgtcctccccctgcgcgctgaagctctggcgagccgttgtcgtctatgcatccgacctcctctacgcgagcccctctattttctga

SEQ ID NO: 25793 - DNA, 171 bp, Zea mays
  Peptide Sequence Number=SeqID_67572
atggtcgccgggctcttgctcctcctcctgctgcgcggttctgggcatgaggaggcgtggggaagttgggcgagagaggagcacttgagtaggagcgtgggtgttacaaagattagaagcgacaacgggacggagttcaagaactctcaaattgaaggcttccttgaggag

SEQ ID NO: 25794 - DNA, 986 bp, Zea mays
  Peptide Sequence Number=SeqID_67573
agtagcgcagagtgccggaggaatctgttggattctcctgctactggttcggttctttgggagttgttggcgtggctgggggaggggatgccgccgtccaacctgcagtgcttcttggactgcaccacccccaccgtggacacgcacattctccccaagacgaatggacgtttgccagccgatgcttggcaccacgctgagatggacagcgtcgagtacttcaatctttccgacctctgggaacagtactacgagtggagcgcgtacggcgccggagctacggtgcagctcccaggaggggagagagtagttcagtactatgttccatacctgtccgggatgcagctattcaccaacaaggtcctgacggcatccaggagttttggtgaagataatggcatggatttctggagtgatgatgaggacaacgagaagatgtcaagatcgtggagttcgacttctgatgaatcattgttcaactgtgatgtggtatggcccaacaggaagcgtccagggcacttgtcctttgagttctttgaagtaggttcaccttacggaagggtcccgttcattgacaaggtctatgaactatcccagggctttcctggattgacattactgaagagtgctgacctatcgcctgttagctggatgtcagttgcctgcgtgaaggatttatctgcatgcttcttgacttaccatactatttcctcctcgttccaagattacgggctcgagaccatgaccaatgattgttgccatccagttgccgacggcaagcagaatggccacatggataaaaagagtacaccgtgtcactgcctccattcggcctcgcaggcacacaaggtacatggttccctctggaccaaccccatgacaggagatcacagaaagatggacttcctcttcagtgcagcggactcctggttgaagcagcttggagtccagcaccatgacttcaacttcttcatcactcaccccat

SEQ ID NO: 25795 - DNA, 456 bp, Zea mays
  Peptide Sequence Number=SeqID_67574
atggccggggagggtacgacgacggtgtgcggaggtcatggtcaggactccgaggcggtggagtggagcggcggcatggtggaggcagcggtcggggcgcgggggtggtggagcatgacgacagcgtctaggaggttagcgctaggacattgggctagtggagcagggcgacgacacgctggaggtttcttccgggaaggaagaatttttttactccaaaagacttataaaaatagggtaccgcggtacgccgaacttgataagggggcgatagactgcagtagatggcaagatctatatacggtggccggggagggtacgacggcggtgcggggaggtcggggtccagatgccaaggcggtggagtggagcggcagcatggtggaggcagcgggcgaggcgccggggtggtggagcacgggggcaacgagcaggaggttggcgctagaacactaa

SEQ ID NO: 25796 - DNA, 597 bp, Zea mays
  Peptide Sequence Number=SeqID_67575
atggagcacgacaacgacgagcaggaggccggcgtcgaggcactaggccggtggagcagggcgacaacgcgctggaggaaggggccgggtgacaaggcggtggagcaggtacggggcccgaggccgctaccggcgatggtgcagggatgtgcccaggaccgatggcacaagcggattggtggcgtagtcgaggcaacgatgacgagtggttctagcgatggtggcttcaattggagtgaacgacccgatcgcgttgagtttcatccaggaaggaagaaattttttactccaaaagacataaaaataggatacggatcaggctatcacggtcctgtaacgggtacaagtggggtggttcgttatacaatggcgtacgtggtcgtttccacgtattaccatcctccacttcaaaagaggaggaaccggagtttttttgtcgctgtaaattttcgccatgtgtcggccactgggattaggatcaggtgcagcctaacaacaagaggtggcgacaaatggtacattccactgtgccctgatgtgtgcgcaagtaaaatactcatccgatgtcctatttgttatcgtttggataagttttga

SEQ ID NO: 25797 - DNA, 1386 bp, Zea mays
  Peptide Sequence Number=SeqID_67576
atggcgagtctcgttccccgcgccgcggccgcttccctcctcgccgtcctcgtcatgacaacgaccaccaccaccaccccggcatcagctcagaggtttccggtgagggcgcgcccaaccaggtcgggctacctcaacatcacgtccaccaactccctctacttcgccttctacgaagccaccgagccggtgacaaccccagcgaccgccgtgccgctgctcgtctggctccagggcgggcccggctgctcctcgctcattggaaatttcgctgaggtcggcccattcctcctcctcaactctagctccagtggcctctcccgcaaccgcaatcgctggaaccgacgcttcggcgtcatcttcatcgacaacccgctcggctccggcttcagcgcgcccgctcactcgacgacatccccagggacgagcccaccatcgccgcgcacctcctcgcggcgctgcagtcgttcatggcgcttgacgcggccttccgcgcgcgccctctgttcctcgcaggagagagctacgccgggcaagtacattccccgcggcccgcgaggcacatcctcgacgcgaacgacaagctcccccgcgggccagagggtgaactttgcagggcatcgtcatcggcaacggcatgactcaccccgtggcgcaggtgaccgttcacgccgaccaggcgtacttcgccggtctcatcaacgccaagcagaaggccaccgtcgagggcatgcagaacaggacggtgagcctggtgagggccggcaactgggcggaagccaggaaggagcggaacggcatcataagcttcctccggaaagccaccggcgtggcgacggccttcaactacgcgcgcgagagtgcgagaccaagtatccgacgcgcccgctgcgcaacttcctcaacaccgacgaggccaaggcggctctgggcgcccggcgcgacgtgaggtgggtgcgctgcagcaaggacgtgtccgaggcgctaggcgacgacatcatgaagagcgtgaagggcgacgtggagaacatcctggcgcggaacggcaccgcgcgggtgctgctgttccagggcgtgttcgacctgcacagtgcgccggcgtccgtggcggcttgggtgcgggagctgtcgtggccggggttgcccgcgttcctggacgcggaccgcgccgtgtggaagcttgggggcggtcggctcgccgggtacgtgcagagctcgggagcgctttccaacacagtcatcgtcggggctgggcacatggcggccggcgacaaccgaccggccgcgcaggcgatgatcgagggctgggtgctgcagacggggcccttcgccacagccggcggccaggcgtcaacgccggcggccatagagccagtcccagtttga

SEQ ID NO: 25798 - DNA, 1929 bp, Zea mays
  Peptide Sequence Number=SeqID_67577
atgcagcacgatcagcgcaagaagggttccgtggaggcagagtttttcacagagtatggggatgcaagtcgatacaagattcaggaagtcattggtaaaggaagctacggggtggtctgctccgctgtagatgtccacactggagagaaagtagcgatcaagaagatacatgacatctttgagcacatatctgatgctgcccggattctccgtgagatcaagcttctgagactcctaagacatccagatattgttgagatcaaacatattatgttgcctccatcaagacgggaattcaaagatatttatgttgtttttgaacttatggagtctgatcttcaccaagttatcaaggctaatgatgacctgacaaaggaacattatcagttctttctctaccaactgatccgtgctctgaaatacatccacacagctaacgtttatcaccgggacctgaagccaaagaatatattagcaaattctaactgcaaactgaaaatttgtgattttggactagcacgagttgcattcaatgataccccaacaacgatcttctggacagattatgttgcaacaagatggtacagagctccagagctctgtggatccttcttttcaaagtatacaccggccattgacatttggagcattggatgcatctttgctgaggtgttaacagggaaacctttgtttcctggtaaaaatgttgtccatcagttagacttaatgactgaccttctaggcacgccatcgatggatacgatttctcgggtccggaatgagaaagcaaggaggtatctaagtagcatgagaaagaaagagacaatttcgttctcacaaaagtttccgaatgcagatcctttagccttggatcttttgcaaaggcttttagcatttgatccgaaagaccgtccaactgcagaacaggcattggctcatccatactttaaagggctagccaaggttgagagagagccatcttgtcaaccaatcacaaagatggagtttgagtttgaaaggagaagagtgacaaaagaagacattagggagctgatattccgtgagatattggaatatcatccacaactgctcaaagactatatcaatggcacggagaggacaacctttctgtacccaagtgctgtcgaccaatttaggaagcaatttgctcatcttgaagaaaatagtggaaacggacctgtgattccaatggaaagaaaacatacttctcttcctaggtctactattgttcactcatctccaattcctgtcaaggaacaaccccgtatcggcccatgtagggaaaggccttcatctgatgagtcctacaggaatcctcgggagacagaacaatattccggcaatctccccagaacgtcacaggctccacaaagagtgccaacagcgagaccaggaagggttgttggtccagtaatgccttaccaaaatggagacaccaaagacccctacgacacacgaaggttggcaatgagctcaggatatcctccccaacaaatcccacaaacgtttggttattatcagacacatggtaaaccagcttgctgcgagccatcacaggctgaaaggtacacgctgcatcagcaggctgcctatgcctgcgcaaaccgtacagccgcgtctgatgttgctctggacatgagagcacccccttttcagcatctatcggcagggcagagaagtgactcttgtgataggctgactgcacagacgtacttgtctgctacatcatctaacgggatcgatgccactgcacctcgactggcagcaactactcacagaaggtcggcgttgttccgtttggcatgtcaaacatgtattagtgactggatcatggccgaaatcatggaaaagaggaacaccgccggcggcatgaagcctgccaaaaagtttgtatctgcctgtgcctga

SEQ ID NO: 25799 - DNA, 1276 bp, Zea mays
  Peptide Sequence Number=SeqID_67578
atgacgacaggcaagacgtcgatcacctggttcgggccggtgccgagggtgaccatcaccgagcccgagctggttcgggaggtcctgtccaacaagttcggccactacgagaagctcaagttcggcaggctccagaggatgctgcacaacggcctgggcagcctcgagggcgagaagtgggcaaagcaccgcaggatcatcaaccccgcgttccatctcgagaaactcaaggggatgttacccgctttcgccgcgtgctgcacggagctggtgcagaggtgggaaggcctggtcgcagatgggcagccgtgcgaggtggacgtgtggcctgagatgcagaacctgacaggggacgtcatctcccgcgccgcgttcggcagcagctacctcgaaggccggaggatcttccagctccagggggagcaggtgcagctcgtcgtccaggccatgcacaagcttcacatccctggccacttgtacctgcctacgaaaaccaaccgacggatgaagcagatcgcctcagaggtcgaggagctcctcaagggcatcatcgccaagagagagaacgcgctgagaagcggcagcgcggcgggcgacgacgacctcctcgggctgcttctggagtccaacatggagcactgcaggggtgacggcagcgacgccgccagggccggcatcaccaccgacgacgtcatcggggagtgcaagctgttctacttcgccggcatggagaccacgtcggtgctgctcacgtggaccatggtcgtgctctccatgcacccggactggcagcacccgggccaggggaggaggtgctccacgtcctgggtcacacgacgacgggcgccggactacgatgccctgagccgcctcagaatcgtgacgatggttctgtacgaggtgcttcgtctgtacacgccgctgacggcgctccagcgccagacgtacaagccgatggagctcggcggcgtcaggtacccggccggcgtgatgctgatgctgccgctgctgtgcatccaccacgacaaggacgtctggggccccgacgccagcgagttcaggccggagaggtttgccgagggggtctccaaggcgtccagggacgcgcccgccttcttccccttcggatggggaccgcgcacctgcgtcggccagaacttcgccctgctcgaggccaagatggggctcgccatgatcctgcagcgcttcgcgttcgagctctcgccggcctacacgcacgcgccgtttccccacggcatgctgcagccggagcacg

SEQ ID NO: 25800 - DNA, 1440 bp, Zea mays
  Peptide Sequence Number=SeqID_67579
atgacccaggatgaccccgacctaggatgtgggacgacgatcccagtgtgctgcattgccgaactatcaggggaaaacactgaaataatggaaatcagcttattgcataatgaatctgatgcaggaagcaccagtttgctaccgctgccattgttgtcatatggtccaagatcaatgcactacatcgtttgccaaaaacatacggcaagggttatccccttgtatgtcccttatgacctcatccatcacaaaggcaaaaaagctgctagtgctctcgattctcaagctgtgaacgctctgcttagaaacaatagtgtatcagtagaagttccaatacaagtaccaccatcatcagactttgagagtatcctgtcaccagagccaatctacagtgatcttcagttgaaagagatgaactacaatgcagcagcaatggatgaaagcactgagttccttcacttgattcttagtggcaatgatgaaggatacaatagcacaactgaattacaagtttgggatgttgtggacttctatgtctcagaaaacttttctgctctccaatttgatagtttgatgggttttacaaatgaagttagtacttcctacaatgattgtatgaatttagttgatatggtagagcggcccgtggctcgtctgtctctagatgatacaccaaaacccagtaacagtgatgatgcggttccggcagacaatgtcacaatggaccctgatgaaacatccttataccttcagacaaaaccaacagattcagaaacagaaagtagttctgccgcaggagatgttgaaactgaatatctagatctaaagctactttctagatgtatgcctgatttaatggatgttgactcgcccaattgcttatcgaaaacaccagtgaaaaaaaagcatgtgactcttgtgcttgatttggacgagactctggtacattcaacattggatcactgcgacaatgctgattttaccctagaagttttctttaatatgaaaaatcacacagtgtatgtgagaaaaaggccttacctgaaaatgtttcttgagaaggttgctcagatgtttgaggttgtcattttcacagctagtcagagagtctatgctgagcaacttatagataaacttgaccctgatggaaaatatatctcacggcgtatttatcgtgaatcttgtgtattctctgacggttgctatacaaaggacctgacaattctggggatcgacttggcaaaagttgcaatagttgacaatactccacaggttttccagttgcaagtggataacggcataccgattaagagctggtttgatgacccctcagatcaggaactgatcgagttgctcccgttcttggagagcctcgtggattcagaggacgtgaggccaataatttcaaagacctttcatgacaaacttgagcagaattag

SEQ ID NO: 25801 - DNA, 1044 bp, Zea mays
  Peptide Sequence Number=SeqID_67580
atgaagacattccttgctggtatggttgaactgattgtgaagaaacagatgagtttgcagggaatccctgtggtggtgcctgggaagaaatgttggaacccattggtggccactgagcatgaaatccaatatgttttccatgttgtgttgtacgttgaattccctgaaaaggctgcaaagctggctgttgacttggcaacggaggacgcattggtgcaggatgatgagaaacatgtgcttgttgatgggacacaggtacaggttgcaaaagagcaccttgtgtttgctgctgtgtatatgaagcattctgggggtgcatatgatgtgtttgttgaggataggcctgtggttgtgggtaagcttgctgctgggcatgtggaggctgcagctgaacttgagagtttaactgcatctgaggttgaatattttgatgtggaggtaaagcttgcagatgtggatgttgttgctgtgcaacaatatgttgctgctgcggaggttgaactcgttgtacttggagaccagatggttggagaggaacatgacttggttggaactgtggaacttgggctgactgaattgattgatgaagctgtgactgatctgcaggtagttgaacatgggaaagatgagggtgactttggggatgaggttgaactggatgctgctgaagctgcggttgacttgtcaatggatggacctggggttgactttgagcttgcatcatcagttgggaggattgcacttgaggctgaacataagaagcaggttgtgcagatccttgcaccacattttgggatggtacttgcattgaaggttgcatgtaatgctgatacgcctgctggtattggttatactgttgatattgctgcatgtaagggttggatccaggatgctgctgctgataatattgtgagtattggagctgctgctgctgctgaacttgttacagctgtggctgtagttaaagatggctttggtagggttgtaactgcaggtgcagcagatccagctgaagcaagtgatgggtcttgggtgactggctga

SEQ ID NO: 25802 - DNA, 327 bp, Zea mays
  Peptide Sequence Number=SeqID_67581
ggagaagagaactcatgcttgatgccctcctcctcaaggaaaccttcaatttgagagttgaaagggaattagagccggcacactataattcaccggactgtccggtgtacaccggacagtgtccggtgctccaagaagacgcagctctggaacttggctgcctcgggaattcacaacggctgctccgctataattcaccggacatgtccggtgtaactgcggggcaacggctacttcggcgccaacggctacctgcgagtgcattaaatgcgcgccagcgcgcgcagaagtcaggcacgcccatgctggcgcaccggacactctata

SEQ ID NO: 25803 - DNA, 309 bp, Zea mays
  Peptide Sequence Number=SeqID_67582
atggcgtcatggtcgacatcccccgcgctgaggccgccgcggccgtgcctggacgggcttgtgcgcccgcgtcgggttgccatggccagtagaaactgtgtcggtcttgccacgcccgcgtcgtgccgcgccatggccgtagcccgcgctgaggccgccgtgcccacgccactgcgtcagggacgcgctcgtctggaggagccgcgctccgagagggccacgcgctcatcggggttgagcccgcgccgccagaggctaccgccatggctgcagcatggagaaagagcagttatggttttcaacccctaa

SEQ ID NO: 25804 - DNA, 237 bp, Zea mays
  Peptide Sequence Number=SeqID_67583
atgaagggcttacaagtgggccccgactgtggcggtgtggggcctgggtcccacggtagtctggtgtggccttcgctggcgagtcgcaccctcgacttcgacggggcttggacttcactgttgagagaggagttaagccttcgggatgcgtgggggagctacacgagccccccttcttgtagcatggcccttcactccgatgtctccgaaggccgcgatcgaggacctcgatgctga

SEQ ID NO: 25805 - DNA, 1392 bp, Zea mays
  Peptide Sequence Number=SeqID_67584
atggtgacatggacaacaacaagcagcctgcctgacaatcagcctagagcagagcctacggggtcccctcagctcacagtcgcaccgcagccgtcctgcacgaacgtgccgtgggacgtgggtggcctccaaggctccaactggaatccaaggcgcgggccgtctctcccgcagtcccgctgtccgcctgttccaacgcgctccgcgcacgcgcgcacacctacctaccccctgcgcttgcacaaaatccttcttgatccgcacaggaaggtcccggcagaagaacttggcgggcgaaaggcgaaaccgacgtgctcccgggcgggcggcgacagcggcatggagcgagagcggcaggcagtggcgaggaacaggaaggtggtgctgcgcgggtacatcgaccgcgcgcccagggaggaagacatggagctcgtcgacggcggcgccgtggagctgcgcgtccccgagggcggcggcggccccgcggtgctggtgaagaacctctacctatcctgcgacccttacatgcgcggcaggatgcgggacttccgcaactcctacatcccgcccttcaaacctggatcacctattgaagggtttggcgtggggagggtggtcgactccactcatccaggattcagtgctggtgacgttgtttccgggatgactggatgggaggactacagtctgatcaccaagcctgaacagctcaggaagatccagcaaagcgacataccactctcctatcatctgggccttcttggcatgcctggctttacagcttatgttggattctatgagatctgttcaccaaagaaaggggagtttgtttttgtttctgctgcatcgggagcagttgggcaaattgttggtcaacttgcgaagctccatggttgctatgttgttggaagcgctgggacagatcagaaggttgagctcttaaaggaaaaattcggatttgatgcggctttcaattataaggaagagcctgacttgactgctgccctgaaaaggcacttccctgaaggcatagacatctacttcgagaacgtaggcgggccgatgcttgatgctgtactactcaacatgcgagtacatggccgcattgcggtatgtggcatggtttcccagcacggggtgactgctcctgccggaatccacaacctgttctccttgataagcaagaggatagagatgaaggggttcatccagagcgattacgtgcacctgttcccgcagttcgtcgatgacatcaccaggcattacagagacgggaagatcgtgtatgtggaagacatgagcgttgggctggagagtgggccggcttccttcgtcggtctgttcagcggtaaaaatgttggcaagcaggtcgtctgtgtgtcgcgggattga

SEQ ID NO: 25806 - DNA, 456 bp, Zea mays
  Peptide Sequence Number=SeqID_67585
atgggagaggagcaagaaggaagggaagagatttaccgatccgccggagtccactattttgcccatttggcaaccctgctgtgtaattctattggaggtttttcgcataattcaggagaccactacaatgaacccttcatgaatgtggactcaagtgatgctgaaaaccctgggaaacaacctgtgattgatgcaagcattgtgtacgatccttggacaagggaaccgcgggggtttggttttgtcaccatggctgctactaaggaggcagatcactgcatcaaatatctggactgttctgtgttgcaaggtcaggtcataattgttgagaagtgcatttctattttcactgatgaaaccactatttctgttttcaatgaatctgttgaactgaactgcaaaaatagaaactgttctattttgtttgagtgcacaaacagaactcaacggaactag

SEQ ID NO: 25807 - DNA, 714 bp, Zea mays
  Peptide Sequence Number=SeqID_67586
atggcggtggggggccctcctctcgttttggtggtgtggctctgcgggatgtcgcgcctcgcgggccggcgggcgttgcctcttctaaaccgcgtggggctcgacaaggcggcctggctggcagcgatgccaccggccaatggcccgggcaggcacaaggtggtggtgacagcgacggtcttctattccttcttcccctctatcattccctttcgtcctcgcatggtgtcttcggcagggaaggcctgggctgctctagggcctgggatgatggatctgatgccttggtggttggatctagtgcccctaggcctggacgcggtgccggtggtgtcggccatgctgggggcgactgcgctggcctacccgggttttccgtcttcgtggccggatccagggtccattgggcggcgggctatggtggtcgtgtgtgccagggccagagacgttttcggcacgtggcagtgtgacgcacgtggcaaggtgatacccggttccatgggcccgaccggagggggtgtcgctattgaagttcgtctcggccacagcgtcacattcgcgattgatgctttcgcttctcagtgcccggtatgcgtgtgggaggaagggacttgcaatgtgaagtcggagctgctacatcaggggatgtggctcatcaacgatgacatgaggcgagtccccccttttcgtggacttgattgttttagaggttga

SEQ ID NO: 25808 - DNA, 1017 bp, Zea mays
  Peptide Sequence Number=SeqID_67587
atggcgattgcagagcacacgccgtcgtcgtcgtcgcctttccggcagcatcgacccaccggatgggtcacgttcacggcggcaacgccactgctcgcgctgcagctggccctgctggccgccttggttatggcgacggacccttcaccttctccggagctcgtcgagctgacgctcctcaccggcgcgcgggagaagggcgcagtgtgcttggatggaagcccgccgggctaccacttgcagagaggcttcggctccggatcccacagctggatcgtctatcttcagggaggagcttggtgcagcagtaacaccacagacacagaaacttgttccgagcgtaagatgaccgcctatggctcgtccaagcttatgggagcagtaacctttgatgggatattcagaaaccagcagcctcagaatcctgatttctacaactggaacaaagtctacgtaaggtattgcgacggggcgtcattttctggggacgcggagggtgaagcacaggacggaactaagctgttcttcagaggatcgcgcatctgggacgcagtcgtcgatgaactcatgggaaaaggaatggacgccgctgaacaggccttgctcgcaggctgctctgctggcggtctagctacgctactgcactgcgacgatttccgcgcgaggtttccgcaggaggtcccggtcaaatgccttcctgatggcggattcttcctggacataaaggatttatcaggagaaaggcacatgcggtcggtgttcagtggagttgttcagcttcagaatgttagcggagttctgcccaagcgctgcctggcgaagaaggacccagcagaggcacgtagctgttcgctcgatctctacgacattttcgcttctcctttcaacatgctaagctgccaacgttttgtttttcttgacctgcgccagtgtttcttccccgctgaacttatcaagagcatcagcacccccacgttcatcgtgaactcggaatacgattcttggcaggtgaggtga

SEQ ID NO: 25809 - DNA, 1638 bp, Zea mays
  Peptide Sequence Number=SeqID_67588
atgtacctggcggcgtggtgcgtggaggcgacgacgacgaggtccacgtcgtccgaggacgcggcggcgtcgaggagcttctctgtgtcggtcggacactcgccgctgcccgccctgtcgcgcgtcggcgacggggtggcctactgctgcgcctggatcgccatgtgggggtgggggacgcgagaaccgcggaggtggggggacggtggcgttggggtgggtgagggggcagttgctgcgcatgcgggcgccgccgaaggtgatgacagtgccgacggccgacatgttgctgtgctgaactgctgcgccgatgcccggcgcaggcgcgtggacgccgccgtcgccgccgaggcacaccagcagccgactggcgaggcgcgtgtgcgggtcgattcttcaacggccctgggcccctggcccctgccacgtcacccgtctggaacagagattcaggtgccgacacgggcgcacggcgacacggtcgcagcaggcggggccgggcgtgcatcttgcaacagccgcaggaacgggccggcccccactcggcttcgacggcggaccaaccaggatctgaacacgcactgttcgaggccccggacgggatccgcggtgggcagagcggtaacatgggacggtctacggcccacgggccgccacttattcgcctccatctgggccggcctgtctagacccggtgggctttcaggcagccacgccgtcgcgaaggccatggcgaccgcgcctcggtggtcgcaccccgtgccgccgccaggcttcgcggcggcgccccggatcatcacggtggcgcttctggccgtgtcagcgttattgtcccggtcaccggtgccgacggtcgcggcggagctcgtcaagctgaccctcctcgcaaacgcccgggagaagggcgcggatttctacaactggaatatagttgacgtgaggtactgtgacggaggatcatttgccggggacggggagggcgaagatcggaacggaaccaagcttttctacagaggattgcgcatctgggaagcagtcgtcgacgagctcatggcaaaagggatggacactgcagaacaggccttgctggtaggttgctctgctggtggtctcgctgcactgctgcactgcgacagttttcgtgcgcgctaccctccggagatcccagtaaaatacctttcggatgccgggttctttcttgattgcttgtttccaccagagcttatcaagagcatcagcacccccacattcattcggaactccggctacgattcgtatcagattgaggcactgaatgggttccggagggaacttgttgaggatttgaaggttgctcaacacaagaggggctgggggctgttcatcgattcatgcttcaaccactgccaaacgccattcggggccacctggcattcgcccatctccctgagactcggtaacaagacgatcgctgaagctgttgcggattggtacgttggtgagaaccatggagtggaggagattgactgcgcgtttccatgcatcaaccccacatgcagcagccagctcgatctagtcttcctgtgtgctgtggcatgcagtagtgccggtcctgatattttagaggtctggagcaaaatttataatggaggtccttga

SEQ ID NO: 25810 - DNA, 1293 bp, Zea mays
  Peptide Sequence Number=SeqID_67589
atgtggagcggggctcctcgcgtggcagaacggctggagctggagcgccaagcaactctcgatgggcacgtgcctcgagatctcgaagccggagtgaacagcggcggcgcacaaggtccgcatcctctgcgagttcgtcgtcttcctccgactacaggacgatttggtgggatggacaacatttggcagcaatacggagacaccaaccaagcttatggtaatgtcacctacaccccaggaattgacttgactctctccccgggaaatgacttgactcagttccaagatccagctgttgtgcatggcccaggtccaattattcaggaaaaccagtcgttcagctctacctcacaagtgcctcaacctgtcaatgatcgaagaaagaagggggttgccaagcgtgagaagaactactccaatttggaggatgaaacattatgctcggcgtacctaaatgtgtcgaaggatccagtggtaggtgtgaaccagccaatgaaatcatactgggcaagaatcactgactacttcaacgaaatgaggactactgacgtggagcgcagcagctcctctctccaacatagatggggcgatatctcaagggacaccacattgttctgcagttactatgctgagattgaacggaagcatcaaagcggtaaaagtgaggacgacaagataaaggatgcactgaaaatgtatgaaggacttcgaagcagcaaattcaaatttttgcattgttggttgatccttagaaaagagcagaagtggtctgaatttctcgccaccactacatcaagcacctcccaagctcgatcaaaggctgatcctgtgcagcagggcgacccaacagcaacatccacacctgaggtgaatgtctcagggaaaattgcaaggccaattggtagggacagggcaaagaaacaaaggagcaacaactcatccagctcctctgcttgctttgaaatgcttcaaaagatacaattggaccgctccaggttcgaggaagacatgaaggctgcaagcaaatatgagtcagaagaaatggctgtccggtatgataggaaactggccattcaagaacaacaccttaaacttgtagcagagtcgacgatgatacagaaggagatgttaaggttccaacaaaaagaacgtgaggatcgcgtaatgaccatggacttggacaaggtggctccttgggtacgcgagtactacatcaacgagcagaaggctatagcggcaaaatctgaaagggaaatgtgcccttgggccatttctaagtattttggtgattga

SEQ ID NO: 25811 - DNA, 594 bp, Zea mays
  Peptide Sequence Number=SeqID_67590
atggacaattcacaattcacgaaagcatataaaaatggtcaccattcacggacatttcacccaggggtggatccaggaccggagctggcagagccgcaaccccgactaactgtgtcagttatgttttctgaggttcaggaaaaggaatgtttcacccgtgctgagttggacggcatcgctggaaatcttgttctcaatgatccaaacaagggccagtggactcctctaccattcatttttaaacctcaccacaatgttataactgggaactatgatgtgaatgttctcatcacagcattagaagctagaaacaagaaggtggtttggcatgatcgtcgtaaaggggcatcatcggttgatctgaatgcagaaacattggtaggcctggtgatcaatgtacctatcaggaggttcagggggctttggactggcaggcattgggtggcaattcgacgcattgatggcatctggtttaatttggacagtgatctttctgaacccaagcagtttaaggaccaagaaaacgtgattgggttccttgacagtgtgctcagccaaggtggagaactcatggttgtgctgcaaggtgaataa

SEQ ID NO: 25812 - DNA, 1701 bp, Zea mays
  Peptide Sequence Number=SeqID_67591
atgggcacgagttttttaatgggtgtaaatatttttcacgggtacgggtttgggatagcaaaacccggcggcaagcttctagagatgctgagccaaatcgaacatcctgggctgtgctggctgcggggtagagctagccacgtcccgtgtctggactctggactggctgactggttggctggtctgcagtctgctgccctaccgatgcaaacatctacgccgcctctgcgcactgcgcggatgggagcgcgcggtaaaattccgactccgacgcccgcccgccgcaccaccagcaccaggtactactcagtagacagactagacagtaggtcacacaggctgacaggcaggcgagtccaaggccaggcggccaggcggactaggtggggcccccacacgcggcactgcggcaggatactggtcggcggccttgtgcctggacagttattctctccctcgtcgacggccgtgtcccgcttgatttcgatcggcagctggagagaatcggttcgattccccgtctgccgcagtgcctcctttcctttcctttggcttaggctcggctcgttccttcgctcgtcgtattttttctccaccacttccttcattttttttttctttctccctccctacacggccactaccagtccaccacaaaccacgtccccgccgtcgtcgtcgcgcttcccctacgcgcgccccgtcgcgtctcggtgctgctgttgggtgcgcccgcgcgttgccgtgaagggtgaagctgcttccgcgcgccgccgccgccacctgccccgcgtgggttgcaagtcaagcagcaggctgggacggggccggagccggagggggcgggcgaagcgggataagggcggccgcggcacgcgcactcaggaggcggacgccgagtggagctccaagccgcgccgcattgctctcttcgtcgagccgtcgccctttgcgttagtatcagccttctcttcccggccattttcagctgctagtcagattagagtagatcggatcggcgtttacatttccggttacaagaaccggtttcagaacttcatcaagcatctacgagagatgggcgatgaggtactggtggtgactacacacaagggagcccctgaggagttccatggagcaaaggtcattggctcgtggagggttatggagaggctcccaggagcaaggattgcctttgttggagacgggccatacaggtccgagttggaaaaaatgttcacgggcatgcctgcagtttttaccggaatgctccaaggtgaggagctctcacaagcgtacgccagtggagatgtatttgcaatgccttcagaatccgagaccctcgggcaagtagtgctggagtccatggcttctggagtcccagtcgttgctgctcgtgctggagggatacctgatataatacccaaggacaaggagggtaagacaagctttctgtttacacccggagatctcgatgagtgtgtgaggaagatagagcagctcctcagttcaaaagatctcagggaaaccattggaatggctgccagagaagagatggagaagtgtgactggaggacagcctcgaagaaaatccgcaacgagcactacagcaccgcgatatcgtactggcggaagaagatgggcaagactaaccagacctccttgtttcaggattcttctgtcgctgccctctccaactag

SEQ ID NO: 25813 - DNA, 1494 bp, Zea mays
  Peptide Sequence Number=SeqID_67592
atggacatggacatggagatgccagatcccgacgagctcgagtggatggagagccacggcctagtccctgaggaagaggacgcctacttcgacgaccccgacgagggcttcgtcctggcccccggcgattcggatcaaccgtgcaattccccgcagccgcaggagtccgccgcgccaagagcaagtatgcaatgcacccctttccttgatgaggaagaggagaggagcaagcggagaaacgttgagcaggaggacgaggattggctgcgctactcgccgcctcccgcccctgagattgtcgtcgccgagaagacaatctcgcggttcgcgtcggagatccatggagactctgtgcccgtaactgctcccaatggtgagagagtttatgccaagcttgcaatggaggggttggtcggtcgaggaattagcggaactaggcaaggggttcagttctccaacccaaacagcaatcacaagggcctgctctcagaatcctttgactcactaacaaggcgtgctgagcaggaggctttagcaaagagtaaggggggtcctgttgcaagtcaagatggcacacctctgaatgcacaaagcagcaatccagaaggtttaggtggctccttcagcaaaaagtcatcagttgataatgcaccagaacaaaaggtgttgctattatgcggtccacctgggctcggaaagaccacactcgctcatgttgcagtcagacattgtggctaccatgttgtggagattaatgccagtgacgatcgttccgcttcatccattgaaacaaaaattcttgatgtagttcagatgaactcgatcatgtcggattcaaagcccaagtgtctggtaattgatgaaattgatggagcactcggtgatggaaaaggtgcagtggaggtcatcttgaagatgatcaatgctgaaaagagtaataattccgacaagagcactaatggtgaggaaactcaagcccgaaagacatctaggaaaagtcatagaacagcaaaactactgaggcctccgacaattagccgtgtggtgaacaggctcaagtatatatgcaaaaatgaaggtttcaaggctagttcaatcgcgctttctgcattagcggagtacactgatgagcagggggcagggacgaccttcgaggatgagctggagacgccgacacgggtggagagccctagagcagccgccgttgattgcctggaagccgccggcggcagaggacaggcagttgaaagagctagagtgctgaaagcgaagacgttgagagatggttctgtgaagataacacaaggcgtgaaggagatgacaatagtggagctcagtgggagcaaacacaaattaaccaagaatgctcgagcaagcgtggatgctgctagcggacacaagcactgtggtggatgcagccaagcgacaagcatggccatcactgtggtagatgccataaccaagcgacagcgtgatgggaggtaccatgactag

SEQ ID NO: 25814 - DNA, 570 bp, Zea mays
  Peptide Sequence Number=SeqID_67593
atgacgacggcggctctcagctcccttacggaagcagggggacgtcagcaagaactcaaccgctacgacaactgtccctccgccaggctccgttgctcctccgacagccacgacaccacaccagcagggtgccaagatctctccggctgccacattggcatacacgtagcactctgctacacccccattgtacacctggatcctctccttacgcctataaaaggaaggaccagggccttcttagagaaggttggccgcgcggggacgaggacggggcaggcgctctcttggggccgctcgcttccctcacccgcgtggacgcttgtaaccccctactgcaagcgcacccgacctgggcgcgagacgaacacgaaggccgcaggatttccacctctctcacgcccgtctccggccgcctcgcttccccccttcgcgctcgcccacgcgctcgacccatctgggctggggcacgcagcacactcactcgtcggcttagggaccccccggtctcgaaacgccgacagaatcgaatggccgaaaaaattgcggcgacgtggacaacgtatctag

SEQ ID NO: 25815 - DNA, 198 bp, Zea mays
  Peptide Sequence Number=SeqID_67594
atggggaattacccattgacatctctagctcgacgtgacgatggccaccaccatgtgacgctgctattgctgggcccatgtggctgcgctgcagttctaataattccttttggcaaaacatgtgattcaaactatcgctgtttgcccgattccaaaaatgaaaataccactgctttctctcgcagagatgattggtga

SEQ ID NO: 25816 - DNA, 846 bp, Zea mays
  Peptide Sequence Number=SeqID_67595
gctgcaaggggtaggctgcctcccctggttctgccctcggtgaatctacaccgtccaatggcttctgtaaatctacaccgtccgcccctgcttacgcccacgttcgtcctcgtctccacgcccatgttcgtcccccgcctccccctattccacccccctgttcgcacctgccgcccctgctccccctgttcgcacccgccgcccctgctccccctgtcccgcgccgcggtgacaggatccgagaacacccctgcggacgcgtccaggattcaaggcctccccctcccttcccctgccctcactcgtacgccgtcgccccctccaccgccgtcgtgcgagagggaggagggacctctggatctccgtggggcgtggaggagtgggacgacgcacgcggaggcagccccggtcggttgctgctgtatccgtccaggatcgggggaattccaggaggcaggcgagcgcagcatcggcgaaccccgattcctcgaacagaaactaggcgtgcgccgcatttgcgagatgagagccgctgcgccggccgccaggagatcatcgtgcgtccgtgctgggagccaggtgccccagcccttccaccttccacggctccacgccttcgtttgcagcgcgcagcgcgcccggccaccgccctccgccggcgcttcccgggcacgggcaccaaccacgcccacgcccacgcctccgcggccgagcggcaccgcccaggccccaggcacccacaccggcactgcccaggccaggccttggctccgtctctacgaccagcttgtgtatctgttagtcagctctctcacctacagcttccgtagcctcctaggcttgtag

SEQ ID NO: 25817 - DNA, 2250 bp, Zea mays
  Peptide Sequence Number=SeqID_67596
atgatggtgggctcttcccgccaccagctgctgcagaggaaggggaagtccgtggctgacaagggcgccgccgccgccgccgccactgtggcggcagagaaggtggtggtcgcggtgagggcagccacgagggagatctccaagacggccatcatctgggcgctcacgcatgtcgtgcagccaggcggaagcatcatacttcttgtcgtcatcccggcacacagctctggtattgtttctggttttagctttcctgtttgtagttgcctgaaagtatctgcacgcctctctatttcaggcagaaagttctggggctttccgctgttcgctggagactgtgcaagtggccataagtctatgttggatcagaaatgtgatttatcagagttgtgttctcaaatgttgaagaaaattgatgtgtatgacatagacaagataaatgtgaggtataagcttgtttccggctctccttctggtgttgtagctgctgagtgcaagcaagcacaggcaagctgggttgtgctagacaaggatttgaagcatgaggagaagcgttgtgtggaggagcttcagtgcaacattgttgttatgaagcgatctcagcctaaagtccttcgacttaatcttgtgggatctcctgataaagagtctaaagcaacatgtgcagttccacctgtgctagatggttctaccagtaaaattgcaactgatgttaaggaagcacggagttcaattcgaggacctgttgtaaccccaaatagcagcccagacctggagacacctttcggaagtactgaagcgggaacttcctctgtctcgagttcagaccctgggacatctccgttttctgcttctgaaacaaatggttctctgaagaaagaggtgcaacaaacaaaggataaaattcagcattcagatgctaatatttctgattcagacagtgaaacattgagccctccagcaaatttctcacttcagccatggatgtctgatattctacagggaccagcatcgtcaagatcacttggaaaagttccacgaaaaaatcgcactgcaactgcagatgttttgttggaaaagttttccaagctggatctcctgaatgaaattaatgctatgagaagcaggtcagacttaaacttccgaggagatgtcagggatgttgttttgttggcaaggaatgcacctcctggaccacctccgctttgttcaatatgtcagcacaaggcacctgtttttggaaagcctcctcgctggtttagttatgctgaactggaacttgcaactggtggtttctcacaagcaaacttcttagctgaaggtggatttgggtctgttcatcgaggtgtccttcctgatggccaggctattgctgttaagcaacacaagcttgctagttcccagggtgatgttgagttctgctcagaggtggaagttcttagttgtgcacaacatcgaaatgttgtaatgctgataggtttttgcgttgaggacagaaggcgtttattggtttacgagtacatctgcaatagatctttggattcacatctctatggtcataatcgagaaacattggagtggactgcacgacaaaagattgcagttggtgctgctcgtgggctgcggtaccttcacgaggaatgtagggttggctgcataatccatcgtgacatgagaccaaacaacatccttgtcacacatgatttcgaaccactggttggagatttcggcctggcgcgatggcaacccgatggagacatgggcgttgaaacaagagttatcggcacattcggctatctggctcctgaatatgcacagagtgggcaaataacagagaaggctgatgtatactctttcggggttgtgttagtggaacttgtcactgggcggaaggctgttgacattaaccgaccaaagggtcagcagttactaactgaatgggcacgcccattcttggaggagtatgcaattgacgagctcatagacccacgactcggagagcgctactctgaaaatgaggttcttcgcattcttgagggtgacatggtcgtggaatctggtggttctgttactggcagtagtgattctgggagcagaagctggaggatgctgaacgaacagcaacattgccaggagtacagtagcccggctcaacaagagtcgcaaagggcaggcgaggggaaacgctcctacagtgccttgagggcctcttgggaccgagacaagcagagtatctccaacagatattag

SEQ ID NO: 25818 - DNA, 1200 bp, Zea mays
  Peptide Sequence Number=SeqID_67597
atggagcactacccttcccccaactatcgtctgctccctacgcagctctccgtgccttcctccccaagtcgcctccgccacgatcgccctccaccacgccctaactactgcttcctccgatgcagcagcgtcaacatgcccgaagggcgcgtggctctgatgcacgagggtgcctcgggcgcgtccccatccgaccacgagtgccctagcacgtgggcatgcagccccacggcgtgggcgagtggctttggcaggctctgtcggccacaacgtcgcggtagccctggcgacgctcttgtcctttcctccggtagttgcagcgggatggggcaattcgacagggacgattatgtcaatatacaaaggagtgctttgaaaggacaaacccaagagatgtctctacaacccaaagaatcaccgaaatgttcgtgcgattatgccattgtggtggtggtggtgctgaatgggacagtcacgacgttcggctcgagccccttctctcccatcctcctgaacaacctccccgcctcgtacatcctccgctgtgccgccttccggcatcccgtgcccaccctgatgcgatatccaccgatgcggcggcagtaccaggaaatgagcaccgggaccggggtctggcttgcagcgcacaccaggttgctccatctggtcgagcaggaaccgggcatcactaaacctcccattccggcacagcgcaacgatcaaggtattgtagcactgcgcgtcaggggcacagtggagctggtgcatgcgacggaacgtggcaaactggcaaatgcatggcacgggagcacttcctcaccgagcacatggatcacgtcggtgagcgaggaggtggagacgatcgaagcgtgcgcacggagagaggaggcagagaccggcaagagcgcgtgggcgcgggtcagtgcgagcaccatggcattgggagcgagggttcagaggttgggacaaggtcagggtgggcgtggtcgtgcgatcaggagaggaaagcaagggaagaggtgttactgggagaaagggtcttacacagagccgaggaggaagatgtatggcgaggtgaaggacgccggcgtgccggtgatcgacataggggatgcagtgtggcttcctggcgcgatagcaggtggcgacgaccatgtgcaggaccctgcgcctgagctttcttcttcctgcgtcggctaa

SEQ ID NO: 25819 - DNA, 546 bp, Zea mays
  Peptide Sequence Number=SeqID_67598
atgacaaaacaaccgctcctactcttcagtggcaagcacatgttcactcgagcctgttcgcggtggagagtgatagctggggagtggagagtggcgaacccaagtggcggctacgtaaaagagaccaggaactatggggctccagctattggggcaggacgtggtagatgtagcttctgtggaggcaggatgggaccaaggcgtgaatttggtgagggcaatggcaatggtgttgagggaggttatggtggagaaacagtagaaactgagggggctcctgctgtggctgaggctgaaaacaagctggaagaagcaccacaatctgaggttgagaagggcaaagagggcgaatcaactgaagtggaggagcctgaagataaggtagttgatatttttaaatgtgagtcttgcacattcaacaaattgttggctctgcaagtgctcaatttcacccagcctatagatagcttaggtagcagcgtcaaggaagctgctgcacatttatggctctctattaaaaatacgaacacacttgatctaccgtag

SEQ ID NO: 25820 - DNA, 132 bp, Zea mays
  Peptide Sequence Number=SeqID_67599
atgagcgttgcggatgaagacaccaggctcaccatctggaggctccccgtcagcgagtacgcggtcgagaggttcaccctacgggcagatgaccaacgagggggttcctcgtgctgttcatggacatattag

SEQ ID NO: 25821 - DNA, 966 bp, Zea mays
  Peptide Sequence Number=SeqID_67600
atggcgattcaccgtctgatgcttcccatttctatccttctgatgagctcactctccggggccgtgtcgacgacgttcacgctggccaactcctgcggctacacggtgtggcctgggctgctgtcgagcgcgggctcggcgccgctgcccaccacgggcttcgcgctggcaccgggggagtcgcgcgtcgtggacgcgcccgcggcgtggtccggccgcatatggggccgcacgcgctgcgccgcggacaaccaggcctccggccggttcgcctgcgccacgggcgagtgcggctcgggggcggtggagtgcgcgggcggcggggccgcgccgcccaccacgctcgcggagttcacgctggacggcgccggcgggaacgacttctacgacgtgagcctggtggacgggtcgaacctgccgatggccgtggtgccgcagggcggcgccgggaccagctgcggcgccacgggctgcctggcggacctgaacgggccgtgccccgccgacctcagggtggtgggctccgacggcgccggcatcgcctgcaagagcgcgtgcggggcgtacgggcggccccaggactgctgcagcggcgactacggcacccccgcgacgtgccagccgtccgccagctcgcagttcttcaagaacgcgtgcccgcgcgcctacagttacgcctacgatgacgccacctccaccttcacctgcacgtccggcaccgccagttacctcgtcacgttctgcccaagcatctccagcctcaagtcgtccgtgagcagaacgaacccgggcctgcctctggtcaacgacacggtctccttcgccggccggggagacgggtcctcgtacccgtacgcctacgcgtcggcgccgccccggtcgtcggctccatgccccctggcgctcgcggccaccgccttcacgtggctcttcgccgccccgtaccgccgccggctgcgattgtag

SEQ ID NO: 25822 - DNA, 123 bp, Zea mays
  Peptide Sequence Number=SeqID_67601
atggcgcatgggatgagagggtccttaccatgcgccacgcgagcaggagcactgttcacggtggagggcggcattgcggtggctcctccacttcggcaagaaattgccgatgcacagatttga

SEQ ID NO: 25823 - DNA, 297 bp, Zea mays
  Peptide Sequence Number=SeqID_67602
atgcaggcggcatgcaactgcggcaagtgggctcacccctccgacttccaacgcacccagcatgggggcccaggcccatgcgtcatgcaaccggcacgccggatgctgcgtgcgagcaactgcaccaccactcgcaccactaccacgcctcctcgactgcggaaccagtaccgtgactcgaggcaaccttgcgtacgacccagcagtgccagcctggcgcgacgggaccgggaaagggagataccccgaaaaggatccttctccatgaaggaaacaggctccgagcctccctactga

SEQ ID NO: 25824 - DNA, 729 bp, Zea mays
  Peptide Sequence Number=SeqID_67603
atgccaccactgagcacccctgagaagcttgttgttactcttgacatgtgcatgactaggctggacaagaagagagcttctatcttcttcaaggcctctgctgatggttacacatcttgtgctaaggagatgaccaagctctcagctcactacatcaacaacatgaagctcaatagggtggaagtggaccttataaggctgttggaggctactttatggcagcaaaacagactaaacttgtctatgtatgatatttttaaagtcttgtcatcattctatcgaatgaagaagccacagcaaggaaggttctgtgctgacttgatccacaaaggcctgaatcacaccttcccgttggcactgaaaaatttaacaaaaggtggtcctgtttctgtggtaccaaaagtgggtttaataacatcattttgtcttttggttgatgatgttcgaccctttcatatattcaaggagttcttgctaagatattggagttttgtgatgggtacaagtttgatcccagctgatggggagatttggcgtgttcggaggcgtgttattgctcccgcactacatcagaagtatgtgactgcgatgattggtctccttggagaagattcacaacggctctgcaagaaattgaacaaggcaacaacggatgaggaggacatggagatgttgctgatcgaaaggaagcgaagggttagggcatgctcattactgcctacaggataa

SEQ ID NO: 25825 - DNA, 456 bp, Zea mays
  Peptide Sequence Number=SeqID_67604
atgttcatgatgattggggtaattgggctgcccagtgtaggcaagtcgatgcacatcttccgatcgggcgcgggcgaggcctcgaccatgatctgggcggcgctggccttcttctacccgctagcggggcgcatcgtggagggggagcatccggggcgccccgccatccgctgcaccgccgacggcgtctacttcacggaggccgaggcagactgcagcctggaggacgtgcggttcctggagcggcccctactgctgcccaaggaggacctcgtgccttaccccgacgacgaccgctggactgtcgagccgcacaacaccatccgcagtgagctcccccctgttgtttggaccatacgacccgccgacgagctcagctcgtcggcagccagttccattccatggacagcaacagcggccgggctcaatcgtctggcaaggcggctgctgctatga

SEQ ID NO: 25826 - DNA, 372 bp, Zea mays
  Peptide Sequence Number=SeqID_67605
atgatctgggcggcgctggccttcttctacccgctagcggggcgcatcgtggagggggagaatccggggcgccccgccatccgctgcaccgccgacggcgtctacttcacggaggccgaggcagactgcagcctggaggacgtgcggttcctggagcggcccctactgctgcccaaggaggacctcgtgccttaccccgacgacgaccgctggcctgtcgagccgcacaacaccatccgcagcgagctccccctgttgtttggaccatacgacccgccgacgagctcagctcgtcggcagccagttccattccatggacagcagcagcggccaggctcaatcgtctggcaaggcggctgccgctatgattga

SEQ ID NO: 25827 - DNA, 186 bp, Zea mays
  Peptide Sequence Number=SeqID_67606
atgccaccactgagcacccctaagaagcttgttgttactcttgacatgtgcatgactaggctggacaagaagagagcttctatcttcttcaaggcctctgctgatggttacacatcttgtgctaaggagatgaccaagctctcagctcactacatcaacaacatgaagctcaataggctaatatga

SEQ ID NO: 25828 - DNA, 1596 bp, Zea mays
  Peptide Sequence Number=SeqID_67607
atgccgagcggcggcgtgttctccgggtcggtgaacctcaagcacgtcaagctggggtaccagtacctggtgaaccacttcctgacgctgctgctggtgccggtgatggccgccacggcgctggagctggcgcgcctcggccccggcgagctgctctcgctgtggcgctcgctggagctggacctggtccacatcctctgctcggcgttcctggtcgtcttcgtcggcaccgtgtacgtgatgtcgcggcccaggccggtgtacctggtggactacgcctgctacaagccccccgccagctgccgcgtgcccttcgccaccttcatggagcacacgcgcctcatcagcgacgacgacaagagcgtgcgcttccagaccaggatcctggagcgctcggggctcggcgaggacacgtgcctcccgcccgccaaccactacatcccgcccaaccccagcatggaggcctcgcgcgccgaggcgcagctcgtcatcttctccgccatcgacgacctcgtccgccgcacggggctcaagcccaaggacatcgacatcctcgtcgtcaactgcagcctcttctcaccgacgccctcgctctccgccatgatcatcaacaagtacaagctccggagcaacatccggagcttcaacctgtcggggatgggatgcagcgccgggctcatctccatcgacctcgcgcgggacatgctccaggttcacccgaactcgaacgcgctggtggtttcgaccgagatcatcacccccaacttctaccaggggagccggcgcgacatgcttcttcccaactgcctgttccggatgggcgcggcggcgatcctgctgtcgaaccggcggcgcgaggcccggcgcgccaagtaccggctggtgcacgtggtgaggacgcacaagggcgcggacgaccgcgcgtaccggtgcgtgtacgaggaggaggacgagcagggcttctcgggcatctcgctgtccaaggagctgatggccatcgccggcgacgcgctcaagtccaacatcacgacgatcgggccgctggtgctgcccatgtcggagcagctgctcttcttcttccgcctggtggggcgcaagctcgtgaacaaggggtggaggccctacatcccggacttcaagctggcgttcgagcacttctgcatccacgcgggcgggcgcgccgtcatcgacgagctgcagaagaacctgcagctgtcgccgcgccacgtggaggcgtcccgcatgacgctgcaccgcttcggcaacacgtccagcagctccctctggtacgagctcgcctacatcgaggccaagggccgcatgcgccgcggcgaccgcgtctggcagatcggcttcggcagcgggttcaagtgcaacagcgccgtctggaagtgcctccgcagcatcaagacccccaccaacgggccctgggacgactgcatccaccgctaccccgtcgacgtcccggaggttaaatgcaatgcagtttggcatggcgacaacctgcttcccgctacagggctctccgttgaaggcaggcgcttcgcgaagcacctccctgttccttctccacctcacagcatcttggagcccccc

SEQ ID NO: 25829 - DNA, 294 bp, Zea mays
  Peptide Sequence Number=SeqID_67608
atggcgcaccggacagtctggtgcgccaccggacactgtccggtgcgccagctacgtcacccgacccgttgggttctgactgttggagcttctgatagctgggccaccgaacagtccggtggtgcaccggacagtcactgttcactgtccgattgcaacctcgctgacggagagtacatcctcgtgccggagcaaggagttgctcaggaggtagcccaggatccagcaccagaacctgccatcgaggatctgcctgccccagctttggaaggcaagccccggttttatgcataa

SEQ ID NO: 25830 - DNA, 1080 bp, Zea mays
  Peptide Sequence Number=SeqID_67609
atggcaatatgtgcaacttactcgagcacgactactctacggacgaagtctgttttgggctatgacgatcagcatgagagggaccgagaggtgtactttgtctccgaagcatccagggggcctggtgtttatggctgcatcgcaatagggcggtatttgatgacagttttcatgcttttgaaaagtaagtcagaacaggaacgtcgtttgctcacagctcttgttaacaaacttggtgatcctgaaaggagagcagcatcaagtgctgcatatctgttaacatgtctcttggctgctcaccctaatatgaagatggtggtgatagatgaggtggattcttttctcttcggaccacatgttggacttagggccaagtaccaggctttctattacccatcacatgggcatctcttgtatgaattacctttaggagcattttgtggtttagtcaatggggctttgtggcacatggaaggtgctattgtgtcacttcaagtttgtacagagatgggcatgatcctcgatggaggggaacacactggtaaaaagcgtcactcaggtgtggtactaatgagctctggtgataccaaaggagatacatatagcaaggacagcaagaaaaaggtaggaaaaatagagggaggaaataacaagatggactccagatccaagggaaacaatgaagtgggttcaacagcaggatcagatttggagctggactccagaatcctttctgcgcttttaactggtgtaaatagggcattaccatatgttgcaagctcagaagttgacgatattgtggaagtgcagacacctattcttttcagattggttcacgctgaaaatttcaatgttggtgttcaggcattgatgcttttgttccaaatatctataaagaataatatagcaagtgatcgtttgtaccgtgcattatactcaaaactcttgagtccttctgctgttacttcctcaaagccagagttatttcttgggctgttggtgaaagcgatgaagaatgatgtaatgttgaagagagttgctgctttctcaaagcggctgctgcaggtgagctgcacataa

SEQ ID NO: 25831 - DNA, 357 bp, Zea mays
  Peptide Sequence Number=SeqID_67610
atggactccccgcgttcgccggagatagtcaccggccacctcgatcgcgtatccccgcccatatataagtgtccgatcacccgcacattaggacataaaccatcacttccagacaccatcgcacaacttcgtcgaatcacgggaaggagggcgacacttcaagtgggaatcttggcgtcgacggtggcggcttgcgtgctcactagcgatgagcctcggtttcgggccagggtgtatcgtgggaccacacatgagacattggagggcaccccgtacgagatcactgaccaaggatcatggaattgctcgtcggagcttttcctccgctgcgggccgcgccatgacatgaatcggtga

SEQ ID NO: 25832 - DNA, 720 bp, Zea mays
  Peptide Sequence Number=SeqID_67611
atggcggagccgacccccaagtcgaagcgcaccaagaaagcgaagaagccctcggcccgggaaggtgatggagaggacatggatacgctcaagtctgacgtcgccacattcgcctcctccctcggcctcctccctggcgctggcgactccaacggcggcttcgatgactccgacttccgcaagtccggccccatgtataaatcctcaaaatttccttccaaacaaccccatcaaaaacctgataacacggcaaacccccatctaaaccctagacctaccaagaagccacaccctctcgagctacgtgactcctatgctgccaccaaacctggtgctgtcaacactaattaccccctgatgaaggcggcagcactctcagggcagtggtacactgatgctgatgagctggaggcgagggtcctaggcggtcgtaagcaggtgcctccagctgtggggcttcaggagatgcagggaatagtggagagaaaacgagagctggcagagaagctcatgttgcagtatgcgagggaatacgatgccgtgaggcgagggcatggtgacctgaagctcctggacatatcagcaaagtctggtacatcagctgacaaggtgtcagcatttacatgtcttgtcgaggacaatccaattgcaaacatgaaggcactcgattccctccttggtgagttgcatgctattggctccaaaaataaaagactgtaa

SEQ ID NO: 25833 - DNA, 282 bp, Zea mays
  Peptide Sequence Number=SeqID_67612
atgccacaacacttgggcgcgatgtgcaatacactgtcaaccgtcatagtccacccaacagtaacaaaggcagaacaccacatccacgtcactcatgctcattgtgtcgccggctcgccgcaaagcgcaaacgatattggtgaccgtggccaccttaggaagcctgaaaaggtcagcggccttaggtctaggcttgtcggtggcagtaaggaaggccgctactcagcaaatgagtgctcggtgagccccgccgaggtcatagtcattgatgtcgctctgtag

SEQ ID NO: 25834 - DNA, 204 bp, Zea mays
  Peptide Sequence Number=SeqID_67613
atggagcgggcctacatccgatccatcgagcacgcggggctcgagggatcggattactcgagggaggactcctcagaggaggaggactccgaggagggcggcgatgacggcgagggcgacgacgatggtgacgagggcagtggcgacgacgacgagggcagcgacgacggcaacaacgccggtggcaagatgccaccggcataa

SEQ ID NO: 25835 - DNA, 141 bp, Zea mays
  Peptide Sequence Number=SeqID_67614
atggctgccgctggagatccaccacctcctatttatgctgagggtgctgcaaggacaagaggagaaatatctccacatttccaggttcattctttcacccgttttttgtgttcaagcatgtgttttaatcttagtatatag

SEQ ID NO: 25836 - DNA, 567 bp, Zea mays
  Peptide Sequence Number=SeqID_67615
atgcccaaaggtagtgtgtgctaccccgacccattactggcccccaaacggcatcaaaggcggtggcgacatctcaaccctacttctcctaccgactggttcttcatgatgcaagcggaggtagcaaggggagccacggtgctcttaccagatcctgcgccgccgcccgcatggagtccatttgccaccgcgtacacagtaggcgtcagcgggttaccgaaggtaaagaatgtcgcggaagccagggcgagctccacggcagaccgcggccaagggagctacgccgggctccaccgatggagaaggcctggcgcgcgcgaccatggagcacgcgaaggtgtcccgcgcttgggcttgagggagtccacaggggtcagagaggaggtcgcaggggccatcttatgtgtgcctgggcagggccatggggcggcggacgccagagattccggcgtgggttacggatcgaggggatatcccttgaccagatcgcggcaggttccaggagggcgagccatgcggaggtggttgttgggggaagaagatagagctgccccaagacccacgtga

SEQ ID NO: 25837 - DNA, 237 bp, Zea mays
  Peptide Sequence Number=SeqID_67616
atggccctcaccatgcctgcacacgaccccgaagacgagaggactatgttgggtttcttctttttcttcgccgaaggtcctcaagatataaacaccttcgccaaaatgccacaagaggtccgccccacttctgtcgaaggttctcaagacgaagacctcggaaagaagcaacgatgcagaacgccgaagctcagtagcttcggctcagatcaagcaaagaaggaaaagactagatag

SEQ ID NO: 25838 - DNA, 1053 bp, Zea mays
  Peptide Sequence Number=SeqID_67617
atgcagcggcaagagccaccgcagaaggagcagttctgggctcccgtgccacttaccaccaagtcctgggcggacgtcgaggacgacgacgactacttcgccaccaccgcgtcgccacgccccgtctggggcactgccggtgagcccgccaaggaagaggacgacgtcgatgatgttgtgcgcgccgcccttcaggagctaatttcagtggctgatgctactcatagtactaaactgtacatagtagaccttacaactggacgtgaagacagttaccttccctttgcaatccaactatatatagagatcaacgtcaaaaggaacctcaggctttgtaaacgactaacgcaggttgggcaacctgtgcaatcatccatctcagtccaccagtcagctacccaacaaacagttttgcctcaatttgttgagccgttggcacgaaggatgtggcctctttgcggtgatcccttgaccatgtcgattctggtaggaaccttgggcaacaaagttgagaaagagatggaggacatggccttcttctttgctgaattggcgctgatgcaatacgaatacggcttggtgacacgtctgccttctctggttgctgcttctgctgtctacacggtcaggctcactgtcaagagagctccctctggaccgacaccctcaagcaccacactgttgtgtaccaggtgctcggaggagcgacccacgaagggcagcggcagctggtcttcacctgttggtttagtgccgtctggagggcagccaggagcagacaatggatccactacaattgaaattgctctgaagattgcatttcgtaaattttctcttgatcatggaattatggccagtagtgaaaatagtacaagaaatgaaagaaacattaagttgaaggtacttgttctaaatggttcctatcatggtgatactctgggtgctatggaagctcaagctccatcgtcttatacatctttttcttcagtagccatgtggttctctgtgccaactgcagtcttttttgtaccagccttctctttggtagcctaa

SEQ ID NO: 25839 - DNA, 540 bp, Zea mays
  Peptide Sequence Number=SeqID_67618
atggctgtgcacacgccactggagctggaggccctagccgccggcgctgccgaggagctcatgaacagcgcagaggtgagggcggagctcggcgtctggggcgacgcgccaccgtgggtgctcaacagcccggccgtggaagaggcgcacgatgacgagatgaagagcgccaagccggacgtggagacactgctgtggggccggcgcgcatgcgcttgctgctctacgagggcgtcctcgacacgtgggatgggatggtgtctacggaggtgtggctgcgggagatgcactaggacgggctcaccgcgttccaggacgcccccgcaccgtgtggcggaggagaagcggcgccagacgggagcagaagctcgctgggtacgtgcagaagcatggcgctctcgtggacgtggtgccggaggcgcaggagatgatcgaggtgttcgacaagggcctgttcagtggcagcgacacgacagcctaaagcaaggtgataggatgggctattgtggtgctaatctatactacttcataagacactaa

SEQ ID NO: 25840 - DNA, 267 bp, Zea mays
  Peptide Sequence Number=SeqID_67619
atgacccccctgtggctgctgctcctcactttactgatgcttttgattagtcagtgtctgagtgttggaagctcgatctcaacatttggaattgttgaagcagcagttgagttaccaactaccctgaatctggagaaaggggctttgaggccggtgaaggtgttggaccgccgtttggtcaagaaggtcaatcatttttcaaacagtggtcataaattaaaaggtgttggtcgccttcaatcattacccatccagacacttgtttaa

SEQ ID NO: 25841 - DNA, 1014 bp, Zea mays
  Peptide Sequence Number=SeqID_67620
atgggttcgcccgggtccgccaatggcagacgcggcgactatgtgaggatcccggaggaggcggaggtggcgtccaagggggagggagatgccgcggcggccgtcaaggcggccgcggcggcggagtgccctagggtgctgcggtgcagcgcgatccggtggtgggccaaggtcgccgtgctcgggatcgtccttgctggggccggagctgccgcggtcgtcttcctcggcccgctccttatcaagaaggcatggtgctctggacctccagtagtgaatgtgtttccaccaaaaggtggatgggtaggaatagtctcacaaaccaactggttcttgatatttctggatgttaagatgtggtacagaattgcagtggaccttattattgttgtacctattcttcactgggaatcaacaacgttcagcaggccatctattgctctaatatgtttcggcacaatcgcattattcccaagtgttttgttaccttcttcgcccttcatgtggcttgcggggatgacttttggatatctttatggttttttaataatcacagtgggtatgagcataggcatgtcattgccgtattttatagggtctgcattccactgtaggatacatagatggctggagaagtggccaaagaaagcagcttttgtaaggcttgctggcgagggagattggcaccatcaatttaaggctgtagctttactcaggatttctccatttccatatatagtttttaactatgcttctgtggctacgaatgtcaaatattacccatatatcgctggttccatggctggaaccatacatgaaactttccttgcaatatacagtgggaaacttttacagagcttggctgtagcaactagccaagggtccttcttgtctgtggatcagatcatctacaatggaatcggatttatagttgcagcagcttctactgccacgatcactatttatgcaaagaaagcacttcaaaggctccaagcagaggaggagatattgtga

SEQ ID NO: 25842 - DNA, 108 bp, Zea mays
  Peptide Sequence Number=SeqID_67621
atggagcatcttgccatcttaaggctgacactgctccaagcctgcaatcgaagactaatcgtccagatatgtgccttgggtgttgtcaacgagtttgagttgctttaa

SEQ ID NO: 25843 - DNA, 882 bp, Zea mays
  Peptide Sequence Number=SeqID_67622
atggcggcggagggggaggccaagaacccgtccggcggtggcgaagggggtaacccccagcaccagcaggcagtgcaggctgcgccggcggagccgccaacggcacagggggaagcggtgcaggaggctggagcgcaggcgacgggacaagagccggagggggagaaggcgaatcgagatggggagggaagcgcgggggagaaggacgacggcgcgtgcagagatctggttctggttgaggatccggaggtgctcgccgtcgaggacccggaggaagctgcagcaaccgcagcactccaggaagaaatgaaagcgctcgtggcatccgtccctgacggtgctggggcagcattcacagccatgcagcttcaggagctagagcagcagtcccgggtttatcagtacatggctgcccgagtacctgtgcctactcacctcgtcttccccgtatggaagagtgtaaccggtgcatcctctgaaggcgcccagaagtaccctactttgttgggcttagcaacactctgcttggacttcgggaagaaccctgaaccagaaccagggaggtgccggcgaacggatggcaaaaaatggcgatgttggagaaacactattccaaacgagaagtactgcgaacgccacatgcatcgcggtcgcaagcgtcctgtacaggtcgttgaggaagccgagcctgactctgcttcaggctcaaaatctgctcccagcaaggccaccgaaggcgccaagaaggttgacgacaagagcccaggcctccaaggcaaggaccggttcaacatcccgttccagtttcaggatgacagcatcgacaggagctatgcgcgtatccagcctcaagccctcaaacttaaaaaggggctcatgtga

SEQ ID NO: 25844 - DNA, 210 bp, Zea mays
  Peptide Sequence Number=SeqID_67623
atggagttaatccaggtcactgagttcacccctagttctaacatggtcatcaattgggtcaaggaggagtctcacctctggtgtagggctagagccatggtttatctagcacccttatgctccaacgaaccaatccgtgatctttgttttagggtttccatggtcacgggtctagctgtttatattattgtatttctacctataatctag

SEQ ID NO: 25845 - DNA, 291 bp, Zea mays
  Peptide Sequence Number=SeqID_67624
atggactgctgccggcacgtgaacccgttccgcgcctgctcggggctgcgcgggctgggctacctcatggtggcgctcgtcgccgccatcgtcgccgtgtcctactacgccgtcgtcgtctacgcatggggccccatgctcctcgccgggggagcagccgcggcaggtgctgccgccgtgatcgccgccttccacatactcgtaagcgccgacgccctcacaagtcacaccccctctcccctttctgttaagatctgtgttcagtactacagcgtgagacatctgcaataa

SEQ ID NO: 25846 - DNA, 126 bp, Zea mays
  Peptide Sequence Number=SeqID_67625
atggagtcggcgctgtgcctacacgcaattgtctgcggcgacggaacccgattggcacaatatgcactggtggcgaggaactggggcgtgacaatcggagtcttaaattctatttttgaactttga

SEQ ID NO: 25847 - DNA, 192 bp, Zea mays
  Peptide Sequence Number=SeqID_67626
atgccgccaccaccaggagcccgcgccgccaccgcgtcgtcactgcaaccggtccgtgccgccgccgcaccgccgcaagcgggccatgccaccgccccgactcaccgtcgcaccacacccgttggagcatggagggagagaatcattgtatgcagcggactgagattgatggatattgtgaaggtgaactaa

SEQ ID NO: 25848 - DNA, 534 bp, Zea mays
  Peptide Sequence Number=SeqID_67627
atgcagagcggaccaacaagtgaaccaaagggtccagaatatcaccagggttcatgccaaggagaccttcaaccatggtgcaacggctcggtgatgaacactggattgaaggaattccgccgaggccctacccttcagcgcactacgcttcactccgacgacgatggcacgctcgctgcagcaaggaagccctggattaggcaccccaaggttcccgtgctccaccaacgccgtctaccgaaggcttgcagcatccctggcaagttcttccatggcgggagatcccgcttctctccctctgtcaccgacgaccagagatttgggcaacccattggtcgagtcgcaaagtctgtagccggtcgccgaggccaaacgctggagctcacccgaattacccaggaccgtaggttccaaccccagcgatggacacttttcctctcactgctcgacacatggcggcggtctggtgatgggcaacggcggcgaccatccatttatattcgcttgaatccccgtcggatgcgcaggagttag

SEQ ID NO: 25849 - DNA, 828 bp, Zea mays
  Peptide Sequence Number=SeqID_67628
atggccgtccccaactacacctatctcaagcacaagatgtcgggccccaacggggtcatcaccgtcggatccacgtaccgacacgcgtacgaatgcgacatggagtgtgtggagtacgccaaggccctcgccgaatccaaggccctcatcgccgacctggagagcctctccaaggaggtgccagatgcgaagcgtcacgccggcaacttcgagccagctgaggcggtcaagtccgtccctctcgaccccagcaacgacgcctccaagcaggttcggatgggctccgagctcgaccccaaatatgaagcagtgctcgtcgactttctccgcacgaacgccgaggtttttccgtggagcccctcggacatgcctggcataccgagggatgtcgccgagcactcgccggatatccgagctggagcccgacccgtgaagcagcctctgcgccgattcgacgaagaaaagtgcagagccataggcgaggagatccacaagctgatggctgcagggttcatcaaagagaaaacaggagcgggcgcgggcctactcttcatctcaccccttgggaagcacatccgttacgtgttgcgcctccatttcccggcgtcaaacaacgtggccgagtacgaggctctggttaacgggttgcgcatcgccatcgagctaggggttcggcgcctcgacgctcgtggcgactcgcagctcgtcatcgaccaagtcatgaagaactcccattgccgcgacccgaatatggaagcctaccgcgacgaggttcagtgcctggaggacaagttctacaggctcgagctcaaccacgtcgctcgatga

SEQ ID NO: 25850 - DNA, 348 bp, Zea mays
  Peptide Sequence Number=SeqID_67629
atggcgggctccctcaacgacatcatcgggcgtttcgcggatgcccgacctgcgcagactcatctagccataaagcgtggccttaaccctaacaaacccttactccggttgtcgcgccctagttcctcgccaccagtgcgtattgtgccaatcgggttccgccgccgtggacaattgcgtgtaggcgtagcgccgactccattgtccctaggcgagaagcttcgacgagtctccgcggagctacaattcacctgggctgaaggagaggaccactgggtgaccggaatttcgccgctgcacaatcggatccgccctgtgccatggctaggcatcatcacctttctatag

SEQ ID NO: 25851 - DNA, 147 bp, Zea mays
  Peptide Sequence Number=SeqID_67630
atgggagaccacgtctcaggtcgcgtgaggggcaaagtctactgccaggttcaatcagggggaggtactcgtttggcgagcatccactggaccaccaaaaatagtgatccaagactttttggaaagcttgggaaaagtactacataa

SEQ ID NO: 25852 - DNA, 399 bp, Zea mays
  Peptide Sequence Number=SeqID_67631
atggttgagggtctcctcgacatgaaccctggtgagattctggacccctttggttcgcttgttggtccgctctacgtagcacaaatcgtagggggaaagtggagctttggtgctcggctggacgggagcaccggtgatggtctccgccgttgggggcggccgccgctggtgcgggatctgctgcgctcagctatcggtggtggaagacaacccatgaaccgtagatcgcgttatcagtggccaagattagaagatagggccaacttgactagagcctatctccgccattcgatcatgatcgtgcgcgcaggactccattccgttgttttaaatcctagcccatcggccggtaatcttacggttctggttgcttaccgcttcggtaatgggctgatctaa

SEQ ID NO: 25853 - DNA, 348 bp, Zea mays
  Peptide Sequence Number=SeqID_67632
atgtaccagagggaacgaggtaccgcatcattttcagccggaagcttgatagtaggagaggacggggagccccttgaggagctgaagcggagcaccacctggcacgtggagaaaggcccgcgactctctacagagttactcgaccaagtgaaagttttagaagtcctaattcactccccttttaggcatcacccgtttccttcatatgctaaaaaggaattttaccgaacccgtcacctttgggtttatctgatttttcaacgagcggacggtctgcgcctgaggctggacgatctgagcttggtcccagatggtgctctcttctcctttggacaatccgtagtgtaa

SEQ ID NO: 25854 - DNA, 261 bp, Zea mays
  Peptide Sequence Number=SeqID_67633
atggtcggccgccaaatccacgagcgacgcgtggcccgctccaacggtcgggaagtggcaccggactgtctggtgtgcaccggacagtgtcccggatcacctattcacccccctctaggtgctctcaacagctcggggcaggctgccatggagggatgcgagcacagtgaactagggggtggagcggtgcctaacttcactggtgcaggagtaatggcgacgagagggggcggtggtgatcggcggggatcgcatcagtga

SEQ ID NO: 25855 - DNA, 474 bp, Zea mays
  Peptide Sequence Number=SeqID_67634
atggcgagcaggtgcctagcggctgcatcggaggccgccgtcgtcttcctcatccggcccatcctcgccatcgttttcgtcttcaccctcatcctcctcggctggtacgtggcgtggacgacggtgctggtgcacgtgccgctggtgcaggagatcgccggcctgcgcccgaagaagccctctaaacccaagccagccaaccgcggccgcgtcgccaagttctaccggaaccaggccgaggccgcacaaagattaggattctgtctgcaacttcgcatactgcatgcccacccactatctaacctgtttggtacaatgcctaaaggacctggaggcatcattaactgcatttttatgttcttcatgtttaccctctgggtctgggatgcctatctcaaattcctatcatttcttgtcatgcctactgttggtgctaaagtaaaactgtttgatgcaattcaaagaaaagcctag

SEQ ID NO: 25856 - DNA, 243 bp, Zea mays
  Peptide Sequence Number=SeqID_67635
atggagggcaggacccagattcaacgcgaagggaagaggagtgcacataccgggttggtgctcatcgctggtgaaggaactggcgaaggcgccttgaccccctcgcatgcgagcttggcctcctccgccaggttgacgatggtggtgatgcccgcaccgccgaggaggttgatggcggcggcgagcgttcgtgcgcgcgtgacgggtgaggaaggtatcagggagagaggaaaggcgagatag

SEQ ID NO: 25857 - DNA, 228 bp, Zea mays
  Peptide Sequence Number=SeqID_67636
atgcagcgacgccgcctcatgcgcgccaaggtcgtcgctctcatggccatggtcagctcggcgctcgtcaatgttgtcacggtcacccaccatcctcgcccttccgccgttgctggcactgctcgtgctcccggccccgaggaggtgaaaatggagcagttattgtgcaaggatgatgggggcttcggtgcagaaagagactacaatccatcgaaagagaagcagtaa

SEQ ID NO: 25858 - DNA, 417 bp, Zea mays
  Peptide Sequence Number=SeqID_67637
atggcggtggcggggtgtatcgcgcggatctggtgggagatggcgcggcacattggcggtggagcacgcggtggcacgggcgtcgtggcctgcctccgtgcctcgctcgaggatctgctccggtcgtcgccgccgtgcgctgtcggtggggctagggcgacgccgagctgtgcttcttcaaggcggaggccgttgacacgtgcgtcggcgggcagatctgtgcgggggtcggcgcaccgtggcttgggtgactcggctgggccggtgcgctggctgcggcgaggatgtccactgggtggtgactgcggtggagctctggcggtgcggtcgcagcgctgttgctgcctgctggggctacattttggtcccgcggcggtggcgggctttccgactgtgggcgagtggctactgtgttga

SEQ ID NO: 25859 - DNA, 387 bp, Zea mays
  Peptide Sequence Number=SeqID_67638
atggaccgggctttcgcccacgtaagacagtgctggggagccgacgccctcaacaggggaagcggcgcccaggggcgtcgccgtcgccaaagctttcgcccaagaaaatcccagcaaaacgaccgaccaagaacccgtgacaaagcaaccacctttgccgccaccgccgcccacacaacacacacaaacccatccagagggacatcgacgcgccagctgccacaacagccgcaaagctgcgtcgaccaccaccacctctggctggacccatggacctggtcgagcggaggcagcacctcgcgccgcacctcccgtcggccatccctggcagcagctagtgcgacacgccagatccaatggcacgcgcaccaccgcagacgccagtag

SEQ ID NO: 25860 - DNA, 1722 bp, Zea mays
  Peptide Sequence Number=SeqID_67639
atgggcccacctgctcccgggctaggccggatctttatcgggcctgcggcacctagcccagcgcttgcacctcacccaggacgaggcccagggaggatcctcccgactccgacgctgcgtaggactccccgactccgacggcgtccgcccgcgtcgcgtgccacgcccacgccacgccggccgccgcgaggaaagaacaccgggtacttccccttcccttacgctccagtttcacaagtcgcgagccgtgcgtcgcgtcgacgcgagttccgcgtgagggagcaggcagttgcagttggaggcggtgacgaaaccctaggacttgagctccagcgcacggctcgggtcctcctcaccgttcccggcgatggaccggcggcaggagctctgcaggaacttccagcgcgggcaggtgcggagtattctcctccccctctccgttgccgcggcatgcgattgcctccggctgtgcacatttatttaagttcagtcgttatgctcgctctgggtgcccgtaccttctgtggttttcattcacgtcctggatggtgcagctgcaagtacggatcgcactgcaggtttgtgcacgcctcctctcagcagcagcagcaggcgaagcccaacccgtttgggttcggcttagggagtaggcagcagcaacagcagcagtcttcgtttcgtgcgcagttccagcagcagcagcagcagaagcccaacccgtttggatttggagtgcaaggcagtgcggctgcacagtccagaaacgctcctggccaggcaaagccatttcaaaataaatgggtaagggacccctcagccccaacgaagcaacaggaagcggcacagccaccagcagcagcccacacctcctgtacagatcctgagtcctgcaggcaacagattgccgaggattttaagaatgaaactccactctggaagcttacgtgctatgctcacctcaggagcggtccttgtgacatcacgggagatattagctttgaagagctgagagctaacgcgtatgagcaaggcaggcaagggcatcctctgcagtcaatagtagagggtgaaaaaaatttgaaaaatgcaaagctgacggactttaataattttctgaacacgccacgtctatcggtatcacaaactccaagctttccaactgtggcttccttccctgaagtgaaaaataactcagcatttggggtttctcaaaataatggaccaccagtgtttagtagtttcagtcaaattggagtaacaactaatatgggacctgggtccagaactacaccaggagtcccaaccaatactctttttggtcaatctacccaaccaagccatccaacatttcctgcacctacttttggtcgttctgatatgaaatttggagtttcaggtccatttggaagccagatatcacaacaatcatctgggacttttcaaggctcaaacatgtccagttttggcaatttctcaaagcctcatgccagctaccagcagtccccttcctcctctagccatcacagagacattgataggcagtcacaagatttacttagtggaattgtggttcctacaagtgccacaaatgaagctcctgttgaggacaataaaaatgaaaatcaggatgatagtatctggttgaaggaaaaatggtcaattggagaggttcataaccataacacgtcaaattgggggcataaaatgcacctgaaatgctga

SEQ ID NO: 25861 - DNA, 219 bp, Zea mays
  Peptide Sequence Number=SeqID_67640
atgtcggcgccggcggcacaggccgtggtggcgctggctctcgcggccatcctctcgaccccggcgccccaggcggacaccttctccaacgtcccgcccacgctctccgagacaaaagtcagcgtggctgacggaggaggatatggtttttgggggcgacgggaagcaagagcggatcaagcaccccaggtcggccaaggcgttgcagtgcacgaccaa

SEQ ID NO: 25862 - DNA, 1101 bp, Zea mays
  Peptide Sequence Number=SeqID_67641
atgtcgtcggggttggggcaacgcagcatgtacctcggcgccatagcctatagcgccgagcaaaaggtcgcagtgcgggccgtgacgcggcgcgccgcgacaacgcttggcggatgccaaggagcttggctagttggctctgtggcctgtggcctgtggcctgcggcctgcgctcggcgccgggaccccgggcccgggggcgtgcggctgcaaggcatcgcgtctggtttggcgtccgcggcggctcctggctactcgatcactgccttttgcggggaaagcgacccgtcgttccgggcagcgggtaagacgaggttacaaagatcctccgcctcctcctcctcctcctcctcctcctcctcctatcagcactggcactgcacgccgccgatctcttggggtcctcggcttcagacggcgagtgattatcgagccagtaagccatttgcaagcactgaactgaaccctcagagcgttgttgcgatggaccaaatcgctacccccgacgaaacagcacatgcctctgcaccttcagttcataagctgtttgatgctaaattaggccaccatagcgtgatggatggcaccttggcatccacgagtcagtcatcaaacatcaagacccagctgatccggtcatcaagcttgtcaaggagcatatcagttaaccttgagaagaggagccctgaatctgatcctgaaagcccacagtctcacgtctcgcatcctaaatttgcagaacccatgttctcgaattcttcgacgttctgcacaagcttgttttcgtcatcttcgacaacagagccatgccgtcaaatgggcactttacctttcctgcctcacccccctaagtgtgagcagcaggtttcagctggtcactcatcgagctcctctctgcttttaagtggtgataccggtttagatgtggctgaacagtcagatgatctgaacgacttgctcaatctttcgggagatgcttctgatggcagcttccatggagaaaacaatgccttagcttttgacgaacagatggaatttcagttcctgtctgagcagctagaaattgccatcactgacaatgagaagaatcctcatttagat

SEQ ID NO: 25863 - DNA, 789 bp, Zea mays
  Peptide Sequence Number=SeqID_67642
atgccgctgcagattgagtctaggagggagctcctgcagcgatcagggaggtcccctgacggcatctccagtgttattctcgtcgagaaagacaggtcttttatcaagtctaaagtagtgataaggataatggaatacctcaacctttttgagatccatggcattatccggaagacaaggacagttatggaatgtttgcaccggttctgtagagactgcatcgacaaatctatgcgactaggaaataacgaatgcccagcgtgtcgcacccattgtgcaagcagacgttctttgagggatgatcccaattatgatgcactgattgcagccctgtatccagatattgataagtatgaggaagaggaatttgctttcacaactgcaactgcctttgcaaggaagtacaggagaacacggggaagagttagaaccatcccccctgatattacccctactggctcttctgaggaggaaagaggagaaggaaattccaaagagaccatcagagagcaatcttctactgatgatcattctccagatttaagacagaaaagatgtcggaagaggtctggaccacaaggatcgcctgctggaaccattggcagtatcgactacagctttgaggagaatgatgaattagttggtggaaaagaaattttagccacctctccgttgcagggagagatgcttgcttgggggggaaaatggtgcacggagccaaaatcgacatggcagtgttggttcaaatggcaggactggaaggagtgggcgcattgcaaaattggttga

SEQ ID NO: 25864 - DNA, 1416 bp, Zea mays
  Peptide Sequence Number=SeqID_67643
atggcctacctccccaccaacgcgcaagaactgctctcgaccatctgcatcctcgagacggcggtcacgaagctggaggaggagatggtctccctgcatttccagctcacccaggagaggaacgagagacggctcgtcgagtaccgcctcaagcacctgcccccgccgccgtccagattgctcctgccactccgggaaactcggaccagacgcgaaaaatgcagtagccaaacggaggaggtttaccctcgcgccgtcttgcatgaacaggctgtgaaactgcagaggcagatctctgtcaagagcttcgtcgatcctaaccagctttccgaggacatcgtccgctgcatgaggaacatctttatttcgctgtcagattcctgcagggactcctcaaggaactcgaacatggagaatcagcagtccattccatctcccaccgggaactattcgatttctgccttctggactctgtcggaaccgtcgtccatttcttcttgggtacagagccctcaagtggatttgaactacaacaacaatgtattagcttcggagactgtttttgacccttacaaagctcgcgagaagcttagctgggctgacataggcagctacggtgcggcggccgaagtttcgtggatgtcagttgggaaaaagcaacttgagtatgctgcggagtcacttcgtaagttcagcactaacgatcgcccattagagtgcagattgttcattgagcagctggcagaaataaaccctattcacctcagtgatgatgcaaggttggcattttggatcaacttatacaatgcgttgatgatgcacgcttaccttgcttatggtgttccacggagtgacatgaaactgttttcactgatgcaaaaggctgcatacaccattgggggccactcattcagcgctgcgtttattgaatacgtaattctgaagatgaaaccaccaagccataggccacagatggctctgcttcttgccctccagaagattaaggtacccgaggagcagaaaaagttctgcattgcggcacctgagccacttctgacgtttgctctcagctgtggaatgtattcttctcccggggtgaagatttacacggctaacaacgtgagggaagaacttcaagacgcacagcgtgatttcattagagcatcggtaggagtgagtcggaaagggaagcttctggcccctaagatactgcactgctttgcccgtggctttgtcgacgacaacagcttcccaatctggatctcgcatttcctaccccagcagcaagctacgtttgtcgatcactgcgtgtctcaacggcggcaaagtctcctgggcacccgtactttcggcgtcgttccatttgattctcggtttcgctacctcttcctgccagatgcgggatcgttaaattaa

SEQ ID NO: 25865 - DNA, 309 bp, Zea mays
  Peptide Sequence Number=SeqID_67644
atgggcaggacggaccctgagacgggccagaggaacaacatgcccaagcccaaagttgttggagcaactgccatggctgcggtgcaggctagatatgggatccggttcttctgccaggcctccagaagcagaacttcagaggcgacaagggtaataagacatgatggtaactcgagagacagctcttacactgttgagcggtctatcagggctttggacttcatcacttctgttggcagatggcagttaggctgtctgaaagcatgtaatatatcagcagagggcaatcacataaaccttttgttgtga

SEQ ID NO: 25866 - DNA, 315 bp, Zea mays
  Peptide Sequence Number=SeqID_67645
atgggtgcggcggccgcgtcgaagaggaggaaggcggcgcggcgggggttaacggttgcggaggggtcgggttcgggggcgtggccggggcggtcccaccggggccgggggcttgggggtggaacggcgcggggacggggaagggcagcggcgcgtccgacgggagagcgcgcagcgggaggatggcctggggctccggcattcgcggcggcggcggcggccgaagttagagtatcgagttttgtattcctcaccaaggcactatgtgatcaaggcaaccagggtccaactcaacctcttggcgtgatcacctga

SEQ ID NO: 25867 - DNA, 837 bp, Zea mays
  Peptide Sequence Number=SeqID_67646
atgaggtgcgtcgcgtggtgggcggtccttctcgcggccgcctcgttggttggcgcttgggggaaccacactgtatcggcgctcacgttggtatcggagacgtggtacgatgaccgcttggcgctggttcctgttgagtttggcggcggtgacggcgaggatgccgcggggcttcgcagtgagctcccgtgccagacatactccgcgaactcgaggtcctgcgaggaattgaacggctccgggtcgttcaacaccacctgcgtcataagttccagctcttcgctggacggtgatctgtgcgtatatggcgacgggagtgtggagattcggccccatgtcaagatcatctgccccttcagggggtgctacatcaccgtcaatgtctcagggagcgtcaggattggtgagcatgttgaggtgattgcagggtcggtaagcctgtacgcggccaatgtgtcgttggatcaccactccaccatcaacaccactgcactcgccggtgagcctcctcctcagacgagtgggacgccgcacagcctggaaggggcaggtggtggacatggtgggaggggtgcatcatgtaaagtgtcaaatgacaccaactggggaggtgatgtgtacgcgtggtcgacattggattggccttggagctatggcagcatgggtggcagcatgtccgccggtcagtttggagggtacggtggaggccgtgtcatgcttaggacatccggctttctgaatgttgatggacaggtgcttgctgaaggtggtgttggcagtctcaagggtggcggcggctctgggggaagcattataatacatgctttcaagctgtaa

SEQ ID NO: 25868 - DNA, 414 bp, Zea mays
  Peptide Sequence Number=SeqID_67647
atgactaggaacaaagctcgactcatggccaaggggcataaagtgaagaacaggcgaagctggccttcggccgaaggaacgaagggaccaagcttcatctcgtttagccttcaaagtaccttcgagctatcttatgtcaagaagccaaagaaaccttcgtccttcaagctatcacttcagataagtgataacttaaggatgaaggggattgaaatcaagtattcaacattggcgcccacctcaggtgattccacgaccacatcaacctacatcatgccgccaaagaaggcaacgacaaccagtttcgtccccaggaccttggacaccaaccaagggtacggagctctcctcagggaagcaaggaaccaaaagaggaaggctgtaagaaaaatggatctcgacccatttgactaa

SEQ ID NO: 25869 - DNA, 657 bp, Zea mays
  Peptide Sequence Number=SeqID_67648
atgtggaatgactttgattttgtcatctttttatatcatgggaatccccaacttgagagacatggtgttcgagtggagttagggtggttccagtccactgcttctgcatattaccagcttggtattatcgtagctgtgaatgagaacttctacaagaatctccgccaccatgagcatgccacagaattttgtgaacgctcaaggaagaacgttgcagttccacttcaggatttcaatcaggcaaatctggatcagccttgcacaagctatgctgtttctagaaagcgattgacaggtggagtcaatggtgggatcataaatgagggaacgctcaagtcactgcactataaaagagactatctctttccattctcattgttattgcgtaattccaggcctctaggctatgcgattgtagcaatcatatacggctctttgtatttttggctctcttctttggcggtgtcctcagttcatcaagtatacaacacaaaaagcttcaagagtagagaagacaatgaatggtggatactgcctactatcctttttctcatcaaatcactgcaagctggactagttaactggcacgttgccaatttggaaatccaggactactcgttatttagcccggacccagatagattctgggcaatgtag

SEQ ID NO: 25870 - DNA, 324 bp, Zea mays
  Peptide Sequence Number=SeqID_67649
atggcgtgcagaaggtcggaaaccgtgggcgacgccaaggtcggcatagtatcgcccaccttcgtcgctggcgccggccgaacaagccacccttcgctcgacgacatctacttcgcgcgttgcacggacgaagaccgcatccgcaggacccgccggatgaacaaggacgctgtccatacggaggcctattcggccccctttgctccgggaagacaagacgaaggccttgtgaagaccataggacctactcccccctcagagcaaggagaggcccatgtacaattcggcccatgtagcagggccccgcgtccggaccccgcgtga

SEQ ID NO: 25871 - DNA, 108 bp, Zea mays
  Peptide Sequence Number=SeqID_67650
atgactcaggacgtcatggcgaaatccatcgccgcgaatggggcatctaggtcgcgctgcagcgccatcgggccatgctgcttcgttccaatgagcagttggcgctga

SEQ ID NO: 25872 - DNA, 141 bp, Zea mays
  Peptide Sequence Number=SeqID_67651
atggaggcgacggtgaaggataatgataatgttattttgcctatgggaagggtggcccttccattgaaaccgtacattgatgaccatgatgtctatatgtgggtaacttcaaaggttcatgtcccttgtgtcgaaggttag

SEQ ID NO: 25873 - DNA, 426 bp, Zea mays
  Peptide Sequence Number=SeqID_67652
atgttgggtgaacatgccaagaaagagatacccaccgaggataagcctgagactttgagaatgaagcatgaggacaagactccatcaagggagatcaagaaatctggcgacaagcataagcataaggaagagttcgctggttcctcgaagtcatacaaggagaaaggcaaaccaccacattttgatggtgaagactattctatatggagtgataaaatgaggaaccatctaacctcattccatgaaaatatttgggatattgttgagtttggtgcacagggtccacaggttggagaagaagactatgattcggatgaagttgcccaaatccagtgcttcaactcacaagcaaccaccaaccttctcgcttcattgtgtcgagaagaattgaaaagggaaatgtgcccttgggcccattttctatag

SEQ ID NO: 25874 - DNA, 672 bp, Zea mays
  Peptide Sequence Number=SeqID_67653
atgaggaattatcaagctatttgtgagttgggttctgtgattggggcagtggaggaaattgatctaaaggctttggagattgatgaggttgtcaaattcaaagtgcatgtcaagagtgtttccctgatccctaaagtcattgaagtgggagtgaagccctttctctttgatgtcttcttcaaggttgattccattgtggaggaagggtggaatgaggaacctgttaacttgggtaaaagagctacttccaatatcggtgcctcagatagttccatggggaaagataaggaagtccaaagatgttgggaaaaatcccctgatggagaagatggtagtgaggggaaagtggacctggaactcagtgaggatgatctgctaagctcacaggagctactagaattagctaagagtgtgggtcttgatatccaaggctctcacgagagcgacaatgataaggctaggtctgaaattttagctcagggagcagtgggcatagagataaaaaggccaaatccaaagcaggtgacatggtggaagattccaagagagggtgagagtgaggatggcctttccttgatttggacaacgaaattgagtatgcagatgatgagtggcatagatcaagtaaaagaaaaagggggaaatattggtctcccctatattgagaggtga

SEQ ID NO: 25875 - DNA, 1677 bp, Zea mays
  Peptide Sequence Number=SeqID_67654
atggccgcaagcacagcggcgccatgctacgacgcgcccgagggcgtggacgtccgcgggcggtacgaccgggagttcgcgggcatcctcacccgcgacgcgctggacttcgtggccggcctgcagcgcgagttccgcgccgccgtccgctacgccatggagcagcggcgggaggcccagcgccggtacgacgccggcgagctgccgcggttcgacccggccacgacgctcgtgcgcgagggggactggacgtgcgcgcccgtgccgccggccgtcgcggaccgcaccgtggagatcacgggccccgccgagccgcggaagatggtcatcaacgcgctcaactccggcgccaaggtcttcatgctgagaccgcgagagagagaaaaaacgtggcaggctgacttcgaggacgcgctgtcgccgacgtgggagaacctgatgcacgggcaggtgaacctgcgggacgccgtggctggcaccatcagcttccgcgacgcggcgcgcgggcggacgtacgagctcaacgaccgaaccgccaagctcttcgtccggccccgcggctggcacctccccgaggcgcacatcctcatcgacggcgagccggccattggctgcctcgtcgacttcggcctctacttcttccacaaccacgctgccttccgcgcaggccagggcgccggcttcgggccgttcttttacctgcccaagatggagcactccagggaagcgaggatatggaacggggtgttccagagagcggagaaagctgctgggatcgagctcgggagcatccgggcaacggtgctggtggagacgttgccagcggtgttccaaatgaacgagatcctgcacgagctgcgcgagcactcggcggggctcaactgcggccgctgggactacatcttcagctacgtcaagacgttccgcgcccacccggaccgcctcctccccgaccgcgccctcgcggctcagatcccgatcaaggacgatgcggcggcgaacgaggcggcactggagctggtgcgcaaggacaagctgagggaggtgcgcgcgggccacgacggcacgtgggcggcgcacccggggctcatcccggcgatacgggaggtcttcgagggccacctcggcgggaggccgaaccagatcggcgacgccgcagggcacgagggtgccagcgtcaacgaggaggacctcatccagccgccgcggggcgcgcgcactgtggacggtctgcggctcaacgtccgcgtgggcgtgcagtacctcgcggcgtggctggccggctccggctccgtcccgctgtacaacctgatggaggacgcggctacggcggagatcagccgcgtccagaactggcagtggctgcgccacggagcggcgctggacgccggcggtgtggaggtgcgcgcgacgccagagctactcgcacgcgtcgtcgaggaggagatggcgagggtcgaggcagaggtcggccccgacaggttccgaaaggggcggtacgcggaggcgggcaggatcttcagccggcagtgcaccgcgccggagctggacgacttcctcacgctggacgcgtacaacctcatcgtggcgcaccatccagtggagtcagctttcaaaaataacacatcgctgtccaatgcagccatcgaaataaggacggatgaccaacaaacatga

SEQ ID NO: 25876 - DNA, 129 bp, Zea mays
  Peptide Sequence Number=SeqID_67655
gccctgactcaccctctgtggacgaaccttgcggaggaaaccttgggttttcggggcattggattctcaccaatgttttcattccattttcccattgaggatgaacctcagcctgtgctcgagagatag

SEQ ID NO: 25877 - DNA, 255 bp, Zea mays
  Peptide Sequence Number=SeqID_67656
atggcactcagtttcagaacattggttttgctcctcctcaacctgatatacccacacaggggtcagccacctgcacctccagtgaagaagggtggtcaacgcacaaagctagcaaacttcgcgtctgacgaggatatgtgggtttgtcatgcttggatggttgtgagttgtgaccccatagtaaacacaggtccagaagcgtccaaggtttttggaatcggattactgaggcatacaactctagaagaggattaa

SEQ ID NO: 25878 - DNA, 261 bp, Zea mays
  Peptide Sequence Number=SeqID_67657
atgaacccgtacctagattccaatgttcctcttaggatggcgcaagaaatgaaggggaagaaaaagagttggaggttgcgacgtacctgcatcttaggaggcgtcgtgcacataacgagagtcggtttcgcatgcattgccatgtgtttgagcgcctcgttgatgctgtgcaacaagtcgatccctacttcgttcagcagccaaactgtgtcggtaaatgaagtattatttgaggttggtattgtatctgaaggtgaatga

SEQ ID NO: 25879 - DNA, 261 bp, Zea mays
  Peptide Sequence Number=SeqID_67658
atggcgctccgcatcgacgaccgggatactggtgcccgaacctccggggagaacgcctccgtttggctcgccatgccgcgacaaatacgtatgtggcttcgcctggctggaatcgcgctctgcgcttccggaaccgtacgccggtgtggcaatgccaccctccggcgagacctccgccgcgaccaggactgcgctgccgctctgggttctcggttggggaagaagtctcggggtcgttggatctcgtccagacggcggtga

SEQ ID NO: 25880 - DNA, 429 bp, Zea mays
  Peptide Sequence Number=SeqID_67659
atgaaggggaaccaccaattcaaccgttggggaggctgtctgtcgatgggcgcaccggacagtccggtgcgccacccgaaacactgtccggtgcaccagccacgtcacccaaccgttagggttttgacggtttcgatcgttggagctctgacttcttggtgcatcggacagtctggtgctgcactggacaggcgactgttggagttgaccgttgcgcttcccagccgttgctccgctggcagaccggacattccggaaaaggttaaaccctattttcctttcaatattatacctcccgggccagaacttcttgtttcagagggggaatcaatcaagcttgatcaaccattaacaagcaatcctaatgttcttaagaacctaccattgggaggggaacaacaactggaaacagttgctaataccccgtag

SEQ ID NO: 25881 - DNA, 291 bp, Zea mays
  Peptide Sequence Number=SeqID_67660
atggagaatgggcggctgcttccaactccagagaaggtcctcagagcacggatgaagtgcgggcaatggcaggtgctagtgcagtggaatggagcgcagccagaagatgccacttgggagcctctgcaacagttcacagcatcgtaccctctttttcagctcgaggacgagctgttcgtcgagggagggagagatgttatgttcgacaaagtgtacagccgaaggcccagaagggcagctgatcggcccatagtaggggtcgatgcagataagagattagaggaggattag

SEQ ID NO: 25882 - DNA, 294 bp, Zea mays
  Peptide Sequence Number=SeqID_67661
atgacgagggcccacctgccggtggcggcgcagcggcggccgacggtggcgctgcttctgggcctggcgctcgccttctgcctcgccgtcctctccatccagtcctccttctacaccaccccaggggcgccaggcaggaggctggatctggacgccgacgacgtgcgcgacctcgcggggttccagtcccgcgtccaacagtgcgtggtccatatggatagtccgactgatctcggtatctctgataggctatcgttcattgctgaaaacttttgtgcccgttgttatctctga

SEQ ID NO: 25883 - DNA, 375 bp, Zea mays
  Peptide Sequence Number=SeqID_67662
atggggaagacacgtgcgctcctcctcgctctccaccaagtgataaattttctcaaatttgtgaggttgtcaatatggtggaatttcttgattaatgtcttggcatggggattcagttgcttgggtaccagatatagcgatgagcgaaatttaaggtgtgaatcccaggtcactgccttggcgtatttaggccccagagaatcgattttacaggttatatcggatttgactcaaggtaggaaattctttttttatgctaatgatgaagatgttgcagaagatggagatcaggatgctgaattgctgatacttcggtttgaaaaagataatactgcacacacatgcaatgcacctcatatactggttgtgttgtga

SEQ ID NO: 25884 - DNA, 174 bp, Zea mays
  Peptide Sequence Number=SeqID_67663
atgcgggcggggttggcacaggagagcagggttacgcaggcagggacaacgtcgcaccgtaggagatttgcgtgtgtggtgacggatgtactggagcataccacagagatgtccgtggcctgcgagcacgatgtcatcgagcaccggaagcgcctactgtcgggaagactcgca

SEQ ID NO: 25885 - DNA, 829 bp, Zea mays
  Peptide Sequence Number=SeqID_67664
atgaatcctctgtccggttcatcttccaccatctcgtgtttctccacccaattacgcagtctcgcgcaagttctgctctccggccgagcaggcagccgcctccgccgcgtcctcccggctgcccacgcccgcgccatcatctccgatggacttggcttcctgtttctcgcgaaccttctcctcgacggttactctaagctcggccgcatccacgacgcgcgccgcctgttcgatggaatgccgcaccggaacctcgtgtcctggtcgtcagccatctccatgtacgcgcagcacggcgccgatggccaagcccttgccctgtttgcagccttcaggagatcctctgacgaggcacccaacgaattcgttcttgccagcgtcgtgcgggcctgcatgcagtccagggatgttccttttggcgagcaagtgcatggaaagatcattaatcttggcctggatgtcaatctctatgttggcactgcactcgtcaacctatatgcgaaggttgcctgcatggatgcggccatgcgtgtgttccatgctctcccaacaaagaatccggttacttggacagcaatcatcactggttactctcggattggccatggagaactagccctgggcttgtttcaaacgatggtcgctcaaggcgtccagcctgacaggtttgtgttagcaagtgctgtcagtgcctgctctgcacttgcctttctacagggaggcaggcaaatacatggctacgcttatcgaagtgcagcagaagtggatgcttccgtgatcaacgcgctcatagatttgtattgcaagtgctccagaccgttagtggctc

SEQ ID NO: 25886 - DNA, 300 bp, Zea mays
  Peptide Sequence Number=SeqID_67665
atggagttcgagccggtggggattatgcccggcggcgagatgcggatcgtgcgggagagccccacctcggcgtacgtccgcttcaaggctggcagtgtggagccagcgcaccatcacacctttggccacgacctggtggtcatcaagggcaagaagaaggtttggaacctcaccaagaaggaaagctacgacctggtggacggagattttctcttcacacctgccggggatgtgcacagggtcaatgatggcaacgcttctgaaggtgctatgctcacatatcctcatttgggattgtga

SEQ ID NO: 25887 - DNA, 195 bp, Zea mays
  Peptide Sequence Number=SeqID_67666
atggagctcatcgaaggagagctcagaaggttcgccatcaacaagggagaagggacaaacgaaatgtacaaccgtctcaagtcattgttgaaccaaatctggaactacgggagctccaagtggacggaccacaaagtcatcaaactcaagttaaggtatgaagtggtgactctggaggaggtgcttggcaagtga

SEQ ID NO: 25888 - DNA, 1695 bp, Zea mays
  Peptide Sequence Number=SeqID_67667
atgaaacaccttgggctgtctgcaccagtttatgcaacagaacccgtgtttaggcttggccttttgaccatgtatgaccatttcctgtctcgatggcaagtttcagactttgacttgtttactctagatgatgttgatgctgcattccaaaatgttgtgagactgaagtactcacaaaattaccttctgaatgataaaggtgaaggagttgttattgctccacatgtggctgggcatcttttgggggggacagtttggaagattacaaaagatggggaggatgttgtgtatgctgttgacttcaaccatcggaaagagaggcatttgaatggcaccgttcttggatctttcgtgcggccagctgttctgataactgatgcttacaatgctttgaacaaccaaggctatagaaaaaagcaggatcaagatttcattgaatcattaattaaagttctggcaactggtggaagtgtgctacttcctgttgacacggctggtagagtgttggaacttcttttgttattggatatgtactgggatgaaaggcgattgcagtaccctatctacttcctgacaaatgtgtcgacaagtaccgttgattatgtcaagagttttcttgaatggatgggtgatcaaattgcaaaatcttttgaaagcagtagagccaatgccttcttgttaaaaaaggtcacgctgataattaacaaagaagagcttgagaaattgggagatgctccaaaggttggcttttctcatgacatatttgtggagatggcaaatgaagcaagaaatctagtgctctttactgagaagggacagaaaatatttgctctccagtttgggacactggctcgaatgctccaagtggacccaccccctaaagctttaaaggtcactatgagcaagaggattcctttggtgggtaatgaactaaaggcttatgaagaagagcaagaacggataaaaaaagagaaatcgctaaaggctagccttgtcaaagaagaggagctaaaggcttctcatggatcaaacacaaaggcttctgagccaatggtcattgatgcaagctcatctcgaaaatctgtgaatgcttcacattttggtgggaacaatgatattctcatagatggatttgtccctcctttaaccagtgttgctccaatgtttcccttctttgaaaacactgctgaatgggacgactttggtgaggtcatcaaccctgatgattatatgatgaaacaagaagaaatggataatactctgatgcttggccctggagatggattagatggtaggatcgatgatggctcagcacgcctgcttcttgattcaacgccctcaaaagtcatttccaacgagatgactgttcaagtgaaatgctcattggtttatatggactttgaaggtcgctctgatgggcgttctgtaaaatcaattattgctcacgtggctccactgaaacttatcctggtgcatggatcagctgaagcaactgaacatttgaaaatgcactgcgcaaagaatttagatttgcatgtttatgctccacagattgaggaaactattgatgtaacatcagacttatgtgcttataagggcagcacagggtcccagcagatcgtcatcgagggccccctctgcgaggactattacaagatcagggagcttctgtactcgcagttctacttgctgtga

SEQ ID NO: 25889 - DNA, 447 bp, Zea mays
  Peptide Sequence Number=SeqID_67668
atggccaatcgttcactggagttccctccatactacagagtcgtgcctcgccatcgatacacccttgcccgtgcatcggggtttgagggcctggtgggggttacggtgaccgctttagttggggatttcaatcttgtgatcaccaagattgggggcgccccggcggggctccgccgcggcattgggtggcgccatcgcggaccgctgctcctccagccatcggtccgagatctgacggtcgatgctagataccggttcaggcgtataattgatttaatcatggcagccagatcttcatcatacggtcctaccagtctcgtgccccttcgacaacgtaaaaattgtaaaagagccccttgggttatggggaatcaactcgccatcctgtgcggagttctctgtgtctgggggatttcacgtgttagcccccgagttttcgagaaataa

SEQ ID NO: 25890 - DNA, 148 bp, Zea mays
  Peptide Sequence Number=SeqID_67669
atggctgtctcaaattccaccacagataccatagatggcgttgtagatgccaccgttgattgcaccactctagatgccttggggatatccttctatggggtagtaacaaatgacttgggggacacaaccacctccatcaccaggagtg

SEQ ID NO: 25891 - DNA, 255 bp, Zea mays
  Peptide Sequence Number=SeqID_67670
atggagtcagctccatccccttcgctgataccgcttgacgaagtgctggaaacaggaaaaactgaattcgaaatgagatggctatgttcagccgaagtcagctcagtctgggtgcaccggactgtccggtggtgcaccggacagtgtccggtgcgccaggctggctctggcgaacaggctgctctcgggacttcgacggcggtgtacggctataattcaccggactgtccggtggtgcaccggactgtccggtga

SEQ ID NO: 25892 - DNA, 486 bp, Zea mays
  Peptide Sequence Number=SeqID_67671
atggaggtcgacgagcaaggagggcttggcggacagggaataggcgcgatcgtcggtgagtgttcggacggcgaggtacaagctccggcgaggcggtcggcgaggtcttcatggagggagggagaaggggaacagagggggggaaagagaaacgactgcggcagtttctggctcctggcgcggtcaggcgtcgggcgcggacacaaggcgtcggctgggtgcgcagggcggctcggggcatgcaggcgcagcaggccgggtgcagtgcggcgcgcggggcagcgagtgggcgctcgggttcctggcggctcgatgctgggtgcgatggcggcgcggcggcctgggcgttgtggcctgggcgcgaggcggccctggcggctggagtcgggtgagagcagggaggagggaagagagaagggcgcgggtggggcccgcgcggcaggggaaaggggagaatttcccctagcggcggtggctggaaggtag

SEQ ID NO: 25893 - DNA, 2142 bp, Zea mays
  Peptide Sequence Number=SeqID_67672
atgagcgagtctgagtcgtccaacacggcgggcttcgccgcggccctggagctgtggcaagaaaaccagctgcgcatcctcgtcctgattagcctcgccacccagtgcttcctcttcgtcttcgcgccgctccgtcagcaccggatcccaggtccgctgaggctctccatctggctggcctacctgggcagcgacgccgtggccatctacgccctcgccaccctcttcaactcccaccggtgcgacaccggcaccggcaccggcaccgcccgcgccggcgtggagctgctgtgggcgcccatcatgctggtgcacctgggtggccaggacagcatcccggcctacaacatcgaagacaacgagctgtggcggcggcatgtcgtgacagcggtgtctcaggtcgccgctgctatctatgtcttcgtcaagtcgtggccaaaatccatggcggcgactgctgcccatctagtggttgaccaagacactcgtaaccggataaatgccttcatggcccataaaagtgagatggcggcttacgggagaatcttgggaccagcgcttcttctcttcttctctgggatcaccaaatgcgtgtgcaagccctgggacctcaagagggtcagcgtcaacagcctcgtggactcctcctcatcgggctcctcggaagagaagggcgatgccggtgagagtgagatgatggattcgcttcaggagtacgtgggagctgcagcacagtatttcgagtccgtcggccatgaggaggaggaggaggacgacgacgccgcctgtaaagcagacgaagtttggaagccctacaacctgtgcgtggacctggcgcccccctactccggccggctgagctgcctgaaacacctggcgcgcagcccagcggacgaagcccatcgcctggtgaaatccagcctctccgcgacgttccaccagctctacaccaaggaatccctgaagctgcacgacatgtcgcacattgtacttacagacaaccgcgccttgaaccgcttgaagctggtcacctcggctcgagggctccggacggtagccgcggccacactgcttggggcgatcgcggcgttctacggagaaggcgacgttgaccaggacccgacggacgtcaccatcacgtacgccctgctgtggtctgctttcgtgatggagtgcgtcttgcccaccgtgatccaccacacgttcgcctggatagagcggctgttcaccgggcaccggacgtggccggaccaggtcgcgcagtacagcctcatggggtacgtggcacgcggccggagccactcgtggctcatgaaggcggtggcctgcctcggctgcggggacctggtcgaccagctctggaccatgaagccgcgcatgggtgcttcgtccagggagatcaccggcctggtccacgcccacgtcgccggagcgtggatgcagggccacatagccggcgcggactcgttccgggcgttcaacgactaccgaggccagtggactctcggcaactgcagggagatcggggtcggcgtatcatcatccatggtggtactcatgagcagcgtgtcgaggccgttcgacgagagcgtcctcgtctggcacctcgccaccgacttctgcttccacttactccaggtccagggagacccgtcccgcgccaacgccaccgcccgccgctgcatcgagatgtccaactacatggcctaccttctcttcgtcaagccggagatgctgatgcccggtgcccggcgcaagctgttcagggacgcgtgccgcgagctcgtgggcctgctcgaggaggatcgtcctgacgcgccgcgggcacggggcaagagagacctcgcacacaaggtcgtccagctgctcaagagggacggagacgacgtcctgggctcagcgggcgtcggcgtcgttcgccggggcttgggcgtgtgggtggagatgctctgcttctcggccagcaggtgcaaaggctacctgcacgccaaaggcttgggaacgggcggggagtacctgtcctacgtatggctcctgctcctctacatggggatggagaccttggcggagaagatgcagaggacggagctgtacgagggctccactgcagcagcgttatccatcagtggccagaatgtttga

SEQ ID NO: 25894 - DNA, 996 bp, Zea mays
  Peptide Sequence Number=SeqID_67673
atggcccgcaataggaagcactggatcctgaggaagctgcctacgttcgtcaaggacttgatcgaccagctctggtgtatggagccgtacaagtcgtccagtggcatcacccaactcgtggccaaccacgtcacggctgggtggtggcagatacatggcatcgcctcctaccacaggttcaacgacagccggggccagtggactctcgaccgtgagggtttgctcgacgcccttggctggagcctaaacaggccattcgatgagagtcttctcctatggcacctcgccaccgacttgttttgcttccacctcgccacgccttcttctactcagcaacgtcaagctgcctgccggagcatggccatgtccaactacatggcgtacctactgttcgtcaacccagagatgttgatcgccggtgctaggcgcagcctgttcaaagacgcctacgaggaactggagggcatcattccaccgaacgagcctgctagtagtagtagtataatccgtaggctaagggagacggggaattcaggatcaggtgtggctcatgacgcttgggctgtcacccaggtgctcattgggtgcaggggctacctgcacgccaagagcatggggagcggcgggcagtacctgtcctacgtgtggctcctcttgtcttacatgggcatggagacattggcggagaagatgcagaggacggacatggtggaccaaggaagacacgaggctggggctagcactggcacaacgaccgtcccaagatcggctgtaccagcgtcgcccaccggcgccggcgaccgaggatctgtcttgcctacgcaagcacaagccatcgacccgaccgtcccaagttcacctgtatcagctgtcggagctggtgacgacaacaacgatcggaagagggcgcaggtgggcgtgccaggcaggagagtgacggcagagggcgccggcgatcaagaaggtgcagcggaagagacgatcccggtgtcgtga

SEQ ID NO: 25895 - DNA, 1254 bp, Zea mays
  Peptide Sequence Number=SeqID_67674
atggaggatgacggcgacgacgacacttgtaaagcaggggaacccagcggacgaagcccatcgcctggtgaaatccagcctctccgcgacgttccaccagctctacaccaaggaatcactgaattgcgcggctggaaggtgctcggcacggcagctcgaagccttcggacgacgttacccgtgagcaccctgcttggggcgatcgcggcgttccactacggcggcggcgctgaccaggtcccggccgatgtcaccatcacgcatgccctcctatggtctgctattgtgatggagagcggcttgttgcccaccgtgatccgccacgcatctcccaggataaagcgactgtttacttggctccggacatggccggaccaggtcgcgcagtacaacctcatggggtacgcggcgcgcagcaggaagcactcgtggctcatgaagctggcagcctgtctgcgctgcagggacatggtcgaccatctctggaccatggagccgtgcaagggtgcttcgtcggccagggagatcaccggcctggtccacgcccacgtcgccagagcatggatggaggatcacatagccgacgcggactcgttccgggcgttcaacgactaccggggccagtggactctcaacaacagcagcagcctgccatccacagtagtactgatgagcgtgtcgaggccgttcgacgagagcgtcctcgtctggcacctcgccaccgacttctgcttccacttcctccacggagacccgtcccgcgtcaacgccaccgcccgccgctgcattgaggtgtccaactacatggcgtacctcctcttcgtcaagccggaaatgctgatgcccggtgcccgacgcaacctgttcaaggacgcgtgccgcgagctcgtgggcctgctccaggaggaccgtcctgacgcgccgcggggacggggtatgagaggcctcgcgcgccgggtcgtccagcagctcaagagggacgacgacgacgtcctggcttcagtacggggcctcacgcacaagctcctaaacctgctcaacaaggacgacgacggtgtcctgggctctggaggcgtcggtgtcgttcgcctggcttgttgcgtagccaaggatctcatgaattcgcacagtggcaacgaggagaagatatggaccgtgatacagggtgtgtgggtggagatgctctgcttcacggccagcaggtgcaaaggctacctgcacgccaaaagcttgggaacgggcggggagtgttga

SEQ ID NO: 25896 - DNA, 846 bp, Zea mays
  Peptide Sequence Number=SeqID_67675
atggccgagcgctggcgctcgagggcgcggcgggacccagacctggacgaagatgcttccccgccgtcccggcagccgcgccacagcgggggcgacgaggaggacgatgagctggggaacgaggatctcagcctggagatcgtcgcgcgcgcgcagcggaagcggcgcggggaatcagccggcggagtgcccgtgttcgccgaccttctttcggtgtcctccgccgacgaggagggcgccgtggtggagctcgatgaggcggatgagccccggaggaagcagaagaagaagcagcgccggaagcaaaggaagaagcatcggaaggagactacagaggctgcggcgggggccgccgtagaggtggatgagaatgcggtttgtagcaccgaggaggggcccattgggacagcagaatcggtgttaactgaaaatggggctgatgcccctgcatctgataatatggttctgcggaagctccttcgcataccgagatactttgatcctggggaaacactgttggagacttgttttaattgtagcgaggaagggcatgtagctgcaaactgtccattggaaaagcgaaagaagccttgctttgtttgtgggttgtttgggcacaatgcaaagcagtgcacgcagggtcaagactgttttatctgtaaaaaaggaggccatatggcaaaggactgccctgataagcacaggaggaatgatcatcaatccacattatgtttaaaatgtggagaaataggtcatgatatgtttggatgtaccaatgattacccaccagatgatatcgaggtatatttgatgatgtgtgaaagcaatagagatagcgcaagataa

SEQ ID NO: 25897 - DNA, 345 bp, Zea mays
  Peptide Sequence Number=SeqID_67676
atgcccgccgcgttctcattatccttcctgcaggggtctgtgactgagcagctgcgcgtcctcgtcgtagcgagcctcgccatctggctgaggttctccatctggctggcctacctgggcagcgacgccgtgcccatctacgccctcgccaccctcttcaactcccaccggtgcgacaccggcagcagcagccgtgccggcgtggagttcctgtgggcgtcaatcatgttggtgcacctgggcggccaggacagcatcacggcctacaacatcgaagacaacgagctatggcgacggcatgtctttacagcggtgtctcagactgtgtcctatgtctataaatag

SEQ ID NO: 25898 - DNA, 1128 bp, Zea mays
  Peptide Sequence Number=SeqID_67677
atggcgtcttcgtcgctgccggaggagctcgtcgaggagatcctggtgcgccttcctcaagacgatcctgtgcacctggtccgcgccagcctcgtctgtaagtcgtggcgccgcgtcctctccgaccaggactgcttcctgcgccgctgccgcggattccacggagcggcgccgccgctgctcggctacttcgccatcaaccgctgctacggcaacgacgccacgcagttcgtccccgcgacctccaccgcctcgcccgtccgcgtgcccgcggtggaccacagacgacgctggttcctccccgtggactgccgtcacggccgcgtgctgatccactacgaggacagggacaggtcgaccaagagggggttcgtcgtctgggaccccctcaccggcagccggcagcacctgggcatgcccagcgctagctacccgtcccactcgtgccgctacacctcctacaccggggccgtggtgtgtgccaaggccggctgcgacgacgaccacctcgactgccaggccggtccgttccgcgtggtctgcgtagagaccaacctcctgaagcctgtattcgcgtgcgcgaccagctactcgtcagtgaccggcgcgtggagtgctcccgtgcccaaccatgacagccacgacttcaactactactgcttgagaagctatggcaagcagagccttcttgtcggcgatgccgtctacttcctcttccaggatgaccaaagcatcctcaggtacgacctgggtaggcaccggttgtctgagatcggcatgccgccagctatgtgcaacacagctctcatgaagacggagggcggggggctagggcttgccgccctacccaacaataatcgcatccatatatggtcacgacatgatgaggatggatgctgggtggagcacagggttgtcgagcttgagacgttgctgccaagacgcatgcgaaacaggtaccatcgagtggttggctccgccgagggcacaaacactgtcttcgttaacgtatgtaatacaatcttcatgctcgacgtcaagtcaaacaaggtgagaaagtttagcaaaagaaagagcggacagttcgagtacatcttaccttacctgagattctacgccccaagctaa

SEQ ID NO: 25899 - DNA, 714 bp, Zea mays
  Peptide Sequence Number=SeqID_67678
atggctgccacgggcgagcgctgcccgagcagtcgaccgccctttccgtgccgccccgcctccccgctaggcctccactgcccactgctccggcgcctacagtggaaggcaaggagaaggacatcgggcggcgatgacgattatcttattgctagcaccgatggggtggggacaaagctgaagcttgctttcgaaactggtattcatgatacaatcgacattgacctggtggcaatgagcgtcaatgacattgtaactctaggtgcaaaaccattgttcttcctagattactatgcaacgagcaagcttgatgttgatcttgcagagaaggttatcaaggggattagggatggctgcgaacaatcagattgtgctctcctaggaggggagacagcagaaatgcctggtttctatgcagagggtgaatatgatctaagtggttttgctctcccaagaaatgatggcataacaactacagttggtgaagctctaatggcaccaaccttcatctatgttaagcaggtgcttgagattattagcaaaggtggtgtgaaaggactagcccacatcactggtggtggctttactagcaatatcccaagagtattcccctctggatgcggggcaaaaaatttactgggtcatgggaaatacctccaatcttcagttggcttcaacaggcaagaacaaatgatcttcaaacttcgcctttga

SEQ ID NO: 25900 - DNA, 2160 bp, Zea mays
  Peptide Sequence Number=SeqID_67679
atgggtgattccactagtacgggcttcgcggcggccctggagctgtggcaagaacaccagctgagcatcctcgtcgtcgcgagcctcgccatccagtggttcctcttcgtcttcgccccgcttcgacagcatcggatcccaggtctgctcaggctctccatctggctggcctacctgggcagcgacgccgtggccatctacgccctcgccaccctcttcaactcccaccggtgcgacaccgacaccggccgccccggcgtggagctgctgtgggcgccaatcctgctggtgcacctgggcggccaggacagcatcacggcctacaacatcgaagacaacgagctatggcggcggcatgtcgtaacagcggtgtctcaggtcgccgctgcgatctatgtgttcgtcaaggcgtggccgaaatccctggtgactactgctcaccaagcagttaaccaagccacccttgacaaggtaaatgccatccaggcccataacgaagagatggaggcttacgggagaatcttcacaccagcacttcttctgttcttctgcgggatcaccaaatgcgtgttcaagccctgggacctcaagagagtcagcgtcaacagcctcgtcgactcttcatcgggctcggaagagaagggcggcgagagtgagatgaattcgcttcaggggtacgtgggagctgcgacacggtatttcgagtcccgcggccatggcagaggagcaggactgcaggaggatgacggcgacgacgacacttgtaaagcaggggaagtttggaagccctacaacctatgcgtggacctggcgcccccttactccggccggctgagctgcctgaaacacctggcgcgcagcccagcggacgaagcccatcgcctggtgaaatccagcctctccgcgacgttccaccagctctacaccaaggaatcgctgaagctgcacgacatctcgcatttcgtcttcacgaacaacgccgccttgaaccgctggaaggtgctcacctcggctcgagggctccggacggtagccgcggccacgctgctcggtgcgatcgcggtgttccactacggcggcggcgccgccgaccaggtcaaggccgacgtcaccgtcacgtacgcgctgctgtggtctgcgtttgtgatggagtacgtcttgcccaccgtgatccaccatacgttcggcagggtacagcggctgttcaccgggcaccggacgtggccggaccaggtcgcgcagtacaacctcatggggtacgtggcacgcagaaggaagcactcgtggctcatggaggtggtaggctggctcggctgcagggacctggtcgaccagctatggaccatggacccgtgcaagggcgcttcgtccagggagatcaccggccttgtccacggccacgtcgccggagggtggatggagggtcacatagccggcgcggactcgttccgggcgttcaacgactaccggggacagtggactctcaacaacagcagcgtgccatccatggtactgatgagcgtgtcgaggccgttcgacgagagcgtcctcgtctggcacctcgccaccgacttctgcttccacctcctccaggaggacccgtccccctccagcgccaccgcccgccgttgcagggagatgtccaactacatggcgtacctcctcttcgtcaagccggagatgctgatgcccggtgcccgacgcagcctgttcagggacacctgcggcgagctcgtgggcctgctcggggaggaccgtcctggcgcgccgcgggcacggggaaagagaggcctcgcgcacaaggtcgtccagctgctcaagagggacgacggcggcggcgtcctgggctcagcaggcgtcggcgtcgttcgccgggcttggtgcgtagccgaggatctcatggactcgcacaggggcagcgaggagaagatgtgggccgtgatccagggcgtgtgggtggagatgctctgcttctcggccagcaggtgcaaaggctacctgcacgccaaaggcttgggaacgggcggggagtacctgtcctacgtatggctcctgctcttgtacatggggatggagaccttggcggagaagatgcagaggacggagctgtatgagggccccactgcagcagcgtcgtccatcagtggccacaatgtttga

SEQ ID NO: 25901 - DNA, 612 bp, Zea mays
  Peptide Sequence Number=SeqID_67680
atgtccaaagtccatgtcctgttgagccatagcatggataaggaaaccatcaaaatgcaaacaaagatattgatatattttggactacaagtggcggcaactatttcagaagctacacactttgttgccgaaaagtttgcccgtacaaggaacatgcttcaagcaatagctatgggaatacctatagtcacgccatcatggcttgaatgctgtagagaagcaaggtgcttcgttgatgagaaggcatacattatgagagatatgaagaaggaaaaggagctaggttttagcatgcctgtctcacttagcagagcccgcaaaaaaccattgcttcagggtagaagagtattaatcacaccaaacgccaagcctagcaaggagcttctgaagagtttagtagttgcagctcacggtcagccattggagagaatcacagcctctacaatgaagaagaaaatttttgagggggcctttgtactctcttgtgaacaagatcacagtgtttgcatgccattaattgagagtggtctggaagtgtttgactcggagcttctactgaacggtattgtcactcagaagctagagttcgccaggtatcgtctttttccatga

SEQ ID NO: 25902 - DNA, 2628 bp, Zea mays
  Peptide Sequence Number=SeqID_67681
atggcgcggcaacgcggcttctccgtgagcgcggaggagctggccgccgtggcgcgcaaccacgacgccaagagcctgaggcaccacaggggcgtcgacggcatcgcggcgaagctgaacgtctccctcgccgacggcgtcaggtcggacgaggcgggcgtccgggccgaggtctacggcgccaaccagtacaccgagaagccgccgaggacgttctggatgttcctctgggacgccagccaggacatgacgctcctgctgctcgccttctgcgcgttcatctccgtcgccatcgggctcgccaccgaggggtggcccagcggcatgtacgacggcctcggcatcgtgctcaccatcttcctcgtcgtcatgatcaccgcggctagcgactacaagcaatcgctgcagttccgggacctggacagggagaagaagaagattgacatacaggtcacccgtgacggctaccggcagaaggtgtccatttacgacatcgtcgtcggcgacattgtgcatctatctatcggcgaccaggtgccggcggacggcctgtacatcgacggctattcgctcgtggttgacgagtcaagcatgtccggcgagagcgagccggtgcacccgtctaccgcgaagccgttcctgctcggcgggaccaaagtgcaggatggatcggcgcggatgctggtcaccgcggtcgggatgcgcacggagtggggtaacctgatggagactctgagccagggcggcgaggacgagacgccgctgcaggtcaaacttaacggcgtggccaccatcatcggcaagatcggactggtgttcgcggtgctcacgttcaccgtgctcatggcgcggttcctagtggacaaggcacacgcgcccggcggcctgctgcagtggaggggagcggatgcgctctcgatactcaacttcttcgctgtcgcggtcaccatcattgtcgtcgccgtgcccgaggggctgccgctcgccgtcactctcagcctggcgttcgccatgaagaagctcatgcaggagcgcgcgctcgtgaggcacctgtcggcgtgcgagaccatggggtcggcgagctgtatctgcacggacaagaccggtacgctcaccacgaaccacatggtcgtcgagaaggtctgggcgtccggggcggcgcagacggtgagcaccgccaagggtttcgacgagctccggtcgtcggtgtcggagaacttcacgagggtgctcctggagggcgtcttccactgctccggctctgaggtcgtcacgggcaaggacggaaggactagcgtcatgggcacgcccaccgagacggccatcctggagttcggtctcgaggtggagaagtacatgggggtggagcacgccggcgccaagaagctcaaggtggagcccttcaactcggtgaagaagaccatggccgtggtcatcgcgtccccgaacagcgccggccacccgcgcgcgttcctcaagggtgcgtccgaggtggtcctgagccggtgcagctccgtcatcgacggcaccgggagcgtggagaagctcacggaggcgaaggcgaagcgcgtgggcagcgccatcgacgcgttcgcgtgcgaggcgctgcgcacgctctgcctggcgtaccaggacgtcggcggcgctggcgacgtccccggcgacgggtacacgctcatcgcggtgttcggcatcaaggacccgctccggccgggcgtgagggaggccgtgaggacgtgccacgatgcgggcatcaacgtccgcatggtcaccggcgacaacatcaacacggcgaaggcgatcgcgagggagtgtggcatcctgaccgatgacggcgtcgccatcgagggccccgagttccgggcgaagagacccaacgagatgagagagctcatacccaaaatccaggcacgtagctggagtaatgtgatggctcggtcgttgccactggacaagcacacgctggtgacgaacctgaggggcatgttcaacgaagtggtggcggtgaccggcgacggcaccaacgacgcgccggcgttgcacgaggccgacatcggcctcgccatgggcattgcaggaacagaggttgccaaggagaacgccgacgtgatcatcatggatgacaacttctccaccatcatcaacgtcgccaaatggggccggtccgtatacatcaacatccagaagttcgtgcagttccagctcacggtgaacgtcgttgccctgatggtcaacttcgtctctgcatccttcacagaagccgactggtttcgtcgtccacaccgcatctcactctctgaacctttacaggtcttcaacgaggtcaacagccgggagatggagaagatcaacgtgttcagcggcatcttcagcagctggatcttctcggcggtcgccggcgccaccgccgcgttccaggtcatcatcgtggagctcctggggactttcgcgagcacggtgcacctgagcgggaggctctggctcgccagcgtgctcatcggctcggtcagcctgttgatcggtgccgtcctgaagctcatccccgtgggttccggcagcgacgactcgtcgtctgccgatcgccacgatgggtaccagcccatccccaccggccccaacgccgtgtga

SEQ ID NO: 25903 - DNA, 297 bp, Zea mays
  Peptide Sequence Number=SeqID_67682
atgggcagccggagcttctcctaccacaggctcaagaagctccccgtcgccgctccctctcctcctcccgccacgacggcccccgctagccgcggcctagagcatgaaggcgacccgcggcgcgccgccgccgccatcgaggactcgtaccggtcctactaccgcgcgctggtggcgaggggttatgccgtactaggagtccccgaaaaaactgcactcggtggatcctatttatggcacgataagaacaaatcgatcttcagaggccaaatagcaacacctacaactccaccatag

SEQ ID NO: 25904 - DNA, 1296 bp, Zea mays
  Peptide Sequence Number=SeqID_67683
atgaaggtctccgtgaagacgctcaagggatccagcttccatatcgaagtggatcctaccgacaagataaggcaacacaagcatgacgtaaacattgacggtctttcaaatagggatggttcacaggttgccgacgtgaaaaaggttatagagagtatacaagagcaggcttcctatcctgctgaccaacaagtgcttatacaccaggggaaggtgctcaaggacgacacaacattggaggaaaaccaagtagttgaaaataattttcttgttataatgctcagacagaacaagggatcatcaagtgcagcaccagctaaggtaaccgcgaatcaggtgttgtttggttcagcccttgttaagggaatggcaccctctactcagacagtgcctgctactccacctcaaacgtcagcagccccagatgcaccggcacctattgtacctgtcagtgcaccggctgcaactgctacagcctcagcagctcctgctgttgctgtctccactgaggcggatagttatggtcaggctacctcaaacctagttgctggcagcaacttggaaggaacaattaaatccattcttgaaatgggtggcgggacatgggatagagacactgtactacgtgctctgcgggctgcgtacaacaatccagagcgtgctgttgagtacttatattctgccttacatgcgatgaactttcagcgatttatgtgtgcccaggggattcctgaacaaatggaggttcctgcaccgcctccgagttcccaaccagtcgaccctgttcaggcggtacaaccagctcaagctggaccaaatgctaaccctctcgacctctttccccaatctcttccgaatgattccgctaatgccaacacaggaaatcttgatgttttgcgtaataactcacagttccaaaacctacttggtttggttcaggctaaccctcaaattttgcagccattgcttcaagaattgaggaaacaaaatccccgggttatgcagctaatccaggaaaaccaagcagagtttatgcggttgattagtgagccactagagggagacgaagagaatgaaatgatgctggatcagatggcagatgcaactgagaccattgcagtcactccagaggagaatgaagctatacttcgtcttgaagggatgggctttgaccgggcactcgtcctggaagtgttcttcgcctgcaacaagaacgagcagctggccgccaactacctcttggatcacatgcacgagttcgacaacgatgacgggctcggagggcctccattgtga

SEQ ID NO: 25905 - DNA, 513 bp, Zea mays
  Peptide Sequence Number=SeqID_67684
atgtggtggggaggaattcacggccactggaaaagaagcaagggaatgccgactgccgggtggttgaggctgtcggtcgcaacgaagaaggctgggggcacgacggctgctactgtggtagcagggacggggaacggcaccgacgcaaccgtggtggaggtagcagaggcgtgccaagttgcggcctgggcgggcgcgggggagaagaccctggccgtcggagcagcacgaggggggggggggaggctggcttcccgtggggcgcggaccgcgcccgcaccaggggtgggaagccagcggaagagaccaaatggtgggtacaatatcaccacccgccatgatttcatcccagaagagccccgtagcttgaagggtattgtatggaagtgtaggtcttgtggtgatacacttctgaggttcacaaaccagggtcctccatctgatgcctgctgcattgagaacgatgacatcaatgcatcctgtgggaacatgctttgttattggcacaagtaa

SEQ ID NO: 25906 - DNA, 414 bp, Zea mays
  Peptide Sequence Number=SeqID_67685
atggccccccctgtgacgtggtcggtcccgagcccggggtcgggcgaggcagaggttccttccgaggtcgaggctgagtcccggggcccggggggtcgggcgaggcggaagacccgtctttccgaggttgaggtggagtccgagccctgggggtcgggcgaggcggaagaccgtcgtccgaggtcgaggctgagcccgagccctggggtcgggcaaggcggagatcgtcgtccgaggtcgaggctaagtccgagccctggggtcgggcgaggcgaagattgtcgtctgaggtcgaggctgagtccgagccctggggtcgggcgaggcggagtccgtcgtccggcgtcgaggttgagcccgagcactggggtcaggcgaggcggtgcttcctatggcgcccgaggctggacttag

SEQ ID NO: 25907 - DNA, 780 bp, Zea mays
  Peptide Sequence Number=SeqID_67686
atgggaacttggcgccaccactgccctgtaccctctgcaccgctgcaaaccatttacctggtcaggcatgcccagggcattcacaacgtcgcaggcgagaaggacttcggcgcctacatgtcacatgaactgttcgatgctcagctcacccctttgggttggaaccaagtcgatggtctgcgggagcatgtgaagaaaagtgggcttgcagagaagattgaattggttattacttcccctttactgaggactatgcaaactgcagttggggtctttggtggtgaaaagtatactgatggtgtaaatgcacctccactaatggttgaaaatgctggacacagtggacgtccagctgtttcaagtttgaactgccccccatttattgcagttgaaacctgcagagagcacttgatagagaatgatggagatgttctttgggaaccagatgtgagagaaacaaatgaggctgtcgcattgaggggtatgaagtttatggactggttgtggacaagagaagagaaagagatagctattgtcagtcacagtggtttcttgtttcacaccttaagcatgtacagcaaggagtgccatccaaccataagagacgaagttagcaagcactttgcaaactgcgagctacggtcgatggtgttggttgacagaagcatgcttgggtcatattcgtcaagattcaactatgctggcaagaatccaaccgggctagatgtgcctagtgatattgcagataagaagcaggttgatgaagctcagaagaactga

SEQ ID NO: 25908 - DNA, 816 bp, Zea mays
  Peptide Sequence Number=SeqID_67687
atggcgagcatagatggttgcattgagctgggccttgtgattctaatgttgttgcaaaaacgaaagggtgtgggtggatggttgggcggcatgcgcgttgatgctactatggttggaaatcgggcatggttcggagggcttttcagcggctcaggcaaaaggcgacaagtcagtgcagagaagatagtgcttgatctaacccctgtacaggaacagagactgcaaagtctgaaggaaaggctaaatgtaccttacgacgaaactcggacggatcatcaagattcgcttagggctctatggaatgcctcctttcccgatacagagctcactagcttagtttcggaacagtggaaagacatggggtggcagggcgtcaacccagcaactgatttcaggggctgtggatttgtttcgcttgagaaccttttgttttttgcaagaacgtatccggcttctttcaagagactgatgctgaagcagcaaggaatgcgaactacgtgggagtacccctttgcggtcgcaggtgtaaacatctcatacatgctgattcaactgttggagctcaactcagtgcgcccgaagtctttgccagggattaacttcatcaaagtgttgacagaacacgaggatgcattcgacgtgctgtactgcatagcgttcgagatgatggacgcccagtggctagcaatgcgagcctcgtacatgcagttcaaagaggtgctggaggccacaaggcagcagctcgagagggagctctccctggaggatctcaatagcatccatgacctccctgcctgcaaccttttgtacaaatag

SEQ ID NO: 25909 - DNA, 147 bp, Zea mays
  Peptide Sequence Number=SeqID_67688
atggctgcaatcatgaacaagagcactcatctggacatactgccttcgcctagggataattcagctgatagtggccaagaagatggaggctctcgggagtttgaattcaagcctcatctcagttctcaatcgtcgataggaccatag

SEQ ID NO: 25910 - DNA, 639 bp, Zea mays
  Peptide Sequence Number=SeqID_67689
atggatactaacttcattaattcttactttaccccctgcaccgtctcccgtgggatctccagcgcgttcatcggtggcagacgcaccccgtctctggcgccccgcgtcggcgccatttgtctcggctccttccccccatgctcttttgtgctctccttagattcacggccacttctcagacgcacccaaggtcccgccaccgacacaccggtcaaatccgagacgctatcccggtggcggtggcacaacgcgcacgcccaatgtggtgtattgcgacgggaattagggcccagcgggtgggatcttgggggtgataacagcgtgggaggaggtggaggagaagtttctttggagcagagatcgagggaggaggagggacgagagggccaagagaggggagagtgggagcaatggggcacggaccagtccaaaccaaaggatagcacgcgaagggagcagaaaaacgctggtgggattgcggcgaagatttcggggttggcctcgccatcgcagggattgtgggcgcgccttccttggagcattggcgagcattgtggtgccatggacgtcaaggggcagggtacgccatcaggggcgaggcttgcggggattgtgggcgcgtggatgaagtcgggttga

SEQ ID NO: 25911 - DNA, 267 bp, Zea mays
  Peptide Sequence Number=SeqID_67690
atggcgatgcggatggcggcggcggcagtggcgctggtggcggtgatgggcgtgctggcgccccgagcggcggcgcagacgccgaactgcgcggagaagctgatcccgtgctcgccgtacatgaacacgacggggacgccgccgggatacctgctgcggccccgctcaaggacgccgtccagaacgacctcaagtttttcccgcatccgggttaatggcggaatcagtttgccttctccgttcatgtggaaatcaactcggaagtga

SEQ ID NO: 25912 - DNA, 213 bp, Zea mays
  Peptide Sequence Number=SeqID_67691
atgcacccgagacgggaccggcatccgcgtcagcatcacggagacccgagaggcgcaggcgacggagttgcgagcacagagagcgacgcggaggagggcatcactggagatgcactcgagaggatcgagcccgacctggaggctctgggtcgagggaaggtcacggcaagcagtatttatggctggggcggaggggcaacaggagaatcgtag

SEQ ID NO: 25913 - DNA, 501 bp, Zea mays
  Peptide Sequence Number=SeqID_67692
atgacccagctgccttcaaagttcaaaaacaaaatgatggtggtgagggtggacgagaaccctgcgccggatggagagaactctcccctggacgatgagtacgtctcggccgacgatgagcacgttgacaatgaagacaaggagaccgatagcatcggcgactacgaaaaccccagtggggcgccccagttgaagaagggtccttggtcgcccgaagaggataagcgtcttaaagactacgtcgaggtacacggcgcggggaactggaataaggtgcagaagaatgccatgctcaaccgttgtggcaagagctgccgtctccgctggaccaaccacctcaggcccgatcttaagaaggatcctttcgacgctgaggaagaggaaaagataatcaagctttacatcaggtggggccccaagtggtccatgatggcctcatatgtaagtgttgcgctcgctgttctcctgcagtttcctgcttacttgctgcatttgcattga

SEQ ID NO: 25914 - DNA, 1359 bp, Zea mays
  Peptide Sequence Number=SeqID_67693
atggtgatcggccccggcggcggcagcggcagcggagcgaagaagcagagggcggatgagcaaggggacggatgcgaggcggtgggtgcggatgcggatccgatccctttggaccactcctcggtgctgcccaacgacctgcggtatctcatcctgacgcacctccccctcaagtacgccatccgcacgggggcgctctcgcgcgagtggcacggcctgtggaagcgccggtggtcgcaccgcgaccccgccgagggcgaggtgcacctccgccgaggtgccggctcgaggagagagctgcacaagtttgagcagcagcggcgaccgctccccccgatggaccgtttctccctcgtcgtcgagactgggctcaggtcctcggagctccggcgcttcatgaggtacgccgccgaccgccgcgtccaggacctccacgtcgagacacggaagagcatcaagaagaacgagaacctcaacttccacctgccgctgtcgagcccggccctcgtgcgcctctcgctccgccgcatcaacatctccaacatgtactacaggggcgcccagccgttccgcgctctcgaggtcatccagctctacctagtctgcattaatgtgtgcttcgcaaagatgatggggctgtgccccagcctgctcactctcgacctgcgaggctgcgtcgtcagatgcggcgctcaaagattgtttgtgccgccgaccgtcaggaatgtcaccgtcgcggagtgcggaggccagcacaatgccgataatctgagatttgctatccccaagaatttaccaggcctcaacgttctcaccatctgttccaatgccctccaggttgcatcatattccttgccaatgccaaatgacggtgccccgttccctactcgcaacttacgcagtttgagagaacttcaactgctcatgttagacatggaagctgtcaacctagctgacctcttcgtgttcctcaagacctgccgatgtcctaatctggagaggatctttgtgcagctcccggccttcagtcatgtgcccgtgaaaggtcccattgatgaggtgatggaagagccatctcaggatggctatggttttgacaaccttgtgatggtgaaggtcatgaacttcaattggcgccctaccgaggtgcagctattgggttttttgttgaggagagctagccccctatgtgaactattgatagtttctaataatgccatgcctctgaatttgtctggtgtaccagacgaagatcttacgcttctactagatggtatcgacaatggcaagataacggtgaggaagtctgacgatgctgaaattcagccatgtcattcagaggactttatcaagttctag

SEQ ID NO: 25915 - DNA, 714 bp, Zea mays
  Peptide Sequence Number=SeqID_67694
atggactgtgaaactcctggagaatcacatggcaagaaacggtcaaatgagtgctcaaaagaaaaggttgttgatgtgcaagaacttgtggatgagttaattgtatttgagcaccttgactatgctttctgtgcccctgaacatgaggcctgttctgaaactcaagctccagacttatgttcaggttcagatgctgttttcgaccccagccagtgttatccagttgctagtttttctgatcttgggatctcggatacactactaacaaaaggtctcttgaatgatatagcactagcaagtttgttgaatgttaatttgaaggaccagtcacatatcaacaggcaggaacctaccaatgatacatcactaggaggagcaagtttcttgaatgctaatttgaaggaccagtcacatctcaactggcaggaacatatgaatgagacatcaccagtagcaggtttattgaatgctaatttggaggagcagtcacatctcaactggcaggaacctaagaatgagtcatcaccagaagcaggtttcttgaatgctaatttggaggagcagtcacatctcaactggcccttgcaggaatacttgagatttggaggcggcaccgacttgtgcaattgtgttcctggacctggaactggaggccactggacgctgatcgccggcgaacgggcgaggcaaggccacaacgaggagtgtggctag

SEQ ID NO: 25916 - DNA, 213 bp, Zea mays
  Peptide Sequence Number=SeqID_67695
atggcaagctcgtctggtggcgcggttgttgcggccatgatgggcatctcgacgagttggcttaagccaaggaaggtggagcacaacatcgttgctgcggccgtgatgcacatctcgacaaggtggctcaaggcattagttgagctaacaaagcagctttgcttggtggaacaaaggttgagttgccacccggaggctttggacaatccataa

SEQ ID NO: 25917 - DNA, 719 bp, Zea mays
  Peptide Sequence Number=SeqID_67696
atggagttgctgttggagaaagagaaggaatcgctcgcagaagttaagaaacaaaatgtgcaggatatgaaattacatctggacacacaaccaacaagccctgcgacaacatcggctcaggtcctacctgatccgcaatacgttcgtcgctcgacgaggttgcttcgtgaccatggcaaggaccttcatcggtggtcgctgcacccgcgcaggggccacgctaccgccacgccggttcgagcactggggctgagaccgcaccggtgctccgcctggtttggaggcgccgtgtcgaggccgcgtgcccgcgctgtggtcacgtgccgtgtccgcgcccgggccgggccgcgcgggttgcctcgacgccgggaccacgcccgtgcgtgcgcgccgctaggggcatgctcgttcgagccgccagggccgggggcacgcccgtgcgtgccgcggggagccgcgctccacgcgtgccggggccgcagtgccgcacccaaaccgaggtcgggctgccgcgctcgcgatgatgggacggccgcgcacgaccgccgtgctgggcgtgtcatgctcgtctcgcctccatcgcgccgaggccgcgcgcccatggccacacatatcccgcgccgccaccggacagccgtgcccgcaccagaccttaggggccgcgcttgcccctcgtgcgcacgagccatttctggcaggggggtctccgtgccgccggg

SEQ ID NO: 25918 - DNA, 291 bp, Zea mays
  Peptide Sequence Number=SeqID_67697
atggcccagtggtcttatgtcaggcccatcccgcaagcttacgtcatgcacagtaggccgcttggctgcaccagatcttcgcctggctacattgtgtggacagggtgcaaggggaacccttccttgaaaaaggggttccccccgggtgcagcgggcactggaggagcaggtccgcaggctgctcaggcgacgcagacggccccaggcccccaggcggtggaggtgatgaggaagacactcgacgacctccgggctgagcaacgtgccgaggcccaacgcatcgccacctag

SEQ ID NO: 25919 - DNA, 2796 bp, Zea mays
  Peptide Sequence Number=SeqID_67698
atggcggcggcgtgggcccgcgcgaagcgcgcactcgccaccggcctctgcgtcggcgtgcccgcgcgccagctggccatcgaggacgcgccgccggtggtggaggcgccgtcttcggtggccgaggacaagctggagtccgcccccgtgtccgtgcgtcggctgacgagctttgggagccggagctcgcagcagggcatcttatttgaccctcaactgctaggaaaagtaaaacttgcaactagaggatattccgatatgtactcgtggggcaaacagaagacatgtgccatttgccttggtggcatgagatcagggcagggtcatgccttgttcactgctgaatgctcccacaagttccattttcattgcatttcttcaaatatcaagcatggcaacctcatctgcccgatatgccgtgctaagtggaaagaactcccaggcgctcaacctgcagatgccagttatggacgagctagagttaacccattaaattggccccaggatgaagggcacatggctgttgtccgcaggctttcccatacatacagcggaaacctgcaggagcaccttcctttcttccgtactctggaggcaggcgttttcaatgatgatgagcacatagatcttcagtctgataatatcagtgaacataatgcagtcgctggttcagttaaaatcaaggcatattcagaagttccagctattgaacaatcaacgaccaaggagatctttgctatcttgatccatctcagggctccaaaatcttcacactcagcgagctcccgtgcacctcttgacctcgtcaccgtgcttgatgtcagtggtagcatggcagggaccaaaattgcacttctgaagaatgccatgagctttgtcatccaaacccttggacccaacgaccgcctgtctgtcgttgctttctcatctacagcacgcagactcttccctcttcggcgaatgacattatctggcaggcagcaagcattgcaagctgtcagttcccttgttgcaagtggtggcacaaacattgctgatgggctaaagaaggctgctaaagtgattgaggaccgtcggttgaagaattctgtttgcagtatcattcttctctctgacggtcaagacacatatacactcccttctgacaggaatctgcaagattacagtgccgttgtcccaccttcaatccttcctggaacatgccagcatgtacagatccacacctttggtttcggctcagatcatgattctgctgccatgcatgctattgctgagatctccagtggcacattttcattcatcgatgctgaaggctcaatccaagatggatttgcccagtgtattggtggccttcttagtgttgtggttaaggaggtgaggttgggcattgagtgtgtcgacaatggtgtgctactgacttccatcaagtctggcgggtatacaagtcaagttgctgaagatggacgcggcggttcagttgatatcggtgatctgtatgcagatgaagagagggggtttctggtcactctacatgtcccagctgcacagggacagactgtgctgatcaaaccaagctgcatgtatcatgacgctatcactacggagaacatcgaagtacatggtgaggaagtaaggattcagcgccctgaacatcgcgtggactgcaaaatgtctcctgaggttgagcgtgagtggcaccgtgttcaggccacagaggacatgtctgccgcacgggctgcagcggaggtaggtgctttctctcaggccgtggcaatcctggaagcccgtaggaggatactggaagcacaagcagcacaatcttcagacgaccagttcctggcattgatggcggagctgagggagatgcagcagagagtggagaaccggcggaggtacgaggagtcaggcagagctttcatgctggcaggcctgagctcacactcatggcagagagcaactgcacgaggggactcaacagagatcactaccactattcatacctaccagacgccatccatggttgacatgctgcagcgctctcagatcctcgtgccacccattgctgacatgctgaacagctccccaactgtggcgcctccaaatagattcagccggccatccagacagtgggatgagtcggttgaggcggaaaaccatgtagacagtgggatcaacaagtccattgatcatattgaacacgcaaaacccaagattcatgcaaaggggggttcgccgtggcgcggtccattgccaaaaccaagagtgtctaagatgactttcgcggcggcgttggacaaagcgatccatgtcgatccgtgttctcgtgaaagaagcaagtctgcatcgcggtttctcgagcgagttcatccatttagcgcgttcaccggcggagttgtcagagatacgacacagtctctttcaaatttcgaaaatcagaaggttcgaagctgtaagaacgttgggccgttttcgccttttctgaggcgtgattactggagaagcgcgttcactggcgattgtgttggagatacgaaggaggctctctcaaaattcgaaaaccaaaaggttgggcactataagaatattgggccgaaaccaggggcacaaagcctcaaactaggcatggaatgggatgagaagtaccctttatccacattggtagcccttagtagagatgtctcggatcatactcctcttcttttgcacatgggtgaaacgagaaagggtaatcagaatagtcctttcaaattggagttaggatggttgttgcgggatggtttttatgatatggtgaag

SEQ ID NO: 25920 - DNA, 378 bp, Zea mays
  Peptide Sequence Number=SeqID_67699
atgcccccagatccagagccgtgctgcctgagggacggcaggtggcggactggcggccgaggaagcgagtacagacggccacggcccagaaggagggcaggccacaggccacaagcgctaccaaaaggaggagaaggcacgggcgtcagtgacgagcataacaaggacaaggcagagggggtgggcaacaagcgtgtctgggagaaggcagaggccacaggagacacaagcgagcaaatgcgagtgtggctggaactgagaagaggtgaatggataaggttggagtgggcaaggtgccaagggttaagacatagctttagtataaggccatactttgatgagttgaagaatgagctaactaatgcataccctggttga

SEQ ID NO: 25921 - DNA, 417 bp, Zea mays
  Peptide Sequence Number=SeqID_67700
atgggggttattgtgcttgggcttttcacggtcatcggcatattctacagtgtcctggtcgcgacaatggttggccagcggatctggcagcggcattatcacattcttgcaaaacgaatgctaaccaaggtgagtgtgagcgctaccgtgtattcattatcacattctgtctcacctagagatggcaatgggtacccgcgacccgatacccgatgggtatttactccattaggtgctatcctagagttactactttatgcaattatctttggtgtgttgaatggatggttaaatgatgctagaaattttgtaatggagtatgtcgtagaggatgtcgatggcgagcgcacagactggtgtccgccgccgctccctgcagagcacatcagccagctgaggtctctggggcttctataa

SEQ ID NO: 25922 - DNA, 342 bp, Zea mays
  Peptide Sequence Number=SeqID_67701
atggaaactgtagtaatgtatggacactttgctagttctagtaataagttcctaagaacgatgatgtatgcacgtaaaataggtggaaaatcaggcttccaggagacggaacaacaagtaatccgaatactggaactgatgcaaatggcaagcgaaggatacagcaaggcggacaggatgagtcctgagccgccttcacttgcatctgcctcgggcggtggaattggtgcgtccggtgcccggaagcttttattatacccaccaatgatttccgctgcagagattattcgtagtgctgaagtttctttgatactaaccatagaaaccttcgacaccatgtag

SEQ ID NO: 25923 - DNA, 324 bp, Zea mays
  Peptide Sequence Number=SeqID_67702
atgcctccgacactgatggccttggggctgcatcaaattcccatgtgtgtgttcgcatgggcgcttggaatcgagtgcgacagtgggtcgaggaatcctctcaccgttggcggaactccgccgcgggcactgtacgtatcgaccctccgcgcgcatggtctccacgaggtggtggccgatgactgccgcagcctcactggtgccacgctcgctgtcctcgctgcgtggaatggggaacctcgggtcgatgccgactgctcaccaaagatcaacgtcgctgcggatccactgcgcgctgtggccatctcgcatcatcgtccctaa

SEQ ID NO: 25924 - DNA, 252 bp, Zea mays
  Peptide Sequence Number=SeqID_67703
atggaggagaaggcgtcgtcgccgctggttccgccgccgtcggagatcgacctcgaggcgggcggcggcggggagcagctccagtgccggatctgcctcgagaccgacgggagggacttcatcgcgccctgcaagtgcaaggggacgtccaagtacgtgcaccgcgactgcctcgaccactggagggcggtgaaggcttacagcccccctgtgcgggtggacgctcaggaactgttagatgatgtcacttag

SEQ ID NO: 25925 - DNA, 1269 bp, Zea mays
  Peptide Sequence Number=SeqID_67704
atgcccttggctgcgtccgcccctgcaagtggtttcctgctggtctgtgtggatttggctgccggaagattgattgatgcggccttcaggatcactgtagactcgctgaactgtgtgattgggagcctgcaggtggcgcgggcgcagaaggggggacatgtggagggtctggtgaattgttgtcatagcaagaagaagaagaagaataggactggcagtggtttgtgggattctgcaaccaaatcctgggcttctggcatggggggtgatgatgagaacagtgaggccaacatgagtgagctcatcggcaggatcggccgggagttggccatctcgtgcctgctccgtcttccccggtctgggaacctatacaggctgaggcgggcggtggggattgccgagcagatgatctattgctcgtgcaacgttctcgagtgggaaggtttcgacccgtgccgccagcggtggttcggcatcccttccatgcctcccatagagtgcttcatgctcgctgacaaggaatccctggccgtgggcaccagtatcctcgtcttcgggaagagggtggaatcccatgttgtgctgaggtatagccttctaactaactcctggaccacaggagagatgatgaacacgccgaggtgcttgtttggctcggcaagcttcggtgagaaggctattgtggctggtggtatcggccagagtggtccgttgagctctgccgagctttatgattctgagatgcagacatggactaccctaccgagcatgagcagggcgcggcagatgtgctctggtttcttcatggacggcaagttctacgtcattggtgggaaagctgagaggcacaacgaggtccttagctgtgctgaggagtttgatttggagaatggctcctggcacttgatcccggacatggcgcagggccttaatgggggaagcggtgctccgcctcttgttgctgttgtgaataatgagctttatgctgctgactatgcaaccaaggaggttaggaagtatgacaaggaaaataatgcatggatcactcttggactgttacctgggaggtatacatcagttcatggctggggcattgcttttcgtagttgtggagatatgctcattgtaattggcgcgatgagtgctggtggtagcggggtgattgaaatttgttcctgggtacccaataatgaacagccagattggaagatcattggcacccgccgttctggaagctttgtgtacaattgtgccgtgatgagttgttga

SEQ ID NO: 25926 - DNA, 327 bp, Zea mays
  Peptide Sequence Number=SeqID_67705
atgaaggggaactcatcaaaagggaggaactcaagtcccaaaggcgtcttcaacctcatctacaactacaacaagtatccacctcagtccgaaggtaggagacaggctctagagcctggtccttcaatcaagatgacatcctacttgccttctagcaagctcggccagggtgatctcaccaacatctggcgcaaggtggagaagcgacgcctcaagcggtttgccattgatctgaagcagcgccttaacagacacactgctgccatcaagcaaggggcgacaaaggcctcacctatggcattcaaggttgatccctgtgggggatag

SEQ ID NO: 25927 - DNA, 204 bp, Zea mays
  Peptide Sequence Number=SeqID_67706
atgggaaagcaagagaatatgactgaaattcagcaaagctcagctcataaggcctcatcgtttgtggatttcgcagggaagaaggctaagtatgtcagccgctaccgtattaccgattcatattcattagatgctgcaatggaggcaactgacgaccaacgtcaaatctctgttggtgtggtgttttgtgaccgttgggcatga

SEQ ID NO: 25928 - DNA, 888 bp, Zea mays
  Peptide Sequence Number=SeqID_67707
atggaggcttatagctttgctacaaattttgcatctgttttaatggaagaagactatgtttttttattgttcccactatcattgaagcctaacataagtttattattgtgctggataaaaaatcaggttgacacattgctagacagtgtgaagtgggacagcaaagggttggctgttgccattgcacaaaatgtggatactggagccattcttatgcagggttttgctaataaagaagcccttgcaaaaactatatcaaccaggaaagccacattctttagccgttcacggtcttccttgtggacgaaaggggagacatccatgaacttcattaatgtgcatgacattttcctagactgtgaccatgactctataatataccttggaaagccagatggacctacctgccatacaggagcagaaacgtgttattatacttcagtttatgatgctctacaaagttcaaagcccaatgaaggcaggcaggttatgacaaccctatactcacttgaagatacaattagtagacgccacgaggagaaagttactgatggaggtggcaagccatcatggacgaaaaagctactccttgataaccagctactttgctcgaaaatacggattaaaaaggttcaaccgttcaacatgacatttccctcggctttaagtgtttatgacagaagtagtgaagaagctggtgagctaattcaaacgctgcttgagaacgaggaccaatctcgtgcagcttcggagatggctgatctgctgtaccacgctatggtgctgctcagagtcaaggatgtaaagatggaacaagtccttgaggtcctgaggaagagattttcgcagtctggtatcgaggagaaggccagtcgcaataaatcttag

SEQ ID NO: 25929 - DNA, 255 bp, Zea mays
  Peptide Sequence Number=SeqID_67708
atgcccgccgccatcgctgctcggtgcgcctgtctgctgctcgcggtccggctcagttgctgcgacgtcgagctcaagcagccgcggggggattcaccatcgcacgccaagcgggcgtaccgtacacacgaagaaccgacgtggttggctcctcaccaggtcggagctccatcgccgattagtgctgctgccagaacctctggatcggtagacaggaaggcgtggtcggctttgaaccgtaggatagagatctga

SEQ ID NO: 25930 - DNA, 192 bp, Zea mays
  Peptide Sequence Number=SeqID_67709
atgggccgaatcgtaggcgggcctccattctggacgaggtcgcaagatgagccgacctcgtcacaggtcttcgtccggtggccgagtacgtcggaggcctcgagcgaagggtggcgtcttcgccttcgccccaacatttgccctccgagggaccagttcgacaaagtcatctggtgccgaagacgtcgctag

SEQ ID NO: 25931 - DNA, 501 bp, Zea mays
  Peptide Sequence Number=SeqID_67710
atgtcgaccacggcgagcagaggagcgcgcatgtccgaagctgagctggggcgagcgcgaccgttgtcgccggtgaggagtcgagcagtcgggcgtgacttccatggaagcagggacagagacgctcggcgaacaaaggaagggacgcacgcaatcgtgagccggaggcagaacgccggccagggcggactgagaaattcggccgagcgctacgagcagaggaaggaatgcgctggcaagcacatggcggccatggggacgagcttgaccatgggcgcgaccgacgagccgaagccgagcgcgaggaagaacgaaggagacgaggacgcgccagtcagggagcatccgcgagcagggagatggagctcgaggacgcgactgccatgggcgaggaacgagccgagggagctgggcgcagtgcagtggagctccggcacggcggctgagcaagagagagcagagcagagggcgagcaggacaccgtggtggagtgttgcgtag

SEQ ID NO: 25932 - DNA, 363 bp, Zea mays
  Peptide Sequence Number=SeqID_67711
atggccatgatgggttcaacatcggaaaagatgtacctctgccaggtaagaaagaagataccgaacttgtcaagtggttcaggggcacctacagggttgtctgaggatccccgagcggtggcccgtgaatttgagatggcacggtggcggtcggagagtgaggagagcactgtcgcaagagattggtggctttcaccgttgtgggctcaccggcgatcaccggacgtgtgtaatatgagctactgcgacgtggcgggcacggcggccggagcggaacagtggcctgagttcatcaacgatgtgatatttcatacccttaagagttatctgcaccccacagagcacgaatcgcaacggcgatga

SEQ ID NO: 25933 - DNA, 360 bp, Zea mays
  Peptide Sequence Number=SeqID_67712
atgggctccatttatacccggaggggcagcccacgcgtcggtggtcagaacaatcgagcgtgcggcaaggatggagtccgcgcagtggcgcacgaccgggcaacgccgaattcgtcgcggtttgttgcagtggcccaacaggagatgaacctgacaactagggcccacacaccaatgaaagcgacaagcgcaggcgttgtggccacgatggcgcgagggtctggcatcacaggcccaccaactagtgagaaagactcagtcactcacgcggtggaagactgggcagtggccccatttgtcagcctccgcagacggcgccctgcgcgtgaccagagctggcaagtggggtcagagacctag

SEQ ID NO: 25934 - DNA, 1287 bp, Zea mays
  Peptide Sequence Number=SeqID_67713
atggctgcttccacaaacaacactctcagggtgctgttcaccctaatggttgtatgcgccgcagtatgcacagcgaaaaggactgtagcaaaggcaggagacttggcgccagcccctgctccgttaggagcaggaggcgccaccgcagccccagaaggtgcggctagagccagcaggacgttcgacatatcgaagttcggcgcgaccagcgacggcaagacggactcgacacaggcagtccaggacacgtggacgtcagcgtgcggagcgatgggagacgcaacgatgctcatccccaagggcgactacctggtgggccctctctacttcagtggcccgtgcatgggggacatcaccatccagctcgatggcatcctgctgggatccaacgacctggccaagtacacggcgagttggatccaggtgtcgcacgttaacaacatcgtcatcaacggctccggcacgctcgatggccagggcaccgcagtatataccaagagcaagaccgacgtcgtcaaggcgatgcccaacacactagtgttgttctacgtgaccaacggcactgtttccggaattaaactactcaactccaaattcttccacatcaacatcgacacttctaaggacatcaccgtgaaggatgtgaacatcacggcgcccgcggacgtcgagaacacggacggcgtccatgtcggcgggtcctccaatgtacgcatcaccaactcgaccattggcaccggcgacgactgcgtctccatcggccccgggagcgacggtgtcatggtgaacaacatcacctgtggccccgggcagggcatcagtgtgggctgcctaggccgctacaaggatgagaaggacgtgagcgacgtgacggtgcgggattgcgtgcttaggaacaccaccaacggcgtgcgcatcaagtcgtacgaggatgccgagtctgtgctcacggcgtcccatctcaccttcgagaacatcaggatggaggaggtggccaaccccatcatcatcgaccagtacttctgcccccagaaggtctgccccggcaagcgaagcaactcctcgcatgtctccatcaagaacgtcaccttccgcaacatctccggcacgtcgtccacgcccgaagccgtcagcctgctctgctccgagacgcagccgtgcagcggcgtctcgctcatcgatgtcaacgtcgagtacgccggcaagaacaacaagaccatggctgtgtgcagcaacgccaagggaaccgccaagggaagcctccaggccctggattgcctcgtctga

SEQ ID NO: 25935 - DNA, 135 bp, Zea mays
  Peptide Sequence Number=SeqID_67714
atggagacgagcagtcggcgcgggggctgggagaatcgcggctgcgcgcagctggaggagcagatcgcgctcccatggacaacctcgccggagctcggtccgtcgccgttcgctgtcaaggaccgcgggctgtga

SEQ ID NO: 25936 - DNA, 924 bp, Zea mays
  Peptide Sequence Number=SeqID_67715
atgggagagagggcaaactttctcaagggagaagtgcgcaagaagtttgaggctgcggccatgagcgccatcgacgcggcgatgctggtggacgcagttgtacacctcggcatagatcactgtttccgtgaggagatcgccacagctttaagatctgtccacgaagacgaagagggggagtttggcagctgtgacgacctccatactgtcgctgttcggttcctcgtactcaggcaacatggcctctgggtgtccgcagatgtgttcgacaagttccgggatgataagggtagtttcagcaagagtctactatgcagcaacccgagggggctcctgagtttgtataacgcagcccacatggcggtgacccctgaagagaaggtccttgatgacgccatcgcctttgctaggagccaccttgttgaggccatgattggtgagctcaggtcgccgatggtggagcaggtgtctcgcagctttgacatccctcttccccgcttctcacggcgactagagagcatgcactacattgctgagtacgggcaggaggaggagggacatgatgctcagatcctcgagctcgccaggctagaatttgagctggttaggtcgctccatctcagagagcttagagaaatctgcaggagaggaggcctttgcgtcatcgccaacatgacagagattgcatggaggaagatcaaccaggcgtgcatggagatggaccccgccatgctgcccggcgttcaaggttgccgtggtcgacctgtcaagatccatagagatcatatacctcgggggcaagagggacgcctacaccttcggcagcaacctcaaggacctcgttacctccctgttcctcaagccgtgtgcctgacaagatccacgacctgctttggcgttcaagctacgatacgtactgtgtaa

SEQ ID NO: 25937 - DNA, 372 bp, Zea mays
  Peptide Sequence Number=SeqID_67716
atgcagctaactattagctctagtgcattcaagcagtgtctaaaggtatgcccaagtattggggcaattggcattagcaatgagaatgagaatgcaaatgaagggagggaaaatggtaaggtaaaggggaaggggaacatgaacttactcatctatgttactacagatcttgatccaagatacaagctatctaattacaacaagttagaaattggggaaatgtttgacaaggaaaaagaagaaaaaggttggggttcagtgaggcaatgtttctatgatttgtttgaagaatatagaagcatgtatgctccaaatgatgatttaacttcagaagtcaatgaagatcaaactcaaaaagaggaggaagaatga

SEQ ID NO: 25938 - DNA, 554 bp, Zea mays
  Peptide Sequence Number=SeqID_67717
ggcttggccgccaggatcacaacaatggcgtgtggagggaccgtgggtcgcctcacgctaggtttggtcacaccgtcgtcaagctctcaatgtttggctggggacatccgtcggtggtggccgaaggttatggtgccctcaccgtgcggattgcggtcggagcagcgggaattcctccctggagtcacaccgccaccacgaaatcgcgtgcggtcatggccagtggtcttcgtcgtgtcagccgtaggtatgtaacctctctaatgttcactaaagtatctgcatcgtgcaacattggttggggagggaagaagcacaccgtcgtagcagaggcgctgcacaccggtagagctctaccttgggctcacacgcgcatcgccaccgcgactagcatcgcgctggaggaagaagacgcgcttgggaccgtcgtctctaatggagtggccaagattagatcctacccagagagtaaacaaacaggatgttgggggccttcggcttccgaaggtcctcaaaaacaggatttaacagtgtttctggagtataatgtgtga

SEQ ID NO: 25939 - DNA, 852 bp, Zea mays
  Peptide Sequence Number=SeqID_67718
atggaggtgccgtggctgctgctggtgcacgggtcagtgacggcgctggtggtggtgtcgttcctctgcgggcaatggcccatcttcgagggcaccttcatccagagcatcaaccacttcctcacctttggggcctaccactacctcctgcggtttgtgcagtctgtgtgcggcactggggctagggatctcgtcctcggtgtcgagggatactgctgcgaccgacccaacccgatattgcagctccaatgctcggttgactacttgactctgcaaacgaggagttttttcaaggaccagaatgtggacgatcaagtattttatgttgccataattggagtgacatattttataatagtgcagacatctttccagtatattcctgggtattatgtgagtggattgcacagatatctgagtgttgtggctgtttctgttggtgctatactcttcgtgcttactagcttttctgatcctgggactgttactgctgaaaatgtttctcaatacgtatcttcctacccatatgacaacattatttttgtggagaaagaatgttcaacttgcaagattactaggccagccagggcaaagcactgtagaatatgtgacaagtgtgttgctcgattcgatcaccattgtggatggatgaataattgcattggggagaaaaatattcggtattttgtggcctttttagtttggcatttccttatatgtctgtacggggctttaatccttggcttcattcttgctggtgaaataaaagagcggaaaattatatacattctgacagggtttttgaggatcttcggcaatagagtcccccaacaacgattatcagtgagatag

SEQ ID NO: 25940 - DNA, 447 bp, Zea mays
  Peptide Sequence Number=SeqID_67719
atggtgggcaggaggagatggggaggagcagaggaggaggtgaagcttaacatcgacaacgtgttcgtggagcttgagtccctcaagaagaagggcaacaaggcagggcggtcaggccgacctccaggaagaagcatagtgcagggcccgtgcagcagcagtagcaggaaccgcctcagaaggaggtcttctgggctcccgcaccactcactaccgacgccctctctcgtggccttccccgccaacgacgatgactcgctcgacaacccggatctggggcccttcctcctcaaccaagcgcgtgacaccatggtattgtgcgagggcggcggcaccactcactacctcgtgacgccggtgcaagaactgtctgccaactgcgaggctaaggctggtgcagccggcggcggcgatgaccagcaactgcagcctgtcgagcccgactag

SEQ ID NO: 25941 - DNA, 531 bp, Zea mays
  Peptide Sequence Number=SeqID_67720
atgaagaggcttaaactcagcgcgaagaccagtcaagaagtcataggtagattgaccaaatggctcatagcgctgacgaaggaaggtccatatttgagaagcatgatcaagctggacaacatttgcatccagacgctcatccgtgctagcaacaagaacagccccaacacgggcatcctcatccaactatgcgcaacaggccctaaaatgagacaaatgaggccagatcatcatcataagcttccagcaacttcttttggtcagctttggagatggttgaatgggtgctccattgctaagcttgcacctgaagtgctttcaaaggtggacaaaaaggttgcctctaccagaacaatggatcgagctatgaatgacatgttgtgggttatggttggacatcaaatcaatccttcctctgataggtatacaacaatatcttgttctttgggacactatgggagagattgtgctcactcaacaagaagatcatcacgtgtggaggcatgggacttcgggtattttctcttctaa

SEQ ID NO: 25942 - DNA, 852 bp, Zea mays
  Peptide Sequence Number=SeqID_67721
atgcaccagcagatgtgtctcgccgacgccaagcgctctctcgagatcgtagtatacgaccgtgccttcgccgagtcccagcagcgcgccaacaagcgggcgcgtcaggacgaggccgccgccaagtcgtcgtcatcgttgccggaggaggcgatggcgtcagcaacatcgtcgtcccgccctcgctacggccgccaccgccggctgccggcggccgagaagagccgccatgcctgcgcaggcatttcctcgaggcgctgggggctccgcgccgacctgccggtgcacttcatacacgacaagcgcatgtcgaaaaccgatctcgatgggcaccagagccggttccgcatcccgcgggacggtgtcgagcgccaccttcggccaatcctaagcccccaagagctcgacgccgccaacctcctggaggggccgaggaggcggccgaggcggcaggagcctggaccgtcagagccgcaggatggcaacaacagaaggaagacatctaagaagaaggggaaggcgcacggcgggctgcccgtgatgcttgtggacctcaacgccggcgccaaggagctgcggctgtcacgttgggatagcagccagggcacgatcgtcaagggagaggggtacctccaattcatgcgcccctgtacattcaaggaaggcgacgacgtcgcgatttgggccttgtgcagcggcggttccgcctcttcggcgtggacatgtgcaacgacagcctactgcacttcctcgtcgtcaagaaacaagacgaaggcccggtgccgtgtctgtcgtgcccctgcgcagcccgagagtttagttagttcttttttttttcgtagacttagttag

SEQ ID NO: 25943 - DNA, 366 bp, Zea mays
  Peptide Sequence Number=SeqID_67722
atggtagatattcccagggcagtgttcgccacgccatgtagcgctttcagccaggacatagacacatcgggggaggatacttctattaatgccagaaaacaaggaaattccaggggaagggcgtctacagggcgccttcaagaatctcttagaaggaaaagcagttcgaggaaaagagaaatcaaaatcctgaagaagagcacatcattccgagcatcatcattgtcattccaacgcatgggggaagcgtcggtccctaccgagcgcaatcgggacgaggcgggtgccgcgaaggatcgcctaagcaaggtccatcaccatttagaccatagagcctgcctcgttgagaaggggccccgaggctaa

SEQ ID NO: 25944 - DNA, 117 bp, Zea mays
  Peptide Sequence Number=SeqID_67723
atgaaggcttgtgttggctcattcaatgatagtgtggtgatgacaaaggatcacatggatgaggatcctatagggacatgctcttttgaacgtctgtgcacgctgatatcgagataa

SEQ ID NO: 25945 - DNA, 1266 bp, Zea mays
  Peptide Sequence Number=SeqID_67724
atgccttggtggggcagaagaggaagagggcggcgtcggccgtcgcccggtgagtgcgcctgctgcgagcgcaggaagcggcctgccgacgggccgggactacctggacgcactccccgacgacctcgtcctctccatcctgaccaaggtccgcggcccgactcctcggcgcccgccgacctgctctccgtccacctcacgtacgtctgcccgggcaccactcgcttttcatcaactcctcgtgttccatcggatggcgaacgctccctctccctccacgtcgcgtggggggagagttcgaagcagttttgcggtttacggaaaacgttagggataaggcggatgccaaggatcgggcgctttgctgatgtcttgggcgtgtgcaggtgcaagaggctcaacgagctgggcagtcacgacatggtgttcgccaaggcctcgccggcgtcgctgtccgtgaaggcggcggcgtggtccgaggcagcgcagaggttcctcaagcgctccgccgacgccggcaacctcgaggcctgctacattctcggcatgatccgattctactgcttgggcagccgcagcggcggcgcggcgctgctggcgaaggcggccgtcggcgggcacgcggcggcgctctactcgctggccgtcatccagttcaacggcagcggcggcgccaagtcggaccgcgacctccgcgcgggcgcggcgctgtgcgcgcgcgcggccgcgctgggccacgtggacgcgctccgcgagctcgggcactgcctgcaggacggctacggcgtgcggcgggaccccgccgagggccgccgcctcctggtgtcggcgaacgcccgcgagctcaccctcgcgctctccgcggccgcctcgcgccacgccgcgggcgtcgtcgtcggaggcggcggcggcggcgggtgccctctcctgtccgacttcgggtggagcctccccgaggcggagccccacgcggcgaaccagtttcatggtggactggtggcgggcgggaagataaccggcgagagcggcgtggacggcgacggcgcggagctccggctgtgctcccacgtgcggtgcgggcggcgcgagacgcggcggcacgagttccggcggtgctccgtgtgcggcgcggccaactactgctcccgcgcgtgccaggcgctggactggaagcgcgcgcacaaggtgcagtgcgtgcccgtggaccgctggctacttggcgccgtcggcgacgctcaggatcagcagcagcagcagccgcagtga

SEQ ID NO: 25946 - DNA, 861 bp, Zea mays
  Peptide Sequence Number=SeqID_67725
atggagctggagaaggtccatgcctgctcccccccctccttctcaggggcagataatcagattccagattcatcatcccggtttcaaaatatccgagagagcgagccgcgaaggtttcatctgctcgaggagttcgacgaggtgaagcgaagctgcaggaagcgcctcgacggacacaaccggcgccgccgcaagccgcagccggaccctctcagccctgccggcttgtttggcgatcaccaccatggaggagtgacaaggttcacatcgtacccacaccgcttcaccacatccatcgcaaagcccgaatggggggcggtcgtcaagacggagaccgacgcgttccaagaccagtactaccctgccgtccacctcaacggcgccggcgccggcgccctcttccacgacaaggaccggaagcacctcccattcctgaccaaccacaacaatggatgccagccattcaccgtcaccacgacggcttcctcagagagcagcagcaagcacagcaacggcaactgtgctctctctcttctgtcagacaacccgacaccagcacaggcacagacggccacgatccctaccgcgcagcccctcgtcgccacggcatcgcagtacggcaggctccctggcggcgacgacgacgacgtctccctcgccgggatgtcgtacatgagggtgggagacagccggcaggcttccaatctgacaacgtcctcacccggtcctgccactgcagctgcaacacagcagcacctgcagtaccaccatggctactactaccatgtgagcggtggcgagcagggcaacaacagcccagatggcgccgccattcaggccctccccttctcgtcgtggtag

SEQ ID NO: 25947 - DNA, 204 bp, Zea mays
  Peptide Sequence Number=SeqID_67726
atggccatgtgggagaatgatagtccaatgaagtttgttacggatgcaaagattcttcgaaggaactttattatcgaactgttaagttatgaggaaaattcgtgcagatatgctatcccggcaaatatccaacagagagttaacaatattgttaaaaaagattatattagtgtacaaggtgtcaacatatttacttatgattaa

SEQ ID NO: 25948 - DNA, 480 bp, Zea mays
  Peptide Sequence Number=SeqID_67727
atgctcctcctcctcctcctcatccttcagcaactgtctgcggctgcggttgcagggatggccaccaccaagcttgggttgtctgacgtggtaaccgacacctgcgacagatgcagcaagagcaatccacaggtgaactacaccctctgcgtctcgtctctgtcgtcggaccccgagagcaggcaggcggacctccacggtctcgccatcatctcggccaagctgctgaggtcaggcgcggtggccatggaggccaagatggcggacctcagcaggaaggagcgcccatggtccccccggaggtcctgcctggacgcctgcgtcggggtgtaccgcaactccctctacgacctcggcagctccatcgtagccatccaggagaggaggtacgcggacgccaagacgtccatgagcgccgcggtggatgcgcccgtcacctgcgaggatgagttcaaggagcagggctggagccacccatga

SEQ ID NO: 25949 - DNA, 372 bp, Zea mays
  Peptide Sequence Number=SeqID_67728
atgcaggcggcatgcaactgcaccaaggggatgcaccctttcgacttcgacgcatccagcatggaggcccaggtccacacgtcatgtaaccggtgtgccggttactacgtgcaagaaactgcaccgccacttgcgccagtaccgcgcctcctcgactgcggaaccggtgccacgactcgaggcaaccctgcacatggcccaacagtgccaaccaagcacatcggtcacgggacaggcgacaccttcggcaggcgaagcgggcgacgcttcacctacgccataatgaccgcgtcaaaaaagggaccgggaaaggggatactccgaaagggatccttctccgcgaaggaagcgggccccgagccctcctactga

SEQ ID NO: 25950 - DNA, 207 bp, Zea mays
  Peptide Sequence Number=SeqID_67729
atgacgctccaatcgatccccgagccagacgagctcgaggcaaaggcgatgtaccgcaacctccacaacctggtggagagagccacggtacacgcactggccaacatcaccaagtgtgatggctccacgaaccccagcgtatggctggaagactaccagcttgcgtgccacatggtgggaatcaaggacgaccacttggtcatctaa

SEQ ID NO: 25951 - DNA, 468 bp, Zea mays
  Peptide Sequence Number=SeqID_67730
atggccatcttcccagcctccgccgggagtgagaccttcactctctggagtcatatcacctttggctccctcaacttcctcgctcagaagaccagtgagctccgcctcgtcggccacgacgaggccaatgtcgcaggcctagggcccagacattccacccggaccaaggcagagaaacgacgcctcaagagatgtgatgctgccctaaagcagcgcctcaatgcatccgccatcgctgttaaatggcgggcgagagtagccccaccatcaaccatggtggccattgtcagatgcgagccggcatccatcctcgatcttcttgaggatggttcaagcagtgcctcgatggagcccgacgtgctcgacgcgctcatcgagaggctcgaccaagtttacgtcaacattgagcaaagatgcctcaaagctgaacagtcccaagcaagaaatacctgcaaccaaatcacatag

SEQ ID NO: 25952 - DNA, 577 bp, Zea mays
  Peptide Sequence Number=SeqID_67731
gcattcagcaaccggggcggggaagcggactgaccggtcgggcctagtgccagagacaccagcgatcgacaggtggggtccaggcgtcggcgctgctcttgctcacgacggtgatgtcgccagagccagggcgggtgtgggctacggcgattccaaggccgtcggggttggccagaattgtcgaggagggctcgacgaacacactgagggggttctagccacgagactggggtcagagaggggagaatggcggagggagagctccggacaggtcgaggtaacttcggcgaggaattccgaccactgggagaggcaatcgactgcgatagggctcggtctagttccagtggaggtgggggagcgctatgggccaacgtcagggcactggacgaggttgggttggccggacaccatgcgggcgcgacgagcaaacgcggccgcacactggcgaggccaaattggctacgggtctccagtgagtgcgagcggcgacagcagagcacgagagagggtgagcttgcgtgaaatgggacaggggagcaagtgcgtgtgccggcggggctcaaaagggagctag

SEQ ID NO: 25953 - DNA, 411 bp, Zea mays
  Peptide Sequence Number=SeqID_67732
atggcgtcgctctccatctccgcgctaggcgcggcgacggcgagcagcagcagcttctggggcaaccggctcgccacctactccgcgccgcagcctggggtctgttcctgcttcccaattccgttccgttctgctgatggtttggtaaggtttatggtcaagatatgcccaattgaaatgagacttaagagatgggagcgaaagaagtgtaaaccaaacagtcttcctgtgctgcacaagatgcatgttaggatcggggacacggtacaggttattgcaggccgtgagaaaggaaaggttggagaagtcacacgccttttcaagcacaacagcacggtgatcgtgaaggacctgaacttgaagtcgaagcacaagaaaggcacagacgatgaacccggtgaaatcgtcatg

SEQ ID NO: 25954 - DNA, 450 bp, Zea mays
  Peptide Sequence Number=SeqID_67733
atgggcgccttggacaggaacgcagtggatcccaaactctcctgcctgggtgccatgttcgggtcgcgtcacgccacgcatggtgagatggtgcacgctctgcatgccatgatggatcctagcgtgtccgcgaaggcgcttcgggtcctcgagtccgccgagggccacgccgtgctgtgcaccgacacagaggatgccatccccgaggtggtgggcaagatgatgaaggccgggcgcgacggcgtggaggccaccgtggccatgctatgggcggtctgccattggtaccaggaccgccaggcggcagacgtggctgtcactgccgagggcaggctgacgaggctgctcctcctgatgcagagcgagtgcatgccggcagcgagacagatggcgctgaagcttcttgttggaatttgctctcccgagcaagatgatccaacgggggagtga

SEQ ID NO: 25955 - DNA, 306 bp, Zea mays
  Peptide Sequence Number=SeqID_67734
atggggttgttcaagaaggcaaacgagctagccattctttgtgatgtgcaaatcggagtcatcatattctctggcagtggcaggatgctggacatgggagtcagtaaagtgatcttgagaactgctgcagtcaatggcgtcgctaataccttcatcaaactgaaatatttcttcccagctgtcagatcagttgttgctttttctgggttgatggtcaggcttaatgcttggttagctaccatatcactcgctatctacaaggcttttgatcatctcggcatgttaaagaagaagaaatgcttctaa

SEQ ID NO: 25956 - DNA, 414 bp, Zea mays
  Peptide Sequence Number=SeqID_67735
atggaggcgacacagaagcacttgtctggtcaaagcctcaagcgtgcgttagcagacagtggcagcggcagcgagcgggaccgcgtcaccgcgcagccgcaagagtgcttctcgcgggcgaaaccaagcaggggagacggacgtgtgagtgactcggtcagcgtcaggcaggcagccatccggctgctctcgacgtcactgctgcgattcgtcgcccgatctaataaaaacacgcaccgcctcccccgtctggagtctggaccattgcaatgcaacgccgtcggcggcgtcctcaggtccacggtgacactgccgtgccccgatcgcctatccacccaccaactgttggctccggcctgctctgagcttcgcacccagttccccgtgctgactgcgctgatgccgtgtcgttag

SEQ ID NO: 25957 - DNA, 309 bp, Zea mays
  Peptide Sequence Number=SeqID_67736
atggcccaacagtgccaaccgagcacatcggtcacagggccagtcagccgcgggaggaggcgtgacggtcgatatggccaaaaggaccgggagaggggatatttcgaaagggatccttctccgctaaggaagcgggcctcgagccctcctactgatcagggtttcgaaggctggccccccggaagggttcgacagccgcctcagagcactcgggattcaggctcattactgatcagaggttcgaaggctggcccctcagaagggttcgacagccgcctcagagcactcgggctccgtgcccactactaa

SEQ ID NO: 25958 - DNA, 405 bp, Zea mays
  Peptide Sequence Number=SeqID_67737
atgtgggctcgtgctgatggaccaggagcagtgaaggacaagtgttggatcttggctaacggaccgaagcagctgcgtgaccagccgtggtggctgaaacatgggacacgcactcgcgctaggacatggcagagtgggtcgtgttgccggcgcggtcaagaactgcaggacacctgtccaagacgtgggggacacgcacacggtgcgatacacacggcggtttggtggtttgagcctcaaaaccacccaacgctatggatggcgggttttgttgagtttggacgtcaaaactcgtcggtagtgattccagtgggaatcggtagcagcatgtggcattacaacgaatggtgcgtcaaggcgaagcaacttcgtgtggagagtgtgcccgtcggatcaaaaacctag

SEQ ID NO: 25959 - DNA, 162 bp, Zea mays
  Peptide Sequence Number=SeqID_67738
atggaggcagagtgcaaaactagcgcagatggcatgggcggttgttggtggagtgcggcagatggcgaggaggttgttgacagcttggggatgaggatagagggggcggggggctctaatgtgaatttcgggccaaaaactgaatttcgggccctaatgtga

SEQ ID NO: 25960 - DNA, 915 bp, Zea mays
  Peptide Sequence Number=SeqID_67739
atggcggcctgggcggttccggcgctcgcggccgctgcgtgggcgctgcgggcggcggtgtgggcgtgcctcgcggcgtcggcgatgctcgtcgccgaggccgcgtacatgggcctcgccagcctcgcctccgccgccgcgatgctgtggcgccgcccggacgcgaggtaccgctgggagcccatgcccggaggctgcgacgtcgaggcggccactggggcggacttccccatggtgctcgtgcagatcccgatgtacaacgagcgggaggtgtacaagctatccattgacgctgcgtgtgccctcacatggccaccagaccgtattgtaatacaagtcttggatgactccactgatccgattattaaggaactagtggagcttgagtgccaggattgggccaccaaaaaaattaacatcaagtatgaggttagaaataatagaaagggatacaaagcaggtgcgctgaagaagggcatggaacatatatacgccaagcaatgtgaatttgttgctatctttgatgcggatttccaacctgaacctgacttccttttaaaaaccataccatttcttgtgcataacccaaagattgcacttgtacaagcacgttgggagtttggacctacctttacatgtgaacaatatgtagaaaaattaaagcaaatatgttatgcttcccacactgtgcggggtctggaaagggtatctttaaatgtcaagccttacccgcataatatgcaaaggttggggctcgaacccgggaccttctggttacagacgaaagcaacaagggacacaacccaacagtttgaaggtgatgcaacagaagaaatggatgaggacaatgatgatgaatctggatctgctgaagttgctgatgcaggcttccatttggatgatgatttggtttag

SEQ ID NO: 25961 - DNA, 633 bp, Zea mays
  Peptide Sequence Number=SeqID_67740
atggcagtgatcatattggtaaagatgttcctgacctggcctttgccgggtgattttgcagtgaactacgatgtttgcctgatgacaaggatacagaagatgtctctagactatcatttcaaagttgagcaggaatcaggatcatttgtatattcattttttggctttaatggtacagctggtgtgtggcgtgtatctgctattaaccagtctggaggatggaaagatcgcacaactgtagaagatatggacttggctgtacgggctagcctcaagggatgggaattcttgtatgttggtgatattagggttaagagtgaactaccaagtaccttcaaagcctaccgtcatcaacaacataggtggacttgtggtgccgccaatctcttcaggaaaatggcatgggaaatcattacgaacaaggaggtgtcaatatggaagaaacatcatctgttatacagctttttctttgtccgaagggttattgctccccttgtgacattcttgttttattgtgttgtcatccctttgtctgccatggttcctggtgtcagcattcctgtatgggggctggtctatattcccactgcaatcacatgtatgaacgccatcagaaatccttggtacgcataa

SEQ ID NO: 25962 - DNA, 117 bp, Zea mays
  Peptide Sequence Number=SeqID_67741
atgggggtgctccttacaatgccaaccacaccaacagatcggatgaaggaaattgcacaagcttcacaagaatttatttatactgatgctgacgggagggctactgatgttgcttaa

SEQ ID NO: 25963 - DNA, 489 bp, Zea mays
  Peptide Sequence Number=SeqID_67742
atgggaatgctgcttgctttggaaaggaggaagatagatgagtggcgggtttctgagccgagcaggaagaacatgaaccacccttctcatgatgtttatgctcagcctattcagatacgtcctacgaggcctagaggtgctttgcctcttactgctaggcctctagaggagagaccatgtggtggtcatgtccttcgggatggtggttgtgtgccatatggccaaggaccccgtgacagtggctttgattcttacttctctagcggaacacaatttccttcttatggtgatcgtttcccttcaggaccggggatgagtggtgttttcctaacatttttatgggcagatgccacaacactgtattatcctctactgatgcaagacgaaggcctagagaacatatggctcatggattccggttattcgcaccacatgaccgaaagcaaaaaatggttctccagcctcgaccctgtgattggtaaggaataa

SEQ ID NO: 25964 - DNA, 198 bp, Zea mays
  Peptide Sequence Number=SeqID_67743
atggaagtaaggggattcatttgcaagaatggtgatattgccaaaaaggcaaagaaatggtattgccgccagatcgtggagaagattgccaaggcagcggtggccatcgagactaagctcatcaacgtcacggggatcttcgtcctccactcctctgtagggcaggggcggacaagaggggcaaagtgggccatgtga

SEQ ID NO: 25965 - DNA, 438 bp, Zea mays
  Peptide Sequence Number=SeqID_67744
atggcgaggggcgtccaccgcaagcttgaatcgatgggacgcccagcgtcatgtcacagcaggatcgacctgtcacagcagttgcacacaggcgagattagcaaggtgacgaacgcagggatgaagctgagcgtgagcagtggccaaactggaagggatgccctacgctcagtaagtgccacacgtcaaaatgtcgtgattggggacctgggagaggaggcacggtgggggacggaggaggcggaggatgattgtgtcatgaacgcgcagtcggcactaagagcggtctccgtctgcgtgccgccgcgctgcctgctagtgccgctgtttggtaggatcacggtgaatgaccttgacggtgggaccggctgctctacacgtcatgccggaggcatgcaaggccgcgtgaaatgcaggcgtgagcccaaatgcgtttaa

SEQ ID NO: 25966 - DNA, 948 bp, Zea mays
  Peptide Sequence Number=SeqID_67745
atgcagcccaagatcagcgcgttcttcgagcggcaggagacggacccagatccgattagtggcgacggtgaggggaacgggcagggaaacgtcggcgcggcgacggaggcgaagcggaaggccaatggctgcaggctcgatgggctcgtcagcaagaagaggaactacgcgcagctccatctggaactagggcagcctgatttcgtcctccacacgtgctccgtgtgcggcatgatgtacgcccgagggaacgacgaagacgagaaggttcacagggcgtaccacaagagctactccgagggagtccctttcaaggttaagttaaccgatgagctgcagggttggaaaaaagagacagtgatagcgaggtccgagggcggtgatcgggttgttcttgcaactgacgagaactcttgtatgtcgaaaagtaaggtcagagaggtgatcacagtggtggagaaggagctgggatttggtgaagggaaactcctgcataagctttgcaaggtgtatctatacatatctgcacaaaggatcgtggggtgccttgtcactgaaccgataaaaacaggacatagagttatcccaagctccacggaaggaagccctaatgatttgccagttagtagtactgagcgaggaaaaaatggtcatacattagagttcggcagtattagtttcaagagggaaatcataaggcggcacagtcgttcggtcaagaacaaagaagagtgccaggaccctggtgccatactttgcgaaacggaagctgttcctgcgctttgtggatttcgagccatctgggtggcaccatcgtgcagaagaaaacgaattgcctcaaaactaatggacgttgcaagcaatgctgctgcagctgcaccaagcatggaactaggagagtgcatctacaagatggatgtttttgagcaagaaaatgacagactgtag

SEQ ID NO: 25967 - DNA, 285 bp, Zea mays
  Peptide Sequence Number=SeqID_67746
atgggtggtttagaactggctatggcactgttaggaggcgtggaaggtcaccatacacagaatgaaattggagaggatgtatatctttggaagattgtggagtattccgagttgttcacttgtgttggtctcgaaggcctttgccaggaagctgaaatggcagcaatgagaaagggagaagctcaaaagatacaaaggttgacacagcgccgaagctatgaagcagaaaagcttcggcatgttcgcagaaaagggaaccgacttaaagatgaaaaggtcatttag

SEQ ID NO: 25968 - DNA, 1343 bp, Zea mays
  Peptide Sequence Number=SeqID_67747
agcatgttccggtgttccctagataccgaatacgagatccctacaagcttcttggtgttgatcgtgacgcatctgaagaagagatccgaggtgcgaggaatttccttattcaacagtatgctgggcatgaaccgagtgaagaagctattgaaggtgcttatgagaagataattatgaagagctaccagcagcggaagaagacaaaaattaacttgaaaaccaagttaaagaagagagtagaggaatccccttcatgggtcaaagcacttcttggttgctttgaggtgccatcgatggatattatctccagaagattgtttttctttgctttcattgctggatggagcatagcaacttctgcagagaatggacctgcgtttcagttgggtgtcgctgccgctgccgcgctggacaaccctcccacacactcatgcagccggtccacgtgcaaccgagcattgccgctgccgccgtgcgatgggcacccttttcatgaggtcctccgttgtggcgaggccccgctcgagcaggacgatgtggttgatgccatcggccaccctgtgcatcgcaccattaatgccactgatgcccacgggcaggcgcatgaccagcgaacacatgtggaggggctgcagcctgcagcatggatggtccagcttgttcttgggccttgcgttctctgtgcaaaggtgctactcatccggcgacacctccctgagcatggccgtgctgccgcagttggcacagatggggttgcacatcacctactagatgtgtgtgctttcgcagctggggtggataggagtagagctgcaagtcagcaagtgacggcggcgtgcggcggcgagcacgggaaggaagggccgaagtggccggaggcgtgcacgcgcggggccaacacgagcacgggccagacgcaatgcgagctcgccggtgcgcaacctgcgtcggggccggccagcgcggctagagacgtacgtgcggtagcctgggatgcgcgtggcgagttccgcgcggcagggcggagcagcaccggcactgtcggtgagctggccgagcatgcgcagccgcggcggagctgggcggggcccgcgtggagctccgacaaggtcacgcgggcagcggtcggcagcgagttcgcgcaggctctgggctctggcggcgtggctggtgcggtatcgggggacgggggtacagccgacggcaagtcatttgctttcaccagtggcgagacttttgcgctaaggagccgcatcaccttcggctctctcgacttccttgccaccgcaaccgacgaactccgcctcgctgactcctcctcgcccatcgacgccctcgtctag

SEQ ID NO: 25969 - DNA, 675 bp, Zea mays
  Peptide Sequence Number=SeqID_67748
atgtcgggagatcacgccaagaaggagatggtgaccggtgagaagcctgctacaagccacgggaaggctccatcgggagagtcctacaacaaagggaaggggaaggaaaaggaatccccttcacataagtcacgtcggagcggtgacaagaagaagaagatgaggaaagtggtctactacgagaccgacacctcgtcgccatccacctccggctccgacacgccgtccgtaacttctaagcgccatgagcgcaagaagtttagtaagatccccctacgctatcctcgcattcctaaacatacacctttactttccgtcccattaggcaaaccaccaacgtttgatggtgaagattatgctaggtggagtgatttgatgcgatttcacctaacctcactccacaaaagtatatgggatgttgttgagtttggtgtacaggtaccatccgtaggggatgaagattataatgaggtcgaagtggcccaaatccaacacttcaactcccaagccacaactatactcctcgcctctctaagtcgagaggggtataataaggtgcaagggttgaaaagtgctaaggaaatttgggacacgctaaagaccgtgcatgaaggagacgaggtgaccaaaatcaccaagcgtgaaacgatcgagggggagctcggttgcttctga

SEQ ID NO: 25970 - DNA, 603 bp, Zea mays
  Peptide Sequence Number=SeqID_67749
atgtctccgatctgggtgttcgggtacggctcgctgatctggaacccaggcttcgcctacgacgaccgcgtcgtcggctttgtcagggactaccgccgcgtcttctaccaagggagcacggaccacaggggcacgccgcagttccccgggaggaccgtcacgctcgagcaccagcccggagcgacttgcgtaggccctttctcatgtccaccctcctactctgtcaattggggagttgcttacagaataaaggaggaagataaggagatagctttggagtatcttgaggtcagggagaagcaatatgatgagaaggtttaccttgacttgtatactgattcatcgcccaaagtaccagctgtcgaaaatgtgatggtatacttcgccaccagtaacaaggagaacaatcaaaactatcttggtcctgcacctctggaagaaatgaccaggcaaatttaccttgctcaaggcccatctggacctaacaaagagtatgtgttcaaactcgaggacgcgttacacaaattaggagttgtagaccaacatgtccaagaactggcaaatgctctgcgtgagtattctgacaccgagttatctaagtga

SEQ ID NO: 25971 - DNA, 1428 bp, Zea mays
  Peptide Sequence Number=SeqID_67750
atggagccgtcgtcagcggcggcacggttgcttctgctggtggccgtggcggcggtggccgcggccagtggcgccaccacgggcgcgctggccgcgacgccgtcgccccgccccaaccccaagctcaggggcctgcgcgtgcgcctgacgcacgtggacgcgcacggcaactactcgaggctgcagctgctgcagcgggcggcgcgccggagccaccaccgcatgtcgcggctcgtggcgcgggccaccggcgcggcgtcgaccagcagcagcaaggcggccgccgccggggacgggtcaggaggaaaggacctccaggtgcctgtccacgcgggcaacggcgagttcctcatggacctgtcggtcggcacgcccgcgctgccgtacgcggccatcgtggacacgggcagcgacctggtgtggacgcagtgcaagccgtgcgtggagtgcttcaaccagaccacgcccgtgttcgacccggccgcgtcctccacctacgccgcgctgccgtgctccagcgccttgtgcgccgacctgcccacctccacctgcgcgtcctcgtcctcgtcgtcgtccgcgtccagcccgtgcggctacacctacacctacggcgacgcctcgtcgacgcagggcgtgctggccaccgagaccttcacgctggcgaggcagaaggtcccgggcgtcgcgttcggctgcggggacaccaacgagggcgacggcttcacgcagggcgccgggctcgtggggctcggccgcgggccgctctcgctcgtgtcccagctcggcatcgaccgcttctcctactgcctcacctccctcgacgacgccgccggccgcagcccgctcctcctgggctccgccgccggcatctcggcgagcgccgccaccgcgcccgcgcagaccaccccgctggtgaagaacccgagccagccgtccttctactacgtgtccctcacggggctcaccgtcggctccaccaggctcgcgctcccgagctcggccttcgcgatccaggacgacggcacgggcggcgtcatcgtcgactccggcacctccatcacgtacctggagctgcgcgcctaccgcgcgctgcggaaggcgttcgtggcgcacatgtcgctgcccacggtggacgcctccgagatcgggctggacctctgcttccagggccccgccggggccgtcgaccaggacgtgcaggtgcaggtgcccaagctggtgctccacttcgacggcggcgccgacctcgacctccccgccgagaactacatggtgctcgactccgcctccggcgcgctctgcctcacggtcatggcgtcgcggggcctctccattatcggcaacttccagcagcagaacttccagttcgtgtacgacgtcgccggggacacgctctcgttcgcgcccgcggagtgcaacaagttgtga

SEQ ID NO: 25972 - DNA, 432 bp, Zea mays
  Peptide Sequence Number=SeqID_67751
atgtgcctgcatcctaaagtccacctcacggccccagtccacctcgcgccccctccctcctcttcggcgtacatggactcgatccgatgggatccgacggccccatttgtcacgcgccgtgcaaccgccagcacgacacagatggacgcaacgcgatgcggcggtcccgccgctctcgtgtccaggaccctttgctcgcttggctcctcgcacgtcgcatcagcaggtggtgggcatcagaggaggagccgcggtggttggtgcgtgtggacagcagatggagatggaaggttggccccccaatcacgggatgcgggagaaaaggggcagcggcgggaactacgggaagatggaggtgggggcggaggcacagcgggcgtcgtgtgcgagagccgggggcggggcttgggcgcgatggtggcgggggcataa

SEQ ID NO: 25973 - DNA, 444 bp, Zea mays
  Peptide Sequence Number=SeqID_67752
atgggccgctcggttcagctggggtggttcgccttcccccaggccgtccctagactacaaatgcctggggcaccgcaacctctacccctctcttacgctgcacctaggatgcctccatcatcgcagaggaagaaacgtgagtgccgccgcagggagagagagagaacacgagaagtcgagcgcaggtttgggatcttcagcgcaggggcgggggcggaccgcggtgttccttacgtgcctcgctgtaatcgggccgtggcatcaatagggcggcgcgccgggatttcgccgtcggaaaacaaggctcgccgtcgcgtagcatctcccgtggacaatcctgctcgtgctcctaactccgtagaagagcccgtgaccgaggatcctggtgagcagcaggttgaagtagctgagcaggagctcattgaaggcaagttgtgcccttga

SEQ ID NO: 25974 - DNA, 204 bp, Zea mays
  Peptide Sequence Number=SeqID_67753
atggaccttgtggccgatgggttgggtcttgggaacaccaacatgcgtggggagcttccatgggccctcctccccttgactgaccacatcatgcatgatgaggtacccgacaaggaccctgttggagcatattttcagtgttatagtcctatatttgaaaataggacttcgtttaggattcctattgaaggtgttgtgaggtag

SEQ ID NO: 25975 - DNA, 393 bp, Zea mays
  Peptide Sequence Number=SeqID_67754
atggagttcggcctcccgcttttgggcctcatagcccttatggtgtcgtctgctgggtcgtgcgccgccgtacccctgcagtatttgttcgacgggcaggccggttggttagtgggtcatctttgggaggcctttaggccttcttttgggtaccctgttctcaggggtctatgcagtgtaagaggtgcaccctttcctgcgacggttcgccacgcactgggcatgagtccatcggcctctctgtttaaggggtggacccttttctacgatggttcgtcatgcactgggcatgagtccatcggcctctcggttaatgatgtggcgcactatacccggaggtcgacattgggtttccccggtggtcctcattatgtgtcgcagaacatgcggtag

SEQ ID NO: 25976 - DNA, 417 bp, Zea mays
  Peptide Sequence Number=SeqID_67755
atggcgctaacgatgttcattactgtctttatatccctttttttgcaaagctatgttgaacgtgtgtttgagaggctaaactcaaggggtaccatttcacacaggttatcaagacctgcaactaagtacgtggatggaaaacattaccgagatttgtcaaagttgaacagaaaccctgctcaagtgatctatctcagcgcccatgctcttgaatcttgcctgcagcatgaaaattgtgttgaaatcaaaccttttaaacttgaagataaaaatgatacccaactgctggatctcattccatttctcgagtatgttgccatggctagaccttctgacattaggacagtgctggcatcctatcaaggtcatgatgttgttgctaagtttattgagcgttcaaaggaacaccagcagtaa

SEQ ID NO: 25977 - DNA, 372 bp, Zea mays
  Peptide Sequence Number=SeqID_67756
atggggtctctaaagtacaatctgctgggttttgacatcagtgaggataagtcacgtacgagttcagggcacatgatctttcgaagtgccataggaattctaagaataagggatggtgccaacgagaaagagacccagctattgtactgtttcactcatacgccggaagggacgaggcaatacaccgtaccaggcatacgcctacacatgatcaaaggtgacactaaggggatgacggaagatgaagttgtactaaagagctctagcctaaacaagtataacccactcgtatcagatccaccttcgagcccgtgtaggtcaccgttcggggactcaaatataggatttcttgatagagatgctctgagctaa

SEQ ID NO: 25978 - DNA, 120 bp, Zea mays
  Peptide Sequence Number=SeqID_67757
atggagcgaagtgagccctcgctgaagccagaatggctgctgcggcccacagtacctgccacaacctataagccggcgactttgccccacacaggttccagctctagtgtggagctgtag

SEQ ID NO: 25979 - DNA, 888 bp, Zea mays
  Peptide Sequence Number=SeqID_67758
atgaatcagcttgattcgttaccatacgctgaaacagttggcgatagcaccgacctacaaaaaatagaccctggtccagacacgatcagaactgtgtgtgctgcagttaaatgtgcagtagtcatcatttctggtcgtcccattgtgattgagccgtatgttccattagtggaagcgcttgttgcagcttggcttccgggaaccgaaggtcagggtgtcgcagatgtactctttggagactacggtttcacaggcaagctcccgcacacctggttcaagtctgtcgaccaactgcccatgaatgtgggagacctacagtacgatccactctaccctttcggcttcggtttgatgataaattcatcattgccagggttctctggtcgactgaaaccagaagcttatctgacagagggaatacaacctggtgagttttcgtcctgctacaatcatacccgctgcgctaaggcgctcggagtgtttgcttgctcgcctaggcgccttaagaacaccacacgtaacccaaatccattggcaagggagcgatataatgatataccaacaaccacacatatggaccaaaggcacaactacatcaacgagttttggcttgtgaaggccgaagcaaagatctatgtccaccttctggttgatggcgccagccagccgattaaggcgtcgcttgagggctacggcacgcctcttgaggcgtcgcttctccttcttattcctagaggtggcagagcatgtgggtcctcccacgcccactgtgatggacacatcggagtctgtgaggcggaccttaccggtggcgatggcgaagaagtcaacggaaccgaatgtgatgcggctcctaggcgtaaaggcctcaccgccggtgaacgctga

SEQ ID NO: 25980 - DNA, 345 bp, Zea mays
  Peptide Sequence Number=SeqID_67759
atggcctggctcggtgttgtcctcagactccaaatcaccgaggggagttcgaaactgaggaacttcttccctgtgactgggtgtcgttatctgatgatggagttggggaccccgaagcgatggataatgttcgtgaagaacgccactgcctgctcggactggatgttggcgaggggtcgaacctcgatccatttggagaacttgtcgacggcgaccagcaggtgcgtaaagccctcgggcaccttcaatagaggaccgacaaggtctaatccccacataaccaagggccaagtgattgggattgtctatagggcctgggcaggcatgtccatctgccttgcgtag

SEQ ID NO: 25981 - DNA, 330 bp, Zea mays
  Peptide Sequence Number=SeqID_67760
atggatagaggcagcagcctcaacatcatctatgcggataccttggagctcatggggatcggacgatcccaggttcgggtcgagctgcgccttttcacggcatcgcccctggcaagagggaaagaggtcctcacctttgaggtggtggggttccgaggcacctaccacgccgtgctctggaggccgtgctatgccaagtttatagccaccctgaactacacctacttgaagctgaagatgtcggggccagcaagcatcattaccgttggcccaacgtaccgccacaccaacaagtgtgacgtcaagtgtgtcgagtacaggcactcgtag

SEQ ID NO: 25982 - DNA, 513 bp, Zea mays
  Peptide Sequence Number=SeqID_67761
atgacggaggaccaccaggcggacaacctcgtggcccgggcggaggcgtacctggccgaggtggcgctgtggagcctggacggggcgctggaggtgctgtgcaggtgcgacggccccgtggcggagcaggtcgggctggtggcccgctgcgtcgacgccgtcgccgccagcgcgggcaaggagcagctggacgcgtcgagccacgcggcgcagaacgaccggctgccgatccagatggtggtgcgcgtgctctacttcgagcagctccgcctcaagtcgtccttctcgggcggcgggtccgggtgcgtcggcttgggcggcgccgacgggtccttctcgcagcgccaggtgaagggaaacagaagcaagacggttgtgcgggatgcagacggcggcgcggaagcaagacggctgcgcgggatgcagacggcggcgcgggggcggcggaagatcgccggcggcgcctggatctcgctcctgggaggggaccccgtcggggaggagagatcctag

SEQ ID NO: 25983 - DNA, 429 bp, Zea mays
  Peptide Sequence Number=SeqID_67762
atgctgccgtgcgcgaggtcggtgcttcgaaggagggggctggcatcttccgtcccgcggaggtgcggcggggagggcgagtgctccacttgcgcgggggagctggtcgccaatgccaggtgttcgagcacgctggctgcgctcggcggcggcgggcgcgtgctcgagcatggcggccggtgggcatatccgcagaccggcgtgattggcgcggggcggatgacgcgcacgcagacgaggtgtttcttcgggtgcggcgacggggaggaggggggcgtgctctccaaggtctatgaggagaggcgcgtgattgggtatgcggtcaatcgagagttgccttatgagctcgagattggattcaagttccttgttgaaagttatgtctcccgtgtggagatggagaagccccagaatacgtgcaagttataa

SEQ ID NO: 25984 - DNA, 1119 bp, Zea mays
  Peptide Sequence Number=SeqID_67763
atggcagatgcagagtacatgaagtacaaggatccaaagcaacctattaactctagaatcagggatcttatcggtaggatgacccttgctgaaaaaattggccaaatgacacagatagaacgccaggttgcatctgcaaatgtcatgaaacagtactttataggaagcatcttaagtggtggtggaagtgttccttctccccaggccagtcctgcaatttgggtgaacatggtcaatgaatttcagaaaggtgccttgtcaacgcgtctaggaattccattgatttatggaattgatgctgttcatggtaataacaatgtctacaacgccactttattccctcataacattggacttggagctacaagggatcctggcctcataaaaagaattggtgaagcaactgctcttgaagtgcgtgcgacaggcattcaatatacttttgctccatgtattgcagtttgcagagatccaagatggggtcggtgctatgagagctacagtgaggatcacaaggttgtgcagcagatgacagatattatccttggtttgcagggtgagatcccagtcaatcataccaagggagttccatatgtagctgggaaggttttcgtgatatctgactggctaggagtggaccgtatcacctcacctcctggcgcaaactatacttattctgtgcaagctggaattaatgctggcattgatatggtgatggtgccatacaattacactgattacattaatgatctcacttctctcgttcacaagggtgtcatcaatataagcagaattgatgatgctgtgaagcggatccttcgagtcaaatttacaatgggcctgtttgagaaccctttagctgatcttagttttgcagagcagcttggaaagaaggagcatagggaactggctagagaagctgtcaggaaatcacttgttctgttaaaaaatgggaactctcccgatcagcaattcctacctctccctaagagagctagaagtatcctggtagctggaagtcatgctagcaatttggggtaccagtgtggtggatggtcaatccaatggatgggggacagtggtaatatcacaactggtgttcattgcatggagatttaa

SEQ ID NO: 25985 - DNA, 525 bp, Zea mays
  Peptide Sequence Number=SeqID_67764
agctccgttgaacgacaaacgggcgccgacggtccgacgacgaacttcacgatgacgagcggtggtgctactgcgcgcgggcagggtttcgacaacggagaaagagagagggagagcagaggagagggcgcggcgtcttcaagcaccatgaatggtgtccatcaatggggagagggagtaatggggaatgaagagaaaacggacggcaggcgtcgcggcacgggcatggcgaggttggctgggcgcgtcgaggtggctgcgggcgtcgtgcatgtggctcggcagctggacatcgcgcaggggcgcgcgcggctcgatcctcgcggcgcggggcggccggatcctagcttgctcggcgtcccggcgttgaggagagagaggggaaagggaaggagagagaagcgacggctgagggggaggggcagagggcggctggcacaaggagcagggcgccggctgctagggttaggggtagggggcgcggtcggctgggggttttgggccgagtgggccaaattcggttag

SEQ ID NO: 25986 - DNA, 219 bp, Zea mays
  Peptide Sequence Number=SeqID_67765
atgccgcacggcgtgcgctttcgcactactgctcagttctcgatgtcagagaacaggcacagaggaggaaggcgtgctcagcaggagcaagcagctcagcaagatgaggtaccccagcaacagcaactgccgcccccgcccccgatgtccatcgagcagatgttcctgatgcagactcaggtatcgtcacggattgagcgtcatagattaacaagttag

SEQ ID NO: 25987 - DNA, 153 bp, Zea mays
  Peptide Sequence Number=SeqID_67766
atgggacgaccccagagagtcacgacgacacggtggaaaggcagagccacgcggcacaaggccgagaggcggtgcttcaccggcgagccaatctgccccagccgcaaagcagaagagtgcggcgaagtgagcagcagttctaagagcagctag

SEQ ID NO: 25988 - DNA, 522 bp, Zea mays
  Peptide Sequence Number=SeqID_67767
atggagctctccctcccagccgagccctctccctttctcccactgccgagctcgctctcttctcgcgcccttcttcctggccgagaccttgccaccggagctcgcccacacctcctcgccagaactcgtgctcgccggccggaccgtctgcgcccaccccggccacctcgaccgagctcccttccgctcctctgcctccgtgaccgatcaccaacaccgtcgtgccgagcgctcgtcgctgctctacgccctcgtcgggagccgtccgtcgtggccgtggtcgtcgttgcccgcgtcggagcttgcccgtgcaacaccccgacgaccgtgcccacaccattcatcaatcgtccaccatccgtggagcctcaccggaattcgcgccccaccgtccaaacgcatcgtcggagttacgccgttcgtcatcgacgtgatcgcgcagcacaccaactggaccatccgcgcccacgccgttcgtcgtcatccgttcacccaaggttgaagagaatcaaaaccatttga

SEQ ID NO: 25989 - DNA, 558 bp, Zea mays
  Peptide Sequence Number=SeqID_67768
atgacgggtgggcccaacataacagtgagaagggagcgcagagagaggtggaaacgtgggctggcggtaacaatgtgggccaagggcaagggagtagtcggcccaggatttagtcacatgtctcaaggagtagatggcaaatcacataaggagatcaactcttttataagtcttataatttgggtattacaatacttgcctcctggggtggtccggaaccgtgtagccgctcagcctggtcctgtaccgtgggcctacacattccaccgccctgcgcaagcatatgttattgcattcccttacaagcgggaccccgactccatttctgcaggaaaggactatgctgcatcagcaggagttgcgctggaagctggctccggacagccccaccaacggcgacgaccacctctgcatcgacggatcgccggcgacatcgactacctctgcaccagcagcgacaacgacctccgctttgggtggctagacagcagcagcgatcgcctcagggcgagcgctactgtaaaaaggtccttgcccccgtcctcctacggggggtga

SEQ ID NO: 25990 - DNA, 435 bp, Zea mays
  Peptide Sequence Number=SeqID_67769
atggagagtcttcctattgagaagcagcaaaactttctttcagaaaagttcaacttgacttcagttaagttgaacttaactttcgttgagttgagcatttcttcgtctgagttgagcttttctttagctgagttgaacttgacttcagatgagttaaacttaacttcagttgagttgagcttttcttcatatgagttgaacttgactttagctgagttgaacttaacttcaaatgagaaacactctagtcaaaaccagttgaacctgcctcaggggaagttcaacttgggttttctctccaaacctctccggtcaataccacttgaactggacgtaggggcggttcaactggtgtcagggttagctgaccagtctaacttcctatttcccagtctaagtgtcagtctgaccaccaggcgattgaaccggctctag

SEQ ID NO: 25991 - DNA, 228 bp, Zea mays
  Peptide Sequence Number=SeqID_67770
atggcggaacctgaagtgaccgctgaactagccaccttgagatcctcgaatgctactgataagaagatggagacaacagttgtcgagattggcatcctagctagggcagctgaaacatcaacttggtcgaagaaggaagtattgaagatatttaagataatcttgtcaaaggcaactgggaaagagagtctgcataagaattttgagtaccataattttcaaaactaa

SEQ ID NO: 25992 - DNA, 333 bp, Zea mays
  Peptide Sequence Number=SeqID_67771
atggagcttcgacgactaggaccatcttgtggtacaccattctaccatccgacaattgaagctcattgctgctatcctactactgaagttcgagtagctgtaacactcagagcaggcaagcaatcatggatctcaagcttgcggggtacggagatggtgatggccgtggggatgaaccctgccacgatggacgttgtgttggaactcacacgactgcacagggagctgtcgccgtgcccgaccatggaggaggtggacgcagcggtggacgcggaggaggcgcgcctcgccgaaatcactaaggaggagaaggcggctcgagtgctggcatag

SEQ ID NO: 25993 - DNA, 2301 bp, Zea mays
  Peptide Sequence Number=SeqID_67772
atgtcatcctcttctttgtctgctgcgagcgcgtcgtcggccacgccgtcgtctgagaagacgttgagccattcggtagtggtagaactgcagcccggccacaccgtcgagttcaggacctcgaggatattttcgggccgtgtgctggagatgcagcggctaggaataagtggggcaattggtgggacttttggttttatgtggctctcgaggatatcgaagggttgccgagttttcccccctgccatcctatgttcacatttttatgtggtctttccacaatttgaggtggcaaaaaaagatgaagacgagggggcccttcggttgaaccgcgtgtttgagctgaatcatttgtcgaacggttcttacctagagggggactccgccgacaccgctgatcgccgagggaagcaaacaaggccctcgaccgatgaaggcccctcaagggataaggctccgggtgcggtcgatagaaagagaaaattaggtacgacggctgaggagttggggctgagggcatctgatcattttgttggggaattactggagacaaggaatattggtgttgttgtgtcagtagtgatggagaaagatcgccaggatgcacaacggaagaagcgtcagtaccccgttagggtggagtctggccggctggcggttgtgctggcagcgtcatccgccagcctggttgtcgcggcgacggaagagaagggtgacataggggcctcaaaggacccatgggctaggttctgcgccgggggcgagatcgcatccacagccactgctgcaggcgtggccgcttcgatcgcgcaacagctgaaatacgcgaccgcctttgtggaacgtattgcttcgggggcgctgaccttagagtttgccgccgagaggcgatggcttgagggaaggattgaacgcctccgcacgcaacatacggaggcggtatgggacaagttggcggctgagaataaaagttgcagtctccttgagaagctctcgatagtagagaaagcaagggaagacctcagtcgtcgacctgctgaggaaaaggcgggcgcggaaaaagcctgtgcggaggcccaggccgcccacgcagaagctgaagtcgtgcgcgctgaggctgaacttgctctcaagtgcgccgccgacaaggagtcggagctgaagagcatccgtagctattgtgagaagacggaggtctccacccgtgccggggttaagcgggcgcacacgctatttgtggaagcgtaccgcaaactcagcgcacagactgctccttttgataaatctggggaggagatgggtctccgctttcttgggtgggtgcaggaggagctggaatcactcccgtccatcgtgacgggcctcatgtgctacacatatcttgttacctgcgagggggcggcgaatgccttgtctcgagaaggatgtaggcacttcgaagtctttgaccgggcgagcgaggacttcgatcgtggaattttccaggttgaagataatgtgttaaagcggtccgttggggcgctttatgataggatgtggggtcctcatggtcgtggcaccatccgggagagggccgatcgagcacgggcacagatgatgaatgaagaagaagttgacgacctcaccgatcttgaaagctcgatgactcgaatggatgacgtggaggaggtgggaggtgaagggctctcagcacctcaggacggctccggcgaagaccctgcggcggcgtctgctccggtgcaggttcggacgtctaggcctgcgcaagcaaaccctgatgacattgatattaatgatgttttgatggctgcaaatgcaatgtttcttagtggaaatgtgtctgaggggtctgagcttgggtcatggtcttcgaatgaagaagaatttgggagtcctttctcatgggttgaggaatcttctgaggatgacctagattattttgctgtgttggatttggctgcgtcggagtctccaccgcgatctgtccctcgcaaggtgctggcaacctcggctgatgtgagagctgaagactcacggaggcgaagaatggatgtgtcgaaacagagcatcagtgagtcgtcacaaagtgggagaagacgtcgccgaatgggtatggaaaggtctcgtcttcggggtggtctgcgattggatcggggtgctcagcgtgagctactttcatcgacgtctgggacgtgcattggagagggggacttgcaggacctgtttgagggggaagagttgaggatgatgttgttcaatttttgggaggcgggtcttattccgaaggaggagcctatgtga

SEQ ID NO: 25994 - DNA, 486 bp, Zea mays
  Peptide Sequence Number=SeqID_67773
atggcacggaggatggagcagggagtcgaggggagcatcgtcggcgttggcgagaggatcgagggcttctcttctagtatggccattgcaaaaggtattgcatctaaaatgggtgtggaggcatcattttcggtcaagcgcaaagcacaggggaagaaatattttgatgaaaacgaatacaatgaagaaattctacaagctaagaaggcttttgaagttaattacttcttatttgttgttgatatggaaaacaactcattgaaaaacagatttcaagaactccagacattcaagattatatttgggcttttattgagctcgacaacattgaagtcgttaaatgatactgaactagaagcatgttgcagcgaattcgcaaaaacattctcttcgcaggacagttttgacgttgagaggaggggggctagacccgttacaaaacaaattccccgagctaaatcccgcgaatgtagccaacaactgtag

SEQ ID NO: 25995 - DNA, 1789 bp, Zea mays
  Peptide Sequence Number=SeqID_67774
atgctgaaagaaatagtgttagacagaaacagcttgtcgggacaattgatccctgccattgctaagcttcagcaactcgctaagctaaccatatctaagaacaacatttctggagaacttcctccagaggtgggcagtttgaaggacctagaggtcttggactttcaccagaacagcttcaatggatcaataccagaagcactaggcaatttgtctcagctcttctaccttgatgcaagcaagaatcaactcactggatcaatatttccaggaataagcacattgttcaacctgttgacacttgatttctcttcaaatgatttggcggggccaatacctaaggagattgctcgcatggaaaatctagagtgcttggttttggggtccaacaatttcactggaggcattccaaaagagattggtaacctaaagaagctaaaaaaactcattctctctgcatgcaacttatcaggcaccatcccttggtcaattggtggtcttaaaagcctacatgaacttgatatatcagacaacaactttaagtcagaactcccagcatctattggtgagctgggaaatttgaccgtcctgattgcaatgagagcaaagctcataggcagcataccaaaagaacttggtagctgcaagaagcttactctccttcgtctgtccttcaataggttaactggttgtatccccaaagaacttgcaggtttagaagctattgttcattttgaggtggaaggtaacaaactgtcaggtcatattgctgattggtttcaaaactggggaaatgttgtatctataagactgggagataataagttcaatggttctatacttcctgccatatgtcaagccaattctcttcagtcacttgacttgcatttaaacgatctgacagggagtatcaatgagacatttaaaaggtgtaggaaccttactcaactgaatttgcaaggcaaccatttccatggtgagataccagaatatttggctgagttaccgctcacaattctggaattgccctataacaactttactggactcttgcctgccaagttgtttaagtcatcaacaattttggagatagatctcagctataacaagctcactggctgtattcctgagagcatttgtgagctccatagcttgcagaggttgaggatgagcagtaactacttagaaggatcaatcccgccggcggtaggtgctctcaagaatttgaatgaaatctcccttgatgggaatagattatctgggaacataccacaagagctcttcaactgcagaaacttagtcaagttaaacctgagctctaataatctgaacggaagcatctcgagatccatatctcagttgacttcgctcactggcttggttttgtctcacaaccaactctctggttcgattcctgctgagatatgtgggggattcacgaatccgtctcaccctgaatcagagtatgttcaatatcatggcttacttgatctgtcatacaaccggttgattggtcgtatcccaccagaaatcaagaattgtgttattctggaggagctacacctgcaagataactttctgaatgaatctattcctgtggagcttgctgagctgaagaatcttatgaacgttgacctctcttttaatgcattagttggacctatgcttccttggtccacgccattgctcaagctgcaaggcctttttctgtctaataaccacctaactggcaatattcctgctgagataggtcgcatccttcccaacatcgtggttctaagcttgtcct

SEQ ID NO: 25996 - DNA, 591 bp, Zea mays
  Peptide Sequence Number=SeqID_67775
atggccggatggtctggccatgtggcccagatggtccgcaccccagacagtccacggggtcactccggcatctccctgagcaacatcattgagttgactatgaagaatctgtcggcggaagatcagcaggaattcaaggagcataagaagcagctgatcaaggaggccatggtaaagtacctggccaattgcaaggtggacaggcatcagaaattcgttcggcaatgggagactgacctggcattgctgccacctactacaaccgcccccaataacggtacacacaatttgtcagatgcaaatgggtgttcacaaccccaaccattgtatggtgtgccaatgaactcatgtgttggacaaccacaaccttttccaccaatctgggataaacccacaaacctgcacacggtcaaaccatctgggcctaagctcggactgtccaaccaagctgcggttgtctccatctttcgtgacaagccaccgagatccatgctaggaccaccatattctgcacaaggtctaactaacatagttggaccgtccacgtatgacatcggatcatccaagtacacaaccggaccgtctgcatag

SEQ ID NO: 25997 - DNA, 786 bp, Zea mays
  Peptide Sequence Number=SeqID_67776
atgactgaatgccatattgcctgtcaccgactgactcatgtagggaggggaaggccggtgatggactggccgacgagggtcaagatcgcggcgggctcggcgcgaggactggcctacctccatgaggattgtcatccaaggatcattcacagggatatcaagtcgtcaaacatcttgcttgatgaccagtttgaggctcaggtagctgatttcgggctcgccaggttagcggagaacgatgtcacacatatttcaactcgtgtgatgggcacattcgggtacctggctccagagtatgcgtccacggggaagctgaccgagaaatcagacgtcttctccttcggcgtcgtgctcctggagctcatcaccgggcggaagcctgtggattcgtcgcgcccgctaggcgatgagagccttgtggagtggtcaagaccactactgaaccgggcaatcgagactcaggagttcgacgaactagtcgacgtccggctcgaagggaacttcgacgacgtcgagatgttccgggtgatcgaggcgactgcggcgtgcatacggcactcggctgccaggaggcccaagatgggacagatcgtcagggtcctcgacgacagcctgacggacgttgatctcagcaacggcgtgcagccagggaagagccagatgttcaacgtagccaacacagcggacatccgccagttccaaaggatggcgtttggcagccaggacttcagctcggattacagccagtccagaccaagcataggcagcagcaggagggatttctag

SEQ ID NO: 25998 - DNA, 432 bp, Zea mays
  Peptide Sequence Number=SeqID_67777
atgtccggtgggggcggaggcggcggtgtggccgtgggcaccggcgccggtggcgggggcggtaatgcggctggtgccggtgggggaggcaatgcggccggtgggggtggagacgatgcctcaggcggcggaggggcactgtcatctggtgaaggaggaggtggtgcagaagcagccggtggtgtcgagggggaaggcagcggcggagtgggagaagccggggaaggtggtggcggagtaggagtggaagaagacggcacgtcagttggcggcggtgtggaggcgctggtcggcgacgaggaagagggaggagggccagaggcagagcccggggtcgtcaacgtgtttgctacgctgccaacgacggcgccggcaggaggctggaccagagttgccattctgttctgtcgttcgtacaactcctgcaagtga

SEQ ID NO: 25999 - DNA, 132 bp, Zea mays
  Peptide Sequence Number=SeqID_67778
atgggtagcactctaggttgtggaacacagggatggtggtcgacggctgaagtgaaggtcatgcggccccgtgctgatgatccgggagtggtgaagggcgagtgttgtgtctttatagacgaaccagagtag

SEQ ID NO: 26000 - DNA, 381 bp, Zea mays
  Peptide Sequence Number=SeqID_67779
atggaggagagtgatgagaagagaaacggaagcagtgatgctccattaacgcgagacgaacggaccgcgggtgcacggggcaggcacgcggtcggtgcgctgctcgacggggcgtcggggtcgcgacgcgtcgggcttggcacctgggctgctcggtcgggcggtgctcggccgtgggcgtcaggtcttcgtcctggcggctggcgcgtcgggtgtggggtcgcggcgcttggtgtggcggcgtcgggcacagggcgcggcgcgcctgggagagaggcaggtagagggccaggtggggccgacttgcaagagagggaaggggagggggtgaagaatggtggcggcggctgctgcctcggaagggtaggggcgcagttggag

SEQ ID NO: 26001 - DNA, 327 bp, Zea mays
  Peptide Sequence Number=SeqID_67780
atgggaaggaccctttgtcatcgcagaaataactcggccaatgtcctaccagctaacccagatgggcaggactccgcgctatgcaggggcatccccgtgaggaacattgtctataggtccaccagaagcagatggattgctcgaagcacccgatgcagcgagtacatcggccacaatgtcatcaggtaccacgacgtcgggcctctttatcaatatccagccagctcggatcgccttgtcacaccatgccttcttgataacacgatcgtcctccaagaccttgatatcacgacgggcgacttccgtgtcgcgacgagcagcttctag

SEQ ID NO: 26002 - DNA, 894 bp, Zea mays
  Peptide Sequence Number=SeqID_67781
atgtggaggccattgttgccatacacaagagtctactcgaggaggaaaaacagacccacttccctgatgcaagctgctgccaatgactctgagattgacgttgttctcagtatgctggctggcgagtcatccgagtcagcgcaagttgagtcgggggagtggagctcctggtccatcgaaatgctgggaaaaaggtcagcagtcctgaaggtactcatcgcaagcgagtacgtcgagcagattttcaggttgaatctgttgagtgcactagaagaagctatacctaaggatcttttgctcgaacttcctaagatcaaggtcgttgacgtccatgtagagtgcccagacgacgtgccctctactagcctactggctgggcaagaggtaacccttctagattgccatggctctctagctcccgaggatgctgtgatctactccctctctactgcttccatggatgttcacgtggggtcgccaatgcccaggtctgatgatgttgtggtgacaagttttgatcttctcgttggtctagctggcccggccaccttagaggtcagtggccatagcactgaagacccaatgggtgctcctggagtcgagatagcttggactaccccattcctttggcgctcagtcatgttcatgatattgtttctgttaatgtccttccttctgggagtacgtcgataccaccagccttgggatttccctcgttcctttccaaccttcagctccctcaccaccttggagaggagccatcgcttcaccatggcggagttggagcgtaagagggacgagttgaaagagtcccaggatgaggtgtcgaaactcagcaagtccttgtctttgaaggattccattatcaaggagctccgcacatcaaaaaactag

SEQ ID NO: 26003 - DNA, 480 bp, Zea mays
  Peptide Sequence Number=SeqID_67782
atgacaccatggggagtcctccttggaaaacttcgagcctccaaagtcctccaacgagccgcgcttgcccttgcctcctttgacgctggccatgtttttcttgggcgagtcggaagagaagaagaagagcagagaaaggcaagagtgagtgaagagagtgggcacaggcaagcaggatatttaaagagggcaaaggtcgagtccttgcttcctgctcgttcagcgaacagtcgcaaggacttcaatagccactcaagtttccaagaaaaggagcagatggctgacacctattcacgtaacacggcacccgaagatagtaaagtcaaccgctcaggcacaacattacctctccatcacatcaggttactatttttggacaagacagtgtacactactcgatcgatacacacccattgggtgtacaacctagatttttcgagaatttctggagcaatgagatctgtaaaatatccgcagtga

SEQ ID NO: 26004 - DNA, 240 bp, Zea mays
  Peptide Sequence Number=SeqID_67783
atggctataattcaccggactgtccggtggtgcaccggactgtccggtgagccaacggttgtcagcgccaacggtcggtcgcgcaatcttcgcgcgacacgtggtcgtgccaatggtcggttgggcacaccggactgtccgagactacaagttgtggagattcctcgcaaacgggaaaatacactaaagaaaaagaccgtggtattcaagttgatcatcggatcacttgaaaggggttga

SEQ ID NO: 26005 - DNA, 264 bp, Zea mays
  Peptide Sequence Number=SeqID_67784
atgatgatgagggtcaactgtgaggacagagtagttgggggctacttgttggttgggagaggagctgaattattgcgagctgcattcttggagattcttgctgctcgaatctcagctgctcttcttcagagggaattgccaattgcgttctgcagtaagattgatttggacaaggttggagcgaattggctgctacggcggggagttccaaaaaaaacccgtgaggttttggccttgtcgacttcttggggcatctgggagtag

SEQ ID NO: 26006 - DNA, 642 bp, Zea mays
  Peptide Sequence Number=SeqID_67785
gtgcctgaatgcatagacaagcttgcacaagccggaattaagatgtgggtcctgacaggcgataagctggagacagctatcaatattgggtttgcttgtagccttcttagacaaggcatgacacagataatcgtcacactggaacaacctgatatcatcgcattggagaaaaatggtgacaaaccaaaaattgctaaggcatcaaagcaacgggttatgggtcagatagaggatggaatcaaacaaattccaccttcaactcaaattagcactgcatcattcgcgctaatcattgatggtaaatcactaacttatgctttggaagatgatgttaagtttaagttcttggatcttgctctcaagtgtgcatcagtgatatgttgccgatcttcaccaaaacagaaggcactggttacaagacttgttaaagaagtaacacataaagtgactttagcaataggtgatggggcaaatgatgttggcatgcttcaagaagctgacataggggttggcatcagtggtgctgaaggaatgcaggctgtcatggctagtgatgttgctgttgcccaattccgcttcttggaacggctacttctggtgcatggacattggtgttaccggcgtatttcactgatggtatag

SEQ ID NO: 26007 - DNA, 357 bp, Zea mays
  Peptide Sequence Number=SeqID_67786
atgaggctatccaccacggcgcgagcatactggcgatccatcgagcgcgccaggctcgatgggtcggacgactcgaatgaggcctcctcgaaggaggtggaagactcctccgactctgaggagtggagcagcggcaagggcgacagcggtgaggacgacggtagcaatggcgacgacgacgacaagggcaacagcgacggcgaaggtggtgacggcgatggcgaaggtggcgacggcgagggcaacggtgagggcgacagtgacggcgacaacaagggcaacagcagtgacggcaaaggcgacgacaaggacgacggcggcgacggcaaggccgacggcataatgttgttggcgtaa

SEQ ID NO: 26008 - DNA, 372 bp, Zea mays
  Peptide Sequence Number=SeqID_67787
atggctacgcctccgtccaccctcatcccgcgacaggccacaccccccgatgaccacccctcgtgcgaagctcaccatgacagttgccctcgcaacagcctgcatgaccgcccttgcacgatgcttgccacaacagccaccccctgcgcggcagcgaagtctggtgaagagggtgagctaacgcgacccggcggccaccccgacgccctccgacttcagccgctccatggctccgccatccgcctccacggctccgcccaacatccgccggtcgccacacattccgctctcggcacgctctcacttcctgcttctagccgaggccaagaggcagccactcaacgcgggcttcaagttgctcaacgagagtga

SEQ ID NO: 26009 - DNA, 201 bp, Zea mays
  Peptide Sequence Number=SeqID_67788
atgggtgaggagttcgtactgcccttctcggacttccccacctctgattctggcaccctcatgctcacgccactctccctctacctgaccagcaccggctttgaggtcgcctcaccgggccaccgcgacgtcgtcggcttctcggccatcgcgaacgcccacgccggacgctgcaagctatgtaatatgtttgaattatga

SEQ ID NO: 26010 - DNA, 594 bp, Zea mays
  Peptide Sequence Number=SeqID_67789
atggccagatgcgctggctggcctccagggtttgaaagcaacaaacctgatgctgatttgggcccctcccgacgtaaagccgcacctgctcgccgacgtcgatgtgaagccactgcttcttctcccgtcgccgctccacccccgggctacggcgcgctcgtgcccgtgaagaccgaggagcccgtgcccgtggccaccgtctcgtctccgcccagggcgctctcaccgccgcgcctctgccgtattattgagttgcacacatttcagaactgccgccagccgcaccgccgccaactccacgccgcaggcctcccctcccacgcctggccgcccccggccgcggtgggctatgggatgatggaggtgggcggcacgggagcgggtggaagggacgagagggtaccgcagtggggcgcgcaggagacgcgagagctaatcatggcgcgcggggagatggagcgggagactgtcgcggcgtgccgcagcgccaagacgatgtgggaggccatcgccgcgcgcctccaggagcgaggctaccgacgaaccgccgagcagtgcaagtgcaactggaagaacctcgtcaactgctacaag

SEQ ID NO: 26011 - DNA, 279 bp, Zea mays
  Peptide Sequence Number=SeqID_67790
atgggcggcgcggcgagggacggcgcggtgatgggtcacgacgaggaggcacggcgaggaggcggcgatggcgatgggtcacggcgatgggtcacggcgatggcgatgggtcacaacgaggagcagcgtgacgatgggtcacggcgatggggcacggcgaggaggcgggcacggcgagggccgggcacgccgatggggcacgacgaggaggcgggtgcgacaatggccggcgctgcgatggggcacggtgaggaggcaggcacggagatggtcttttga

SEQ ID NO: 26012 - DNA, 267 bp, Zea mays
  Peptide Sequence Number=SeqID_67791
atgaagcgcccgcgcttgcggcccggcggcgccggcggggcacagtgcccgtcgtgcgcggtggacggctgcaaggccgacctaagcaagtgccgcgactaccaccgccgccacaaggtctgtgagacgcactccaagacgcccatcgttgtcgtcaccggccgcgagatgcgcttctgccagcagtgcagcagaagtcccattgtcatttgcaagaagaccaagggcatgtccagttatgcacttaatatatttagcaactattga

SEQ ID NO: 26013 - DNA, 168 bp, Zea mays
  Peptide Sequence Number=SeqID_67792
atggccgagctggcggcgaggaccccggcggcctaccagtcagcggctagcgacgatcacgcgagtgtgggttacgagcggctggcagtgggcccgcatggtcagtcacagcgtggcaagcgcacgcgcccgcagttatggagtcggctagcacaggccgcacggtag

SEQ ID NO: 26014 - DNA, 195 bp, Zea mays
  Peptide Sequence Number=SeqID_67793
atgtctcaagataagaaagttgttgctgaaatgaagctgagcctttctgaggagaagaatcttggctttcttgaatcaatagcgaaaacaaatacagagctgttgggggccttcggcttccgaagtgtgaagaagtataaggagtacgaaggatggtgcagagccgaagttatgagcaggagagcttcggcatga

SEQ ID NO: 26015 - DNA, 1071 bp, Zea mays
  Peptide Sequence Number=SeqID_67794
atgctgccgccgtgggacgtgacgctgtaccagaaactggacatcaccgtgggcgacgtggcgcgcagcctgacgccggcgaacgtcatcgggcagggctggtccgggtcggtgtaccgcgcgagcgtgccgtccacgggcgcggccatcgccgtgaagaggttccggtcgtgcgacgaggcgtccgccgaggcgttcgcgtgcgaggtgggcgtgctgccccgggtgcgccaccgcaacatcgtccggctcctcgggtgggcggccaaccggcggacgcgcctcctcttctacgactacctcccgaacggcaccctcggcggcctgctgcacagcgccggcggcgggtcggccggcgccgcggtggtggagtgggaggtgcggctctcgatcgccgtcggcgtggccgagggcctcgcgtacctgcaccacgactgcgtgccggcgatcctccaccgcgacgtcaaggccgacaacatcctcctcggcgagcggtacgaggcgtgccttgccgacttcggcctcgccagggtcgccgaggacggcgccaactcgtcgcccccgccgttcgccggctcgtacgggtacatcgctcccgagtacgggtgcatgaccaagatcacgacgaagagcgacgtgtacagcttcggggtggtgctgctggaggccatcacggggcggcggccggtggaggcggcgttcggggagggccggagcgtggtgcagtgggtgcgcgagcacctccaccagaagcgcgaccccgcggacgtggtcgaccagcggctgcagggccgggcggacgcgcaggtgcaggagatgctgcaggcgctcgggatcgcgctgctctgcgccagcgcgcggcccgaggaccggccgacgatgaaggacgcggcggcgctgctgcgcggcctccggagcgacgacggctccgccgaggcgcggaaggtcagcgggtcgaggccgccgccgctggactcggccaggtgggccgctgcctcctcgcccgccaaacccacggccctcccgcggccgtcgccgtccgcgtccagctcgctggcgtactcaatgtaa

SEQ ID NO: 26016 - DNA, 120 bp, Zea mays
  Peptide Sequence Number=SeqID_67795
atgacggctgagccggagctgcggcgtgggtcccacgactcggtgaccaacaccccaggcacaagtgcaccacaggatgatgaggctgtcttgcaaaatttaatagaattccaaatgtga

SEQ ID NO: 26017 - DNA, 393 bp, Zea mays
  Peptide Sequence Number=SeqID_67796
atgaccaacgtagagcaggttgttcgtacatgtgaaggctgccagtactacgcacgtcaaacttatatgctgtctcaagccctacacaccatccccgtcacttggccattcgtggtttgggggctggacttggtcgggcccttcaagaaagcgcccgagggctgcagcgacctgcttgtggtagtttataagttcaacaagtggattgaggccaggccaattgccaaactcatgtcgtcggaggccgcaacctccttcagcgacatcatctaccaatttggggtgcccaactccatcatcaccgataatggcacccatttactagggaacctttcctacatctctgcgatgacttcaacatccgtgtcgactgggcggctatggagcacctga

SEQ ID NO: 26018 - DNA, 192 bp, Zea mays
  Peptide Sequence Number=SeqID_67797
atggccatgatgggttcaacatcgaaaaagatgtacctctgccaggtgaagaagcagcaaacttttgttgcttctgttccaaagtcgtaccaaaagaagagaatcaagactaaaagctgcgagaggaaaggccctccgttaaaaactgttactttttatttgggaggggtttttgcctcccatgttatgtaa

SEQ ID NO: 26019 - DNA, 153 bp, Zea mays
  Peptide Sequence Number=SeqID_67798
atggggatagcaaacaagaactcattaaaggatggaattaagacgaagcttgcaaggtggaaaagaaagggaaacaatcaagggtcaaatattttgaaatatatgctagctcaaatgaccatcctcaataagaagtatagaagagttacttag

SEQ ID NO: 26020 - DNA, 255 bp, Zea mays
  Peptide Sequence Number=SeqID_67799
atgggagagaagcagggaaaatcgcggcttgggaaaatgccagggagagggacgcgccaccataggcgagcgctggggcacgcaggccgagcagggagcgcggcggccatgggagatggtggccaagctggagctgagcgcgcgcagagaagggaccaggaggagttatttatatctgaaagtgttgatctgagcgagaagcaacaaaccgacaaaactgattttggcttcaataatttgctctgcctgatttga

SEQ ID NO: 26021 - DNA, 324 bp, Zea mays
  Peptide Sequence Number=SeqID_67800
atgagcggcgcgcaaggttcgggaacccagggttttatggccggtgaggttgggcagttaacggccatcggattccacgaatcccgcgagctagcggacatcagggccatggctgttgcggcggtgaggatcgcgcggataacgctgacagcacgggcccacgcggaagtgagagtcttgcgcgcaggagagagggtgctggcatgtgggcccgacttcacagcgactcaggacgacgcgtgggtgcggcaaagaaccgggccgcgcgtgaggaaaacaccaatgggccaaataggtgattcaagaatttcttttagggtttaa

SEQ ID NO: 26022 - DNA, 219 bp, Zea mays
  Peptide Sequence Number=SeqID_67801
atggcgagagtagcgtgtaccctccgtggcaagaggctggacggtggtgtatctatgctctcggttgggtattcagatgatcaagcgtttgcagttaacttcgttcttgtcaccaacttgagcactggggttaccaaaggaggacgggacatacctgaggtcaacactatggatattgttcaaggtgttccaagggagctcaccgagaagttgatttga

SEQ ID NO: 26023 - DNA, 144 bp, Zea mays
  Peptide Sequence Number=SeqID_67802
atggctgcggagaccgtccgtggtgacatccgaagacaacaatctccttcgatgcggtgcatcggagggcgtcctcctccgaccacctgcgacctaatggccttggaaacaaaaatatcatccaaatttgcgcgcatgcaataa

SEQ ID NO: 26024 - DNA, 3015 bp, Zea mays
  Peptide Sequence Number=SeqID_67803
atggcgcccaagagcaggcgtgggaaggccaagggcgagaagaagaagaaagatgagaaagcttaccaatctgattccgtcttgtacgtggttattgtagttctccctgtggccattgacatcactgtcaacctcccggaccagtctcatgtcattctgaagggtatttcaacggacaggatcatcgatgtgaggcggctgctctgcgtcaacaccgccacgtgtgccatcacaaattattctctcacacatgagatgcgtgatggtgcgttgaaggatgccgctgacattgctacactaaaaccctgcactctcacattggtcgaagaggagtacagcgaggagagcgcggtcgagcatgtccggcgtctgctggacatcgtcgcttgcaccacctgcttcggcccagcgccgccacctcctcctccgccgtcccccaaggacgccgatgccgctaaggagacatccagctccagctccacatccaaggccgtcgcatccgcctcctcgggtgggcgccgcacggcctcaccgccgccggcctcgccgtcctccgctgccgcgaaggagtcgtcagccgcaaaggaggcagcagccaaggagtccgcggctgcggtagagctggaggccgagatgagcggcgcgtgccctcgcctcggcgccttctacgagttcttctcactagccaacctcacgccgccactccaatttgtaaggcgagtgttgcagcctcgacaggaggaacagccttcggatgaccatctgttctttcttgaggcaaagctatgtagtgggaagttccttgttgttgaagctcggcgaaagggattcttcagtctaggaaagcagcgagtcttgtgccacaacctagtcgatcttctgaggcatcttagtagagcatttgacaattttggaaattttccttatgggtttcgtgcaaatacatggcttgttcctccaattgctgcgcagtcaccatcaacgtttcctcctcttcctgctgaggatgaaacatggggaggcagtggaggtggttggggaagggatggaaagagcgacatggtgccatgggcagatgaatttctctatctcacatccatgccttgcaaaactgctgaggagagggaactccgtgacaggagagcattcctacttcacagcctctttgtagatgttgccatctttcgggctattgcagcagtaaggcatgtaatggagggtacagagttatcggcatcaaccaatatagatgaagtcttgtattctgagacagtgggacattttagcatcactgtcacaagagattcttcagatgcaagctgcaagatggacactaagatagatggaaacagagccacaggaatggactctaaggatcttgcggaaagaaaccttttgaaaggaataactgcagatgaaaacacagctgctcatgatgtcgacagtttgggcattatcaaccttagatattgtggatatgttgcagtagcaaaggtggacaacatcgacaaaaccaaagtaaatgcttctatcaagcctatgaatatcgcagatcaacctgaagggggtgcacatgcattgaacattaacaggatgctccttaatgaagccacctctaccggggagaaaaagatatcaaacctttcacaaaatcataggcaggaagaactaattgcggcacaaacttttgttgagaagttattgaaggaaagtcttcaaaagcttgaggaagaggaaaatgtaaaacattcatttatgagatgggaacttggtgcctgctgggttcagcatttgcaggatcagaaaaattctgataaggataaaaagcaaggtggtgagaaggataagaaaaaaacactggacaaatctaaagaaccaaagattgaagggctagggaagcctctcaaagctcttaagaatgcaaaaaatgttgattctgctgacctgggttcctcagcgggacccaaaagctctgcagaaagccagaaagataagccatcagatgttaaattgcctcaaggagagtccagtgcttctgagaatgaaaatctgctgaaggatttattaccagaatctgcttttaccaggttgaaagaatctgaaactgggctccaccagaagtcaccacctgagttgattgagatggctctgaagtactatgatgaagttgcacttcctaagctggttgctgattttggttctctggaactttcacctgttgacggtaggactttgactgatttcatgcataccagaggcttacagatgcgttctctaggacgagttgtcaagctttcagagaagctttcacatgttcagtccctatgtgtgcatgagatgatagtgcgtgctttcaagcatatcgtccgttctgtgattgctgctatttcagacattcgacaattagcactaacaatagctgcagcgttgaacttattgcttggtgtccctgaatctgatgtctctggaagttctcctaatgtgcatcccctagtatggagatggctggtgatcttcttgaaaaagagatatgaatttgagctcacggagaaacattaccatgatgtgaggaaatatgctgtccttagaggactgtgccataagcaagttgcatgctcatctgcagatggtaggcaactgctagaatcctctaaaactgcccttgacaagggtaaacttgaagatgctgtcaattatgggaccaaggctctttccaagctcataactgtatgtggtccctaccaccgaatgacagctggagcttatagtctgctagctgttgttttgtaccatactggtgattttaatcagcatgagcaaacaaccttgcaaatccttcgtgcaaagcttggaccagatgatctaagaactcaggatgctgctgcttggcttgaatactttgagtcaaaggtaattgagcaacaagaagctgcacggaatggaactcggaagcctgacgcatcaatagctagcccaactattcctattataaatgcatctctcaacccctactag

SEQ ID NO: 26025 - DNA, 555 bp, Zea mays
  Peptide Sequence Number=SeqID_67804
atgtcaggagctcacgccaagaaggagatggtgaccggcgagaagcctgccacaagccacgggaaggctccatcaggggagtccggcaacaagaagagggaggaatcacctccccgcgtcaagtcgcactggagtggcgacaagaagaagaaaatgaagaaagtggtctactacgagaccgattcttcgttgccatccacctccggctccgacacgacgtccgtcacttataagagccatgagcgcaagaagtttagtaagatccccttacgctatcctcatatttccaaacacactcctttactttccgtcccactaggaaaaccaccggtttttgatggtgaagattattgtatgtggagtgataaaatgaggcaccatctaacctcactccacgctagtatttgggacattgttgagtttggtgcgcaggaaccatccatgggggatgaaggctatgactcggacgaggtagcccaaatccgacacttcaactcccaagccactactatactcctcgcctctctaagtcaagaggagtataacaaggtgtaa

SEQ ID NO: 26026 - DNA, 549 bp, Zea mays
  Peptide Sequence Number=SeqID_67805
atgaccattggggaactctactgtcgacgggcgcaccggacagtccggaaaaggtgtaagcctatttccctttcagttattgctataaaaacttctcagaacagtaatgaaggtagcacaaaggagctgaaggctattgttcttgagttgcagcaggagcttcaagctaaagatgtccaaattagcacaatcagttctgatctatcatgtcagttaagggctgctgaatcttctgcaaagcagttctcagttgatcttgaagatgcaagaatggagctccaaaatttggagaaacaagttgatgtattgcaaaatcagaagaaggatttagaaactcaattaaatgagcataaaaatatggaatcaatggcaagtgagcaacgtggaagaattgagaaattgactgatgaattaagcagaaaagatcaagaaattgaaggtttggtgcaagcactcaatgaagaagaaaaagagcttgaaatcttggagaataaaagccttcagttggagcaaatgctgcaagagaaagaatttgccttgaagacctga

SEQ ID NO: 26027 - DNA, 567 bp, Zea mays
  Peptide Sequence Number=SeqID_67806
atgaccgagaaagatgcttcggatgcgaagcctgggctaatcagacttcgttataaatacaagtttgaagatgaatttggagagccttgtgatgagtggctagattctatcgaagcgagcgcaatgagattcttggcaactatagcaaaccggaggtcgaagcattgtatagagcctttctgtcgtgaaagaaatgagaccaagaagaggaaaaaacaaatgatgaaggtgacaacaaagcaccacaaaatcttgaaggtaaagcctgaggtgacaacttcccacacttctgaagagacagcaattatgttggacgaggaaaaaaccggttctatgaagcctgcaacgacaagtgacaagggtaaagggcctgcagaaatcgaggaggccaaaaaagacattgaatatgacacaccagtaggagaagggccttttgatcaagagtttggagaccggcggtatagggttcaccatttggccgagaaggttatgagcgccaaacaggtggctgaggctattggcttcgccgaacaacttgggtgcccttcaaggtgtacaatcttctag

SEQ ID NO: 26028 - DNA, 441 bp, Zea mays
  Peptide Sequence Number=SeqID_67807
atggtgtcagcatcacagatcctggaactgtctaaagactataaggccaaattttacctacagaaacctgacagcacaaggatatctgttgacagtgataagagggctggaaaacatggattggatcagagcagaagcatttcgaacaatataagttgtagtgtgactggaggaaggaaccctaccttccaagttaaagatggagaggttggtcagcaagatgcaggtcatcagagtgcaagccatgttttccagatcatcgactactccaggtttgtaagtcagcaagatgcaggtcatcagggttgccatcaccagatctttcacgagattcacccaggatcaagttctggggaggtcaaaggggaattgatcactaacaaggtcattgcaggacctacaagccctctgtgtttttccttgaaggcatgtgcaccatag

SEQ ID NO: 26029 - DNA, 492 bp, Zea mays
  Peptide Sequence Number=SeqID_67808
atgccaagatgtataattttcaagaatcaacccttggaaaatgaggaggatctttggattatgttcaggcctattgtttgcactaatgaaaccaccctaattccaagagctcaaccaagggatgcagcttcatcattagatgggaacgaagatgatgatctagtccatctgggagacaacctaaacccaaagcccaacactaaagcaaaaggaatgagacaagttttgcatgattccccactgctgaagaagaaaaaggatattatggatgaatacatgaaaaggattgtgcaagctattaagtctaggacgtttagctccaaaaagactgtgacctccttcgacaatgatctgatgtcagatacagacaacaaagttactaatgaggggtatttgctggcattgcttgcaatgtacatatggaaatacagggacaatgctgaattacaaatgtacctttggcttgagagaagaaaaatatatgaggactag

SEQ ID NO: 26030 - DNA, 240 bp, Zea mays
  Peptide Sequence Number=SeqID_67809
atgaaggaaagaggggataggggtgaggatgggataaccctgggaggcaaattggagatggaagcaagaaatggacctaaaggggctttaccgtctaccgatactgaatgtatatacttcgtaaagggcattagtaaatgtcccatctctgtagagaatattagtgtctaccaggatggtgtctaccatgtctacaggatattagtgtctaccaggatggtgtctaccatgtatccatag

SEQ ID NO: 26031 - DNA, 1296 bp, Zea mays
  Peptide Sequence Number=SeqID_67810
atgagaaaagatgcaccaacacgcagatcgacgccgccattacctccatctcctaccctcacccgcacacctcccttccgcccggggcgtcgacgcctaggtctgcgtcctcgtccaacctccacccgctgccgctaccctcacccgcacacctcccttcgaccatgggatgtggtagtggcttacttctcagtcatcttcgtgatcgtcgtccgaccatggggatcgaatgcgagcagtagcaacatacaggaacacacggacatgaagatggatgatgatggcgatgactacaccttcgacgctgcccagccgcttcattatctacgatttgtaggcgacgctggtatcatggggccaccgctgctgtactcaatcttcaaacggccgaaatcccttccatgggttgctccggtggagccagagacgaccatcgtgccactgggatggctcctactggttgacaggaatccgtcgccgtcgcccactcccgcggacaaaaccgagagcgacgacaacctccgatgggtgctgactgctgagacaggaagacacatcttgctttcccatattgctagccacgagggtctttactacctgtcggggaccataattaggggtaccctcaagacgcctaattctcagctgagtgagactgacaggcagtcaggccttgccaaaggcgccataggaagctccgcccgacccagggctcggactcgggctcagccccggaagatggcgaactccgctctgcccgacccagggctcggactcgggctaaagccccggaagacggcgaactccgctccgcccgacccagggctcggactcgggctaaagccccagaagatggcgaactccgctctgcccgacccagggctcggactcgggctaaagccccggaagacggtgaactccgctccgcccgacccagggctcggactcgggctaaagccccggaagacggcgaactccgctccgcccgacccagggctcggactcgggctaaggccccggaagacggcgaactccgctccgcccgacccagggctcggacacgggctaaggccccggaagatggcgaactccgctccgcccgacccagggctcagactcgagctcagccccagaagacgacgaactccgcttcgtccgaccccagggctcggactccgccctggcctctgccgaacaacctccgcctcgcccgacccaggagctcgggctcggcctcgaccatggaagacagactcgacctcggcttcggaggagcctccacgtcgcccgacctag

SEQ ID NO: 26032 - DNA, 333 bp, Zea mays
  Peptide Sequence Number=SeqID_67811
atgacagttatagagatcttgttcgagttagacaacacgactgtccttgttactgaggaagaattttgtgatcttagtctagacaccatgagtggtgatctcgtcatccatgaccatgttgaggaggtcgtcgatgagagtggcatggagccacatgagaacgcgtccaagaacgacgtggaagaggcgacaccaccagcgatacatggtggggagagcatgtcgagcctaatgttgatgaggctagtgatgctgacggattatgccacactagcgagggaggctgtgagaacgccgaagttggatgagctgacgaggctaacagtctggtag

SEQ ID NO: 26033 - DNA, 110 bp, Zea mays
  Peptide Sequence Number=SeqID_67812
atgttgatggaaggtcaagagtttgaggactcgggactagccgtaggggtccgaaccatacagaagtcagtctactacgtcaccgaagtcctcaatgaggcaaaggccag

SEQ ID NO: 26034 - DNA, 348 bp, Zea mays
  Peptide Sequence Number=SeqID_67813
atgatgccatgggcatcgcacgtgcagggacaagccgacgcgaccggggacaagagtcacacatgccacatggactgttcggcgtgggggaagagggagtgggcaagaaggcgctatgagggaggggtttcaagcgggctgggaggggcggttcggcaagagcttgtgggcatgcgctacggggcggacagggtggaggggcagatggaaattggggggaggcgggctgacatgtgggccccgcggccaggtggcgacggtggcgcaagcgcagcgcgtggggctgagggaaggccgtggcggctgggcgttgcccacgcgcgagtagctgggagcgcgacgcggtag

SEQ ID NO: 26035 - DNA, 2628 bp, Zea mays
  Peptide Sequence Number=SeqID_67814
atgaagcgcgcgcgcagctccgaggtattcatcggcgtaggccggctgcgcgcacgcaggggcctggcgccgcttctcgcagcggcggctttcgcctacctactgttcgtgtccgtcaagctcacttacctcggcagcgctgggcccgcgcctgccgtcggccgcctggccaccaccggcgcgggcgagccagctgcgcgcgcgcgctcgagcggcggcggggccgtgtccgggtacggccgcatcaccggcgagatcctccggcggcacgaagccttcgaggagcggcggaagcggtgggggcagctggggaacttcacggagctcgagcgcgtggcggccgaagcgtgggcgctcggggccgccgcgtgggaggaggcctctgcgttcgacggcgacgtcgactacatcgcctcccgcgacgtcgccggggagggcacggccaagtgcccaggctcgctcgcgctcggcgccggggagaccacggcgttcctgccgtgcgggctggccgccgggtcggcagttaccgtggttgggacagcgcggacggcgcggccggagtacgtcgaggcgctggagcggagcggcacgggcaacgggacggtgctggtggcgcagttcgcggtggagctgcgcggcctgcgcgctaccgacggcgaggagccgcctaggatactgcacctcaacccgcgcctgcgcggcgactggagcagccgccccgtgctagagatgaacacctgcttccgaatgcagtggggcagggcacagcgctgcgacagtaccccttccggagacgatgacctggttatgatggcctcctttagacctttgtacttattcttgcagcttgttgaccttgcagtcgatggactaagaaaatgtgagaaatgggactggcaggacgtagttgaatcgaaagaaacaaagacaagctcatggttcaacagattcatcgggcgagcaaagaaaccagaaatgagatggccattcccattttcagaggggaagatgtttgttctcactatccaagctggagtcgaaggataccatatcaatgtgggaggccgccacgttgcctcatttcctcataggatgggattcgccctcgaagacgcaacaggtttagccgtgacagggggcatagatgttcactctgtgtacgcaacagcgcttccaaaggcacatcctagcttttctctccagcaagtcttggaaatgtctgaaaggtggaaggctcgccctgtgccagaggaaccaatccatcttttcatcggcatcctctccgccacaaaccatttcgccgagcgcatggctattaggaaaacttggatgcagtttccggctatccaatcggggaatgcggttgctcggttctttgttgcgctgagccacagaaaggagataaatgcagcactgaagaaggaagcagagtattttggagacatagtcattctgccgttcatcgaccggtatgagctagtggttctgaaaacggttgcgatatgtcaatacggggtgcacaatgtcactgcagattacatcatgaagtgcgacgatgacacctttgtgcggctggatatagtactgcaccaaatcagtacctacaacaaaacctcacctctgtatctgggcaacctgaatctcttgcacaggcctctaagaaggggcaaatgggccgtcacctacgaggaatggccagaagcggtgtatcccccgtacgccaatggacctgggtacgttatctcggccggcattgcgagagacgtagcatcccggcatacaaaccactccctacggctgttcaagatggaggacgtgagcatgggcatgtgggtggaggactacaacgccagcgcccccgtgcagtatgtccacagctggaggttctgccagttcggctgcgtggacaactacttcacggcgcactaccagtcccccaggcagatgctgtgcctctgggagaagctgtcagcggggagagcgcactgctgtgcatcaaggctcatgaccttcgttccattcgcctggcttcggtggttcggttccatacgaccatctgctcagatgactaatgccagaaaccatgatctcgacaccgcatgttctttggttcttagattgaaggccgccggcctatttgtagaactgcaaatccgtacccactggaacgggaaattgtctcccctgtgtggcttcggcgcacagcgcacagctgctggaccagtggaccggcgggacaaggaaacccgcgcggtatccggtggttttgccaagaccctcccccgtttacaagccagaaggcaagctataggcgaaacttcgggggtcgtcgagggttctcgaccctcccttcccctctctcgcccgctcgctccctcaccgccggcgttctcgccgccagctacggacggggcacactgcgcagggtcccagccccgcctctcacccgaacgtcttcgctcccctcaccgggtaggcgtcgcgctctactggcaccaccccggccctcgcgctctactggcaccggaccggcgcggggtggcgcggagacctgtcccggccaggagaccgttccgtgctataccggcgctgatccgcacctgcttcgtggcgctgctgcccgactag

SEQ ID NO: 26036 - DNA, 261 bp, Zea mays
  Peptide Sequence Number=SeqID_67815
atggccgattctaaagatctcaacaacgtttcccctagcaacgacataaggttgattatggatgatttgtcggtctatgagcataaagaatttgaagactacatgaagaagctggatgaggaggaccagcgacgacgagctcagcttcacgaggagtgctatggcacactcagcctcagggcaaggtgtgtagctcgtcttgcgctggggaataaggcgccaaaggggtgtccttggggcgacgccttagggggcatgtag

SEQ ID NO: 26037 - DNA, 258 bp, Zea mays
  Peptide Sequence Number=SeqID_67816
atggccggccccccgtcggcgtcggctggtccacgcgcgcatgtagtcggcagccgggggccgcgcgcgtcggggttggtcgttggagagttccgagacagcgacgcggtgcgcgccagccccggcaggccacagcccacagctgtcgctaccgcggcctgtctgtcggtgccgccgcacgttcgcccccgaaatctcatgaccgcctccggtgacgttcagtggaaggagatgaagcagtcccagtcaatgcggtaa

SEQ ID NO: 26038 - DNA, 624 bp, Zea mays
  Peptide Sequence Number=SeqID_67817
atgcgcgctggcatgcgtccatatatgtgggtgcaggcgcagtacctgatgctgctgtgctcgttccgggagcagctgcagcagcacgtccgggtgcacgccgtggaggccgtcatggcatgccgcgagatcgagcagtccctgcaagacctaactggggtgacgctggaggaagggacgggagcgaccatgtcggaggaggacgaggacgaggcgccgatgctggaggtgggtctggtggacatgggctccgacgggcacgacatgatgggcttcggcccgctcctgcccaccgactccgagcgctcactcatggagagggtccgacaggagcttaagatcgagctcaagcagggtttcaagtcaagaatagaggatgtgagggaggagattctgaggaaaaggagggccgggaagctgcctggggacaccaccagcatcctcaagcaatggtggcagcagcactccaagtggccataccccacggaggacgataaggcgaggctcgttgaagagaccggcctgcagctgaaacaaatcaacaactggttcatcaaccagaggaagaggaactggcacaacaactcccagacgtcaaccctcaaatcaaagcgtaaaaggtga

SEQ ID NO: 26039 - DNA, 630 bp, Zea mays
  Peptide Sequence Number=SeqID_67818
atggcggccgcgtcgctcaagttcgcctcccccaaacccttggcctccgcaccgtccgcgctcctttgcgggcgtcgcgcccaggcgcggcccctcccagcaagtcgcctccctccgcctacccgcgtcgccgtgcatccccccgccgcgccggtcgcgacgcgcatcggctcctttgacaaggttgcttcatttcgtttgttgctgtcgtggaggtggcgttggcgccaggtactggaggcgctgatcggcgggaccgacttctccgaggaggatgcggaggcgacgctgaagctgctcctggacgagaaggacgaggcgcgcatctccgccttcctcgtcctcctcagggccaagggcgagaccttcgaagagatcgtgggggttgcgaaggcgatgttgagctgctgcatccgagtcgatggtctggtcgacgccgtcgacattgtcgggacaggcggcgacggcgcagacaccgtcaacatctccaccgggtccaccatcctcgccgccgcggccggcgccaaggtcgctaagcaaggaagcagggctagctcgtcggcgtgcggcagcgccgatgtgctggaggcgctcggggtcaacatcgagcttggacccgaggtattctaa

SEQ ID NO: 26040 - DNA, 482 bp, Zea mays
  Peptide Sequence Number=SeqID_67819
cgggggcgagccgaggaagaagaggtcgccgccgccgccaccgcttccatgtctgggggaatcgcccgcggccgccttgccgaggagcgcaaggcctggcgcaagaaccacccgcacggtttcgtcgcaaagccggagtcgctgcccgacgggacggtgaaccttatgatttggcactgcaccatccccggcaagcaagggactgattgggaaggtggatacttcccactcacccttcatttcagtgaggattaccctagcaagcctcccaagtgcaagttccctcagggtttcttccacccaaatgtctatccttctggaacaggttggagaccagctattactgttaagcagattctcgtcgggatccaggacttgctagatcagccaaatcctgctgatcctgctcaaacggatggctatcacctttttatccaggatcctacagaatataagaggcgtgttaaactgcaggcgaagca

SEQ ID NO: 26041 - DNA, 657 bp, Zea mays
  Peptide Sequence Number=SeqID_67820
atgagcccgtgtccgacgacgggcgcggggccgtcggagagggcgcaggagatcgcgcggcggcgggaggagatgctgcacgacctccccgagtccgagtacgagctctcgctcaccgacctcgtcgagaaggccgcgggcgggggcgactgtggcgaagccgcgcccgcgcccatggcagaggggaaggacccgggcgcctcacggccggcgcccggcgggcagctgccgcccgcggcagcgaggagggcgtcggcgcggcggcgggacagcgggggcagcttccgcttccgcagcagcagcgacggcgtcctgctcaacttctacatgccgcggtcgctcacccggagcttcaccgcgccgcgccccgcccggacgccgtcgtccgcatccggctgccggagccccaccatcgcatccgactgcagcaagagggagagggactcggacgccgagaccgtcaagtgctggtcgttgctgtgggatcggcggtggcgcaagtccagccggcgggacccgggcgcgccgcccagcgagagcgagtccgccatccgcgccgcgtcggtcgtcaaagcgaagcggccaagcactccgctccgccggcccatatctgagccgactttttttcgtccgtctcctgccccgcctgccggataa

SEQ ID NO: 26042 - DNA, 1718 bp, Zea mays
  Peptide Sequence Number=SeqID_67821
ccgccaacccctactaccccgccgacaccaagctgctcaagaagcacctgcagcagcaggccacgcccacgcccacgcccaccaaggacatccaggagatcgtccgccgccagcaggagcccgcggtgcagctcgccaaggccgtgccgcagccgcagccgcagccgcagactcctccgccgccgccgcctccgcagcacaggccaccggcgcggaagacgcccggcagcggcgtgtcggccacgactagcggcgggagcgagcgggacggcgccacgcctaggagcaccggcagcggcgcggggctgccggaggtctcgcacctcgggtggggccactggttcacgctccgcgagctggaggaggccaccggcgggctcgccgaggagaatgtgatcggcgagggcgggtacgggatcgtgtacaagggcaccttgcacgactccactttggtcgccgtcaagaacctgctcaataatagggggcaggccgagaaggagttcaaggtggaggtggaagcaatcggtcgtgttcggcacaaaaatctcgtcaggttgctcggctactgcgtagagggtgcttacaggatgctcgtgtatgagtatgtggacaatggtaatcttgaccagtggcttcatggtgatgttggcgaagtgagcccactgacatgggacatcaggatgaacattatgcttgccacagctaaagggctggcctacctccacgaggggctggaaccgaaggtggtccaccgcgacatcaaggctagcaacatccttcttgaccagcagtggaacgccaaagtatcggatttcgggctcgcaaagctgttgtgctcggagagaagctacgttacgacccgtgtcatgggaaccttcggttacgtggcgcctgagtacgccagcaccggcatgctgaacgagaggagcgatgtgtatagcttcggcgtgctgataatggagatcatcaccggcagatgtcctgtggattacacaagggcggctggagaggtgcagctggtggagtggctcaagaacatggtggccgagaggaaagcggaggaggtagtggacagtaagatggccgagaggcctcctcccaagacgctgaagcgggcgctcctggtggcgctccgctgcgtggaccctgacgcgaacaagcggcctaagatggggcatgtgatccacatgctcgaaatggacgatctccagttccgagacgataagaggcccggggccgggagagatggtcgtcgtccccagggtccggatagattggtcgtggatgtggatgtggatgtggatgggtccaaaaacaagggcctggaggattttgcagaaaagaaaacgacaggcaggggggcacacaacaacgtagctggaggcaaccagcgagttctttcatgccagctcgatgaagtctgtggctcaagtgccggcggtagtccaggattaaagccacgaaccaaacagcccctaagtatcccttcagatgttttggatatactcaattgttcacaaataacatcttccaaaaacatgtcatcagccgcagataaaaggcacaatcagagtttgttcctttcggggccttttatgcagctggcacatggaccagggaaacgaccgcaacaaacagcgacatatgttacggagatcgacaaccagagtgctcaagcaaaatttctagtcagtgtgatcattatgacgaagccttag

SEQ ID NO: 26043 - DNA, 192 bp, Zea mays
  Peptide Sequence Number=SeqID_67822
atggcgaatatacaagcttccttgcgtaccatcacaagttcacaacaacagattgggaaaaataagaaaaattacacgtctccactagcacttgcacagtacaaggcgccaatggccgcacgggaggaaagcagtggaagcagttgctgccgctcctccgaagtccgaacccgtctcgctgaccagtgcaac

SEQ ID NO: 26044 - DNA, 822 bp, Zea mays
  Peptide Sequence Number=SeqID_67823
atgtcgattccgcctgaacgctactcatgcgcgtgcacggtgcacctgaagaaacgagccatttaccgcgcggacaagcaagcaaactgcccagaagaacggctctccacttcacacctgtttgctgtttttcatctcccgttcacctcgcgtgccgcatgcgcgacaactagagcgaccgccgccgctctacgcccagctgcccatgtcttcgtcgggcccttcgccggcgacgggaacccaccacaccaggtcaacaccgttgcaagtaattcatgttttgggaaacttcatgagaatttggttgttcctacagttgtcaatggaggaatcctggcattctactttgtattatggggtaaaggacttcttgcttgtggtccactagttcattctgacttgagagctgcacacatgaatttgcatgattgcatttggggatggggagttgcacttactctcctcgggttgtgcaatagctttggaagtgaaccagtggagaaggcagcacaaactattggagtgaaagcaatgatggtgccaattactgctgggatcttgtctgctttaaggagagtattagctcggcgtgtttctctcaagaatcaacttaaaaggcggctccatgctataactattgcttctgctacttgtttcctttttccgtttgccatgtgggatacgatcctaggttcggcatctgacagcattgttaaattacaactaccaagttgggcatactttagtactgttttatttggaatggtgcttatattctatgttgacaatgttgctgaagaaaaatcgcaaagtgaaccttga

SEQ ID NO: 26045 - DNA, 1047 bp, Zea mays
  Peptide Sequence Number=SeqID_67824
atggcggccgcggcagtcgctggcatcgtcagcaacgacgcgccacggaagcgcccgcgtcgcccgcccagcggcgtcagaatggaggccatgagcagaggcggtggctgctgctgctcgagcagcgacaagaagctggaggccgcggagccggcgacgacgaggctggtggtgatcgtgggcgccacgggcccgggcaagaccaagctgtccatcgacgcggccgtggcgctgggcggcgaggtcgtgaacgccgacaagatacagctgtacgcggggctcgacgtgaccaccaacaaggtgccgcacgcggaccgccgcggcgtcccgcaccacctcctgcgcgcggtccgcgccgacgcgggcgagctcccggcgccgtcgtaccgcgcgctggccgccgaggccgcggcctccgtcgcggcgcgcgggcgggtgcccgtggtggccggcggctccaactcgctcatccacgcgctcctcgccgccgacagcctcggcgcaggcgacccgttcaaggtcgacgacgggtaccggccctccctgcggttcccgtgctgcctcctctgggtggacgtggacggcgcggtgctggacgagtacctggaccggcgcgtggacgacatggtgcgcgagggcatggtggaggagctccgggagtacttcgcgtcggcgccccccgcctcgcacgcggccgggctgggcaaggccatcggcgtgccggagctgggcgcccacttcgcggggcgcaagagcctcgccgcggcgatcgacgagatcaaggccaacacgcgggtgctggccgcggcgcaggtgcgcaagatccggcgcatggccggcgcctggggctggcccgtgcggcgcctagacgccacgcccacggtccgcgcgcggctggccggcgccggccgcgccgccgaggccgccgcgtgggagcgcgacgtgcgtgggcctggcctcgccgctatgcgccagttcctggacggccacgagcagcaggaaaggtggccgctggcgcggaggcaatgccgtggcatggtggtgtga

SEQ ID NO: 26046 - DNA, 183 bp, Zea mays
  Peptide Sequence Number=SeqID_67825
atggactgcgggttaattcaaacatttgccaagatctctttagcaattaagtcaagcgaagagatcagcggcacaaacaccatctccctcccccgcggcgaacaacggcgaacagagccgcggcgcccgaccaccctccggcgaggacaaccaccgaccccagagcgccatcctcaatcataa

SEQ ID NO: 26047 - DNA, 222 bp, Zea mays
  Peptide Sequence Number=SeqID_67826
atggccggctcggcccgccccgcccggccgcgccctggccggctcggccagcccccggccgtgccccccgccggcgctagagctgggcgttcgggtttacccgtggcagactggcagtgtggcacaggcactagctcaggcacaaggcgcacaacggcacaagtgcacaatggcacaagcacaacagtcaatagagaacagacaacaggcggtcaggtctaa

SEQ ID NO: 26048 - DNA, 549 bp, Zea mays
  Peptide Sequence Number=SeqID_67827
atggcggaccacttcgcgttgatgacgggccggctgctgacggagtcgacgctccagtccgccatccaggaggcctttgccgatgccgtagcctcaacagccgccggctacgaccgtacagatccctccgctgttcctgaagatgttcagccgggcatgggcgtgggcaagggcaagggcaagagtggtgtcatggtggagtgcagaatctgccaagaggaaggcgacgaggcttacatggagacaccctgctgctgcaagggcagcttgaaggcaagattaatttcctctgcttctcttttcggggagctggagaagtacgggaaaacgtcggtgctagtcatggtcaaacctcggatcaggctgatgctgctgctgttcagaacggctggaattgtcataccagtctacatcatcttggtatcagttaccgcattgcttcattggtgcaatcaacgacggatctttagaatccaggttgtgcacgagacgacggtttcagaacctcgtggagcagggggcctgcagcatatcatcaacattcggtag

SEQ ID NO: 26049 - DNA, 201 bp, Zea mays
  Peptide Sequence Number=SeqID_67828
atggtcagaagggtcaccggacagtccgatgcccaccctaaaaaggaaggtggccaatcaaccaatcctatgaccgctgcagaccagagtgtccagttatcttctcggttattcattggctccgtacgtgacaattttacaaaagccaactttacaggaattagatcttgtggcatcacacagattggaggaggtggttaa

SEQ ID NO: 26050 - DNA, 192 bp, Zea mays
  Peptide Sequence Number=SeqID_67829
atggggattagctctccccgggtagaaagggaatcatggctcatgggtaaaatggttcgagatacaaggattatgttatggttttggttcgactatgatgatgttgtttcctcgatgaggaaatggtttacgggagaaggtgaagccgtggaaggagacttccaggagttccaagactacgacgaattctag

SEQ ID NO: 26051 - DNA, 627 bp, Zea mays
  Peptide Sequence Number=SeqID_67830
atgcccgacgaccgccagggtgggactcccactgatgaatgggactcacataccctgattcggtccaccttgcagtgtacacacagttacacagaggaggtttcctccctgcgaatctgcgatactgactctgccttcttcgttccagcgccgaaagagagggagagccaagccgcctcccgccgcgacgcacgatggatcgcgcgcagttgctcctcgtcggactcccggccttgctcttcttctccgacctcactcacatcttcgcgccgccgcctccccacctccgccacccccatcaccaccctcctcaccaccaacatccgcatccgccgcatcatccccactcgcctcatccccatccgcacccgccgcatcatccccacccgcacccgccgcaccaccaccagcaccccgacccctccacggcaatcatacaggagccacgtgtggatgaggctggattcggcagcacagtggagctgcaattctgtgcctcctgctcgtacaagtgagcctgctcgtccactgtgtcttggggttgcgcgtactgttggttgtttgcttaattcctttggttatttgttatgtatgagcgttgtgactttgtctgctttctgcaaataa

SEQ ID NO: 26052 - DNA, 492 bp, Zea mays
  Peptide Sequence Number=SeqID_67831
atgactgacatggaaagtttgtggggtggccttacagacaggagtaatgttttagggtggggaactgcagtgaccatgaagcgcatgctggaaacctcatttcctggcattcatgttatcttgcataattatcctcctccattccccaagcgtgtactcagcaaagttatcccaattgttcaagttggagccgttgcaacaataatggctggtgaccagattttccccagaattggaatggttgctcctccatggtactactcgcttcgtgccaatagattcggaaccatggcaacaatctggctatttggcaactttgctcagtcctttctacaaagctctggtgcctttgaagtttactgcaatggagatttggtattctcaaaacttgctgagcagaggttccctagcgagttcgagttgcgggaccttgttggcagcagattgcctgggtctccatttgggaggaatccggggaaaaccctgacttga

SEQ ID NO: 26053 - DNA, 648 bp, Zea mays
  Peptide Sequence Number=SeqID_67832
atgggggaagacgcaagcgccaccaactcttcaaccgaggcagtcgagagagtagtggcatcaactggtctcccccatcagaaaccgaggggtcactcagatgggagaacacaggcgccaacgactattcaaccgaggcgttcaggagagcaacgacatctactggtcctcccaccaccgaagacgaagcaaaatgaggtcccagtcgatcaagcaccaaggttcgaacagaggaaggctaacagtcctacaaacgcggtcgctgcttgtggtgcttcagatcgcgatcttcgtcatcatcatccggtgaagaaggcgggggttggatatgaacccgcaagtcatctgaacctccaaccttcattgatacacgtgcgcacagagaagatgctccaccgtatgaattccccaaagatgcgcaggaagcccactaagctcaacgtcgaggagcaccggcaggactccaccgccagcggccaactcctaacgacgccaccttttaaggtgcaaccgaaaaggaggaatgaaaagagattttcctccattgtaggcacgaacgacatgatcctcagaggggaagaagaccaggaaagagttggacgcagcacgctggagttggagcacatcagcttcaaggccaagccttga

SEQ ID NO: 26054 - DNA, 576 bp, Zea mays
  Peptide Sequence Number=SeqID_67833
atgacccctgaggcctccgtgataagcccctggatggcctcggtcgccctctccaccaacgaacttctccgacgcgtgaagggaacggtgcggaaggcggattattccgtcgtggtgccgatgcggcccgagcaggggctacatgtccctgacatgcaagaaaatgatgtcgaccttactgccattgttgacaagtactttgtgcaggcccatcctgcgacccggcagttgatcaccatggcatctgcatgtggcgcactgcgtaggtcaatgtctcttgcgtcgaaggtgtgggcgacaactctttggttgtcagccggtttgatttctggccatcctatctttggaggccttggttttagggcaatccctggtgggatgtgtcgagtcttcgccatggaaaagatagtaaaaccttcgctgttgcgggactcggccattgcctctgcctctagtgttgctgttgcggccctgttgcgtggggtactcatggcgacgagcagtgtctccagtctgctactgattggcgatggtgttcacttgggactggttacggtttggccgaccaaagtctga

SEQ ID NO: 26055 - DNA, 519 bp, Zea mays
  Peptide Sequence Number=SeqID_67834
atggaccaggagttgtctatggacgactacctagtgggtggagtcaccatgttcgatgcccagaccgggctatcgcctgctggggcgaaggctgggcaattggcaatggtgctgtctaaggtgcctgccggtccggcggcggtcttcgctgaccaggttgcttcgggggtgctgacctcgcagctgctttccgagaggaaacaacacgaggggaggattgagcaccttcggacgcaacatacggaggtggtcagggacaagtcggcggtcgaaaataagagccgaaaccttctcgacaaggtgatggtgcttgagaaggaaaagaaggaactcggtcgccggcttagtgatgagaaggaagatgcggagaatgcccgcgcggaggcccaagctgcccgcaagcgtgtcgcggacctggagcttgaggtgaggaacatgcgcaactaccgtgagaagacggagttggccacctgtactggagtggaccaggcgcacacactttttgtggatacattgtag

SEQ ID NO: 26056 - DNA, 240 bp, Zea mays
  Peptide Sequence Number=SeqID_67835
atgtcctacgcgtcgcttgtgacttgtgagggcgctgcgaatgccttatctagcaaggaatgtaggcacttcgaggccttcgatcggggcaacgaggacttcgatgctagtgtattccagattgaagacgatgtgctaaagcgctataccgaggcgctttatgataggatggggtcctcacggctgcgacgttgttcgagagagggccgaccgagcactgacacaggtgatgagggatga

SEQ ID NO: 26057 - DNA, 411 bp, Zea mays
  Peptide Sequence Number=SeqID_67836
atggtcactggcaaaaaacccaaagcctcgggaaagaagaacgatgaaaggactccatcgaaggaggccggcgacaagcacaaggaagaatccggcggctccatcaagtcacataggaagggtgacaagaagaaaaagaaaatgaagaaggtggtctactacaagactgactcttcaccttccacctccggtgtcgagtctacatcttcgaagcgccaagagcgtaagaagtatagtaagatgcctcttcactatcctcgcattcctaaacgtgctcccctactttccgtacccctagacaaaccaccatactttgatgatgaagattattgtatgtggagtgataaaacgaagcaccatctaacctcactctacaaaagcatatggaatattgttgagtttggagcgtag

SEQ ID NO: 26058 - DNA, 1362 bp, Zea mays
  Peptide Sequence Number=SeqID_67837
atggtgtatctttatgtgcatcgtgatatagtgcaattagatgacacttcattgtggggcattgtgaatgaggaagctaaggaggttgctcagtacacgggtatcatggaccacatggtagtggtggcatgcatcctgtacacgtggaagctaaaagacatgggtaacatagattgggatacccatgcttcaaactactgggtttgtgatggcattatacaaggcagtagtagctcggaagcatgggcttggaaggttggtgatgcactacagagaaacacacagttggactggagaagatttgcatcaccaccattcctctactgcagcaacctaaggttcctccgccttcaccgttgcgaggacgatggcacaagtatcacaccaacagagggcaaggaacttgacgaccagagtggagcatggagggcttgcttcgggaagctgcgagtaatggatttgagctacacccaatggtgctggttgctgtcagaaaggatgatgaacataatggccaacctcagagagttgaatgcaaagggaatcaagaacttgagcacaagtcatctacgtggttgtggcagccttatcaagcttcgagtagaagacggcagcgttgacggacaaagattaatacttgagaactctgttgcactggaacaagccgtcctcaccaacgatgctaaagatgaaggtgctacagttgataggatacgcaacatctcctttcgtggttgtgctcagttgaggagtatattgttgagaggattattttgttgcctccatgagttggacctctcttgcacatctgtggaaaccgtcaacttgcgaaaggtacaagcccagagattgaagcggctcatcctacttgggtgccagaagctccgtgcaatactatggccactgagcacctcatctattgctaagaccttggatgtgttttgtgtgagcaccaccccatccatgacagcatcaggacaggagtggccgcgtctatgtaaatgggaagaaaagaggaaggaggctaactctgcttctactacagaatcctcatccttggacagaaactggtacatttgtgtaagggatgcgaggctcctccggtcgctacaaatctttcgtacctatgaaaacaatcgtttttcccttggctggcctacacgtgtggagttcactacaccaccagcatcatgtgatcttgttgctgctcaaggagtcagtatcttgcagcagactatacatgttgtagatgtatatgcaagagatatgatcacccatacccaacttattcatgatgaggatgcactgctggtgatgaggacggtgaaggaccgatccactgggatgtgggattgccaatga

SEQ ID NO: 26059 - DNA, 537 bp, Zea mays
  Peptide Sequence Number=SeqID_67838
atggcaaagcacatctggaactggagtccaagagcttatccatctgcatactcctttcaacagctccagttcttgcacctggactactgcccgagggtcatcttcgtgctccccttggactcgaatatgtcgctgcctcagcttgagaccctagagatcatttgttgcggtgatcttagggagatctttcgctcatgggatcccaggctcgagaaccaagaggaggttgtcaagcatttccccaagctacgacgcatccacctccacaacctcccgacgctgcgcggcatttgtggccgcatgatgtcttcaccaatgctcgagactatcaatgtcacaggctgtccagcactcaggcgtttaccggcggtcggcggccgtctcgcgcagccacccacagtggtgtgcgagaaggactggtgggatggcctcgagtgggatgggttggaggccaagcaccacccttccctcttccgccccaagcactcatgccactacaggaagcccaagcttcttagaggcagcgtcctcaggtaa

SEQ ID NO: 26060 - DNA, 198 bp, Zea mays
  Peptide Sequence Number=SeqID_67839
atggcggcgcgcggaggagcttgcggcggtgggggcgcggtggcggcgcgcgaggagctcgcggtggcgggtggcgagggcggtctggagcgcctcggctccggtcgtgggggtggggcggtgcagcgagaggagcagcggcacggtgagaggagaggtggcgcggtgagaggagagacgaagcggcggcgcgggtag

SEQ ID NO: 26061 - DNA, 390 bp, Zea mays
  Peptide Sequence Number=SeqID_67840
atggagttatccagtggattagtggtgaggccgaagcttttgaagaaattcttagataggggggatttttgtgccttcgctggtgcccgcggggttgtatcaattttggaaaaggtatggatgaagggtgaccatgagatagctaatgaagctataaaacatgagaaagaacctcacgacgctcaagaagaagctaaaagagctgaagaagctgctgagcgcgccaagcttatagttgaactatctccccttccggagccatacgatccagaagccgacccgtccatcaaagaggcgttggatattatcaaaattgcaaatgacgctattgatgaagctatcgacaggcttctaaacaaagctgtcgataaagtccttaaggattactaa

SEQ ID NO: 26062 - DNA, 168 bp, Zea mays
  Peptide Sequence Number=SeqID_67841
atggcgcagatacttacccggtccacgttcgccggtgagcggaagaagtccggcgaggggattaaggtgaacgcgctcggttttgagttagaggctgaaattcagaaatctgaattttcagatttctctaggaagcctctaattgaatggcttgtttggggtttttaa

SEQ ID NO: 26063 - DNA, 612 bp, Zea mays
  Peptide Sequence Number=SeqID_67842
atgcagagaaatagcagacgtcggctgcagaccacgacgtctggacacagagaagcagcagcactacagcagacgtcggctggacatagagaagcggcagcactgcagcagaccacgtcggcggccggtggcgctgatccgctcgaacagcacaggtgcaaggcgcacaacgtcaggccaggcgaggcggacggtacaccttctctcgctgctattcgtgaggatgattccccagaccttagagtagttggtagggtgctcgaagaacatctgaagatgcaggatgttccactgaagactcagagacttgttgtgagatactacagaaaatttgggcgtgatggtagtctttgcggcacaaccttggttcgaaagataagaggcgagccgaagagatcggttgtcgcgattgaaggcggtctctaccaaggctattcggtcttcaaggagtatgtgaatgaagcgatggatgagatcctgggggatgagatcgcctccacagttagtcttagggttatggaggatggttcagtgattggggctgcactcgttgcagcatcatactcgtcatcgcctccacagttagtcttagggttatggaggatagtttga

SEQ ID NO: 26064 - DNA, 296 bp, Zea mays
  Peptide Sequence Number=SeqID_67843
gcgccgaattggaggagatagccgctggggagagacctcggctgcggggagaagaagactgcgtgagtgcgcgcggcatgggcgagccagggagggagaagaccccgggcacgctgcacgcggctggaggagaacggaggagtggctgggcgggcatggctctcctcctccgcgcgtgggagaggaagcttggagatggcggcgtggaagacgcagagacccaaggcatgcacgatttttatcccgcgatggctgaaaaaatcaacatggcggcgagattttcttctcaggcatag

SEQ ID NO: 26065 - DNA, 171 bp, Zea mays
  Peptide Sequence Number=SeqID_67844
atggacgaccggagcaaatggttcgcggcggtgctgccatgcgtcgtggccggggcttacgggctgcgtgattcgcggtcagagcacctgggcgccgacgttggcctcgccggcgggctgcgctgccggggttcagttgtgcgccgccgtgattgtgctggagatgggtga

SEQ ID NO: 26066 - DNA, 606 bp, Zea mays
  Peptide Sequence Number=SeqID_67845
atggcgtccgtggccgccaccaccacgctggcaccggcactcgcgccccggcgccgggcgcggccagggaccgggctgctgccgccgcgccgggcctcggccgtccgctgctcgctcgaccgtaacgtctccgacatgggcgtcaacgctcccaaagggttattcccacccgagccagagcactacaggggcccgaagctcaaggtggccatcataggggcaggccttgcgggcatgtccaccgctgttgagctcttggaccagggccatgaggttgatttgtacgagtcccgtccgtttatcggtggtaaggttggctcctttgttgacaggcaaggaaaccatatcgagatggggctgcatgtgttcttcgggtgctacagcaatctcttccgcctcatgaagaaggttggcgctgataataatctgctggtgaaggaacatacccatacttttgtaaataaagggggcacgattggtggtatttatcctttcttaacaagaaccaatcgtgatcctatttttatggaaacaatgcaaaaatatctaagaaaaatcatttttgcccctaactgcgggtgtgaccaagccattgtgcggccctga

SEQ ID NO: 26067 - DNA, 268 bp, Zea mays
  Peptide Sequence Number=SeqID_67846
atgggggtgggcgaagttctgccgtcgtgggccgacgtcgaggctcccataccagtcccgagcgcttcacctactcaccggatggattgtgtgactggtgacggcgagtggagcacagatttcgtcatcggggcgggacttcgttcgcgcgtggccgagctcgccttcgcccagagatcaaagagcacctgggcgccgacgttggcctcgccggcgggctgcgctgccggggttcagttgtgcgccgccgtgattgtgctggagatgg

SEQ ID NO: 26068 - DNA, 540 bp, Zea mays
  Peptide Sequence Number=SeqID_67847
atggaggttggtggaggactgaggactggtgtgctcacaaggtttgcaacagcggatgggtacaaagctgcctttcaggggatttggaggtatctgcatgcgttcttcttcttgggaagtagatgccaaacaaactacatcttcggatcaacacaccttgggttaaagctgtatacaaagcagtttttagcgaaaacaacagactatgaacaatttgataaccgaggaggtttctgttgggtgctatcgcctgttgcggcgctcacgccgtcgccttgctgctgttacgctcgtcgacatgccacctcgctggagctccgtctgtcatcgtcgtcagaagctcgtcctgggtccttgtgcttcctcgccagcgccgtgcccagctcgccggaagctcacagccgctcgtcgtcgtcaatccgtcgacgccatcgccaaggcctcgtcgtccctgctattgctagagacctgcccttcgacaccagcaaccgcgttcgattcttccccgacaatcgagtccctgttgcgcccacgcggtga

SEQ ID NO: 26069 - DNA, 684 bp, Zea mays
  Peptide Sequence Number=SeqID_67848
atggacaaaccaaccaaccattggcttttctcgcttcagggtgctggcgattcccgcagcgacctcctgtgtatcgggcggaggcgcctcacgggcgccgtccgagccgcgccggacgcgccgccggtggtcagggctgccgtcagcgccgtcaccgagctcctcagagccctctccccgaacaaggcgctcaggggcgctgctacccagcagcagcagggcgaggagccggatccggacccgacctgcggcagcgtcgaggacgtgctcgccgtgctccgagacgattaccggcgcgcctacttcctcaccggggatttcactccgggaatatacaccgaagactgcttgttcgaggacccgacgatcaagttccgcggactctccaggtactcccagaacctgggtctgctggtgcccttcttcgacagcccttcgctcgagctagagaacattgagaagggttcgagggccgaaacgaagttcgtcaaggcgacatggaaactaaggacgtatctgaggcttccatggaggccgctggtcgcgatcggagggagcacgacgtatgatctggatggagatttcaaggttactcggcactccgagagctgggacgtctctgcgcttcaggccatcgctcagatcttcgtctcggccccggaggagaagctggaaggcagctga

SEQ ID NO: 26070 - DNA, 324 bp, Zea mays
  Peptide Sequence Number=SeqID_67849
atggagaggacgaagggcagtcgcgccaatcgtctcgcatttgttggtgtagcgaggcgacgaagacttcgcgcaaagggtagcgtcttcgccttcgccccaacaccaacctcgggcgggaaaccagtgcacgacccgggactggctcgtgggtgtcgttgcccatgcttggtcctacaagtgcgcgagggcgcggcgacggccgcctccagctcttctgccattgggcgagttgtgagcgaggtggggtgcttgtggttgacgtggagcgcggtgaccggtgcggagcacgatttcatgcgcgagcggctccaggcgtcatga

SEQ ID NO: 26071 - DNA, 666 bp, Zea mays
  Peptide Sequence Number=SeqID_67850
atggtcgtgtgcagggagggggctagagagggagagacgtgggagatgacctttgagattttcatattgtttgcctgctatacagaacttgattttcggttcccggtgggagctccgttacatggcattcaagcattcctaagaactaatcagctcaaggtttatgataaagcaagaaatgcagttgctcttgcccttagtccagttgttcgggctctggttgatcctgatggtgcattgcagcaagtgcgggacttggatgatgtaagtttcagtgattggttcatgtccaaagggggtactcgggagagtatcacaagaatgtgggatcctgttgcttacgctttgggtttcattgactgtgataatatcagtgcacgttgcatgcttactattttcaccttgtttgccacaaagacagaggcatccctgttacgcatgctaaagggttcacctgatgtttacttaagtggcccaataaagaagtatataacagacaggggtgcctgtgatgttccgggtatcaaaagattacttccatcagaatggagggaatgggaaatgtttgacaatatctacaagttagatggtgtccctgttgtcactgtccagctccgctacaatggatgggtcactgaacttcaagatttggagaaatcaaggtag

SEQ ID NO: 26072 - DNA, 303 bp, Zea mays
  Peptide Sequence Number=SeqID_67851
atggcgcggctgggggcgatggcggagggcccggcaccccctttccccgtgatgcccgcccccaccccgatagacgttgcgcgcccgacgcgcctgcctctgctcgcgttggagacacggcctaggtcgccggtgctccttcgaatcgaatcccaccatgtttcttctgctgcaagctgtcgctgctgttgccgttgtagccactatcgcgcgtgctctagccactgggtcactgccgatgggatccatgtgtctattgtgcggcgaacgcggaagccagcagcatcatccgggaagccatag

SEQ ID NO: 26073 - DNA, 261 bp, Zea mays
  Peptide Sequence Number=SeqID_67852
atgtctaggatccgagtccggtaccccgtgcccttccggttctggatccggatccccgtctgctcgccgggcccgttgttcgccgcctcgaccgaaggggatcctgtcatcgccacacagtttctccaactcggggatcacctccccaccatcttcacctccctcggatttgagtacaacgacaaggtgatcccctccatcggcgatgaggtgctcaagatcgtcatcacccagttcctcaccgagctcccacgtggctag

SEQ ID NO: 26074 - DNA, 372 bp, Zea mays
  Peptide Sequence Number=SeqID_67853
atggtggtgacagtgttgccagagtacccagaggtttacaacatagtaaacaagctgagggtggagtcagtggttgctgttgaaggtgtgatccagccacgcccggtggatgccatcaatgcagatatgaggaccgggactatagaggttgtggcacatcatgttctagtgctgaactcagtaacccggtcactgccgtttccagttacaatttctgatactgtaaaagagaagtttccagaagaaattagattgaggtgcgacttcagctatcggctcgctattcacagtttatatgatctggactgcgctcattatgatagctgttggaaactgaacccataccctaaacagggttgggagtggtattaa

SEQ ID NO: 26075 - DNA, 1215 bp, Zea mays
  Peptide Sequence Number=SeqID_67854
atgcaggcaacatgcaaccgcaccaagggggcgcaccccttcgacttcgacgcgtccagcgtggaggcccaggcccacacgtcatgcgggcggaagcagcggtcaagtcgtcagcaagctcatgtcccctcctggaacagcgagagaaccctctcccacggcgtgaagacaatgcgcctgcgacgcttcaccttcgccataatgaccgcgtcaaaaaaggcgcgccacgtcgttcgatttcgtatccttttcctcttcctctttctctctcttacaacagggaccgggaaaggggatattccgaaagggatccttctccacgaaggaagcgggccccgagcccccctactgatcagaggttcgaaggctggcccctcggaagggttcaacagccgcctcagagcactcgggctccgcgcccactactggtcagaggttcgaaggccggcccctcgaaagggttcaacggccgcctcaggccactcgggctccgcgcccactactgatcaggggttcgtaggctggcccccgaagggttcaatagccgcctcagacccagagcgagggatgacctgggtacgttcgatacataaccaaggctcgggctacgctcccgagccaagtccggctttgggcgccataggaaactctgcctcgcccgacccagggctcggactcggccttagctccggaagacaacgaactccgcctcacccgacccagggctcggactcggccttagctccggaagacgacgaactccgcctcgcccgacccagggcttggactcggcctcggctccggaagaagacgaactccgcctcgcccgacccagggctcggactcggcctcagttccggaagacgaagaactccgcctcgcccgaccctagggctcggactcagcctcggctccggaagacgacgaactctgcctcgcccgacccagggctcggactcggcctcagttccggaagatgacgaactccgcctcgcccgaccccagggctcagactcagcctcggctccgaaagacgacgaactccgcctcgcccaacccccgaggctcggacccagccttgtcctcagacgatggtctccgcctcgcccgacccggggctcggactcgacctcgacctcggaagacagactcgacctcgacctcggaggagccaccgcctcgcccgacccagggctcggaccgaccacgacatag

SEQ ID NO: 26076 - DNA, 411 bp, Zea mays
  Peptide Sequence Number=SeqID_67855
atggccgaggcagctgctgagaagctggtctgcgtgaccggagctggaggcttcatcgggtcatggctggtcaaggagctgctccaacgcggctacgttgtgaggggcaccgcgaggcaccctgaggaccccaagaatgcccatctgctggcactggatggagctcaagaacggctatctctgtaccatgctgacgtgctggactacatgtcgctttgtcgtgcgttcagcttatgtcatggtgtcttccatgttgcctccccggtgtcgaatgatcctgtcagtagtctatacttcctcctcctccttatatatgacagatatacgtacttatctctgcttacgcttatgcttatgcttgacgacgcaatgatatacatgcatgtagaaccttgtgccggttgctgttga

SEQ ID NO: 26077 - DNA, 1044 bp, Zea mays
  Peptide Sequence Number=SeqID_67856
atggacgtcgaggacgaggaggagctcgtcgccaagcgcgcccgccgcgcaggcaggacgtcgtcgacgcgcgtggacgtcgtggtggcgcaggacggcagcgggcgctaccgcaccgtcagcgaggcggtggcacgggcgcccagccacagcaagaggaagtacgtgatctacgtcaagcgaggggagtaccacgagaacgtggaagtcaggaagaagaagaccaacatcgtcatcgtcggcgagggcatgggcgagacggtgatctccggcagccggagcttctccagcggctggaccaccttccgcagcgccaccttcgcggtgtccggcgccgggttcatcgcgcgggacctgacgttccgcaacacggcgggtccggcggcgcaccaggcggtggcgctgcgcgtggactcggaccgctccgccttcttccgcgtggccgtggaggggcaccaggacacgctgtacgcgcactcgctccggcagttctaccgcgactgccgcatcgccggcaccgtggacttcgtcttcggcaacggcatcgtcgtggtgcagcgcagcctcgtcgccacgctgccgctggcgcccggccagacgggcagcgtcaccgcgcagggccgcaaggaccccaaccagaacacgggcttctccttccacggctgcgtgctggaggccaagtacccgacgtacctgggccgcccgtggaagcccttctcgcgggtcgtggtcatggagtcctacctgggctctggcatccaggcccgcgggtggctcgagtgggcagctgctggctcgggggaccacagcccgggcctcgccacgctgttctacggagagtacaggaactacgggcccggtgcgggcgtcgcgggccgagtgaagtggcctggctaccacgtgatcatgggacgccgccgtcgccagccggttcaccgtcaggcgattcatcgacgggcttgcgtggttgcccggcaccggcatcaccttcacggcggatctattcaggagatgacgatggccagcgctaatgcagttgcttga

SEQ ID NO: 26078 - DNA, 1317 bp, Zea mays
  Peptide Sequence Number=SeqID_67857
atggcggagttgagttgggggaagaagaagctcccccctgccagtgtgggcccgcaatgccagcgatctgcgcggagccgaggctggcaacgggagtgcggcggtgcggccgcggcggtagctggtccgacaggcaggcccaccggtcagcagcgtgagtggcgcgtgaggctgcgacagacagccgccgacgcgcgtgacccacgagggccaattccaaacccagccagccagccagagccaggcagcttccagccgagcccgcccgactcgacggacaaggcaaggcaacgcaaccaaccccacctggctagtggcttcgccccggttggccccgagcccccgaagccaagagcattgcgaatgcgaacccgcgacaagcttattgctgctttcggtccttcccctgcgcgccgcgagacctggaggcgggccacgtccgggggggcgccgccccggcggcggccggaggagcggccgggcgggggggcgccggcgcccggcgccggcgcgtcgcaggccgtggcgtcgggcgtcttccagatcaacaccgccgtcgccacgttccagcgccttgtcaacacgctcggcacgcccaaggacacccccgacctccgcgacaggatgtgcgtccgctcccccacccgcctacccgccttaccttttgccccccagcctgttccgatcgccgtacctttaatccccatctgttttggtattgcggattcggcccgctctgcttttggtccgcctgggaaattacgtttcgtccctgtggctaccaagaagattgctgatgcaaagctagctaaagatttccaagcagtcctaaaagaattccagaaagcccaacgattagcagcagagagagaagctgcatatgcaccttttatttctcaagcgggcttgccacagagctacaactcaagtgaagtgaataatggtgctgataggttggcagagcagcgcacacagcttctagaatctagaaggcaggagttggtcttcttggataatgaaatcgtgttcaatgaggccatcattgaggagagggatcagggaatacaagagattcagcaccaaatcactgaagtaaatgaaatcttcaaagatctcgctgtgctagtccatgatcaaggagcaatgatagatgacattgattcccatatagagaacgccgttgtagcgacttcgcaggctaaaggccagctttcaaaggctgctaaaactcagaagtcgaactcttctctgatatgcttgttgctcgttattttcggagtggtcctgctcatagtgataatagtacttgcagcctaa

SEQ ID NO: 26079 - DNA, 377 bp, Zea mays
  Peptide Sequence Number=SeqID_67858
aatactatgcagtgtacggcgggttgattcttaaatactacgggggctcctatgcaaagtgctatggccgaagggaaggtcctggccacggtggagggtggaaccgcggcgcattttctgcgacggtgaggaatcccgaggtccccagtcgcaatccccgcttgctgaagccacgtacaccatcctcgtgctccagtgaagcccccaggcacgacaccaaggacgcggtggtgaagagcgctcgggtcgactatggcggctaccctttccgctcggtgctcacgacaatgtggtttacggggaagaggatggggtcccgatggcgcgtggcggtacagggtgagatggtcaagaaagcgaggaggttttacggttaa

SEQ ID NO: 26080 - DNA, 501 bp, Zea mays
  Peptide Sequence Number=SeqID_67859
atggttgctgagaagactgcaatggaagaggcatcaaagagagggatacaactactaatagttgtcccaccagggacaataggtagaatgctccaaccaacattgaacttaagtttatccatagtggccacctacatgaagggcacaaagaaggcatactcaaacgcggttggtgcatatgttgatgtgcgagatgtcgcccttgcccatattttggtgtatgaagatgtgagcacccatggtcggtacctctgcataggtcacatgctacaccaatcggagtttcttcaaatgatgagagatctcttcccacaatacccgatcaccaccaaatgcaaggatgaaaacaagccactgatcaagccttacaagttctccacacaacgactcaatgctctgggtatgaagttcactactttgaaagagagtttatacaacacagtggttagcctacaagagaatggtcatatcccagtactgctacataagtcgtctctatga

SEQ ID NO: 26081 - DNA, 504 bp, Zea mays
  Peptide Sequence Number=SeqID_67860
atggccgaggcggctgctgagaagctggtctgcgtgaccggagctggaggcttcatcgggtcatggctggtcaaggagctgctccaacgcggctacgttgtgaggggcaccgcgaggcaccctgaggaccccaagaatgcccatctgctggcactggacggagctcaagaacggctgtctctgtaccatgctgacgtgctggactacatgtcgcttcgtcgcgcgttcagcttgtgtgatggcgtcttccatgtcgcctccccggtatcgaatgatccggaccttgtgccggttgctattgagggaacaaagaacgttctgaacgctgcagcagacatgggggtgcaacgtgtggtcttcacctcatcctacggggctgtccacatgaaccctaacagggaccctgatcggacagtggacgagagttgttggagtgaccttgaattctgcaagcaaacacaggtccactgctacttctacgctattcaagcatttttttggtag

SEQ ID NO: 26082 - DNA, 954 bp, Zea mays
  Peptide Sequence Number=SeqID_67861
atggggatttatccccgcggggaacggggatggggaagaaatgccccccgcaagagttcgtggggatccccgcgggggaatttttttgtcgcggggatgggtacggggagacaaaacccgacggggaaatccccgttgccatccctagtcccgacccagcgcagccagtcgttctctgctgccaccccggcagccggcacccaccatgccgcgcgtcacactcgcactgccccagctccgacaggcacctcgtcctgtgaccactccagcgtagccccgtccctgcgggtgacgccgccggcgcggcggccgaccgagccagatacgacctggcaagctgatgcctttgcgcgcccgtcggccgcctccaccagtcggcgcgccttcccggcgcgccaaggggcaacagcaacgcccaacgggaacggggctttggcctttcggcggagcccggctgatccgcggggccgggcccagcatgtccgggcgggaggcccgcctgctggcctggcgctggcagcattatttttacgcccacttccgttggaaagccgaggcgcgcgagctccacccaccacagcaggcagagagcagagcgccaccagccaagccgtccgatccttcgtctgccgaagcccaagcccaagcagcagaacaggtccgatggctctcgctctctccggctgctccgcccgcgccgccctgacgtcgctggcccccagggccaggggctacgcggcgtcggcggcgtccggggccatgcggcgcgcggcggcggagagcgcggccgcgggcgaggccaaggaggccgggcgccgcaccgccgccgccgaggtctcgtgggtgccggaccccgtcacgggccactaccgcccctccaactgggccgccgccgccgccgaccccgccgacctccgcgccgcgcacctcgcccccacctacgcccgggcctga

SEQ ID NO: 26083 - DNA, 318 bp, Zea mays
  Peptide Sequence Number=SeqID_67862
atggataggtccaacgttgacatcttggcagactaccaggatcccaatgatgaagaagttgacaccaaagatgaggaagactctaacgatctggagtggactacatcggggcacaacactagcacatcttgggacaataccctaaggagtggcttgtatcgaccgagattattggcccgaacggatatggaagctgaaaaggtggaggccatgaccactacacttttgtctgctaaggacacctttgaggccaaagttcaacgatgcagccaccatggctatgtcatccttctacatcctcaaatgaggatgtcctag

SEQ ID NO: 26084 - DNA, 450 bp, Zea mays
  Peptide Sequence Number=SeqID_67863
atggctgctgaaaacactgcaatggaagaggcattaaagagagggatacaactactaatagttgtcccatcagtgacaataggtagaatgctacaaccaacattaaacataagtttagccaatgttgctgcctacatgatgggcacaaagaaggcatactcaaatgtaattggcggatatgtcgatgtgcaagacgttgcccttgcccatattttggtgtatgaagatttacgcacgcatgggcggtacctctgcataggtgacatgctacatctatcaaaatgcaaggatgaaaacaagccaatggttaagccttacaagttctccacaaaacgccttggtgctttgggtatgaagttcactactttgaaagagagtttatacaacacagtggtcagcctacaggagaatggtcatatcccaatattgctacataagtcatccctatga

SEQ ID NO: 26085 - DNA, 732 bp, Zea mays
  Peptide Sequence Number=SeqID_67864
atgacgcttgggaaaaaggcgttgctacagagcgaggacgagttgaggccggaactggtttacggcgaggctggcccaagtgcgtctggcgtgttcgacgaccatggacgcgactgtggagggggctcagtgccggctgaaggaggccgggccaacatccttagcagtgcagggccgacggtggagctgagaaggatggggcgtaggcgatcgacagtgagggacgacgatgaggtcgagtctagggcaagctcgcacagctactggagggatcgagcagagaggaacacccagggcgttgatcaaagagggcgcagcctggcatcgaggggacaagcgccagggaggctcggcggcggcacaggcaagaggcgagcattggggaagacgagtccggcgaggaggcaagctgtggaggagttcggcacaacacccagggcggctgcgctggtgaactccggcggggaccaagctcgagcaggacggtccggtggggctgagcgcatagggaggaacgacagtgagggtctaggcgtgcgagctggtgatgaggacgaagcaccgggcccaggcggcgcacagctaggaagcttcgacggcgcggtggccatggagggagccttgcctggctgcggcttgattggaggagaggcaggatggacgcgcgagcacagaggaaacaaagctgagcgctgtgtacaagataagggaaaggcgctcgtgaacagataa

SEQ ID NO: 26086 - DNA, 903 bp, Zea mays
  Peptide Sequence Number=SeqID_67865
atgaactgttccactagtttctttcgttgccagatggaggacatggagatggatggtgcatttgagcaggttgctgtggagctggtggcacaaggagttattgggaagagggtggatgagatggagtcaggttttcttatggcacttgattacatgatacaacttgcacagaaggacacagatgatgagcgtaagtctattcttgaggtaattaagcagacagtgctagaccatctgacgaagaaatgtcctccacatgtccaggttgttgggctactttgccagactgaaaagaaagagagcagacatgaattgttgcgccgcgtagctgctggtggaggtgtttttaagaacgataaaggtcttaagtgccaaattcctggggcaaatcttaatgacattgcaaatcaggcagatgatctagtagagtcaatggaatctagggacaccattcctgatcgaaaacttcttgcaagattagttatagtaagagaagaagctcggaatatgatgggaggtggcctgttagatgagagaaatgatcgtggtttgactaccctccctgaggcagagactcgggagattggctctacttctactagcttgaatctgagggacagctttgatgaatttcagaggtcaacccaaatgctgaccccaatgtgtcccttccgggccactctctccccatcctctgcaactaccagtgtcgacacccacatccacctcaccctctctgcaatccgtgcacccttcctccttcctctccgcatccgctgccactcattgccgttggagacttcactgaagtcagcaccgccttggactattagccagattgtatcatttgaactttgtgtagatcatgccattgctgtctgcaacacatcgaagaagcagtag

SEQ ID NO: 26087 - DNA, 165 bp, Zea mays
  Peptide Sequence Number=SeqID_67866
atgggccatccagattccagaggtgggccagcagggagcaggcaggcccagctgcccaggccgcaccacagtccagtagtctacaacgtcatcacgcaacaggaccgggtacccgaccgcatgatctggaatgtctgtggacgcaccaaactggtgcaccactag

SEQ ID NO: 26088 - DNA, 513 bp, Zea mays
  Peptide Sequence Number=SeqID_67867
atgaagaaagtggtctactacgagaccgactcatcgtcgccttccacatcaagctccgactcgtccgtcgcttctaagcgccatgagcgcaagaagtatagtaagatgccccttcgatatctccgtatttctaagcgcgctcctttacttttcgttcccttaggcaaaccaccatattttaatgatgagtattattgtatgtggagtgataagatgaggcatcacctaacctcactccacgcaagcatttgggatattgttgagtttggagcgcaggtacctaaggtgggagacgagggctacgactcggatgaggtcgcccaaattaggcactttaactcccaagccacaactatactcctcgcctccttgtgtcgagaggagtataataaggtgcaagggttaaaaagtaccaaagaaatttgggacgtcctcaatacggcgcacaaatcttttcgagtgaccaagatcaccaagcacaaaacgatcgagggagaactcgaacgaatctaa

SEQ ID NO: 26089 - DNA, 501 bp, Zea mays
  Peptide Sequence Number=SeqID_67868
atggcttttaacacctggccaccactgaggggcgagtggtccatgccggagctaaaagatagcattccttcggagaaggagccagacctcattggattgaagtatacatacagatttgagattgtgttcgggagccatgtgatgaatggcttgaagctgttgaggacaagtgttcgcgctagtgccgagaagagctatgaagagatgacaaccgtaatcgaactgaagccaattgttggggcatcgaggctgtggaagttgagtttgcagactaaacaggttattgagctacccattattaacgaaactcctttggcgaaaatgagtgtagagccaaggaggatactgaccctaacaccttctgaggaggcctcaaggaaaagcgagcaaataaatcatgtaatcagtgcctttctttatgaagatataactgagaaaatgatgaggtcaaaaattctccagaggcctcggaggaggggaccatcaccacaacaatggtga

SEQ ID NO: 26090 - DNA, 180 bp, Zea mays
  Peptide Sequence Number=SeqID_67869
atggagagtcatgatctccgggcagaaagggaatcacagcttatgggtaaagtggcaatgagattgatggtttttggtattgactctggtaatggttgtcagcattgcaacccctgctcaggagaggatgaagtcgtggaaggagatctccaggagttccaagattacgacgagttttag

SEQ ID NO: 26091 - DNA, 2967 bp, Zea mays
  Peptide Sequence Number=SeqID_67870
atggcgctgctcttgccacctcccgccctctccacgacgcctccatttctctccgctccccgaccagcacggctaccctgtctcagatgcactagaactaccaccgccacctcaagcgtctccacctgtcctcccgcatcgacgtcttctccctcgacctcctcgccggtggcgtcggacggcgcagttggaaggaagagcaagaataagagcaggcccctcaagccgagttttgaggaacaggccctccgccgctggtccgcccgggcaccttcccagcgtgcctcggtcccctgggaacaacctcagcagcagtcgcctttgccgccttcgctgccgcaccgggctggccgaggaagtggtgatgcgggcgatcaaaaacgcagtggtggaggctcaagcgcaacgttgcgctccatcgtggactactttgctggcggctcctccgatgacgaaggagttcgagtagaggaaggggcgtgcgacaccaccgcagtaccggaccaagcggcacgggagcaggacgatggatcgcattttcggccgagctatctgcttgggagccacccattctctgcgccatggattcacagggaggaatcgaccaatgataggggggtttccggtccggtggccgaagaggaggaaaggttggacattcgtgatgcttctgatgatgaactgggcttggtggatgaggataaggaagagacggataatggtgaggagcttcttactgggggtttagaagatgaattttatgatgattatgccacaccaactatgaattcttcatatggagtggatttgtcagtggacaaagatgcttatggtagcaggttcgataggagtatgatgcagagcagtgtaaacaccatagttaaaacattgaggaattcgatggaggaaagtgacccgaatgccacggttgagttgtctaatgcagaagattttgtccagaaattgggccctgcactcctgccatgggaaagggaggaggaagatgatgaggcattcagcggtggcagggcggtgaggcgcagcaacacggagctggccgagaggtctattccagagcctgaactgcggaggcttagggacacggcgttgaggatgaaggagaggataaaggttgggccagggggtgttactcaagacatagtggagagcatccacaggaaatggaaggtggatgaggtggtcaagatgaggtttgaaggccctccaagcctgaacatgaagagaactcatgatttactagaggacaggactgggggagttgttatatggaggtcagggagatcagttgtgttgtataggggaatgaattacaactttcaatgtgtgcagtcatatgctaaatttatagaaattgattcgggtaagggagttagcgatgctaatagtgctgtattgagccatgatggtcacaacttacaggcctcaagagcagatggcatgaagagtttaacgtctactggcaatttttctctggagtcctctgaaacatttgatattgataacttcttggatcaattgggaccacggtacaaggattggtctggtcgtggccctatccctgttgatgccgacttgcttcctggtgtagtacatggctacaaaccaccatttagagtacttccctacaagattaaaagcactcttagagataaggaaatgacaactctgcgtagacttgcaaggcaaactgctcctcatttcgctctagggagaaacagagaacaccaaggcttagctgctgctatggttaaattatgggagaaaagtgctattgcaaagattgccatcaagagagggattccaaacacatgcaatgacagaatggcagaagaaatcaagctcaccctcacacttatggttaagtctgtggaatctgataaccatacgtctagacccaatctagaatatgagaaattgacaggaggagtgctcttgtcaaggaacaaggagttcattgtcttctacaggggcaatgatttcatagctcctaaagtaaggcaggtcttggtggagaagcaagaacaagccattactcaacaggatgaggaagagctggctcggcttaaagcatcagcctcaattattactatccccaaggatataaagggtcctctagttgctggtactctggcagaaactacagaagcaaaatctagatggggaaagtcagttaatgataagcagagggaagaggagatgaagcatttgtctttgttgaagcatacctctcttttgaagaacttgaagagaaaactgattttggcaaaaacaaaagttgcaaaagcagagaaggctctagctaaagtccaggaatttctcactccagcagagcttccaactgatctggaaacagttacagatgaggaacgcttcttatttcgcagaatcggcctgaaaatgagggcctttttgatgcttggcagacgagaagtttttgatggaactgtacaaaacatgcatttgcattggaagcatcgagagttggttaaaattgttgtcaggggaaagagctttgcacaagcgaaacatattgcaatctctctagaagctgagagtgaaggtgttctcatttcacttgacaagacaactaaaggatatgtaatcattttctaccggggtaaaaactacaggcgaccccaaatcatgaagcctaggaatctactaacaaggaggcaagcattggcacgctctatagagttgcaaaggcgggaggccttaaagcatcacatctcaagtctgcaaggcaagatctcgaagttgcagtcgcaacttgtacaaacaaaggttgcaagtgagaaacatgatctgaagctgcttcaaacagttgaggatgacttctcatcatcagatgatgatgtagaggatgatggggaagaagcttatttgcagacttacagcagcgctgatgaagaagatgccgaggatgatgctaatgaatatatttag

SEQ ID NO: 26092 - DNA, 276 bp, Zea mays
  Peptide Sequence Number=SeqID_67871
atggcggcagagggcaacaaaagcagggaggcgcctccactaacgccggcagagaatgaggcgttcctgcgcatgctcagagacgccggccaaagattgggtagcgcagctccagaggttgaggtccagtttgatggagtcagcgtgggtgcccaggcgcacaattgcaaggcggctagagtcatctaccaaagtcaattgcaaaggcagttagatcaagagccgtctgtaaaaattggtacaacacaaaatttccaagaaacctttgatagataa

SEQ ID NO: 26093 - DNA, 285 bp, Zea mays
  Peptide Sequence Number=SeqID_67872
atgggattaggcggactatgtgtccgcagttggatattcagttctgtcgacaacttcgtccatgacctcgccattccagaactcgagttcggcctcaaccttctcagcgacctcaactctagcttctccaacactaccgacgatgtcgcaaactccatggtgttgcccaacttcgccatgacacgcaacatactcaccctcaaggagtttcctggcgaatgggtgtcccagcctggtgttggtggtggcggaagatggtgtcctcgcacagttgtcatccttgag

SEQ ID NO: 26094 - DNA, 2397 bp, Zea mays
  Peptide Sequence Number=SeqID_67873
atgtcgtcgatgtgcgacttaaggccgaattcgccatacaagggcttgaagtgggatgcccacttgggctataggccgtatgtcttggtgtacactgtacaagtaaggtcgtatgtcttggtgtacaagattattccagcaattactggcacttctggccacacatcaaatgtcactgggcctttatcgtttggtagcaacaataacctccaatcatggttgagctggggttactgggcatccccattcacttatgctctgaatgctgtgactttgaatgaatttcttgacatgagatgggctagggtgttctactttaagaattccaagacacttggagaagctattctgatgcttaggggtttgctcaatgaatggcaatggtattggacctgtataggaattttatttggattcaccctggtcttcaacatcctaagcgtacttgctttacacttcctgaaatctccacacaaacgtgaagtaaatatcaagtcacaagacagacagaataaagagtacaacgatcaggcagttgttaatgtgaatgcctccattggtcaaagcctaccattccaaccactgacacttgtgttcaaaaatattaactactctgtggaactaccaaaaggtatgagaaaacatggagttactgaatcaaggctccagctactgcgagatgttagcggctctttcagaccaggagttctaacagcattgatggggattactggtgcgggaaaaacaacattactagacgttttagctgggcgaaaaactggaggttacattgaaggagtcatcagcatatgcggttacccaaataagtatgaaacagtctcaagaatcacgggctattgcgagcagactgatatacactcaccttatctaacagtatatgaatcacttaagttctctgcgtcccttcgcctaccttcagttgttaaatctcatcagagagatatgtacgtagaagaagttatggacctagtagagctaactggcctgaggaatgcgattgtgggcattcctggggcaacaggcctatcagctgaacaaagaaaaagacttacaatagcagtggaacttgttgctagtccctccatcatgttcttggatgagccaacaactggtctagatgctcgtgctgcagcaattgtcatgcgtacggtgcgaaagatggtgaacactgggcatactgttgtctgtacaattcatcagccaagcatccagatatttgaatcttttgatgagctgttactaatgaaaagtggaggacagctcatttacagtggttcactaggtcccctgtctagagatttgataaaatattttgaggctgtccctggagttcctaaaatcaaagatggtcagaatccagctgcatgggtgctagacattagctcacatgccatgcaatacatgattaacgtggactatgctgaaatttactataactccaatttatacaaggagaacatggctatgattaatgagttgagcaaaccgaaaacaaaccatgaggatctgcatttgccttcaaaatattggccaggctttaaggaacaatgcatcgcttgcatctggaagcaacatttgtcttacagaaagaactcagagctcaatgtgtttcgcttcatcaacacatttgcaacctcgatcgtgtttggtattgtgttctggcaaactggttcaacaataaaggtggagcaagacgtgttcaacatactggggattggatacgggtcggcactgttcctaggcttcgtgaactgcactagtttactgccagtggttgctgcagagagagccgtttcctaccgagaaatgaattctggcatgtactcttctatggcattcatcatagctcaggtagctgctgaaatcccttacatggttatccagccactcattttctcagcaattgtgtacccaatggttggattccagctggctgtgaaaaagtttttcttgtttgtgctatacatgatcctgattttcatggactacactctgtatgggatgatggcagttgcactgacacctactgctgagatagctactggtctgtccctcaccatctttgtagtgtggaatttcttctcaggattcattgtcacagtaaaggcaatgccggtgtggtggaggtggatgtactgggcctgtcctacagcatggaccctatatggccttgtgtcctcgcaacttggtgaccataaggaactaatccgcgtgctgggccagccagaccagccagtgatcacattcttgcaggagtaccttggcctggaaaatggctatcttcccctggtcacagctctgcactttgttctgagcgcactcttctgttttgtcttctgcgtgggtatcaagtatctcaggttccagaaaagatag

SEQ ID NO: 26095 - DNA, 462 bp, Zea mays
  Peptide Sequence Number=SeqID_67874
atggctcccacaactccaatctgccttcgcgtcgccccaactccccgtccatgtcgagttcgagtaggacgaggacgaggagggcagcgccaacaaggtggaagggatgggctcgacaccttcatgctcttctacaccgtcttctctgtcatcgaccccaagtgcgacgcccgcgactcacacgtcccgatgagcaccaaccaacggcaagaccccatacaagagggccagtccatcggcgtcatcgccaacgacgttgacaagaacggcaagccacacaagagccgctgcccgccctcgtgcggtggaaagactcagagctgttattggggtgccatgttttcattagaggaaagggttccatcaagatccagggaagaaattgaatataacaactcaaatattggtttactatgcattgcaggctcaacacttttcatcttgctggaaggggtgacatga

SEQ ID NO: 26096 - DNA, 495 bp, Zea mays
  Peptide Sequence Number=SeqID_67875
atggcggcgtccgtggacgctgcggcggccctggcggtgacgccccccgctgtggaggaggcgggcggcgctgttgagcaggccaggacgctcatcggcgcgctcaacctgctttcccgcaacctgccgctgccccccgacgtcctgcgcgcggtctcgtccatctaccacgatgggggtgcgggtgacgatgaggaggaggaggggggagagcgggaagcggagaaggaagggaatatggagatgacggccgcggaggagggttaccccgttgacgttgcgaccaaggtgcgtgtgggtggttcttctggtctgtgtggggattgccccccttctgttcgggtgctggggactgcacctgaccgttgtctttgcttgcaattgattgctctattggcccttgcattagtagctttgatagttagtatttggcggctgatgcgcttgtatgaggttctgcaaatttctctgttgaggggtcttcatattcattag

SEQ ID NO: 26097 - DNA, 2511 bp, Zea mays
  Peptide Sequence Number=SeqID_67876
atggcgctgcacggtgaagaaccggcggctagaggagcggaagtaaaatccgaggtggaacccggatctttataccatgcatggcatgttcgggcacgtcaacgtatctcacggcaagagaaaaataggttgaatcttctgaaaattggtgatcaagtagcatatatgaagatggttgaggagagcaagaacgaacgtctgaaaatgctccttgacaaaacaaatgagcttcttgaaggaattggaaaagctgtacagcgacaaaaagatgctgagcatgttagtcagcatgaagggagtgaagtgccaaaagggtcagagtctgaggattgctctcaaatctcaggcgtcaagagtgaatcacctggggaatctccttcagatgacgatgcagactttgctggctctgcagatgaaagtaaattcaatgcaggtcgtagacttgattttactgtccattccattgaagaaaaggtgacagaacaaccatcagctctcgaaggtggggaattgaggccatatcaactggagggtctccaatggatgctttctttgtttaacaacaatttgaatggcattctggctgatgaaatgggtctgggtaaaacaattcagaccatagctttgatagcttatctgttggaaaataaggaggttgcaggaccacacttaataattgctccaaaagcagtattaccaaattggtctaacgaattcaaaacctgggctcccagtattgggacaattctgtatgatggtcgtccagaagagaggaagcttttaagggaaaagaattttgatggattgcaatttaatgttttgctcacgcattatgacttgatactgaaagataagaagttcctaaagaaagttcactggcattatttgattgttgatgaaggacatcgtctgaaaaatcatgaatgtgctcttgctcgcacactagtttcagggtattataccaaatttgccaaatatatacgaacaaagtttttgctgaattttgaggaatggtttaatgcaccatttgcatgtgatgttagtcttaatgatgaggaacagctattaatcatacatcgtctgcatcaagttttgcgtccatttttgctgaggaggaaaaaagatgaagtggaaaaatatctccctgtcaaaacacaagtaattctcaagtgtgatatgtctgcttggcaaaaagcatactatgaacaagtcacaagcagggaaaaggttgcactaggatttgggctcagatcaaaggctctgcagaatctgtcaatgcaacttaggaaatgttgcaaccacccctatctatttgtagagcactacaacatgtaccagcgggaggaaattgttagagcatcagggaagtttgaattgcttgatcgtctacttccaaaactgcagagagctggtcacagggttctgcttttctctcagatgacgaaactgcttgatgttttagaaatatatttgcaaatgtacaatttcaagtacatgaggcttgatggatccacgaagactgaagaacgagggaggttactggcagattttaataagaaggattcggaatatttcatgtttctcctcagcacacgtgctggaggacttgggttgaacttgcagacggcggacactgtcattatatttgatagtgactggaaccctcaaatggaccaacaagctgaagaccgtgcccatcgtatagggcagaagaatgaagtgcgtgtgtttgttcttgttagtgtcggctccattgaagaagagatcctggaccgtgcaaaacaaaagatgggtatcgatgcaaaagttatccaggctgggttgtttaacacaacttccacagcacaggacagacgagcattgctgcaggagatccttaggagggggacaagctcgctgggaacagatatccccagtgagcgcgagataaatcgtttggctgcacgaactgatgaagaattctggttgtttgagaagatggatgaagaaaggaggcttagagaaaactacaaatctagacttatggatgggaatgaggttccagattgggtattcgccaacaatgatttacccaagagaaccgtggcagatgagttccagaatataatggtcggtgcgaagcgacgtagaaaggaggttgtctattcagactctttcggtgatcagtggatgaaatccgatgagggatttgaagacattccaaaggcgactcagaggtcgaagaagactgcttactcatctgacatccaagttgagtttagtgaaaggaggaaaagacctaggtctgtagaaaacagcgcagacggtgtgagcaacccgacgtggacgcctgacaaaggaagggctggagtttcatcatacagcaaggacgagactgaagatgatggcgaagacgaagtcattactagcggcttacaaaagggaaacagtttcacatggaataccctaggaagaagaaggtcaagccacttcagttcgtcatcggactcgagagggcgcccaacattctaa

SEQ ID NO: 26098 - DNA, 2577 bp, Zea mays
  Peptide Sequence Number=SeqID_67877
atgtcggactttgtcaggagtagatatgataagcaagaagatttccaagttttgttgagcaagaaagatcctggagaacaacctcagcacaaggattacctgtggatggctcactggaccaaagcaagcagcgctgcagaaccccgaaacaatgacagcaatcctttggaggataccaacaatggcactactacgaaagatagcgagaccttgccttatgaattcatgaaatctacagttgctgaaaggctcatggtaggagtacgccatggaagtgcctccatgcagcatgtccgacaattcaagtctagtatgcggggtatgccacgactttccaatgaattgggaccaaagaatagtgaacaggttgatgagtcttttgaaaaatctttgaaaaacgatgctatgaacttgagaactaggcaagttgtgtcagaaacatattctattcacaagctttcagagttaccgttggattttcagaaccttgggagctcagatgatccaagtccagattggagccactttccaatgttcgaaattaatcaaaagattgacagtattgtcaaccgtaaacgaaggtctccacctctggatctaaatgtgtctgcatcccatgtgatggccctatcgtcacaagaatacatgatgcactcacatcaaacagctgatgagaacatggatacgtgcaaacctgcagaaggctttgcatctcgtgtagaagatcatgctggcttcaattcagatcctccagggccaaagttaaaagggcaattgttggataccatgtcatgttcttgcagcaaggatgacaacaactcagcagattgtccaatagatgagcagcacacaagccactattttgcaaactcaaagcatgaactaccctctgtatctaacaaaaagaagttcaagtttgcaggaaacaaccacaatcgaattgttgcaagtgcgtcccacgatctgaagacaaaaagatctgctgtccataaacaacaaagtgctgcagaggcagtgttctgtgcaccagtacttgatagtgagtttcagaatgaacctataactatttccaacatcgacaagaaggatggtgaaaattttcatgatatgtataaatgtcttggcaaggctgtttcatgtcctttgttaccttatgagcatcgtcatctgaatacacagagaacggaatctgcagaaaatttgaaagtctgcacgcttcctgatcatcaaactgcaaataaattgacagaaaagagtcatggtgagctgctgacatatggaccaaagtcaaaggaaatgtatacaggaaaatctagcgactttggagtttgtatgtatggcaccaatattggcagtcagttattcagagcacagaatcaatcttcagctaagactgaaacattgcacagcgatactctcattgggtccaaatccccagcaggcatcgcttcattgtcggcacaaaaggactatggttgcacggacgaagcaaaaagtgagcagctcgtagctccgtccaggagaggagattcaggatacggtaaagaagatggatttcataatgtcaatgaaggtcatgatgtttggtccaaagcaactattggtagtaagcaatcatgcatgcccggaacgggaatcacgaacctagatctgatactttcccagatgagcagaatgagaaatcaaatttccattggtagaattcaaccaccaataggtgccgagccaagtgacagatggctcaagcgcctacagcctgacataccagatcctgacatccctggttccaggaggccaaacgttggaggcagccctccactcaggcaaagaaatcgttcgtttgacatggcacttccttgcaacaggactgacactggaacaactgactgtgttatggaggaccagagcttggataaagtggaaaaaacgcaagaaaagcaagaaagtaccccaattccagcgaagagcgtgaatagctggataggaagatggtgccagggaggcactcctgttttccatgaaggcccaggccagggaaggcaagcaacaaagcctggccggccatctgaagaactcgaaggtcggttcccaagcattgcagcgatggcgatgatggggcgagcgatgaacaagcttcggccgtgcgagcatcagaagatggggccacttgtggatctgtcaggaggacggcgacgaggcctgcatggaggctccttgctcctgcaagggaagcttgaagtacgccccatcgcagatgcattcagcggtggtgtgacgagaagggagacacctgctcctggctacatccaagcacggccgatgcagaacgcggatcactccgctacgtcgacaggctacggacacgaccaaacgccggatcctaccggcgtactatgctgtcgcataatcgccatcgctctgatggtcctcctcgtcttccgcgacgccgtctccgtcttcctgggtgaccaagacgcctacaccgttgcagtggtcacggttgtgcacggccaggcttcagatcatgcggcagaggagcggacgcagccgcagcagcatgtcatcagcattcagtag

SEQ ID NO: 26099 - DNA, 1527 bp, Zea mays
  Peptide Sequence Number=SeqID_67878
atggccgcctcgacggcggcggcgcggcgtctcctcctcgccctcgccgtcctcgccgcctgcctcggctcggcgccgcacggggccgtcgcgctccgctcgctcggcgtcgggggcgccaaggcggccgacggggacgcggccgtggacctcgacgcgtccaacttcaccgccttcctccagacttcgccggagtcgttcgcggtcgtcgagttcttcgcccactgtggtccgccagcccaaaagctcatggtcaccccaggttatgatgcggccctatgggatgaagctggggttcagaggctttcttggtgtcctgcctgcagaaactacaagcctcactatgagagggttgcaaaacttttcaatggcccagatgctgcacatccagggactgttgtgatggcacgagttgattgtgcatcaaagtttagtttcagtgttatgtcagaagacgatgaagctgcacaggtgaacgtggatctttgcaacaaattctctgttgaccattatccttacctggtgtggggtccgccaacaaaattcaatttggctcagtggaaaccaaagcaagagaatagtgaattggaactaattgatgatggaagaacagcagatcggttactgaaatggataaataagaagatgggaagctcattcaatttagacgacaaaaagtatgagaatgaaagtatgcacccaaaaaatacttcagatcctgaacagattgttcgagcaatttatgacgttgaggaagctacatctcatgcattgcagataattttggagcacaagatgatcaaaccagacactcgtgactcgcttattagctttttacaaattttggtggctcatcatccatcaaagaggtgtcgaagaggatctgctgagctacttattgactttgatgatcactggcatacaaacctctcattaagtttggaagacagtactacactgttgaaaggtgcaggagagaaagtatgtggaaatggagtgccacgtggatactggattttctgccgaggaagtaaaaaggaaacaagaggatttagtgtatcagtccccttcaaatctgcccgtgaccttgccctctggctatggaccgcgcataacaaagttaacgagaggttgatgaaagaagaaaaggagttagacaatgctgatccttcatttcctaagatcatatggcctccaaagcaactctgtccattgtgctaccgttcttctagtaggacggctgatggagccatgcaggttgagtggaatgaagatgaagtattcaatttcttggttaactactacgggaagatgcttgtatcatcctacagggagacctccatgcagtcctttcaagtagcctcaatttctgacgattcttccgcatccagtgccgcaacagtacctattggagctgccctgggtatcgcccttgctagctgtacatttggggcgctagcatgcttctggaggacccaacagaagaacagaaagtactaccatttacgttctttaaagaaaatttga

SEQ ID NO: 26100 - DNA, 399 bp, Zea mays
  Peptide Sequence Number=SeqID_67879
atggccggtccacggcgggtggcgggctccgcggcggtgagactgccggcaaggccaacgggtgaaataggcgaggggggaaaggtgtgtcatgctcgcagtgaagtggcggaggtcaagagctacactaatttgactagaacccaacagagaggggaaggggggagctcaccggagatgaagatgacggcggcgctggctcaattgagctcggggaagggggaagagatggccgaggccggggtgaggaatttggggagctcggggcagtccttttataggcgcccggggctaggaagggggcgagaggtggcgagcaccggcgatctcgccacgacggggatggtggcgcacagtggtgacgacgggatggctcgggcagacggggcgacgggatag

SEQ ID NO: 26101 - DNA, 999 bp, Zea mays
  Peptide Sequence Number=SeqID_67880
atgggccgcgcgccgtgctgcgacaaggcgagcgtgaagcgggggccctggtcgcccgaggaggacgagcagctgcggagctacgtccagctgaacggcatcggcggcaactggatcgccctgccgcagaaagcaggtcagggtagtacagtacagcctcatcccatcgtcgtcgtcagatactcagattgttcagaatccttgtttgctgccgccaacgccaatcagggtagcattacagtacacgggctgaaccggtgtggcaagagttgccggctgcggtggctcaactacctgcggccgaacatcaagcacggcggctacaccgacgaggaggaccggatcatttggtcgctctacagctccatcggcagcaggtgggttggggtacggtggcagccaggtgatcgatcgatcggtttccgtctgtgcgctggactgaccgaccgagctatgctacgcatgcccatacccaggtggtcgatcatcgcgtccaagctccccggccggaccgataacgacgtcaagaactactggaacaccaagctcaagaagaaggccatggcggccagtagcagcggagcagccttcgcggcgcccgccacgccggcgctctcgcccgcctcctcgtgcgtcaccagctcctccagcggcgacgtgcgcctcggcgcagcgtacacggagccgccgccgcctcggcagcacgcggggctcgtacgctctgacgctccgcggacggagctcgcgcccgtgccggcagtcgcgcacctggacggcgcctgctggccggccgcggcggcgctggacgtgctcctgcccgagctcggcggcgagcagctgttcccgtacgggtacggcgacttcttcggcgggctgcaggacagggccctggagcagcagctctcgtcgtgctacttccccaacgtggccgagatatggggcgccgctgccgtcgcccccgacggcaagccgccgggtctctgcaacaggctgacgtag

SEQ ID NO: 26102 - DNA, 243 bp, Zea mays
  Peptide Sequence Number=SeqID_67881
atgcagccaaaattttcagtttcagcgaatgatatcagggaacctttagctgaagctattgcccttggcgggaaattttactctaaacggaacattctccccccggaaccatacgatcctaaagttgatccagctctaaaagggatacttgatgaattcaagatagtaaatgcggcgatagacgaaactattgataaactcttaaatgaagctgcgaaaaaggttctgatagaagatgattaa

SEQ ID NO: 26103 - DNA, 738 bp, Zea mays
  Peptide Sequence Number=SeqID_67882
atgggagctcatgtgaagtgtaaggcttaccaaagaggatggttgaagccaaccgagaaggatcagacggcccacgagtcctctccttcccccagcctgctaacccagggcggcgccaccgattccccgcggcggcgcaacataccgacgaccagcgccccagtagatgccccaatccgtgaccaacgagtgctacgcacagaggaggacgaggcaaatgcgaagattgaagactcaccatcgattggtgccgcgacgactactgcccacggtacgcgcgacagcatggcggagttcccactccggcgaggcattccggtggtccagagtgtgattccgcccaggagaagccgcgatgagcatcagagaggaccagtgattgcccccggtcgattccgatcgcccaacgccaggtataatgagatcgaggttggacgagcgcatggtgaggagaagatcacgcgatttgttggtgcccgcgacatttgcgcggattctgttctcagcggtgagtccgactcgagaaggatatcagataggatcacggggaaagaggggaggtttgttatccggggatgctgctgccctattttcgcaccgaaaggagttgaggtagcgacgccagtgcatcacgggggcgcgacattcaccgcccatgcgtcaggtcgcgtgtgtttagcagagtcctccaccatcggtttggggaagaagcttctgcgggtgggacccagccgttag

SEQ ID NO: 26104 - DNA, 273 bp, Zea mays
  Peptide Sequence Number=SeqID_67883
atgtgggggaaaggaaagaagcgtttcggcggtggcggcagcggtgagcccgcggccaagcgccaggccgcgagggacgatggcccctccgaatccgctgaagacggtaccgtcgtagccgagatatcgaagaacaagaaggtgtccgttaggagctggaaaggcagggtcttcgtcgacttacgcgagttctacttcaaggacggcaagactctccccacccgcaaagcggtaaggcggtccaaggcgttggaccaccgcctggacacctag

SEQ ID NO: 26105 - DNA, 357 bp, Zea mays
  Peptide Sequence Number=SeqID_67884
atgggtatcgacggcgactgctgcctcgacgcggagggtgaaaactcacctgcaagcagtcttgggcgaaggaggatggcgagtgcacagtgtgaaatcgacgatggctgctgcctcggcgcggagggtgataactcacctgcaagcagtcttgggcgaaggaggatggcgagtgcacgatgtgaaatcgacaacggctgcccggctacccccaaatctagggttgcatcgaccaacgtggggaagctgcaacagcaacgagctacgattggaggaaacgacgcgtgcctcaaagatgcacagccagctcagcctctccgccagcccgaagcaatagcagtcatcgtcgcctcctga

SEQ ID NO: 26106 - DNA, 1428 bp, Zea mays
  Peptide Sequence Number=SeqID_67885
atggcggagcgcctcgccgcctccctcctccctgccgcctcgccgtccccgtccgcccgccgcgcaacggtcgcagccgcagccgccgcctctttcccctccccatgctccgcccgcgcggggctgcgcctacgctcccgcccgcccctcttctcgcagaaggcggccgggcgcgggtgtggcctgcgggtggtgcggtgcatggcagcgtcggacgcggtgcagctcaaggccgcgcgggaggacatcaaggagctccttaagagcacatactgccaccccatcatggtccgtctggggtggcatgattctggtacctatgacaagaatattaaggactggccacagcgaggtggagctaatggaagtttaaggttcgatgctgagctgagtcatggagccaatgcgggcctgattaatgcattgaagcttatccagcctatcaaggacaaatacccaggtatcacttatgcagatttgttccagttagcaagtgctacggcgattgaggaagctggtggtccaaaaattccaatgaaatatggacgtgttgatgtcacagcagctgaacagtgtccgcccgaggggaggcttcctgatgctggcccacgtgatcctgctgaacaccttagggaggtattttatagaatgggccttgatgacaaggaaattgttgcactatctggagcacacacacttggaagagcaaggcctgaccggagtggctggggaaagctagaaacaaaatatactaaggatgggcctggtgagcctggagggcaatcatggacagttgagtggttgaagtttgataatagttacttcaaggagatgaagttattttttttgaacgaaattcaggacatgaagtttttgagccagcttccctggaaagagcagaaggaacaggatcttctagttttgcctacagatgctgcattatttgaggacccatcgttcaagatcgttcttgcattgactgagaatctatggcacattcaggtatacgcagaaaagtatgcagaggaccaggaagcgttctttaaagactatggtgaagctcatgctaagctgagcgatcttggtgcaaagtttgatcctcctgagggattctcactcgacgatgacacatgctcttcaccttccgacgagaagacggaagaacctacactggtagcggtaggagcggcagtagcaacagcgacagcggacgacaacaacggcgcagctccgcagccggagcccttcatcgctgccaattactcgtatggaaagagggagttgtcggatgcgatgaagcaaaagatcagggcggagtacgaggggtttggaggcagcccggacaagcccatgcagtccaactacttcctcaacatcatgatcctgattgcggggttggcgttcttgacgtctctgctcgggaactga

SEQ ID NO: 26107 - DNA, 369 bp, Zea mays
  Peptide Sequence Number=SeqID_67886
atggtggcgactcccctcggcgagttggaatacgacgagcgccgcatcgcgccaaactccccatcatataggcacagggtaggccagctagatttccgggtcaaagacgcgagtggaagcgaggcttgcgggcgcagttacgtcggtgcacgcgaagtctccgcggagaatataagtccgacagatggggtccacacggcggtgtctagctgggatggagcaattttgggccttacaaaacctaaccccttaacagaaatcttgtcctcgagatttcttggtggagctggtggtggtggaggaggtagtggtctcgcggtcgagcacgtgggtgccggtgcgtggcaagcgctgacaggtgggctctag

SEQ ID NO: 26108 - DNA, 381 bp, Zea mays
  Peptide Sequence Number=SeqID_67887
atggccaaccctctacaggttcgccgaagggcgcgctcaccgtcgttcgccgtcggggacctaggtctgcgaagaaacagaagtgtaggggcctctgtgcgaatgtttgagacacagaagaatagtgctaaggactctttatgggtttttcaaatagccaggggtctctgtgcaaagacaccaacacggggcctaaacctagacttttggaattttagaaattactggatagctctaaaaatcataaaaatttttggaccaataccagaaaggccaacacgcaatgggagtggagagatggcgagagtagcgtgtactctccgtggcaagaggctggacggtggtgtatctgtgctctcggttgtcgtgaacccagtctag

SEQ ID NO: 26109 - DNA, 456 bp, Zea mays
  Peptide Sequence Number=SeqID_67888
atggccacgtgttcgacgcgccctggcatcgccagagcacgccccgacgctcagccccgcgcgcaccgcgttgcgccaagccaaacccgtgcccctgccccgcccgcacatataaagccaatcgaggcttcgaccctcctagagccaagaatcgagctctacctcgccggagacaacggatcagtattgccggacttcaccagatcaccgacgtacgtagaccgagctccacggctggagcacacgccgccgacgagcccgaccgcctacgcacgtggcccgatcgattctggccatcaccgacgacgagccatacatcgacgtgactgcaaggagttcccggagctaaccccgcccttcgccggatctccctcgccgccggagccagcaccagagcctgccatcgaggatctgcctgcccccgctttggaaggcaagccccagttttatgcataa

SEQ ID NO: 26110 - DNA, 149 bp, Zea mays
  Peptide Sequence Number=SeqID_67889
atgggtggcgctctccttcatcccaatgtctctgacctccttgcaatccgcatcctctccacccgccgtggttcactaaccaccgttggcacgtgggcacaccagaaattgaggggaggtgtggtgatcggcgccgcccgcggttcaag

SEQ ID NO: 26111 - DNA, 168 bp, Zea mays
  Peptide Sequence Number=SeqID_67890
atgggcttcgttccgataccagatgtgatagaacctcccaagaaacaacaaaactctgctattttcctcacctacaacaacatgggtttgaaaaccccggagtacggagtgtactttcgcaagtcttacccgacaaaagaaaagactctcaaggatatgttggcttga

SEQ ID NO: 26112 - DNA, 321 bp, Zea mays
  Peptide Sequence Number=SeqID_67891
atggcatccgtcgtcctctggtcccagcccgacctatccgtgcgctcggtcttcatccatcgggcttcgcgcgtgctcgcgtttaccgtcgagctgttgaacatgtccttccttgcttgtgacttcgtcatcgccaaagccctcactagattcatgtcctcaccagctcactccaaattcggtctcgtcgtcgttccgtgcgtcatcaagaaatcccaagaatctggggaagatgaagctagcagggtgatattcaccaagtttgccggagggcggttcatcgccgctcgccgtcgaggacctgtcattgtgaagaattag

SEQ ID NO: 26113 - DNA, 348 bp, Zea mays
  Peptide Sequence Number=SeqID_67892
atggcgagagtagcgtgtaccctccgtggcaagaggctggacggtggaatatttgtgctctccattggcatgaacccattctgtcatctgaggtctttgagacgaggacaggtgtatgtgggcccaatatcttgggaggttccgtcacaggacctcaaagcgatgaatgatgtctgtgaagaatgctattgcttgttcggatttgatgctagcgagaggctagacctcaatccatttggagaatttttcaatggcaaacaacagcagtacgaaagtcttcgcccgctgagccaggcatcaggcctcggccttgccaagagggagttctcctcgaaggataaactctag

SEQ ID NO: 26114 - DNA, 216 bp, Zea mays
  Peptide Sequence Number=SeqID_67893
atgacgccggtggggcagagtcgaagcaattgggacaacgacgtcattgttgcggaagctggagatggcgaggacgtagagcgactcctcgttcaggttttcgttgaggatctgatgagcaccacacaaatacttcactgtcttctaaatcacaacaacacccaacacgactactccgaaatcatgaaaacaatcacatcacattcatcgaactaa

SEQ ID NO: 26115 - DNA, 351 bp, Zea mays
  Peptide Sequence Number=SeqID_67894
atgagcagcatctttcagccagacacgcgcagttccaaatcaccggagccttctccgaccggacggaggaagctcgctgagctgctgcaggaggcaatgcaagacggtcccgaagaaagcgccgacgaggaggagcagcagcagcagtcgctatctgctgccgctgatgggaagccgccggtgtctgagtccacgtccagctccgcttgcagcaccgtgccgactccggtcgcagtcgccaagagccggaaggagaaggcgtgctgtgtcatggatcatgcagggttcgtggtttttagcgctgatcgagcgtatgacaagggcaggctaactgctaagaatgtgatgtga

SEQ ID NO: 26116 - DNA, 555 bp, Zea mays
  Peptide Sequence Number=SeqID_67895
atgcggtggggcgacggtttcaggagggaatcgattaatcgtccgcctacgccgagcgcggtggaggatcgggacaaggagccttctctcgtagaaatcattaacatcaagtttgtagagagtggagagaaggagaagctgacggagctcctccgcgagcggctcgtcgagtgcggctggatggatgagatgaaggcattctgcagggactatgtaaggaagaaaggaagaaataatgtgagggtagatgacctcattcatgttattgttccgaaaggaagaggcagaactcctgcaacgtatccggtccttcatggctaccacacttcggtagtcatttatcgtgacggttggagctacatgtaccattgtacgaacactgggaggtcgatcttgttggggaccaagggtgcaggtactgagcatgaaaaggatcagtgtgatcttcatgatgctatcgacatgttcctcgtcagacaggcggttggcgtgatttcaggtgtagcaacacggagttataaccctgaatactgtaccgttaaaggaaccttgtag

SEQ ID NO: 26117 - DNA, 369 bp, Zea mays
  Peptide Sequence Number=SeqID_67896
atggccgccgttttcttccaccacgtcgtcggcgacctcaccgtcggcaagcccgaggtcgccgagctgcacgacaccgacacgctcgacgacgccgcgcgcgccatcgccgccagccccgagggcgccgtgcccgtctggcgccccagggccgcgccggacgacccgccctcgggggccaggttcatcggcatgatctccgcgctcgacatcgctgccttcgtcgcctccgcgggggtcggggatcgctccatgcgcgccgtcgtcggcgaggtcgtgcagcccaatcctgcgctgctcagggagatcgatccgggtaccagatctgaaagctttccaggactatacatgggaaaaatccaaatatag

SEQ ID NO: 26118 - DNA, 456 bp, Zea mays
  Peptide Sequence Number=SeqID_67897
atgggagaggagcaagaaggaagggaagagatttaccgatccgccagagtccactattttgcccatttggcaaccctgctgtgtaattctattggaggtttttcgcataattcaggagaccactacaatgaacccttcatgaatgtggactcaagtgatgctgaaaaccctgggaaacaacctgtgattgatgcaagcattgtgtatgatccttggacaatggaaccgcgggggtttggttttgtcaccatggctgctactaaggaggcagatcactacatcaaatatctggactgttctgtgttgcaaggtcaggtcataattgttaagaagtgcatttctattttcactgatgaaaccactatttctgttttcaatgaatctgttgaactgaactgcaaaaatagaaactgttctattttgtttgagtgcacaaacagaactcaacggaactag

SEQ ID NO: 26119 - DNA, 369 bp, Zea mays
  Peptide Sequence Number=SeqID_67898
atggaaggaggaccttcatcaacaccggttggtgggcaagccgttgatgcaaaccatggaggttttgaaaccccactcgtcctgctgccgctcgtcaggctggcggggcctagtagtttcgctgggcgtgagaaggccggagggcgagaagggggtgcggatccaggcggcgtgcagctctgtgagaagaagcgacatcgtggctggacgaccgcgccgcagcgcgaatgttggggaggggcatgtggctcctggtgtcgtatagctcggcgagaagaggcgtttgatgggatggggttcccggcacgacgacggcaactccgtgtgaagaagcgatgtcgtggccacacaatcacgccaccttcgtag

SEQ ID NO: 26120 - DNA, 363 bp, Zea mays
  Peptide Sequence Number=SeqID_67899
atgggcgcttgcgcttcggtacacaaggacccggggcaccccaagaagcagtttcttgactctcccaccaaggcgaaggccgccaacgggaagggtggcgggggcggcggtgttgctccggttggtgatggcttcggtgatctcaagtccaaggtcgacgctgaggctgagcagctgcgggcagagtttaaccccaagaacccggattctggtagcaaggatgaagtgttcttcgaatctcgagcctggttagattccgactgcgaggatgacttctacagcgtgaatggaggttccttgatgacacagctttatctgtctctagaatctaacggcgtccgcatgactatctcagatagttag

SEQ ID NO: 26121 - DNA, 1320 bp, Zea mays
  Peptide Sequence Number=SeqID_67900
atgcagacgccgaccatgtcgacgtccatggccaccacggcgccagcgaagccccccgcgccgccgcggcaatgctgcaggtacctcctcctcccctccaccggccaccgccggagcgtggcggcatggtctgccaaaaagaagaacccgtggctggacccgttcgacgatgggcccgacgaggagttcgattaccagggcatgttctccggcgggaagcaggaggaagacccgcggccgcccgaggaccctgagaacccgtacgggttcctgaggttcccgcagggctacaacccggagctggacagcctcgcctccaagatgctcaaggaccggtaccccggcgtgctggtggacgtggtggcgtcggccaggggcaagcaggtgtacgagatgtgcaagaacgtcaggtacgctaacgtctatgaccccgacgacgactggccggagcccgccgaatacacgcacatgctcggcgtcctaaagaataggtactatgatctgatcatctccacgaggctggcggggatcgggcacgcgctcttccttttcatgtcgtcggcgcgcgacaaggtcggctacgtttaccccaacgtcaacagcgtcggcgcgggcctcttcctcaacgagatgttcaaggcgccgactaacaacctcgccgacggcgggtaccacatgtataaagacatgctggagtggatcggccggccggcgaagaacgttccccagcagccgacacagccgctgcgggtgtccatctccaagaagctacgggcgtacgtggaggacaagtatagccgcgccggcgtggagaagggcaagtacgtcgtcatccacggcatcgcctctgactccgtcgccaacatgaagtccagaggcgacgacgactgccttcttcccctcgggcactgggctcagatagccaaggaaatcagctccggcgacagggggctcaagcctctgttcgtgatccctcatgagaagcacagagatgaaatcgaggaggaggtgggggacgacacaagcatcctgttcatcaccaccccaggccagctcacctgcctcatcaacgactctgccggcgtcgtcgcgaccaataccgctgccgtgcagctcgccaacgcccgcgacaagccatgtgtggcgttgttctcgtcggcagagaaggcaaggctgttcctgccatacgtggagggcaagagcagctgcaccgtcatatcttcggcgacggggaacctgatcgacatcgacctcaacgcggtgaagaatgtggtgaaggacttggagcccgctcccagcttcgcattggcacagaagtag

SEQ ID NO: 26122 - DNA, 279 bp, Zea mays
  Peptide Sequence Number=SeqID_67901
atggatcaccggattgctcggtccacgcgcggcggcgggcgaccgaagttcggcgatggtgaatccgcctctctagtgaggcaataccttggctcaagcttggagaagcttcacggcttcacggggaagcggtccaggggctggggcaaggcgagggcgacgagcagacgcgcgaggcagggcgaccacgcgcggggcacgcgctgccgcggccagtccgtgctcggccggcctgacacggcgtcgagcaagtggctctttgctcctgcccgagtttaa

SEQ ID NO: 26123 - DNA, 177 bp, Zea mays
  Peptide Sequence Number=SeqID_67902
atgcagattattgaaagaaagtgcgaggctcaaaagggtgctgggataagtgtaaagtacttaaccctaaatctgggttatggatacaagcatgagaaaacttcaaaagatatgagaaatgaccccaagatatccccttggaaggacttaagtggcatcaaaaccctaatgtactaa

SEQ ID NO: 26124 - DNA, 213 bp, Zea mays
  Peptide Sequence Number=SeqID_67903
atggccctcgccggcgttggccgcttatcgactaaaacgaagaagaaactaataccagaaaggccaacacgcaatgggagtggagagatggcgagagtagcatgtaccctctgtggcaagaggctggacggtggtgtatctgtgctctcggttggcgtgaacccggtctggccttatgaaacccgatggcgagttgacatatgcaaggcttaa

SEQ ID NO: 26125 - DNA, 231 bp, Zea mays
  Peptide Sequence Number=SeqID_67904
atggctgagctccagtcccgcgcacccgaagtcgattatcccggggagaatctctgccgtgtggggcccacggtcagggtggtcttcgacccggatttgggctctgtaaccctggatgcgctgctcgtcggcgtgaagcccgccgcgcggggtatgcttcgccgtgtccaagcgcttggggtggcagatgacgttcttggcgttggatcctcatccaacggtggggattaa

SEQ ID NO: 26126 - DNA, 156 bp, Zea mays
  Peptide Sequence Number=SeqID_67905
atggcgaaggtagttgttcaagctcttgttgttgaaggtggtcgttcgagttcacaggaggctgctggatttgggatgaagttggagccattattggtggttgtggtaaggcacatgcaactggagagtggcttgccgaagccattgaaaatgtag

SEQ ID NO: 26127 - DNA, 141 bp, Zea mays
  Peptide Sequence Number=SeqID_67906
atggcagctgccgagctgagggagcagctcaacgccctcctctcctccatgatcaccttgatttcatccctcagctcggtgctagccgttggtgtgcgactgtatgtgcctagatgtagaccagtagacatgcacatttga

SEQ ID NO: 26128 - DNA, 1089 bp, Zea mays
  Peptide Sequence Number=SeqID_67907
atgaagcagcctctgcgccgattcgacgaagaaaagcgcagagccataggcgatgagatccacaaactgatggttgcagggttcatcaaagaggtattccatcctgaatggcttgccaaccctgtgcttgtaagaaagaaaggagggaaatggcggatgtgtgtagactacactggtctaaacaaagcatgtcccaaggttccctaccctctgcctcgcatcgatcaaatcgtggattccactgctgggtgcgaaaccctgtcattcctcgacgcctactcagggtatcaccaaatcaagatgaaagagtccgaccagctcgcgacttctttcatcacaccttttggcatgtactgctacgttactatgccatttggtttgaggaatgcgggtgcgacataccaaaggtgcatgaaccacgtgtttggcaaacacattggtcggaccgtcgaggcttacgtcgatgacatcgtagtcaagacgaggaaagcctccgaccacctctccgaccttgaaacgacattccggtgtctcatggcgaaaggcgtaaaactcaatcccgagaagtgcgtcttcggagtcccccgaggcatgctcttggggttcatcgtctccgagcggggcattgaggccaacccggagaaaatcgcggccatcaccaacatggggcccatcaaggacttgaaaggcgtacagagggtcatgggatgccttgcggctctgagccgcttcatctcgcgcctcggcgaaagaggcctacctctgtaccgcctcttaagaaagaccgagtgcttcacttggacccccgaggccgaggaagccctcgggaacctgaaggcgctccttacgaacgcacccatcctggtgcctccggctgccggagaagccctcttgatctacgtcgccgctaccactcaggtgaggccggtctacttcatcagtgaggtactgtctgagaccaagattcgctacccacaaattcagaagctgttgtacgcggtgattctgacgcggcggaagttgcgacactacttcgagtctcacccggtgactgtggtgttatccttccccctgggggagatcatctag

SEQ ID NO: 26129 - DNA, 309 bp, Zea mays
  Peptide Sequence Number=SeqID_67908
atgctggccacggtgaggcttggttccgcggcggtacaaattgctccggtgagaggcaattggcgtgtgggtcccacgctagtgccacagaatgcggacatcggcgcggaggtggagctagggagtagacgcgcgaatcacgcggagcttgctacggtaaggttggggaagatcccgacaggcgggcccctgatgccagtggaaggaggaatcggtgcgcgaggggaagagctggttctgacgggtggggtccacacggaggtgactgcggctatggaatgggagtgggctgcggtgcgactgaggtaa

SEQ ID NO: 26130 - DNA, 1371 bp, Zea mays
  Peptide Sequence Number=SeqID_67909
atggacccgaaccgccctccgcttgggcgccgcgccttcctctcctcttccgtccacgctgcaaccgcgctcctctcgatccttctcctcgtcacgctcctccgcctccccctctccacctccccgcacgccgcctccaccatcgccgaccagaagcctaaggagcagacctgcgatcccacctccccgctcgactgcgccgacccgcgcttgttccatctcatgatgcgcagcgccatcgaagccttcccggccgtccattttgctcgcttcggccgccccgtccccggtgaccccccatcctcctcttgcgacatggcctggcgctcccgctcagacttcgactccccctctaaggctaccaccaaggactaccgccgcttcgccatcggccgcgacccccacacatgcgcctactccgtcctctcaatcggcgattaccattccggccccaatgcccgcaagccccgccgcggcgccaccaatgccaccatcgctactccaccaccgcctgcgctctcccgctcccagttcgccaagggcgcgtacctcgcttacctcggcggcggcgaccgctgcaagcccatgccacactacctgcgcagcctcctctgcgccctcgccgaggctcgctacctaaaccgcaccctcgtcctcgatctcacactctgcctcgctgcctcctatgccgcccctgggactggggaaatgcctgaggaaggcaagcgccttgccttctacatcgacgtcgagcacctacactcccaggtccccatcattgaggagagacagttctgggcagactgggacagttggggggtgcagggccaactccgggcacacctcattgaggacaccaggcttgcacttataaagttctccaaggtgaaggacaccctcatcatcagaaaattcggagacgtcgagccaggtaactactggtacaatgtctgcgagggtgaggcaaagcatttgctcagcccattgcactgggtgatacgctggactccaagcttgatgcacattgttgatgatatcctctcaaggatgcaaccagactttgattcggtccatatcgatgccaagggtgaggacctgagacagagggtcgaggaagttcttggtggagggcggcaggtgtatgttgcaggggttggggtcaacagggcattgctggagtcactcaaggaaaagtgcattgtgcattatctggatgagtttgaggacctgtgggggacagacagcaagtggttcttggagatgaagaggctcaatggtggcgttcctgtggaatttgatgggtacatgcgtgatgttgttgatagagaggtcttcctcaaggggaagaagaaggtggaggtgctccggtga

SEQ ID NO: 26131 - DNA, 1758 bp, Zea mays
  Peptide Sequence Number=SeqID_67910
atgtcatcagaggaagtggcaaagatggaggcggaaatggcacaaatgaggcgctgcagtagcccaggccaaggtggtgtgcctgtgacggtggtgtactacctgtgccgcagcggacggcacctggagcacccacacatgttggagatgcacctcgcctctccaaatcaagccctctacctcagagatgtgatctgtcgcctagacgaactgcgagggaagggcatggccaccatgtattcctggtcctgcaaaaggaggtacaagaccagattcgtgtggcatgatgtgatggaggatgatatgctgctccccgcccaggaaagcgagtatgttctcaagggatccctcttgcccctccgccactcaacaccacctatagttggagctgcaccaccaacaaaagatcatgaccagctgaatattgatacaaccattattccaaaggccccatgtgtcaaggcaaatccacatgaagagtcaccaactcattcgcaaaaaggctggactactaattcatcatcatctcctccaatggttgaggatgaagaaccaccacctgtagctctgcaccaagggtcacagccagcactatcatcaatatcaccatcatcttgttgcaccactggggatggagatgatgagacagcatcaccacatccaagctgttcaggcagaccctcctcccctaataagtcaacaacaaaaggatcctcaggtggcacactctatcccactccatctagccttgcgcttcacagcaagcagatgatgccagggtgctgctatgtcatcgcagcagcacaagacttggcgacacagacccaaggaatatcaacagggaaagagattcacaaggacactagttgcagtactgatagcacaccggccaaggcaaccatacctaccaacaacaagcagcgggacaatgcaggatatttctatagcagaagtggtaggagtgggactttggagtccttgataagggctgaggctcatggcagaagggtcgccactgctaagaggacccaagaagaggacgacgacaaagaagcagtgcagtcatttgccacaaagctgaaccctgccaacctgctgatgagacttgtggcttgtgggtcgaccatgtcagcaaggcagcatctccctgcctgcagtctcatgcgaacagcacacaagccccggtatttgacccaacatgttgagttcctgccttcatctccagtcttgtctccccttggcacgctcatcatgcgtcctagaagtgctgatgaagccagaggagcttcagactcaggggactgcaaccattgcagagggaaactgcttcaaactacagagaataggtgtgagtcaggaaaagtgatgtccaccattgttaggccctcctcacattgtgaccataacagtgtttctgagaaagaagtccccatagcaaatttggataatttggaggacggaagtaaacttatctcacaaaaaatcagaatggcaccatgtcagcaacacacaagtgggacatttgtaaccacagatgtaggtggcgaacaaaaatccaatacattgtcaagaagtacgagcaaaaagatgatcaatccatcatcacgaccttcaagagtatcattccacgacgaaagggagaaagtgatcaagattgaagaaagaaacaggattgagtatcttgccaacaccaataaagctgtgtggggcagaaaatttcctcccaaggtctactatgtacggcttgctgaccagtag

SEQ ID NO: 26132 - DNA, 279 bp, Zea mays
  Peptide Sequence Number=SeqID_67911
atggctattgatcaggacggaagccacttgccgcaacctgaagacgtcaagccacttcctgcaaccgtgctgctgcatgccgtgcttgacgctgtgccaggaagccgtgtgctacctgaggacggcaagctgctgcccgcagctgcgccgttgccgcaacttgccatactggactccacgccaggaagccacttgcagccgcctgcaatcgcgttgccgccgttgatcgacgggcatactccacattttccgcaagtagatcacagagctggaggatag

SEQ ID NO: 26133 - DNA, 768 bp, Zea mays
  Peptide Sequence Number=SeqID_67912
atggcgcggctgcaggcagcaacttgccgtcctcaggggttggctcatcctccacttcagttcactgtcctgatccatagccatgttgacagcaagaacatgtatggttgggtggtgatgtctccactggaactcgcgacagctcaggatgtggaactgatcaagttaggcagtaagggtgttgccatgcactccattatagctcgaggacaagctgccttcgaagggtgggggatgtcatggggtggcagccaagagcacggaggccatagagataggctcaggcttgctgtcctcaggctgtggcacgcggcttcctggcgcaacatcaaccacggcaagcggtggcgcggttgtaggcagcgacttgatgtcttcaggttgcagcacgtggcttcctggcgcggcatcaagcatggcaagtggcagcagtggcgcggctgcaggctgcggtccgttgttccctggcacatcgacttgcatcgcctagcagggttggctgatcctccactccagttcaccgtcctaatccatagccatgttgacagcaaaaacatgtctggttgggtggcgctgcctccactggaactcacgacagctcaggctgtagaactgatcaagttaggcagtaagggtgttgcctatgatgcgtggatacttctcaaaattcacgtaccggtgtcagataccgtatcagatacagatactcctcggatacttctggatacgtatctgaggcgtatcgaaaattcctgtgaatttaaataa

SEQ ID NO: 26134 - DNA, 354 bp, Zea mays
  Peptide Sequence Number=SeqID_67913
atgagccaaaggaaagattttgagatgtctttttgccaaggtggggttcccattctcttgacgcagaccccattagatctttgggagagtttggccaccagccatacctgtcttgaggctgctgatggtgaggtggtcagtcttcgtgcccacttggaggaggcagaccgtcgtggtgcagagctagagttggaggtgtcgggtctccaagagggtgcagatagggtcgttgcccttgttcatgcccaaggtgccgaccgagaagagcgtcttctcgatgcctcgaactgggttcttcaagctgttcatcgtggtgcccatcgcggtgctgccgatgctctagctttcgtctag

SEQ ID NO: 26135 - DNA, 420 bp, Zea mays
  Peptide Sequence Number=SeqID_67914
atgacctacgagccccttgacctgcggtgcactcatgacctattaagactaggcctgagtgtgcaagccatctacatggcctacaacacgatgagccacgccgagacccaggctatcaagactaggggttggcgtggcatagaagcggtaatgatggcgtcaagacccatgttgtccataataatgagtatgagccaagacaaccgagtgaccaacacgcatacaaacaacgcgtcttcaccgagaccccgcaaggagcactacaaacttagtgtctcttgctttgattacacgtgtattgagaacaagaatgaggaagaagaaagcgatccaagaacaagagctcaaagaacacgagtaaaaactctctgtgtagtcactaggagtttggagtggattttggacttggagaggctttga

SEQ ID NO: 26136 - DNA, 420 bp, Zea mays
  Peptide Sequence Number=SeqID_67915
atggagcagcggcggccagctatggccggacccagggaagatgagggaggccagggtgcaggaaccaggggcgcacgcagagagctccacggcgagggagatgagctgaagcgaccagagagggcgctcggccatgggggaggtgagggagctgggagcagggcacggctgccatgggcgatggggctcggagaggcggccatgtttgtgctggaagggagatggacatcggctggagaggaaagcgtcggcatgcgtgtgaggaagaagaagctgggatgcggcctccaggaatatcaggcgagatcagcgactgcagcgaaggcttcgagcgaagggtggcgtctttgccttcgccccaacatttgccctccgagggaccagttcgacaaagtcacctggtgccgaagacgtcgctag

SEQ ID NO: 26137 - DNA, 312 bp, Zea mays
  Peptide Sequence Number=SeqID_67916
atggcaggtgctaaaggttcaacacaaaccaataaaaagatcgaagttagggttcaaaaaaaggagcaaaagaaaccgaagaaccctggtctagcgcaccggactgtccggtgtgccactggacagtgtccggtgcagcaccggacagtgtccggtgcactagggaggattgacctcaaactcttcaccttcgggtttctccaggcgcactccgctataattcaccagactgtccagtgtgccaccggactgtccggtgcaccaagcggagcaacggctatcagcacaacggtcgactgcgcagtgccctga

SEQ ID NO: 26138 - DNA, 234 bp, Zea mays
  Peptide Sequence Number=SeqID_67917
atgacctacacattgcattcctatgcatacattgaagtgatatctgcagcctacctgagtcaagcgtttgaacatactaaacacatgtcggggaatatggtaaccgactcaactagtgcttttggcaaaccaaacccactcatccaaacagcttcacggtctagaggtagaggagtagactcctcacaccgggtttattgtgtcttctctgagtctcaccatcgcgtgagctaa

SEQ ID NO: 26139 - DNA, 303 bp, Zea mays
  Peptide Sequence Number=SeqID_67918
atggccagtggttctatatgtgcaaccatgggtccttgcttgctgccagttgtggccttcctccattctcacccggagtgccccttgaggctcctcagaggggtgattgggaactacctccatcacgaggtagctccccttatggctaggcagttacctctgtacaagatgtatgtcaacactccaacggagggcacacgactaagcaccttgtctcctagcgatgcggaaattgctagctggcttagagaaaccatggaggtttgcaagggtgcggagaagccgggtgaccaatcgcggtga

SEQ ID NO: 26140 - DNA, 498 bp, Zea mays
  Peptide Sequence Number=SeqID_67919
atggcgtccaaggcgctcctcgtgctaacgctcctgctcgccgccaccttcctcgccgcctccgctaacgagcaagccaaggcggccaaagaggagaagaaggtggaggtccaagactggcacggcggcggcggctacccgggtcacggcggcggcggcggcggcggctacccgcactgccggtggggctgctgcaaccgcgggtaccatggcggctgccggtgctgctcgcaccctgatcagataccagagcccatgtaccgtcctgagctcgtcgagttgatcacacagacagaaagcgctgccttttctgcagcaccaaaacaccggagactatgggatgtcatcaagctcggcgtcggcgatggtaaatgccgcgatgaccagaacactctggtggctctcctccgtcccatgcatgtcgccggatatgcgggctgttctggcagtaaaatctactgcctgagagatgttggaggtgatctgatgagagtatga

SEQ ID NO: 26141 - DNA, 228 bp, Zea mays
  Peptide Sequence Number=SeqID_67920
atgggcacaacagacatgtcattctcagcaagcatgcggttaaacaaaggcaaaaccttcaaatggggtagccacggttgtatgtctggtgttctggcgcagaagagcaacttgcttagccccagattctggctcgtgttccatgagatattcaagatcaagaatcatgccatcaagtacctggaggaccacagaagtagccctgaccccaatgaaactttgggataa

SEQ ID NO: 26142 - DNA, 1740 bp, Zea mays
  Peptide Sequence Number=SeqID_67921
atggccctagccatcggtggcgtccacgtcgacgagtcctccgcgctcgggaggaacgtgtttggcgtcaaaagggtggtcttcccggttgccgagatgcccgtcccggctcggcggctcctcaggaagcggctgaggtcggagctcgacgccgtgcgcgacctcctcagtaaggcggagctatattcctgcgcttctggcgcggccggcaaggacgacgaccggctcttcgtccccgaggcggcggtggaggatgacggccgcagaaaggcatctccttgcgcagggcgcaaaagggagtccaccaagccagatgatagggagcggctggccggccgcctggcctcgatggcggcggtgctgccggatcacgtcgtcgcgttcctgcaggaccgacgcgctggggacgcagattcccgtggcggcgatggcgagatcgagacggacgtgcagtccatgaaagatggtgctctgttccagctgaaggtgttgctggacaagttcgcaccggagaccacgccgaagttggtgccgcgcgcaccacgggttggctccggcatcagctgcctgtcgcaggcgcggcaccaagaggcaggagacagaatacccccggtgcaagaggaagggcagggcatcaacgtctgcggcggcgtctctcgcatatcgatccaggacatcgctgaggagtacggcgagctcgtgaatggcatcagagttcagctcctgtcgccgctccagcgcaagtacgtcgatctcgccgagcaaggcgggtacattgacatctgcggcgacgcctctcctgtcgtgttcccggccaagaccggcgatagcagcagcccaaacttgagcagcagcagtgactccgatgcaacatcgtcgactgattccgactcaagcagcagctcgccggaggctggagaaccagttccggcgcctgaggctgatcctatccaaggcaaacataatacgcactcgcagccaccagagccggcgcctgaggcgattcagattgcagagccggagaaccagtgcccggcgacggtgtgcgcgatcaccaaaagcccaccagcgccgacggtgctccccaaggaatgtggcacccttgctcagcaaccaccaggcccaccaccgctagagcaggcaccggaagctgtccagattgcagagccaggggagcttaaggagaagtgcgtggcggccggggctacgatgcaccccatcactggcagcgcacctccgcctgcggttcttcccaacgggaatggcacctcttctcagccggccccggtggcggcgcagatcgcacagccacaggtggtccagcctgagggcgtccggcgcgcgcggacccagacgaacgacctgatcgccatggcgcgacaggaggggaagaggcgtgcgatggccaaggcccgccgagagcttctcgagctggagagggcggtgctgcccgacgagcgcatccatccgctggacatggagctgctgggcatcgccgcgttcgagcacgtcgtgagcaccgtgcgggacgcacgcacggcgcagccccgggtgaactatggagttggcctcagtgtctcgcccggtcgccccagcatactgcagcagctggggctctttctgaaggccgatggcggcggcgaggaagaggagggcgaggaggagcggccgccaccgttggccgtcgcttctgatggtgaagacatggacatggaggtcgaggacgggcagatcctgtag

SEQ ID NO: 26143 - DNA, 357 bp, Zea mays
  Peptide Sequence Number=SeqID_67922
atggaaaagaaaatatcagagttcgaagtttcgaatgcggagaaagacaaacgcattgcatcgttcgaaggtgagctgaagcgagcaagggaagagtacgaagtagaaacgagtaaaataagactggaatctgtcgaagttgttgttatcttaaaccttgctcaagtgaagatgggtgatctcaatgatgtaataaatcacatcaggcagcttaatgaaaactatctaattttgatgagaaactgctatactctaggcaacagatgtcgtaatgagttacagaggacattctcctctgctggagaaaggtctcaggaaagaaacttagcctatggtgacttagaaggaattatgtga

SEQ ID NO: 26144 - DNA, 531 bp, Zea mays
  Peptide Sequence Number=SeqID_67923
atggatgtgaaaaaggtcttcaagggcaaagtagaggagcaatgttcaaaaattgaagatctgaggaacaacatgtttcaaggtgagatattcgtatgttcttttgactatctttttatttttgctaggcaaacttacatgaaaggaattgttagccagtcttcagataatcagtattgggatatatggaaccgtcagaaattgagtccagaattcgaagtgaagagacaaaatattctcagagctaaccaggggattgagctttgccagctcaatatcattttgctagcttatattagcttccagtggcaaattgggatatcaggtgcttttaagtccgggagactgagatcgcatatgagtcagcaactagaaggcaaccaacacttaccaaatcctattcattccgctcttggagccaaaataatgtggtggcttgtttgctttattgcgcaatttggtcagtctcttgttcgagcagactatcttatcctccgcaagggttttataatggtcgatatggatgcttga

SEQ ID NO: 26145 - DNA, 249 bp, Zea mays
  Peptide Sequence Number=SeqID_67924
atggtgttttctgttctggtccacagcacgccaaagaaactccaagagaagttcaatgttggtgttcctgagacctcacgctctcattttgctgcagtccctactggtacaagtagcaagcggcatgctgctaggaagtggaagcgctcgctcagtgaccccttccgttcacggccgcacagtgctccggaattagtgtcaggatgcaagggatcaccgcccgtgcctgtggctccagaggcgaggtag

SEQ ID NO: 26146 - DNA, 285 bp, Zea mays
  Peptide Sequence Number=SeqID_67925
atggaagaacttcactatttggtcccctactatctaattttgcagattgaatcacgtaacaatggcttggagatgcagtctgtaaataacaaagggcttatggaagagctagataaattgcttgagcgtctgtggattccacatgagtttacaacatcattaactggaggctcatttgaagagtcatggatgctgaaaaatgttgaggcatgtgaatggttgacaggggccattcgcagtcttgaagttcctaatttggacccatgctatgtcaacatgcgcgct

SEQ ID NO: 26147 - DNA, 761 bp, Zea mays
  Peptide Sequence Number=SeqID_67926
atggccgcaagcaccgcgcggtggcaactgctggccggccaggtgaaacggcaagcgtcggggttcctgcaggacaagtacaagcaggcgaggctggcgctgggcgacgaggcaaccaacaacgagccctgcgtccccgacgccaagaccctggcgtgcatcgccgactcggccttcgacatggacgacttctggaggatcgccaaggtgctgcaccagaggctgagccgcgctgccgactggaaggagtggcgccccgtgtacaaggcgctggtggtcctcgagttcctgctcaccacggccccgaggacggccattagagtctcccacgaggtgcgcggtggcggcgtcgtcggcggcagcccgacgtcgtcgtcctccccgtcctcggcctcgtcctccgcctcctccaggacctcgcgcacctggtccttcggcgggtcctcccactactccgatggccctgccatgtgcctcacctgtgcctccgacgccgactaccgccacgacaagaaatgcgacgcgtacacagccgacgacgactgctgggcctcgtcgaatcacaagagcagcaggtgggcggccaggttggacgaaagcgacggcgaggaccagcaccagggcctcatggacgacgcctgggacgcccacttggtggaggacagcaccagcacttggtccgccaggttgctcggttccttgtccttgagcaccagcagggcgtcaggcttccagagtctgtcgcaaccggagcagcgaag

SEQ ID NO: 26148 - DNA, 279 bp, Zea mays
  Peptide Sequence Number=SeqID_67927
atggcggccgaacccgccgctacggccgctgcttcggcggcggccgctatctccgctgtcatggactggcgctcctcccccgacgcccgcgccgctgccttcgcgtacctcgaatcagtctgttctactccgctcccccgtcacctcctctttccctttgggcttcgctttcccgagtctgcttttggtttgctgaattgctcttttgaccgatgttgcatcgtgttgtggagagctttcttggttgatgccgcttgttgtggctggatttttgcatga

SEQ ID NO: 26149 - DNA, 315 bp, Zea mays
  Peptide Sequence Number=SeqID_67928
atgccccctaagagagcgaattcaaaggccactgcttccatcgatgatgtagccaaggaggcccttctagctgaaaagaaaggcaaagctcccattgcagacgacatccctcaggaggccttcgacgatgaggcaatcaagagcaaaaggcaacgccaacacaatctgcctacgccggagggcaccgcgcgcacttgcagctctaagggggtacctcaggcaccatcgccaggcttcgtccacctagaaggagaagacaccatcgaagacggcgaaatcataggcattacagccgaagaccaactcaagttgtga

SEQ ID NO: 26150 - DNA, 138 bp, Zea mays
  Peptide Sequence Number=SeqID_67929
atggcgaactcaaccgtgggcatcacgccggcgcgggagcaccagagagcgcgggacacggcgaggcgggctaacggcggcgtggatcaactacgggttttcaatccaaattcaaaccaagtttcaaattcaaactaa

SEQ ID NO: 26151 - DNA, 339 bp, Zea mays
  Peptide Sequence Number=SeqID_67930
atgcttggtcaccggcgccgctctcctctgttcgtccacgccatcaccgatttgactgctttacggtcgcggttgaacgtggcaagctctaagagaagcaccgcgctcggtgttgtcgttgatcgccagcagggtccggtgatggttatcaccgtgaccgtcgcgatgctcatggagcctataaatccaccctgctcccacttcgtttgtctcatatcaaccaagcccaactcttcattcctcagttgcgaatccaaccaaccactagccatcacgttctgtcccccatcctctgtgatcaacggagttcccctgaaccggtttcttccgccgccgtga

SEQ ID NO: 26152 - DNA, 1497 bp, Zea mays
  Peptide Sequence Number=SeqID_67931
atgaggccgcgcggcaggggcgacgacgtcgaagacgacgaggatgagtacgaggacatcacgccccctcgaagaacgccagagcctgaggccgaccccgtccgctcgccctcgccctcgcccgctcctgcccccgccccaccacatcccgcgcgtgcccctctcagcagtctcgttgtcaggccgccgccgcagcaacaggagaacggcggcggatcctccccgccctcatcctccgcccgctcgctttctcccagcaccggcggacaccgaggccgcggggcctcgcccccgcggcgacggcgggacttctcaccgccgcctccccgtggttgggtgaggcgccggtcgccgctgccgccaccgccggagaggcggcgtcctgggagcccgccgccccagcgccgacgcttcagcccaccgccccggtcccacctaccgcggcatccgcgcttccacgatgagcaggaagctactaattacaccgtgaactaccagaaggccgctattcagttgagctgcagtggcaatggatatggaatgcatgcaggcccttcgccaccacgcagagcagaagccagcaaatttgatgatgatgttagtccacgttacactcatggatatcaagggggtggtagaggaggtgcaaggttccgagagggtcctccaccatatggaagaggtagatcatatgggagaggttatggtgctccacatggaaaggatttgattaatattgatggagaatatgttcaccgaaatgacccaaatctgtcgccaagagaaggtgattggatatgccagaaccctaattgtggaaatctcaattttgctcggcgaactcactgtaacaactgcaacaagttccgctattcagcacgtgaagcatatgaacctaggcgcagccctcccttcaggagttaccccagccctccacgagggcctccaaggatggttggtccacctggtgatcgagcccctgcaagagagatggccaggtacagatccccacctcatggttggggagcaagtgatcccagggcatatgcaggtcgatcccctccagaacgtgcaggacggtttacagatccatcaactaagggaagaatgggcttccgtggtgagcgtgacccaagggaccgtgtgaaatatgagtggtctgccactgatgactacgttcagagggagcgcccatatgatggttatcttgacaggagtcggcgtcgctcaggatctcctcgtggtaactggggaaatgatctgcgtgacagaagccgctctcctgcacggaacaggcctatgaagagttccttcaccggaagaggtcgacctgacgactatgctgctgatccatatggcagccgagggagacccaatggtatggaggccggccgtgggcgtgggcatgcttacagagcaggcagtggtccgtaccctggtgagactcgaggtgaccaacgcgctgctccacgcgctaggaacgaggatggctattag

SEQ ID NO: 26153 - DNA, 210 bp, Zea mays
  Peptide Sequence Number=SeqID_67932
atggcccgcgggtcagtcttaccgcacctgcgcacgcgctgtgtatcactggcagttggggcccgcttgaccatccgctccaccgctcgctttctctggcgtgagggacccaactggcagcacgcccttcccggggtgagaattgcgggcgccggtgatggcgccgtcgtgcaccgtgggcggcgccgccgtcggggtaaacgggagtag

SEQ ID NO: 26154 - DNA, 684 bp, Zea mays
  Peptide Sequence Number=SeqID_67933
atggatcttcgcgtagccgcagccgtctccctcttgcttgcactggccacgaccaccggcgccgtcacgttcaacgcgacaaacacggcgacgggcaccatcggcggcctgcggttcgacgtggccgtgggcctggactacgccaacctggtgctctccaatgcctccgccttcatctggagcagtgccttcaaccagaccagacccgccgaccgcaagcccgtcgacgcggtcaccctcgtcgttgccgccgacgtcagcggcgcggcagccttcaccgccgccgacgtcatcaccctcagcgccccgtacgtcggcaactactccggcgacgtgagaacagaggtgaccggcgtgctgttccacgagacaacgcacgtgtggcagtgggacgggcaggggcacgcgaacggcggcctcgtcgagggcgtcgccgacttcgtgcggctgaaggcgggctacgcgccggcgcactgggtgaagccggggcagggagaccggtgggatcaggggtacgatgtcacggcaaggttcctggactactgcgactcgctcaagccgggcttcgtcgcgctgctcaatgccaagatggaggacggatacaccgatgatttcttcgctgggatcctggggaagggtgtgcagcagctgtggcaggactacaaggccaactacgacgcgtga

SEQ ID NO: 26155 - DNA, 312 bp, Zea mays
  Peptide Sequence Number=SeqID_67934
atggcccaagggcacatttccctttcagaaccactcggcgtgcgggaggtgcgaggcgtgtatccgtcaaatgctgggccacctcgtgcttggaatattttaatcgtctcgacaatgagctcagggaagcatttgagaacaagtccgcaacaaggtcatttcaagtttgagttaatcagtctatctcgaacctatcgcttcttcgtggaaattacgatacctggaatactcccggataaaggctacatcggtctccatgcgcttgcgaagaaaaatctaattggcataagaaccaccaacaagtctttctag

SEQ ID NO: 26156 - DNA, 282 bp, Zea mays
  Peptide Sequence Number=SeqID_67935
atggccttgctagaccctcccgagcgcctccagcctgaggtggcactcaacttggtgcgcaacccgctcgaatgggatactaggacacccatcgcagagtggtggagcgtgcaggcttacggccaacaggccgggtttatgagggtggacctcaccgggctggcgtacacctgggggagcgcttacggaacccttcttggttcagtactcgccattgggctaggtcccgaccctgggctcccatctgtgtttgctgatagagtccacgtcctcacgctgtag

SEQ ID NO: 26157 - DNA, 180 bp, Zea mays
  Peptide Sequence Number=SeqID_67936
atgtcacactttggtcgtgtttggctcgctatgccccctacctacgcctcgccagagttagaagatggccagctaggagcaaaagtagtcattgataaagacatgttagctccacctaaattagccttattggtttcaaatgctgaagatgccaatttggctttgttagttgcttcataa

SEQ ID NO: 26158 - DNA, 627 bp, Zea mays
  Peptide Sequence Number=SeqID_67937
atgcaggccgcgcttgtctgcctcctcgggtctacgcggcggtttcacgcgcgcctcgcctccttgggccgcggcgatttgaagcccgactggccgacgatgagggccgacgccttgcacgccatctccgtgtatgtgagcgggatgctgaccgtgcgcgagacactgctgttcgccaccgagttccgcctgccctacgcgctttcctcagagcggaagcgcgcgcgcgtcgaccagctcggcctcttctgcgccgccgacaccatcatcggcaacgagggccaccacggcacgtcctcggtagcggcgtcctgtacgcggtgtgtgctggtgatgcaagtggcggcgtgggcgtgggcggcctatacgagatcatgtacaacaacgtcgttagtctatgcgtcaaggccattgggtggaggctcgagtggaggttcaagtggaagcccctcgacggcgccgacgggggataagaggagcgcccacttccctatggtcctggtccagatgcccatgtataacgagctggaggtgcataagctgttagcggcagcatgtgagctgcagtggtcgaaggacatgataatagttcaagtggtggacgattctactgatccctttatcaag

SEQ ID NO: 26159 - DNA, 147 bp, Zea mays
  Peptide Sequence Number=SeqID_67938
atggcggtccctggcactggacggtttcttcttcgtcggcgtctaggaacggccgtgcgcaggatgggcgtcacacgcacgcacgcatgcgaggcgatatgtgcggcttggcagtttctgcttcgaccatttgagattgagatttga

SEQ ID NO: 26160 - DNA, 390 bp, Zea mays
  Peptide Sequence Number=SeqID_67939
atggcggtccttgccatggcgcattctcccgacgctgtccctggccgtgtgcccctgccccgcacggtgccccggcccggcgcgctccgctataatttaccggacatgtctggtgagccagcggagcaacggctaactagagccaacggtcgactgcaaaagtgcacagtgatgaatagtgtcgcgcagaagtcagagcatagaagtcagaggtcactggacatgtccggtgtgccaccggactgtccggtgcagcaaaaggacaaagggttccaacggtcaacagctccaaaccccaacgggcgtgcaccggacagtgaacagtggctatccggtgcgccaccggactgtctggtgtgcccatcgccagcagagtcagccaacagctag

SEQ ID NO: 26161 - DNA, 1224 bp, Zea mays
  Peptide Sequence Number=SeqID_67940
atgtcgacggcgagcggcgtatccgctggctccgtgctccagctgccctcctttcgggtgccggccaagagatttctgcctcggagaacagccgctggtgctccggctggtaacttttttgtgaagagagatattatatataatagaagctaccaccaattcttaccattgaagcatataggaggcttgcaagcagcagtacttccagttactccaccactattagatggtgaggggaaaaagaaacaaatggctgaagagtatgggttcacacaaattggagatgaactaccagatgatattactcttaaagatgtcatggatactttacctaaagaggtatttgaaatcaatgatgtgaaggcttggacatcagttttgatatcagttacttcttatgcgctgggtttatatttcattgctaagtctccatggaataagttggttgaagatgttgttggaaccttggctttcatgccattgatatatccttatgaaccgtggagatttaagcatgaccgacatcatgccaagacaaacatgttgatagaagatactgcatggcaacctgtttggcaaaaggaaattgaatcatcaccttttctaaggaaggcaattatttttggctatggccctatcaggccatggatgtctattgctcactggttgatttggcactttgatctaaaaaaattcagaccaaatgaagttccaagggttaagataagcttagcatgtgtgtttgcattcatggcgattggatggcccttgatcattctcaaatcaggactagctggatggtttaagttctggttcatgccatggatgatgagcacttttacaatggtacatcacacagctcctcatataccattcaagtcatctgaagaatggaatgctgcacaagctcaattaaacggcacagttcattgtaactatcctcaatggatagagatcctttgccatgacataaatgtgcatgtcccacaccatatttctccaagaattccaagctataaccttcgtgctgcttatgattccatcaaacagaactggggcaagtatgtcaatgaagccaactggaattggcgattgatgaagacgatactgacgagatgccatgtgtacgacaaggagagatactatgttccgttcgatgagctcgcgcctcaggagtcccaaccaatcaaattccttaggaagttcatgccagattacgcatga

SEQ ID NO: 26162 - DNA, 276 bp, Zea mays
  Peptide Sequence Number=SeqID_67941
atgaagagacatgaatggagcttaggttatggtgcgtcgtggaaacttcgatctggcttgatttatggaggtgttggagcaaaaatcgcatggcatgttgaggaacatggtggtacggagaggggcaagcggacttcgttgcgggtgagtttgtttcgtgctcattttcttctgcttgagcgcggctttgacgttgaaggcgagctggatcggctctccctcggaagcttggcgttgccgggcaagaaaggcaagatcacccttctgccgagctag

SEQ ID NO: 26163 - DNA, 213 bp, Zea mays
  Peptide Sequence Number=SeqID_67942
atggacctgtgctcgctccccatggagccctgctctcctctagccgtgctctgcctgtcacaccccgctttggaagataaaccgaatgtgaaccatcacaatgcttcaaataacaatagagagggactagctttatgtggggttaaggtcaagcagttgcttttagttgatcaggttgcacattttacccacgagccatggttccctctctag

SEQ ID NO: 26164 - DNA, 222 bp, Zea mays
  Peptide Sequence Number=SeqID_67943
atggccctgcgcgcgcggttcgcagcccggcccctctctcggtgtggccccgtcctcgccgcgagatacttgatcagagatggttggtttacaggtggtgacaaggatgatggttatgactatggtaatggttgcctttggtgcaatctatgctcgggtaaagaagaaggcgtcgaggcgaatctccaggagttccaggacttcgacgagttcgaggattag

SEQ ID NO: 26165 - DNA, 606 bp, Zea mays
  Peptide Sequence Number=SeqID_67944
atggagatgagagcgaagaagagcagcagaagcagcacgagcaacaccagcggcagcacgacgaccacggcggtggagaggaaggagatcgagaggaggaggaggcagcagatgaagagcctctgcgccaagctcgcctccctcatcccgaaagaacactactcctccaaggatgctatgacccagctgggtagcctagacgaggcagccacgtacataaagagactcaaggagagggtggaggagctgcggcacaagagcgcctctgcacggctcttggccgctggcagtggcacgagacgaggcggaggaggaggaggcgcctccacatcgtcggcagcgacgaccacggcgagcggtggcgcaggatcatctgaagaagccggccggcgggaggacgacatgccgccggcggtggtagaggttcggcagcacaatgacgggtcaagcctggacgtggtgctcatcagcagcgcggcgcgacccttcaagctgcacgaggtggtcaccgtgctggaggaagaaggcgccgagaccgtcaacgccaacctctccgtcgccggcaccaaaatcttctacaccatccactgcaagcttttatcttaa

SEQ ID NO: 26166 - DNA, 1260 bp, Zea mays
  Peptide Sequence Number=SeqID_67945
atgaagccgtggaaggagacttccaggagttccaagactacgacgagttctaggcgtgggttagcggcaacccccagtcggctgcctgtgaaggccgcggttatctacgtttcgttttcgtactttgatttattaacacatgttgatacccggacaggaacatcccgcatgaagtgttcaagtgccaaagaatgtcaaaggaccaagtatgctgcaggaaccaatgtacaagttgctcctgttgccatccctgctgaggttcaagacattccagcccaacacactcaggaccatgaagttgttcctggtcctactgaggtgcaaggcaatccggttaagtatagtgcagaacaacttggaagccatacgatgaactgtgaccttgataatcgtgtgaactctgtttccagcaaggatgcagtagaacacgatcatgtccattcagctttacctgatgcgcataggggcaatacacatgcagatacaataacaaatgatggagaacccattggagcaaacaacaatgggaaagtgtcgaggttaacctacggtgaagataaattcagaccaggtattcaaagatctgaaaaccacacagaatctatggaaggtttaagctgtttgcaaagggcaggagattccgttggatccccagcaagtattaacaatacaggattaccaaagaacaatgtttcttctgaagctcatattgatgataatgagttgaggagaaatgatcttgtcaatgatgttgaatcaaatttgattgatgatttctttaatagccgtaggtttcttggttttgctgatgaagcaatggctcaaagtggaagaactggatcaagtggacaggcaagagaaaacagctgtaatcaatttcaccaaatctggaactatttggaattacctaatccaatggatgaagcgacccctagtataatccaccacaatccaaacctgacataccaaagtagctcctgcagatgctgcatcaatgacaataccaaagtaacacaccatcggaagatcacctcatcctccaacctgaacggaggcatcgccgataactacctgcacacgagacatgtcaaaattgtgaaagcttggcctttacatgttcctccaatggctacagaggatacaaaaatgagcatcagagattcagttttcagcaccgacaaacagcaaaatggaggcttcgaaggactggaacttgaggaaggtgactgtatagtgtacctcagtgctgcgacatgctaa

SEQ ID NO: 26167 - DNA, 264 bp, Zea mays
  Peptide Sequence Number=SeqID_67946
atgtcgctccggccgagcgagcgggagcagatgcggaagggcaactacaagcagacggtggacgcggaggagagccgccgccgccgcgagggccagatgatggacatgcgcaaggccaagcgcgaggaaagtctccagaagaagcgctgcgatgggtttcccgcctccgccgccggtgtgccgccgatgggccactccaccgcgctccagcagaagatgagtgcatggtacttctttcttaattcccactacaactttatgtga

SEQ ID NO: 26168 - DNA, 222 bp, Zea mays
  Peptide Sequence Number=SeqID_67947
atggagctctcgatgttgtgcctgcttgctctgtcacgacttgtggatggaggggcgacgactctggtactgatacccagaggggaggctctcatagggaaactttccataggaattgaattctctaaaattcctttgctttttgccattcaaaggaggacttattctgtaaatctaatgacaagcaccacacaacaacaactactgagcaagagcaactag

SEQ ID NO: 26169 - DNA, 351 bp, Zea mays
  Peptide Sequence Number=SeqID_67948
atgaagagccggaggcagagcagcgggggcagctcgggcgcctgcgccgcgggggagaggaacgcgcacagcagcggcggggggtgcaagctggagaggaaggacgtggagaagaaccggaggctgcacatgaagggcctctgcctcaagctctcctccctcatccctcccgccgccgccaccacgcacgcctccctcctctccgacgccgcgtcggcggcggtgtcctccaatcccggcaacaagcaggtgacagccacgcgggtttgctcgggggtcacacgtcacgtcattatttggcttaggcgcacgtgccggatgcccgagaggaggaactcgtgggcgcaatag

SEQ ID NO: 26170 - DNA, 1362 bp, Zea mays
  Peptide Sequence Number=SeqID_67949
atggggaacatctgcggcggctgcgggaaggacagggtcgccgaggatttcaggccgtctagcccagggacgacaatgacctccaagacgagcggcagcataaccaccaccagtcagagcaccacggggaagctctcctccgtgggcagcagcttcatggcgtccgccggcagccgcagcaccagcggcggattcgacgagggggccaagtaccccgacggaggccagatcctggaggcgcccaacctccgtaccttcacattcatggagctcaagacggccaccaagaacttcaggctcgacagcgtcctcggcgaaggcgggttcgggacagtctacaaagggtgggtggacgagaagaccatgaccccgaccaggaacggcaccggcatggttgttgccgtcaagaagctcaactcggagagcatgcaggggtacgaggaatggcagatgttaactagcatagctaatttacactgctcaatctacctgcagtcggagataaattttctaggaaggctctcccatccgaacctagtgaagctcttgggctactgctgggaggacagagaactgcttctcgtgtatgaattcatggccaaagggagcttggaaaaccatctattcaggagaggatgcgccccgttgtcttgggaactgaggctgaagatagccatcggcgcagctcgaggactcgcattcttgcatgcatcagaaaagcaagtgatctaccgtgacttcaaggcgtccaacatacttttagatgcgaactataacgctaagctctctgattttggccttgctaaacttgggccgactggtagcaagtcacatatcacaaccagggtgatgggaacgtatggctatgcagctccagagtacgtagcaaccggccatttgtacgtgaagagcgacgtgtacggcttcggcgtggtgatgctggagatgctgtccgggcagcgcgcgctggacccgaaccggccgaacgggcagctgagcctggccgactgggcgaagccgttcctggccgaccgccggaggctggcccggctcatggacccgcggttcgaggggcagtacaactcgaagcaggcgttccaggcggcgcagctgacgctcaactgcctggccggcgagccccgcagccggccgtcgatgaaggaggtggtggagacgctggagcagatcgagtcggtgaagagcagggcgcgggaggcgcgcggcggctcgtcgcgggaccggcaccacggccgcgccggcgcgacgcaccagcggtcgccgcgcgccggtggcgagccgcgcggccgcggtgggtcccgggccgccgccaacggccacgccgccagggccgccgcgcggtga

SEQ ID NO: 26171 - DNA, 459 bp, Zea mays
  Peptide Sequence Number=SeqID_67950
atggcagagaccgcagatgctagcaacgcacttgaccatgggcttcactaccttcggtcaaccggcaatgcatgtgcggcgagggcgctgttatggtggggatgggataactctgatgctcacgctggtatggccacttccgtcgaactttccttgttcttgcctccttcggtgaacttcctcggttcttgcctccttcggcaacttcatgtactcacggccgatgttgccgccacacaccgtctcttgtgctcctcctccggcgaacatccactgctcgaaccaccatggcgctcagctacagggcgtcatgacagcagctccccaagcgatgcaagccgcctgttcgacgaaatgtgtgagaagcaaaatagagacatcaacgatgttttcatgtgtctaatacaaatttattttttaaaacatagccagatagcattttcgacaggaacaaagtga

SEQ ID NO: 26172 - DNA, 1014 bp, Zea mays
  Peptide Sequence Number=SeqID_67951
atgaggaggaagcgggcaacgtccgtatcgccgacggcgtccgcgagcgcaacgcggcggctccgcctgctgcgcctccctctcctcgccttcgccctcctggcgatcgccgccgtgctgcgccgccacgtctccgctcccgcgcggcgctccgtctctgagccggacccgctgccctgcggcgcggcgccgtcggacctgacggcggggcggtgggtggcgacgccgcggcccgtgccggcgccgctctactccgcgacctgcccgttccacagcggctcctacaactgcctccgcaacgggcggccgccgctggcggcgctgtcctgggcgccggcgcgctgcggcgtcgtcccgcggatcgacccctccgcgttcctcgccgccgccgccggccgccgcgtcggcctcgtcggcgactcgctgtccgagaacctcgccatcgcgctgctctgcgcgctccgctctgccgaccccaacgcgcgccggtggaagcgccgcggcgcctggcgcggcggctacttcccccgccacgacgtcaccgtcgccttccaccgcgccgtgctgctcgccaagtacacgtggcagccagtggaggatccggagcaggttcacaaggatgggataaaggggatttacagagtggatgttgacatccccgctgacgattggataagcgtcaccaagttctacgacgtgctgatcttcaacacagggcactggtgggggacatacaaattcccgagagagacgccccttgtgttctacgaaggaggaagaccgatcgagcctccgctcagcattcccgacggcctgaaacgagtcatcaaatccatggccgcctacatcgacgcggaggccccgagcacgacgctgaagctctggcgcacgcagtcgcctcgccacttccacggcggcgagtgggatcgcaacggcagctgcgtgactgacaaactccttaaagaggatgaggtactaccataccatcagctgagctgggacgacatcacctag

SEQ ID NO: 26173 - DNA, 343 bp, Zea mays
  Peptide Sequence Number=SeqID_67952
gccgctcggccaggggaggcgcaaggcaagccaccagctgggcgccaagcacgccgccgcacgggattggggagggagcaggcactgggcgggctgggcggccatggctagaatgggcagacgacgccgcttgttggggcaacgggacaggggctccacgcgggggagctgggctgcgcgctggccgaggcgagcaagcagggtggagcgacagcacgcgtgcgcagcagacgatgacgcgaaggctacacgcacaaagactcagcagggaggggacgcggaccttaccagtcaagacgacatcggcaagcatgatgcgcaaggtgttcctgagagcacctag

SEQ ID NO: 26174 - DNA, 330 bp, Zea mays
  Peptide Sequence Number=SeqID_67953
atgttgatttttgttgtactcatctttgtgcagctggacgcttggttcgatccgcaattcgggggtgtgaacaaggacgcgaggacggtgaacgcggtgacggaggaggcgttggcagggtcgtcgggcatccgactggtgaacctgacctacatgagcgagttccgagccgacgcacacccggcggcctggctggggaagaagggcgtggtggccgcgtacgggcaggactgcatgcactggtgccttcccggcgtgccggacacctgggtcgacgtcatggccgtgcagatcctgcatcacttcaagcggctagaaaaaggaaaatga

SEQ ID NO: 26175 - DNA, 1149 bp, Zea mays
  Peptide Sequence Number=SeqID_67954
atggctgccccgcacgacgaggccgcggcgtgggcggaggaggcggcgcgccgggtctgggccggcgccgtgccgctccaggtccacctccacgacgccgacgtcaccgcgctacccccgccgccgcccttcctgactttgggaccaagaattgggtatttgcccctcttgatacctgttataagggctcatttcagcaatgcactcccacctggtgttgacactgtttgttttgatggtcatttactcgagttaaataatgctattgttcaacactctttaaaattgctgactgccttttctattctcgtttttgaactctcagatccagaaagaccatggaatctaatagtccattttaggggatatccctcagaaatcttgtcaccatgcgagggtgaagatagtgtgaagtggagctacatgaattccctgaaagaggccaccttcatcattactgggaacagtaagagtgtgatgaatatgtcgcatgctgatcaagtcgctctgtgggaatctgtaatgaaaggtaacttagatgggtataaaaatatctccaccaggcttaagcttggaccatttgaagatgatgtgttagtacggacagcctccgtggagcggcaacgtcaacaaaattctgatgaacctgaatctcctggatctagcaaaccgtgcagggtccctgttcgattatacgtacgcaatgttcaagaagaccttgagtacatagaacatgcagttcctgtcagtgactgggaaaacgtgtcctacataaatcggccatttgagactcgcaaggctgaaggtagaagctacatcaccctggaacatgcgttgcaaacattgcttccggagttcttcagctcaaagcccccaggcagcgctgacggctcccaacacgcaggcgcaatggacgcagccgcagacagttcagatgccaccaactcttcaagtcgttctcaggaggcagagcaagccctggcaagtccagcagaggcgggttctgccaagagagcgaaagtgaagctggtgagggtgcaaggtgttgagctcgacatggacatcccgttcctgtgggtcgccgaccacctcaagaaccccgaatactacgtccacatctgtgtatacgtcggcactagaaaacaatag

SEQ ID NO: 26176 - DNA, 420 bp, Zea mays
  Peptide Sequence Number=SeqID_67955
atggctgttgctggtcaagatttcaccagtggcggatggggctttgcatttccaagggattcccctctgcaagtagacctgtccaccgcgatcctaacactgtcggaggatggggaactgcagcggatccatgacaagtggctcaagacaggcgattgttcatctgacaacactgagtttgtggactcgaaccagctccgccttgagagcttcatgggcctgttcctcatttgtggcgcagcatgtgtcctcgccctgctcatttactttggcatcacgctgcgccagtacctgagacatgagcagccgggatcagcaatctccgcggactcaggatcatcgacatcgaagcgcagtctcagaaaattcatttcgttcgtcgatgaaaggcaacgatcaccaaagaaaaacggaccatga

SEQ ID NO: 26177 - DNA, 468 bp, Zea mays
  Peptide Sequence Number=SeqID_67956
atggatggaggcagttggtggtacgggaacgtccgcacgccgaatccagtcatgtcacaggcggcgtccatatctgctagccccgggctaaccatctcagcaaatcatgctcttgaaagcgagtcagactccgacagcgaatcgttgtatgaggtagagggagttccttacgagcgaggtaacagatccattgagacgaagcgaataagaaggatggtgtccaacagggagtctacgcggcggtctaggaggaggaaacaggcacagttgtctgaccttgagtcacaagtaaagatggcagaggatatggtagcgagaagtgttgtatcgtgtgacctaggcgaccttggcctggcaccatatgtgaactcaaggaagatgtgccaagctttgaatgtgctcacagggttggatttactagggagtgatgcattcacgtatggtgccaggccacacgatacatattaa

SEQ ID NO: 26178 - DNA, 1550 bp, Zea mays
  Peptide Sequence Number=SeqID_67957
actgcccccgcctccctacccgcccgcctgcccgcccgccagacgcgacagccgcgatctgcccgcccgccgtcatcgccgcggggctctcgcgcccgccctcgggccgccaccctttctcatccgcgcacgcgcagtcctcgcaccccgtcgacttccccaccatcgctgcctgtcgtgccgcgatatccgcctccaagggtgaccgccgccgccgacccggcgtcggccagcactcctcctccccttccccttctctcgcaaccgctgcagccaaggaggagcaggagcagccggtgctggtaaggatcaagcacgagcgggacccggagcggctgtaccagctgttcagggccaatgcgcacaaccgcctcctggtggagaaccgcttcgcgttcgaggacgcggtggcgcgcctggcgggtgctcgtcggaatgacctcgtcgaggagatcctcgagcagcacaaggcgctgcccaggggaggcgggaagggttcgtggaaggccgggatgccaggccacgcgctacggactttccaggagatggggatgtacgggtgcccgcgcaccgcaaagtcgctcaatgccaccatgaaggtcctgctgcgggcacgaatgtttgatgaggctctgtcgctgtttgaggagggcccagagaagtacgacgtcgaggtggatgacatctcgtgtaacacggtggtgaagatgttctgcgacatgggggacttgcgtgcggcgtaccgggtcatgcaggggatggagagggctggtttgcggtcggatgtcatcacgtacatgacgctcatggctgctttctataagtgtggccgacacgaggttggggatggtttgtggaatctcatgaggctgaggggttgggtgccgacacttgctacctacaatgtgaggatccagttcctggttaacaggggaagggggtggcaggcaaatgagatggcacggaaaatttatgtggcggggatcaaaccagatgagatcacatacaatctaattatcaagggtttcttcatgatgggtgagcatgagatggccaagacggtctttggcgcgatgcacgggaggggatgcaagccaaacagtaaggtttaccagacaatggtccattacctctgtgagagaagggactttgatttggcattcaggttgtgcaaggatagcatggagaaaaattggtttcccagtgtcgatactattaaccaactgttgaaaggcctcatggctatctcaaaggataggaatgggaaagagataatgaagttggttactgggagaaaaccttcgtattcatatgcaagtctggctcggaacttcctgagatactttgagccaccgctgttccagagggctgcgatggcttggagtcggcaagaatgtggctcaacgtcgtggctgcagctcgacagtcgcggaggttctggaggattaaccatctgctgcaacgccaacgcctgggacatgggctgtaggagcaagtgccatccagacattcgctttcctttcctcagtaagtggacattcagaaagtag

SEQ ID NO: 26179 - DNA, 165 bp, Zea mays
  Peptide Sequence Number=SeqID_67958
atgaagcacgattctgcttttgaagctgcattcttagagccgaagcaactgtttgtatctacatggtatgatgatgatgatgatcctataggggacactgagatgcgctcatgcctgggggcattgctggttgggagcagggcagttgcgtaccgaaaggtgtag

SEQ ID NO: 26180 - DNA, 627 bp, Zea mays
  Peptide Sequence Number=SeqID_67959
atgacgcgctatggtatcacacagttccctgggggttctgcgtatccatatggatatggtggccgcatatcaatggggagcccctacgggccaatgcaaatggctgggccaaccgcatactctggtggatctatgatgggagcaggtggaatgtatggaatgcccatggacaggtatgggctaatacctgctggttctggtccaatgggcacgagagctggctcatattctgatgaagattctcagaagaagtctgcaggagctggccgtgataatgattgggagtgtccaaattgccacaacatcaactttggcttccgcacagtctgtaatatgagaaagtgcaacacacctagacctgaaaaccagtattatgacttcacaattgtgcttgaagttgactttgctgccacaagattacccggatctaagcctgatggtttaagagggtcaaaaccaaagacaccagagggcagttggaagtgtgagcagtgcaataacataaactatcctttccgaacgaaatgcaatcgtccccaatgtggagcagaaaagccatcacagacgaacaatgcaaatgaatcagcggaagatcaggacaatcaggttctttctgaatggttgtga

SEQ ID NO: 26181 - DNA, 276 bp, Zea mays
  Peptide Sequence Number=SeqID_67960
atggcgccccttggttttgcttgggcgacgataggaccagaggagctcgagttaaatagacatgggacggcaccagatttcaaccacccatgcgcagatttagccaacaacaccccccctgatcctcggcgtgtaggtcggcgcctagttgagatttggggcagagtccgtgaggttgaagaccgacctgaagaagtggccccacgcgttagggcaagaatagcctggggtaagaaagtttatggtgagaaagaactccgtgctgggtggtcctga

SEQ ID NO: 26182 - DNA, 1305 bp, Zea mays
  Peptide Sequence Number=SeqID_67961
atggcggctatcgctgaagatcgtcaaccgcagcatggcgtcaacagagaagctgcgacgaaggcggtacacacgcagttacagatggagcgtagcgacgaaggtgacagcaggagtcaagaggagggctcgtactgctactgcctggttaaaagcgtgagtcacctgagccgcaataaccgtggctttaccacgctgccagagaggtacgtcctgccgccgtccgaccgccccgacgacgacgggctcggcagggtgaagctccccgtcgtcgacctggcgcgcctgcgcgatcccgcctaccgtgcttccgagctggacacgctcgacgccgcgtgccgcagctctggattcttccaggccagtacactgcacgcacaggcctgtcatcttcttgggagagtttgcatccatacagatcgacctaaaattaaagcgcatgcatgcatctgtatgtatgtacgtgtacaggtggtgaaccatggggtggcgcctgagctggtcgaggggttgctggacgtggcgcggcggttcttcgagcttccgctagtggggcgggcacggtacatgtcgccggatgttcgagcgccggtgaggtacggcaccagcttcaaccaggcgaaggatgccgtgctcttctggcgtgacttcctcaagttagcctgccagccgctacacgccgtcgtcgcctcgtggcctgacgaacctgctgatctcagggaagtggcagccaggtacgccatggcgaaccaacagttgttcatgcagctcatgggggcagcactggaggctctgggcatcccctgccaccgaagccagggtctgctacgggagctggaggcggggtactcgcagatcatgctcaactgctacccggcgtgcccgcagccagacctcacgctggggctgccgccgcactctgactactgtctcttcacgctcctgctgcaggaccaagtcaagggtctccaggtcctgcgccgtggccactggttcaccgtcgatgccgcccctgggtccatcatcgccaacgtcggcgaccatcttgagatctacagcaacgggctgtacaagagcatgttgcaccgcgtgcgggtgaactcgacgcagacgcgcatctcggtggcctccttccacagcgtgcctgcggagcgggtgatcgggccggcggcggagctggtcgacgaggcaaacccacggcgctacatggataccgactatgccaccttcctcaacttcctcgcatccgccgaggggaagcataagaccttcctccagtcaaggaagctgccaatgctaagctag

SEQ ID NO: 26183 - DNA, 312 bp, Zea mays
  Peptide Sequence Number=SeqID_67962
atggccgatcaagcttcagttacccaggggatcccaagttctgccttgtgtgggaccgtgctcctttgctccactagcggggttctctctagtgtagtttgtggtctccccatggcttcctttggcgatcccaagggagatttcctcccgggagatggttctgaagcagaagaccgctccttggctgaaggtgctcatgctcttgaaggtgactgccatggagtcagtgttgatcaacgtcgcaccccctacctgggcgcactagctgtcggtgttgttaaccgacctcacaccatggggttatcctcgtga

SEQ ID NO: 26184 - DNA, 135 bp, Zea mays
  Peptide Sequence Number=SeqID_67963
atggcgcctgtctacagctcctctgcgcagactgtccggttgtcccatcagacagtccggtgcgcaccggacaggtgttgcatcctcattgccttaagtccaatcctcttcgcatctcgtgaactacaattataa

SEQ ID NO: 26185 - DNA, 666 bp, Zea mays
  Peptide Sequence Number=SeqID_67964
atgccgccgccgccacacgacatcgcacatccgctcttctccctcccctcgctctcggcggtcgacgtccgctcccctggtgccatcgcttgtgcctggctcccgccatcgctggctccccgatggacctcacggctagtgtggggccatggatccccgacggatcgagggtcgcgccgcctcatgaggaatgtcctcaggaggcttggagccttcatgctggtcaatcttcccaagaagaaagtagtggtggaagaaatcctggtggagctgcaccaccttcatgtagggaatggagtgatcttggaggatggctctgaggagattttggcaacaccctctccgttgtcagagtctcatgcctttgccgctggagcttcatcttcagcaccaccagtgctagcatcacaagcccgtgctcctagaggtgatgacccagatgattctggtgaagaagatgatgatgaagaagaagaggaagaagaaaacaatgataataaagatctgcacgacacggtgtacagacatcttcccatatgtcctcgtggagagagccagactggtgttgttctaggtcttaacaccgacctggacagtgctaccctggaccaattaagggtacataaggagctcaaagatggacatgcaaggattgcagcgctataa

SEQ ID NO: 26186 - DNA, 129 bp, Zea mays
  Peptide Sequence Number=SeqID_67965
atggcctacttcccagattcctgcccccgctcttgcagcccgtccgtgcgcctgctttgtggtatcgctgtcgggtggggcgttgatgatcgacagtcaatagtgcataccggtttgatgaagagctaa

SEQ ID NO: 26187 - DNA, 324 bp, Zea mays
  Peptide Sequence Number=SeqID_67966
atggcggcgcagagatcaaaggttttgggaggtgaaggtctcgacaatcatcaagtcgccaactatgagactataactgtggatgagcttttcagaaagtggcgtggtggatctaaggatgaatgcttcaactgcggtgaccctgatcactacatcgctagctgccccaagacgaagagtagggcagaggccgacaagggtgaccatcactctggtcgacgcaagggcaagcaggaatacacctccggtgaacacaagtccaaggggacgtttgacaaggaggctctcaagaaggcataccttcataaggccaagatcaagtag

SEQ ID NO: 26188 - DNA, 531 bp, Zea mays
  Peptide Sequence Number=SeqID_67967
atggtggcctactgcgacgaagttcggcgcctggaagacaagttctacgggctcgagctcaaccacatcgctcgactgtacaacgagactgcagatgagctggctaaaatagcctcggggcggacaacggttccctcggacgtcttctccagagacatacatcaaccctccgtcaagaccgacgacacgcccgagcccgaggaggcctcggcaccccccgaggaggcctcggcccagcccgagaaggcaccctggggcttctcgcacctgctggtcgccatcaacaaattctccaagtggatcgaggtccaacccctaaccagcatcaggtccgagcaggcggtggcgttcttcaccaacatcatccatcgctttggggtcccgaactccatcatcaccgacaatggcacccagttcactgggaagaagttcctggacttctgcgaggacaaccacatccgtgtggactgggccgccggacttaaaccgaagatctacaatgacctcacaagttcggcaagcggtggatga

SEQ ID NO: 26189 - DNA, 702 bp, Zea mays
  Peptide Sequence Number=SeqID_67968
atgggtgttaccaaatacccttcccacaaattagaaagcataaaaagatggagacagaaagaaaaattcggcagcacctcccttgaaagttgcataacgagggaaccacagagtttatacatgatggaaaagaaagcaatgctcagctttaacccatcttctttgccagctcctttctacctagttgcggtggaagaagtcctagtagagctgcaacaccttcatgtagggaatggagtgatcttggaggacagctctgagcatattttggcaacacccattccattgtcagagtctcatgcctttgatgttggagcatcatcttcagcaccaccagtgccagcatctcaagcccccgctcctagaggtgatgacccagatgattctggtgatgaagacgatgatgaagaagtagaggaagaagaaaacaatgacaatgaagatgtcaacaatgaacaagaagacaacttcgttggattgcggcttgcacagagcactacacctcaatgttcgagaagggacacttcccaaactagctgcaggatgtgttgcatgcacggggaacctacgttcgacctcaatatgacacaaggcgggtgtctgagccccctcgagcttgttactacatcactcacgtgcatatcagagtgttggatgcaggagacagaggtttcaggactctatcatcccatgagtctctaa

SEQ ID NO: 26190 - DNA, 261 bp, Zea mays
  Peptide Sequence Number=SeqID_67969
atggcttccagagacttgctctacttatcgcagatatacgtcgacgctcgagatgaagagtactacgatgacgacatagaggtgagcagaggcgaaaacctaactcatgttgggatcctttctggcaagggttggcggaggccctatacagggacacgtccacgaaccgataagctcatgatccaatctgatgatgacccgatacggactcagatccttatctggttccaccattcccttgccatacatgggcttttgtga

SEQ ID NO: 26191 - DNA, 225 bp, Zea mays
  Peptide Sequence Number=SeqID_67970
atggccggaataggtctgaccgtgtgcgtaggaggtcgggctcgtcggcgacttgtgctccggcctgctcttggcggtagggctcaatttatggcacatggagcttcacttaatgttagggaggctatattcccaaggaatcaacagatggcttacctgatagctcggtctacctgcgacggcggccggttgaagtccggcgacgtggatccggtgttccggtga

SEQ ID NO: 26192 - DNA, 283 bp, Zea mays
  Peptide Sequence Number=SeqID_67971
atgacgcttagcgctggccagctgacgagtgaaagcatcctgtgtagtgtgttcgtgctctcatgcaagagcggcgacatgttcgcgctcccgtgcaataggcacaacagtcgtggcagcagtgagggctatggccaaggtagagtgagccgctacaacatcagggggcatgactggcggatttgcgaagggtggagaggacttaaggaggacaccatggccgccgccgccgggcccatgcgagaggccgcgacggcctgctgcctgcagcagcctagcactg

SEQ ID NO: 26193 - DNA, 630 bp, Zea mays
  Peptide Sequence Number=SeqID_67972
atgggtgcacgaccaccaccaggaatttcagtgcaggctggaggagcgaacgcctacagaactatgcaacagactccaactatggatccactgaggcacacacggatgagcatgaaccaaacagcactggctgctgccggccaaaccaccgctgccgcgtatgtccgaccaacccaagcagacatccaaaaccatctctttcctgtgcagcaaagccaggcaccacgatcgcaacaagtgccacgaacaacaaccccgcctctacagcgggcgccaccgcacctgcaacctcccagtgtaccaccgactgttccaagcacacctcaggctggaccttcgcatggtcttccaccggagctccctgtggatgatagctggcgccccacgggacagatgagagggagtctgacaggcaatgcttacagttctgcaattaggcactatcggggccattctgagcagcagcagggcgagcctcggcctcccaacacttcaggcacaaggttcgctctatggcaaatcaagatgagggacattcttactcaaactgaagtcgatgacactcttgataagttcagtaaaaaagatccaaaatcttggacccatgaggagaagattgtaaggccgtga

SEQ ID NO: 26194 - DNA, 155 bp, Zea mays
  Peptide Sequence Number=SeqID_67973
agggtgcacttagcgaaggtgacaagggtgttgcggaggactgtggcttggaggtcctaaacaacggctatcttggctttaccctctccgaagagagggagcccttccagaaattctcagtggcccagtgggccaaagagggggtttggaaatag

SEQ ID NO: 26195 - DNA, 885 bp, Zea mays
  Peptide Sequence Number=SeqID_67974
atggagaagcggctagcgtacgcggccttgctcccactgctcctcctcacgctccgcatcctccccctgccctccggctcccccaactgcagcggcggcgagggggaaaccccgcccgcgtccaggcacgtggtgcggttcctggagtaccgccgcgcggaggagcaccgggagtacctggacgcggggctccgtgacggcgcccccgcggcggcgtggcgctgggtggagcggcggaaccccgcggccgcgttccctaccgacttcgcggtgctcgagatccgcgacgcgcaccgcgaggccgtcgtggcggcggtgcgggcgctcggccgcgtgcgggacgtgcacgccgacgccacctactcgcgctccgccctttcggcggcgccggatcggtcgcgtcctccccggcgggggaagctgttcaccgccatgtcgttcgagggcgaggaggagggtggcggagagaccggcaattcgtcttctgctgcctgggggcggaagcttcttctgcagactttggtattggaagaagagtggagaaagatcaacattttacctatttttttggcattatctatggaaaatgggagaagggtgggcctgagatcacaagttacatccctttttggagctgaacggttatggggaagaggcttcactggcaagaaagtcaaaatggccatttttgacactggtattcgggccgatcatccacattttcgcaatattaagatatgtcagcgtccggggaaggccacatcctcggttgtcaccaagacgtgctcaagtatcctgactcaggaggctgacttcaaggcccaccatgaaggggctactactcatgggccccatggcttggggacctcctttggcccctattag

SEQ ID NO: 26196 - DNA, 2199 bp, Zea mays
  Peptide Sequence Number=SeqID_67975
atgtcccagaaggcttggattacacagattctaccagaggatgttgagatgctcccattgcaactcactgatggagaagaactggagagctcagctagagctggaggaggtggtagtaccagttccctactggtctgggagctcacagcaaacaacattattatggtatcagctattggaaatgatgggcctctatatggcacattaaacaacccagctgatcaaagcgatgttattggtgttggtggtattgattacaataaccatatagcttcattttcctctagaggcatgactacgtgggagcttcctcatggttatggtcgtgtgaaacctgatgttgttgcatacagtcgagatataattggatcaaagatcagcacaggctgtaagaccctttcaggcaccagtgtagcaagcccggtggttgctggtgtagtatgtttgcttgttagtgttatacctgaagacaagcggaaattgatcctcaaccctgctgctatgaaacaggcccttgtggagggtgcttctaaactttcaggaccaaacatgtatgaacaaggtgctggcaggcttgatctctggcagtcatatgaaatcttaaaaaattaccaaccacgtgcaagcatatttcctactatgcttgacttcaccgactgtccatatttctggcctttttgtcgtcaacctatgtatgctggagctatgccagtaatcttcaatgctacaatcctgaacgggatgggggtgattggttatgtaaaggatcaacctttatggcaaccttctgaggatattggcaatcttcttagtgttcacttcacctactcagatgtcatctggccctggacgggataccttgctctacatttgcaagttaaagatgagggttctcagttttcaggcataattagtggcaatgttactctgactatttataccccagcagctcatggagaaagcagcccacggagtagtacatgtattcttcacatgaaggtcaaggttgttccaacacctgttaggtcaaaaaggatactgtgggaccaatatcataatattaagtatccttcaggatatgttccaagggattcccttaatgttcataatgatatccttgactggcatggtgaccacttgcacacaaacttccacattctgttcaacatgctaagagatgcagagtactatattgagacacttggatcaccacttacttgctttgatgctagcaattatgggacattgcttatggttgatcttgaggacgaatactttgatgaagagattcagaaacttagggatgatgttatacacaagggacttggtattgctgtttttgctgagtggtaccatgttgatacaatggttaagatgacattctttgatgagaacacccggagttggtggactccaattactgggggtgcaaatattcctgcaattaatgaacttctggcaccatttggcattgctttgggggacaaaattcttactggtgacttctcaatcaatggtttcttgcatagcttccagctccaagaaaactcaaagacggtgcaagatcacataaggaacactggatacagaaagcacccaggggaaaagccaaggctctcctcaattcttggagtaatagaagcaggggaagggaggattgcagtgtatggtgattcaaattgtcttgacagtagtcacatggtaacaaactgctattggcttttgagaaaaatattggagttcactggaaacagagtgaaagataatgtccttttctcagaggcagcacagttaaagtttcctgtttttgagaatatccatcatccatcacgtagaacggatgtaaacttttcaacatactcaacagttgttggcaaggaattaatctgccaccaagattcccggtttgaggtttggggaacgaaaggctatggtgtccaaccaataggcacatcaagaaagcttccagagtaccagatgcatgaaagttctagttctcccaatgtaacaatacaaattgctggcagtagacaagataaagttgaaaggcttcaaagaaatctttcgataccaaatgctgctaaatttgatgataaaagagattattttggatttattggtcatgaggaggttgacataggaatgttaatggcaagccaatggatgataccttgcttcgctgccactgcttgtcagtaa

SEQ ID NO: 26197 - DNA, 297 bp, Zea mays
  Peptide Sequence Number=SeqID_67976
atgaccattgtcaccaccgatctgagctgcgggccgtcgtccaaggcgaaaggagggcagccggcagtgacggtctccggcggcgacaggcaggggagcagcaagatcgagatcaagcgcatcgagaacatgacgaaccggcaagtcaccttctgcaagcgtcgcaacggcctgctcaagaaggcatacgagctctcggtgctctgcgacgccgaggtcgcgctcgtcgtcttctccagcgtggccgcctctacgagtacgccaacaacaggtgatgaggaacaagtttgctgctga

SEQ ID NO: 26198 - DNA, 186 bp, Zea mays
  Peptide Sequence Number=SeqID_67977
atggcaaccggtttcttcctcggccccgccgtcatggccgacacgtccgccgccgtcggcctccacggcacgctcttgcgcgtcgccgtcgttcaggctgctctgccgcaggggatcgtgcccttcgtgttcgccagagagtacagcctgcacgccaccattctttccaccgggtttgtctgctaa

SEQ ID NO: 26199 - DNA, 258 bp, Zea mays
  Peptide Sequence Number=SeqID_67978
atgaccattgtcaccaccgatctgagctgcgggccgtcgtccaaggcgaaaggagggcagccggcagtgacggtctccggcggcgacaggcaggggaggggcaagatcgagatcaagcgcatcgagaacacgacgaaccggcaagtcaccttcagcaagcgtcgcaacggcccgctcaagaaggcgtacgagctctcggtgctctgcgacgccgaggtcgcgctcgtcgtcttctccagacgtggttgcctcttctag

SEQ ID NO: 26200 - DNA, 1257 bp, Zea mays
  Peptide Sequence Number=SeqID_67979
atgatctcgtggcacgacctgtacacggtgctgtgcgcggtggtgccgctgtacgtggcgatgatcctggcgtacggctccgtgcagtggtggggcgtgctgacgccggaccagtgctccggcatcaaccgcttcgtcgccgtcttcgccgtgccgctcctctccttccactgcatctccgccagcaacccgtacgtgatgaacctccgcttcatcgccgccgacacgctgcagaaggtcctcgtcctcgccgcgctcgccgtctggtcgcacctcccgcccgcgcgcggctgcggcggcggcacgaagctgcgggagccgttcgactggtccatcacgctcttctcccctgtccacccctgcccaacaagctcatcatggggataccgctcgtcgtggcccatgtacggggcggtactcgggcgaacctcctgggtgcaaggggtgggggtgctccaatgcacgtgtgggaaaacgctcctgcccgtcctctacgagttccgcgccgcgcgggtgctcatcgcggggcagtgcccggacggcgccgcggcgcgcatcgccgacgtgcgcgtggacccggacgtcgtgtccctgtgcggcagccaggcggtgacggaggccgaggtggcgccggacggccgggtgcgcctcgtcgtgcgtcggtccacgtcggcgtcgcggcggtcgctggcgacgccgcgcccgtccaacctggcgggcgtgagatctactcaggggtccagcggcatcgcgcacgcggacgccatctgcgccgccgcgccgccgccgcacggcgcgtcgtcgctgcgcatgtcgagcttcggcgcggcggacctcttctccctgcacccgacgccgcggccgtccagcttcgaggagcaggcggtgcgggccaggtctgccgccgcggtggcgcccagcaacgaccccagggacgcgcacatgttcgagtggagctccggtgcgtccgcgacgtcggaggtgcgcggcttgccggtgttccacggcggcgacatccaccgcggcatggatccccgccggctcgtcccctccgaggcgcctccgagagcgatgcggccgggggagcgcgtcgttacggggtacccggcggacgccgggcaggacatcgttctggccaagctggaatccggctcgacggaggccgagcggaaggacgcctgcggaagagatggcggcgccggagagcagcaggcggcggcgccggccggcgtgatgatgcggctgatcgtgacgatg

SEQ ID NO: 26201 - DNA, 405 bp, Zea mays
  Peptide Sequence Number=SeqID_67980
atggtgtcagggtccaggatcttgatgaagctatggtggcaactaagcaggctggttgccttaatttgtgtccctacagaagatgcgcttccagtttcagtgcctatcaaagagcatccagatatcctcgatgggcacatgtttggtctccatcagcaagaggatgatgaagatggacatggcgataatgaacgaggtgaagagcacgaagacagctaccggaggtggcacaacgcgacatcatttgtaggccaccacgaagaggcagatggacaccaccagcactgtgctcacgcccttgctcagttcctcgccttttccaaacttgaggacaaggatcacacccaccacggcctgcaaaaacaacaaaaaataataagaatgcatcattatgacccgagctag

SEQ ID NO: 26202 - DNA, 729 bp, Zea mays
  Peptide Sequence Number=SeqID_67981
atggctggttccgcctacaaccgcgtggactacttctcgcccgacatcatctcccagctcctcgcattcgccaacaagttctgctatgagggcttgaatccaacctacgacaaccggttgaatgttcggtttcctttgggacaactggacctgcatcaactttctctccttacagatgcagataagggcaatggcgacaagtacactgatttctcttatgaaattcatatggtgttttacccaacgctcgttccgtttgctcagaaatgcgcttggacgtcatctccgtccattttaacgttacttacagaatgggcccactacaaactttcactctcctgcgcttgcgcagcctcttcttctccgatcccgactccaactctccctctctccttcgcctggcacatcctcgacggcgcggtagcctgcttcttcaccggcgcggcagcctgcttcttcgacgacgtggaggcctgcggcggcctaccgagcggacgggtccgcggacgaacggatctccggcgcctggcagatcttcggcgcgcggcctaccggttgtggacggatctccgctgcctggtgccctggtatatcctcgacatcgcctggagatccacccgcctggagaagaccggtaggcttgcttcttcactgacgtcgcggcctgattcttcgaaagcacggcggccggattcttcgacggcacggcggcctgccggttttgtctag

SEQ ID NO: 26203 - DNA, 327 bp, Zea mays
  Peptide Sequence Number=SeqID_67982
atggcgtggaagagcggaagcgatttgccgacggcgacgacgcaacaacagttaactaaagctcaaagtagatttaacttaccactccaggtgatggaagtggctgtgtcggccatggagcatatcccgacgacatttgtgactaccccacaggaggatatccccacgacatctgtggcggtggcatcgacgttggcatttgaggtggcatctacggagtcatctgtggcagcatctacgatatctatggtggaatcgaagatggtctcggaccaaatccccacgacatcggtggtggcattatttggttatggggacatatcttag

SEQ ID NO: 26204 - DNA, 639 bp, Zea mays
  Peptide Sequence Number=SeqID_67983
atggggaagaggaagtcgaggccctccaagctgacagcgaagcccaagaagcagctggagaccgacttcacctgccccttctgcagccacccgggcagcgtccagtgcgacatctttctcaaggaacgccggccgttcgccgtggcgtcgtgcagcatatgcacggagtcctacgccaccaaggctcacgcgctgacggagcccatcgatgtctacattttacccaacactggttccctttgctcacaaatgcgcctggacgccgtctccgtccactttaacgttacttacaggatgggcccactacaaactttcactatgttctgcgcagcagcctcttcttccccgaccctgactccaactctccttcgcctggcacatcctcggcggcgcggcagcctgcttcttcaccggggtggctgcttcttcaccggcgcggcgacctgcttcttcaccggtgtggcggcctacttcttcgacgacgcggcggcctaccgggcggtcggatccgcggacgaacggatctccggcgcctgtcggatcttcggacgcggcgcagcggcctaccgggcggacggatccacggacgaacggatctccggcgtcacggcttgcttcttcaccggcgccgcgacctga

SEQ ID NO: 26205 - DNA, 399 bp, Zea mays
  Peptide Sequence Number=SeqID_67984
atggaaggtggcctgattagctacaagaagatcttgttccatggactcgatctctggactgcactatcgttgcctcagcccctaggtcgtgctgccctctggcctcctcatcgtacaattcaccaacatctccaatgtttcagaaaaatagtttctccaatgtgggcaatgacattgcttagcttgtatgttagagttcatgtcaccatattaggtagccatctctacttggattttgcccagtgtacaaatggtgcacacttacaagtagaatctgacacctttaatggaaatggacacaagaccttggttgcaatggatgattatcttgtcactgacaaaatcactgcattcatagtgcaaatgcaacatgcagcaactgaagtccttaaagagtaa

SEQ ID NO: 26206 - DNA, 369 bp, Zea mays
  Peptide Sequence Number=SeqID_67985
atgtccttgggaggggagttcgtcatccgcagcgccgggtctagggacgtcggcacgacaccaccgtgtggcggtggaatctcagatgactccgtagatgccacctcaaatgccaacgtcgatgccaccgccacagatgccgtggggatatcctcctgtgggggttcgggttcgcgtcatactccgaacaatgctacgaacttcgtcgaccagatcttcaacacgagcgacttgcgtcctgacgatccacctcaaggctgggacgcgcatgaggctaggaattcacagagccagggcgtggagggcagcgagagcaaggtggaggggttcatgctggacttggcatccagaaacattgacgatgtgtag

SEQ ID NO: 26207 - DNA, 540 bp, Zea mays
  Peptide Sequence Number=SeqID_67986
atggggaagaggaagtcgaggacctccaataagctgacggcgaagcccaagaagcagctggagaccgacttcacctgccccttctgcagccacctgggcagcgtccagtgcgacatctttctcaaggaacaccagccgttcgtcgtggcgtcgtgcagcatatgcacggagtcctacaccaccaaggctcacgcgctgacggagcccgtcgatgtctacagcgagtggatcgactcatgcagggaagccaacaagggcgtcgtcgccccccggccggacctcgacagcgaagccaagaggaggaggaagaccgaagacgacggctcggctctggcctcgataagcgcagcaaggaatctcaatgtcatcccgcgcaaggacgctgaagcacccccaggaaaccagcgggcactagtcaacaatgcagtgcaccgtcacatcggctggcagggcgccaagtgtaatacccaaacttctgttgcgcaactgcggtaccctaatgttgcgagccttagaggtgtacgagagcaggactactga

SEQ ID NO: 26208 - DNA, 324 bp, Zea mays
  Peptide Sequence Number=SeqID_67987
atgggcaagaggaagtcgaggacctccaagctgatggcgaagcccaagaagcagctggagaccgacttcacctgccccttctgcagccacccgggcagcgtccagtgcgacatctttctcaaggaacgccagccgtttgccgtggcgtcctgcagcatatgcacggagtcctacgccaccaaggctcacgcgctgacggagcccatcgatgtctacagcgagtggatcgattcatgcagggaagccaacgagggcgtcgtcgccccccggccgcaccttgacggcgaagccaagaggaggaggaagaccgaagacgacggctaa

SEQ ID NO: 26209 - DNA, 189 bp, Zea mays
  Peptide Sequence Number=SeqID_67988
atgcagccccgaccgcgcgagggcctcagtgccaccgatgagattgcgtcgcccggcgccatgcacacactgccgcccatcgtgcccgaaggaaaaggtggtgacatcgcgagtgcagctgaccccaaggtctctgctcaaatgccagtaaggtgggggaaactttatcggcgatatgatatccgataa

SEQ ID NO: 26210 - DNA, 396 bp, Zea mays
  Peptide Sequence Number=SeqID_67989
atgtacaacagcccgcgcacctatcgcgcctccaagtactcggagttcttcaagcgcgagtgcctgcaggccttaaccaacccgcacgacagcccctcgctcacccacgaagcaatagcgagagcaagcgatgagggacagggatcaaagcgcgataggtacatcaggtccgaaggcaacctgctcctgaacgactcaaagcaacacgccgctgatgctccagaaccagacgctgctggagaagagccgtggtactttgagagtagttcaaccatgcccaggagccagagcaccgagaagatagtagggaaggatacataccgccgtggaggtggaggtgtcaggcgtggccgcatcctgagtggagccgccgccgcccgcgagtcggtgaggtag

SEQ ID NO: 26211 - DNA, 457 bp, Zea mays
  Peptide Sequence Number=SeqID_67990
acagggatcaaagcgcgataggtacatcaggtccgaaggcaacctgctcctgaacgactcaaagcaacacgccgctgatgctccagaaccagacgctgctggagaagagtcgtgggactttgagagtagttcaaccatgcccagccgtggaggcatcaggcgtggctgcatcctgagtggagccgccgccgcccgcgagtcggtgaggcaggggctaggggcggacggcaaggagaatgagcgcgcgacggtgcgagctctgcaagcagggccagctactttgaaaaaaagatcaaagatcatcgtcttgaaggtaacaactttgaaagcggacgtgttcgacgtcgtcgtctacagacgcatggccaacataaaagatagcgtcagcgtgatagttgccaagttggaatgttataaatccatcacgagagttccgtcgagcaacataatcttttga

SEQ ID NO: 26212 - DNA, 1524 bp, Zea mays
  Peptide Sequence Number=SeqID_67991
atggcatgcctaattggtgattgtgtatcgaacacctgcaacaggtccgaaccctctcaacccaacacagacggtcgcgggctccgtgttcggctcgacgtcgtacacagcggcggcgcacgaggatgggaggtatcgtacaggaacaagtacgtgggctcggacaccttgcagctggagaggaggaagaagacgacggcgtggcctttcgtgccgtctgttgatggacagccctacgcaacgctggctgcatttgctctcaatatcttgagatttggaaaagctgtcaaggacagcgcaaatacaaacatattcgagcacgcgggaagagcttttgctgtcaccgagaaccatctgccttacgagatcaacatcagtaatctcagtacactgggaccctacagcgtcaatggagcttggaaccaacctttcactagtcaccccaagaaaattcaagggagtggagaactggtgatgatggggacaaatactgaaaagccttactacgtgcttggagtaatttcatctgacggcgagaggcttgtccataaggttgatctcaaatttgaggaagggaaactcatccatgacattggagtaactaaaagacttatcgaaaatgatatggatgggaaatcacggttcggggtaatgcctcgttttggcgatgccgagtccatcatatggttcgatgtcaagaaccactgcagctaccatttgtttaactgctttgaggatggaaatgaggttgtcatcagaggctgtcgactgcttggttctattctccctagtggacgtcatagagctgacaaatcaaaatggtatggaagagcatttctccagccagacaaggattcagaagattttgacccttcactggatggcatcctcttttctcgcccttatgagtggcggttaaatttagaaaaccatagtgtatatgaaggttacattactagtgagaaagtcgcaatggatttccctgtcatcaatgacaaatttatggggattcaaaacaagtatggatatgctcaggttgctgactcgttggaaaccagtaaaacaggcttgtttaagttcaatatgatagcaaagctacactttgacacgccggataagtacaaactaaagtaccagaaaaatctccaggaaaacgaacaattgatctttgtggaataccacactttgcaagagcaacagttctgctctggagttcagtttgttgtgaaagaaaacggaatcgacgaagatgatggatggctagtcacttatgtccatgacgaaagaacaaacatctctcaggtttatattattgatgctaagagattttcagaggagccagtagcaaaaattactttgcctcaaagagttccatatggtttccatgggaactttttctacacaaagggatcaatagactacttaggggtgactacatacattatgatgggcatagattggtccattgttctaagggtatccatggcttgtcacctgctcatccttaagttcaactacagttag

SEQ ID NO: 26213 - DNA, 1170 bp, Zea mays
  Peptide Sequence Number=SeqID_67992
atgtctactcggaccactgcgtttaccattacctacacggctacaccgtcgcctaatttgccaacgcccgccgccgttccgatggaaaccgccgcgccggcgcgcgtccaagccctcgctgaggccggcgtgtcccgcctcccggcgcagtacatccagccgcctgagcaccgaccaaccccctcgccttctcctattgccgcggcgctctccgtgccggtcgtcgacctctcaacctccaccgccgacgacgccgtccgcgccgcgtgcgcggactggggcgcctttcacgtggtcggccacggcgtgccggtggatctcctcgacgcggtgcgcgcggcagggctcgccttcttccgcgcgcccatggaggacaaactccggttcgcctgcgacccggccaggggcgccgcctcggaagggtacggcagccgcatgctcgccaacgacgactccgtgctcgactggcgcgactactttgaccaccacacgctcccggagtcccgctgtgatcccgcccgctggcccgacttcgtccccggttacagcatgttacttttgcctataacacgggagataacaccatgtaccttttacagagatactattgcaaaatacagcaacagcatgaaggatcttgctcaaaaattgttgtgcatcatctcagaaaatctgagcctaccaccatcttatatacaagaggcggttggagaagttttccagaacattactattagctactattctccgtgtccacaacctgatcttgctcttggattacaatctcattctgatatgggcgcaataacacttctgatacaagatgatgttggtgggcttgaagtattaaaggatggaatgtggatacctgtgcctgctttgcgtgatggcatccttgtgattctcgctgatcagacagagatcatcaccaatggaagatacaagagttcagttcatcgagctgttgtcaatgctgagcatgcccgcttatcagtagcaacattttatgatccatcaaaatcaaggaaaatatgcactgccccgcagcttgtgagtgagaatgaaccacaaaagtatcgggatgtaatttatggtgactatgtctcatcttggtatagcaaaggtccagagggcaagcgaaacatcgacgccctcctgattcagcactag

SEQ ID NO: 26214 - DNA, 738 bp, Zea mays
  Peptide Sequence Number=SeqID_67993
atgaacgtggcgtggaaggtgcaccgcatcctgcaagacggctccaccagcgtcctcctccacagcgccgcctatggccggtacctcgcggcgtcccacgacccggcgccgccgggccacctcgacctccgcgtcgacctgggcgtctacgaccaggacgtggaccccatcctgaggaaggccgtcggctccggggacgccggctacgtcctcctgcgccacgtcttcaaccgcctcctccgcgccaacggaaggtaccgcctctggcaccgtggcgtctccgtcgacgacgtcgacaaccagagcacgatgatgcattggaaggtcgagaccatccccaccagccccaggccgccagcacttccagcgccgactcggaggaaccgaggcagcttccgcggcctgttcctcctgcacgaggagcccgtggtgctgcagcggacggtacggttcgtgcgggcggacaactacggcaacttcccggacaactggggcacgctccagttccagggccgctccgtctttgagctgagagcggagatggcgcgtcgcttaaactatgcgctcttcttcttccgcctcctgatgtgcgtccggggcggccgctacgggcgcctgaccccgctactcatcgacctgcctcgcaacgaggagaccctggacatcatcgtcctcttcatcgggacacaagttgctcaggaattgcggtacccggtggtaaacccaagaggtgtatga

SEQ ID NO: 26215 - DNA, 858 bp, Zea mays
  Peptide Sequence Number=SeqID_67994
atggaaccgaacaggagcagaggaagatggtgcgtgctactgggggatggcgagctgcacaaaaaagggggagatcgacctggggaggatggcggccaggtggggctgctcaagaaaatccacgacaaggcagggagaagcagccgacacgacacattcgacagagaggctcgacgaccaagggagtggcaccaagccccgcggatggagaaggcagggcgcggtccaaggcctaggtgttccctggccataggcagggaagagcagggggaggcggtcgctgtgcagggcaccgaatggggggagagaagagctcctgctaggggaaggtgccatgggagaagccatagcagagctccgagcggggaggagaaaggagaggaggtcggacgccctagatgggaggagcagaggcgccatcggagtgggtgcctgcgccgacccaccgccgtggaggagcaggggacgtcggcctcggccatgggggagcccgactggcgtacacccgacgcgcagggggttaaggttggaggggaagacgctggggacggccttcggagctccggcgtccaagcaaaggggagcttggctccatgcgaggaacacacgctcttggaagaagaggaggaaaggctctgcgcttgggagcttctgcagaaacctgggtgtcgaggggaggaaggaagggagctcgccgcggaagctggagccgaggggtcgcacgcccatggaggccttgctcctgcgcgctggggaaagggctccctgctgcaacgccgtggagaatgggagcaccagggaggaagaacgtcggctggagaaaaagacagggagaggagcgactgctcgttgatttaa

SEQ ID NO: 26216 - DNA, 327 bp, Zea mays
  Peptide Sequence Number=SeqID_67995
atgggggagcccgactggcgtccaccctacgcgcagggggttgaggttggaggggaatacgctgggggcggccttcggagctccgacgtccgagcaaaggggaggttggctccatgcgaggaacgcacgctcttggaagaagaggaggaaaggctctgcgcttgggagcttctgcagaaaactgggtgtcgaggggaggaaggaagggagctcgacgcggaagctggagccgaggggtcgcgcgccaatggaggccttgctgctgcgcgctggggaaagggctccctgctgcaacgccgtggagaatgggagcaccagggaggatga

SEQ ID NO: 26217 - DNA, 138 bp, Zea mays
  Peptide Sequence Number=SeqID_67996
atgaatggaccgataacacgatctcgtgcacaatctccaggtaccttggagaagactagcaaggacttgggaaaggccaaggtgttgaggaggaggagcaagggcggccacaacaggaaggagatcaagtccgactag

SEQ ID NO: 26218 - DNA, 360 bp, Zea mays
  Peptide Sequence Number=SeqID_67997
atggctatcggtaagaaacaagaggagtcaccggaggccgctcaacgtggcatttactgggctaagtctccggtgacaacgaagctggctttagtgacctacagcggggtggtagcatggctagtaacatggcggacaccgatgaacggcgatcatcgtggtgacggtcgtgcggccatgtcgcggcacaagtggggcgcgaaacgcaacaccggtgtgaatccaagtgcgggaccaccggcagcgaggtacactgcaccagggatcccctgcaatcaatgtaccatgggaatcgtcttcagtgtgcccgacagtgcgagtttgagcgcgatttactccaaaattcgtatgacaacatga

SEQ ID NO: 26219 - DNA, 1332 bp, Zea mays
  Peptide Sequence Number=SeqID_67998
atggtggcgagcaaggccgccccgttcgacgaggtgtcctcggtggaggcgggggcctacgggggccgcgacgacgacgggcggccgcgccggacgggcacggtgtggacggccagcgcccacattatcacggccgtcatcggctccggggtgctctcgctggcgtgggccatcgcgcagctgggctgggccgcgggccccgccgtcatgctgctcttcgccgtcgtcatctactacacctccacgctgctcgccgagtgctaccgctccggcgacccagtggcggggaagcgcaactacacctacatggacgccgtccgcgcaagcctcggcggcgccaagtgcttcttatatatctccgtctcaatttctgacgaattaacactgatgctgcatgaccgacgacggagcagcgccatcaagagggcggactgcttccacgccaagggccacaagcacgcgtgccgcagctccagcaacccctacatgatcctcttcggcgtcgccgaggtcgtcttctcgcagataccggacttcgaccagatttggtggctctccatcgtcgccgccgtcatgtccttcacctacgccaccatcggcctcgtcctcggcatcatgcagaccgtcgccaacgggggcttccagggcagcctcaccgggatcagcatcggcgccggcgtcaccccgacggagaaggacacggtcaaggcgccgccgccatccgaggccaaggtgatgaagagggcgaccatggtgagcgtggccaccacaacggtgttctacatgctgtgcgggtgcatgggctacgccgccttcggcgacgccgcgccggacaacctcctcaccggcttcggcttctacgagcccttctggctgctggacatcgccaacgtcgccatcgtcgtgcacctcgtcggcgcctaccaggtcttctgccagccgctcttcgccttcgtcgagaagtgggcagcggccacgtggcccgacagcgccttcatcgcccgggagttccgcgtgggccccttcgcgctcagcctgttccgcctcacctggcgcacggcgttcgtgtgcctcaccaccgtcgccgccatgctgctccccttcttcggcgacgtcgtcggcctgctcggcgccgtctccttctggccgctcaccgtctacttccccatcgagatgtacgtcgtgcagcgcgccgtgcgcaggtggagcacgcactggatctgcctccagatgctcagcgctgcgtgcctcctcgtgtccgtcgccgccgcagcgggctccatcgccgacgtcatcggcgcgctcaaggtgtaccgcccgttcagcggctag

SEQ ID NO: 26220 - DNA, 240 bp, Zea mays
  Peptide Sequence Number=SeqID_67999
atggtcgtcgccaatgccggcgactctcgggttgttctgagcaccacaaccgacaacggcgccatcacgccgtctaactcatcatcacctgaatcccaacctgccactcaagagtcgtcggtactcgccatgtcgcgcgcgttcgatgactactatatcaaggattgtggtgtcatctcggcgctggaggtgacgcagaggatgaccgataataatgaccactcgccattgtcagggtag

SEQ ID NO: 26221 - DNA, 251 bp, Zea mays
  Peptide Sequence Number=SeqID_68000
atggtggcggagcttcggctacacaggaagatctccggtgagcgcggacagggcggactagagggattaggtgcgaacggagggatgttccaggtggcgggtgataggacggagcttaccggggcaacagatgcggcggggagttccacagcggccgtagaatgggtagcggacgtcggtgtgtggtggcggggctctggtcacgcgcgcagagcgagagacagggcgagggagttctactgggggcacaa

SEQ ID NO: 26222 - DNA, 468 bp, Zea mays
  Peptide Sequence Number=SeqID_68001
atgggcaagagcaagaaaggtggtggctcttcgcatcactccggcgacaagcgcaagcgtgagccgactcctccctcggaggacttcggcgacttggagtactcggaggaggagttctcctccgagtccgagggctctccggctcctgcctctcccccggcgtcgtctgatgattcagacgactcccagaggatcgccgtggaggtatggacttacatctgggccgtcgagcgcgccggactcgagggctcagatgagtcagagtactcctcggacgaggagaattcctccgacccgtccgaggagggcagcggcggcgacggcggtgacggcgacgacgatggaggcgacagtgacggtggcggcgacagcggcaagggcggtgacggtagcggcaagggtgacagcggcgacggcggcggcagcagcaagggcatcagcaagggcagcaacaaggccagtggctag

SEQ ID NO: 26223 - DNA, 546 bp, Zea mays
  Peptide Sequence Number=SeqID_68002
atgggcaagaacaacaagcgcaagcgtgagccaactcctccatcggaggattttggtgactcggagtactcagaggaggagttctcctctgagtctgaggggtctccggctcccgtccccctgcgtgagtcgtctgacaactcagacgacttccaggggctcacggcggaggtctggacgtacatctgggtcgtcgagcgctctgggctcgagggctcggatgagtcggagtactcctcggatgaggaggactcggacggcggcggtgaggacgaggacggcgacgacgatgacgacgacgacgaaggcggtggcgacggtgacggtgacggcagcggcaagggcggcagcagcggcagcaaggacggtgacggcggcggcagcaggggcggcagcggcgatggcggcagcagcaggagcagcaacaggggcggcagcggtggcgacagcaacaggggcagcaacaggggcggcagcggtggcggcagcaacaggggcagcaacaggggcggcagcggtggcggcagcaacagggccagtggctag

SEQ ID NO: 26224 - DNA, 783 bp, Zea mays
  Peptide Sequence Number=SeqID_68003
atgccgaagggcgccaagaagcgcgccaaactcaagaagcagcagcagcagggtcaccccgacgatggcggcaacacaaacgccagcagcggcaatggtaacggcagcgataacaacaacaacgcctcgagcggccgcgacggcgacccccacctgtgcatcccaccaaaagtttctcgcgtcgatgcgagcgaggactccatggagagctccgaagagatggaggagaggaaggcccccgcggccgaggttcccgtggagcgtgccgtcgaggcggacgtcgccgggtctggggaggtcattgtggacgcgtttccaccggaaaccgctgggcatgtacgtgagggcgaggtggatgaagcagaggtggaggtgcacgccgtggtggcacaggaaccggaggtaaaggatgtgttggtggccgaggaatccgtggtacaggagtcagtggctgatgcgccggcggtgaaggaggtggccaaggtgcatccggtgcttgaacctaagctgaaggttgatgaagttgtggtggtcgagcaaacgcctgtagcaccagatgtgaagggcgccggggctactgttgtgttgaaaacaccagagctgattaggagaaatgtggttgtcaaggaccctgctgaggtgtcgagatctcaggacgctgctgatgtgcatactacagaggtggcccgtggacctgcagtggcagtggttgcttcagggcagcgggcaacatggtggaattgctgtggcctttttgatgcttttactggttcagggagatag

SEQ ID NO: 26225 - DNA, 426 bp, Zea mays
  Peptide Sequence Number=SeqID_68004
atgaggtccccctgcttgacgatggacaacacggtgcagccgctctggaccgagtccaagcggcggctgcattggagcttgtcatacacagcggctcctgcagccaccacaacagctgccggagcggctagtcggaggagattaccagcaaggccaacggcgaagcaggagataccatacagggagctcgtgggtcatgaatgcagtgcacagtccttccgccccaagggcggagctacaggctgcttccaaattccaatcgacaaacgcgtctgctccccaccccacgacggtggacgattaatgactgacgagacgaggcgcaggcgcaggccgcaggctcataggcgccaggcggccaagagcacggacggcaaccatttgaacttgacggtgagtgtgctagtgctaatcaactctagatga

SEQ ID NO: 26226 - DNA, 336 bp, Zea mays
  Peptide Sequence Number=SeqID_68005
atgaagtacaacctggatttcactagtgtagtagcttggctggccctcaaagccacttcatctagacaatctgatctaatgtataccgatgaagtcttaataatgacaaaattgtccatgctctgccttaataatggcaaaattgtccatgctctgcaggccatccagcggcgaaactggatccagcgacccttttcactgtcagctgtcagcgcatacgggcatgagggcgtcgtcttggaagcattgtctggctgtctgcgagtaaggagtaagctgtcctgtttctcgatgaccgtttcccagccgtccatgaacaaattgctctggatatag

SEQ ID NO: 26227 - DNA, 2628 bp, Zea mays
  Peptide Sequence Number=SeqID_68006
atgactcccgaggaagtaatcgagaattttgtgagctttgaatgtatgatcaagggctcaaagaagatcaacgagcttgatgaaccctccacgtccgaagcacaaccggtggcattcaaggcgacggaggagaagaaggaggagtccacatcgagtagacaaccaattgacgcctccaagctcgacaatgaggagatggctttaatcatcaaaagcttttgccaaatcctcaagcaacagagggggaaggactacaaaccccgctccaagaaagtgtgctacaaatgtggtaagcccggtcattttattgcaaaatgtcctatatctagtgacagtgacaggggcgacgacaagaagggaaagaggagagaaaagaagaagtactacaagaagaagggcggcgatgcccatgtttgccgggagtgggactccgacgagagctccaccgagtcctcctccgacgaggacgccgccaacatcgccgtcaccaagggactcctcttccccaacgtcggccacaagtgcctcatggcaaaggacggcaaaaggaagaaggttaaatataaatcctccactaaatatgaatcatctagtgatgataatgctagtgatgaggagaataatttgcgtaccctttttgccgacctaaacatgcaacaaaaggaaaaattaaatgaattgattagtgctattcatgagaaggatgatctcttggactctcaagagtacttccttattaaggaaaacaaaaagcatgttaaggtaaaaaatgcttatgctctacaagttgaaaaatgtgaaaaattgtctagtgagctaagcacttgccatgagactatagacaaccttagaaatgaaaatgctagattaattgctaaggttgattctcatgtttgtgatgcttcaattcccaatcttagaaatgataatgatgatttgcttgctaagattaaggaattgaatgaatctcttgctagccttagaatagaaaatgaaaatttgattgctaaggctaaagattttgatgtttgcaatactattatttccaaccttagaactaaaaatgatatgttgcatgctaaggttgtagaattaaaatcttgcaaaccctctacatctaccgttgagcacacttctatttgtactagatgtagagatgttgatatcaatgctattcatgatcacatgtctttaattaaacaacaaaatgatcatatagcattattagatgctaaaattgccgagcataacttagaaaatgaaaagtttaaatttgctagaagtatgctctataatgggagacgccctggcattaaggatggcattggcttccaaaggggagacaatgtcaaacttaatgctccccctaagaacttgtctaactttgttaaaggcaaggctcccatgcctcaggataacgagggttacattttgtaccctgccggttatcccgagagcaaaattaagaaaattcattctaggaagtctcactctggccgtaaccatgcttttatgtataagggtgagacatctagctctaggcaaccaacctgtgctaagttgcctagaaagaaaactcctagtgcatcaaatgatcatggcatttcatttaagacttttgatgcatcttatgttttgactaacaaatccggcaaggtttatgcatccgggggctcaagttggatactcgacagcgggtgcacaaaccacatgacaggggagaagaagatgttctcctcatttgagaaaaaccaagatccccaacgagctatcacattcggggatggaaatcaaggtgtcactgtctttagaagaagtgatgattcaatagcatttaagggagtattagagggtcagccatacttggaaaaatctcatacccaagagaccttaaagggattcttaagacgagctcaaaatgagttcgacttaaggatcaagaaaattagaagcgacaacgaaacggagttcaagaactctcaaattgaagactttcttgaggaggagggcatcaagcatgagttctcttctccctacaccccacaacaaaatggtgtagtggagaggaagaatcgaactatattggacatggcaagaaccatgcttgatgagtacaagacaccggatcggttttgggccgaggcggtcaacaccgcctgctacgccatcaaccggttatatctacaccgaatcctcaagaaaacatcttatgaactcctaaccggtaaaaagcccaacatttcatattttagagtttttggtagcaaatgctttattcttgttaagagaggtagaaaatctaaatttgctcctaaaactgtagaaggctttttactaggatatgactcaaacacaagggcatatagagtctttaacaagtcctcaggacttgttgaagtttcttgtgacgttgtgtttgatgaaactaacggctctcaagtagagcaagttgatcttgatgagataggtgaagaacaggctccatgtatcgcgctaaggaacatgtccattggggatgtgtgtcctagggatccgaagagccctcaccatacccacagaatcaaccctccctccttcatgccagccatcttccaccaaccccaaatgaagaccaaggctccagtttga

SEQ ID NO: 26228 - DNA, 1101 bp, Zea mays
  Peptide Sequence Number=SeqID_68007
atggcaacagcggcgccggtcagctgccggtggacgcgcgtcctcacgctcggccgcggcgcgtcgggcgcggtggtgtcgctcgcggccgacgccgcctcgggcgcgctcttcgcggtcaagtccgcccccgcggggacgcgggccgcggagagcctgcggcgcgaggggagcatcctgtccgcgctccggtccccgcacgtggtcccctgcctgggcctccgcgccgcggcggacggcgggtgcgagctgctcctcgagttcgcgccgggcggctcgctggcggacgtggcggcgaggaggagcgggcgcgacgagcgcgcggtcgccgcgtacgccgcggacgtggcgcggggcctggcgtacctccacgggcgctcggtcgtgcacggcgacgtcaaggcgcggaacgtcgtggtgggcgccgacggccgcgccatgctcgccgacttcggctgcgccagggccgcggcgggcggcgccgaccccgggcgccccgtcggcggcacgccggcgttcatggcgcccgaggtgctgcgcggcgaggggcagggccccgccgccgacgtctgggcgctgggctgcaccgtcgtcgagatggccacgggccgcgcgccgtggagcgacctggacggcctccccgcggccgtgctccgggtcgggtacaccgacgccgtgcccgaggcgccccgctggatgtcgccggaggccaaggacttcttggcccggtgcttcgcgagggacccgcgcgagcggtgcaccgcggcgcagctgttggagcacccgttcctggcgtcggctggctgcggcgccatggcggagtgggtgtctcccaaaagcacgctggacgccgcgctctgggaatccgacgccgacgatggctccgatgacgagggggacgtgtcagagagccccgcccagagaatcaaggcgttggcctgcccctgctgctcggccttgccggactgggattccgaagaaggcgactggattgaggtgctcggtgagcaatgtgaggccaacggtttggtaccaccgaccaaagaggtggccaaggagacggccagcgaagacgagattagctactgttccgtcagttga

SEQ ID NO: 26229 - DNA, 1044 bp, Zea mays
  Peptide Sequence Number=SeqID_68008
atggcccggtgggtttggtgcagcgaacgctgctgtctggcgagtaattctgttcgcgggcccaaagtgtcaacgcccagccagcgccctttttatataggagcacgcgttgacctcgacggcggccacgttttacttcggagagaggggggcgggggatcggtcaggctcccgctcccggcggcacccgtcgtcccgatcaccaaccgtgctacggccgctggaccgtcctcgctttcgcaccgtatcgcctcgtctgtgtgcgcgccagacgtgctgcgggggctggcgtacctccacacccgctccgtcgtgcacggcgacgtcaaggcgcggaacgtgctggtcggcgccggaggccgcgccatgctcgccgacttcggctgcgccagggcgctgtccggctccggctccggctccgcgcgccggccgatcgtcggcgccacgccggcgttcatggcgcccgaggtggctcgcggggaggaccagggcccccccgccgacgtctgggcgctcggctgcacagtcgtcgagatggccaccggccgcgccccgttcggcggcatgggtggcgctggcggcgccctcgcggcggtccaccggatcgcgtacacggacgccgtgccggaggtgccggcctggctgtcgccggaggccggggacttcctggcccgctgcttcgccagagacgccgccgaccggtggaccgccgcgcggctcctggagcacccgttcgtggcgttggcccgccacgacgacaaggccccgcggccgtctcccaagagcgctctggacgccgcgttctgggagtccgaaacagagtgcgaggacgaagcggacgatgcgtcagggagcgcgtcggagaggatcgagtcactggcgtgctccgccggggccttgcccgactgggacggcgagggcggatggatcgacgtgctcggcgagcactgcggcgcgccaggcaaagcgtccagcgtcctggtggcggtgccagatagcaacataaacagcatgactgtaaaattaagacaacaatattactag

SEQ ID NO: 26230 - DNA, 324 bp, Zea mays
  Peptide Sequence Number=SeqID_68009
atggcgcaccggactgtccggtgcgcccatgcgcagaacagtgctgcctcaccggcgatctcccccgccgtgggcgcccgccacctcgccgtggaccgggcctttccaagcaccctccggccaaattggccctaccaccgtgatcccctacccccgcccgtgtcctcccaccactctgtcgtcgcagaaccgggatcccggtggagaaccgccgcggacctcaccggcggtcgggccccgaccggaccttcggcgacgaagcatggtcccaacagtagccccttcacggtgctagatcgttttttgtacgagcttgatccgtga

SEQ ID NO: 26231 - DNA, 318 bp, Zea mays
  Peptide Sequence Number=SeqID_68010
atgtggtatgctggtcgtggtcacaatggagatctagacgacaagttggagtcacgaaatggcgcacaagtgtatttcgggagtagctctaggttcctaaacgtagggagaaaattgggttgggaagttgttttcataactattggagttgctctaatggatttgaggaaaggagaggaagacaaacaacctccacccggatttgaggctaaccatcaaacggaaaatatggaggaaacagtagggaagataggcaaaatacgcaattcacgattaacatctctagatgccaaatcttcaaattggccaccattataa

SEQ ID NO: 26232 - DNA, 3207 bp, Zea mays
  Peptide Sequence Number=SeqID_68011
atgtggcaaaactcttgtgataccacatttgtgtttcattttctgaaggcccttattactctaaagaaaggtagcaagcttatcaagtatagccggaaaggaaaacccaagatccgttctttcagactttctagtgacgaaacagcattaatttggtattctcacaaaaaggaaaagttcctcagactgtcctctgtctctaaagtcattcctgggcagagaactgctgtttttaggaggtttctacgccctgagaaggactatctatcattttcactcatatacaagaacggccaacgttcccttgatctggtttgcaaggatcaagttgaagttgaagtttggttttcagcactcgaggcattaataagttcgtgccatagaaattcttcagttgatgaacacaaggatagagtatcattttctgatgatgtatcatattatcgagatggacatccgtatgattcaacactagatattgcttcaagtatatcacgtagttttaacacagcagattattgccgaggcagttcttttagtttcagaagatcagatgctggatctgatcgtgcaaatatgataagaactagtggtgcagatagtactcgacttagtatttccagtgcccctagctcttccagtcagggttctggaacagatgacatagaatcccttggtgatgtctatgtatggggtgaagtttggactgatgcggccccatcagatggacacacaagctcgtcttgctcaaaagtagacgttttgatcccgaagcctttagaatcagatgtcgtcttagatgttaatcagatagtatgtggttcaaggcatgttgctcttactaccaggcaaggggaggtgtttacatggggcgaggaacttggtgggcgccttggtcatggaactgatacagatattagtcgtcccaagcttgttgagtcactatccgtgaccatagttgattttatttcatgcggagagttccatacctgtgctatatctgcttctggtgatctgttcaactggggggatggctcttaccgtgctggattgcttggatacgacactggggctagccattggcttccaaagcgtgtctcagggcccttggaggggcttcaggtactgtctgttgcatgtggctcgtggcattcagctctgatcacatcaactggaagactttacacatttggtgacggaaaattcggtgctcttgggcatggaaaccgtgaaagcgctgcgtacccaaaagaagtggaagccttgaatggatttagaactgtcaaagttgcatgcggagtctggcattctgcagcaattgtggaggcctctgttcagacaggcatgaatgtggtgtctaagaagctgtatacgtggggtgatggagataagaatcgtttaggccaaggggacaaagaagctaggctgattcctacctgtcttcaagctcttcttgagcacaattttcatcagctgggatgtggacagaacatgactgttgcccttgctacatccggtcatgtgtataccatgggtagttctgacaatggtcagctcggaaatccaaaatctgatggtaaacatccttgccttgtcaaagacaaactagctaacgagttggttgaggagatctcatgtggagccgcccatgttgcagttctaacgtcaagaagcgaagtatacacgtggggactgggtgccaatggaagacttggtcatggtgacctcaacgacaagaagacaccaactattgtcgaagcacttaaagatcggcatgtcaaaagtatatcatgcggctcaaacttcacaacatgtatctgcatacataggtgggtgtcaggtgcagatcagtctgtttgcacaggttgtaggcaggcatttggtttcacgaggaagagacataattgctacaactgtgggctagtacactgccatgcttgcagttcaagaaaagtgctcaaggctgctctggcaccaactcctggcaagccgcatcgtgtatgtgattcatgtttcctgaaactgaagaatgcagacaccagcagcagcaatgcgaacagaagaaatgccgctactcgtcgctctacggacagcagagaaaaaccagaaataaggcctcccaggcttgtggcaacaccgtcagcagagccaggcaagtacatggaggtaaaagcatctaagagcgatatgaaacctgcagattcgatcatgaaggcatcacaagcttcggctctactgcagttcaaagatcttggttttggtgcccaatttggtgggcttcagcctatgggaatgccaccggcattagctatgtcacctgcgataccggcattttctttggcacctccatctccatatacaaagaaaatgaaatcacctcctacttctgctatcccccagagctctaaagtcgatgttgatcacttgcagaagtcaaatgacttgctgaatcaggaagttctgaaattgcaatctcaggcaagtacggttgaggatttgaaacaaaagtgcgaagcacagcacgagcagcttcagaaatcagataaaaaagctaagtcagttgcctctatggccactgaagaatcctcgaaacgtaatgctgccgtggagtttgttaaatttcttgataatgagctcaagggtattgcagataaacttcctgttgacgttgccgacagcttgaaagctttgcaaatgcgaacacagtcactactgagggaacaatcaggtcaccccttagagctcgtgaatccaatggaacgtgatcatcttcacctgtccagtggtggaagtggaagatatgatttggtcactcataagtcaggaggtgtaggttacctgacaatgtctcaagatggcagttctgccagtggctcagccatgtccatcacgagtgaatccccatcccatcgtttcatggaaaacagttcaaaggcccatggtgattttgccccgaagcagggtacccatggagaggtccagttaattgagcagtttgaacctggcgtatatgtgacacttatccaactaaaggacgcaagaggagattcgcagagaatcaggctgaagaatggtggagggaaaaccaagagcgggtcttcaagaaatacagccacccaactcatgcaccacatggaaacacaacttctcacgaggaagagcatcattcatgatctccaaatcaggtccacacaggtcgtcatgtag

SEQ ID NO: 26233 - DNA, 276 bp, Zea mays
  Peptide Sequence Number=SeqID_68012
atggacggggccccagaagccctggctcccttcacaagcgattcactcgacgtcatcgaaagccttgacttcatcggtttggtcccccaagaggagtgcctcatggtcacctcagctggggacacctcaacgctcgtggagaacccagaggtggcccccactgatgttgcagcgtacgtcgcggtgtctgtcccgcccggattcgacctaccatcccgggaaccgttgtcggggcaaagccccacccatggcggtcgaggcctgaaactcgcctag

SEQ ID NO: 26234 - DNA, 105 bp, Zea mays
  Peptide Sequence Number=SeqID_68013
atggctgatatggatctgattggacttgatttatccatgataagtttaagagcaactcaaagagccttttgcgagtggggcggcaatgcacggcatgaactataa

SEQ ID NO: 26235 - DNA, 579 bp, Zea mays
  Peptide Sequence Number=SeqID_68014
atggaaattgattatatagatttacatgctattttccgatgtacaacttctaacacactcttctacttgcttcgttataacatgaatgtagtatataactatctgtctcatatttttagaaaagtttctaaaagaactgaaccaaacaggttcaggaaagctctaaaccacctcctagcaggtgctaccagcaaccatttcaacggcatcgttcttttgtccctcctgccgctcgcggatctgggcagggacatggacacgaagatggaggacagggctttggccagttccacgggtctcaagatggccgtggccatggagggcatcttcagcaacaacattatcatcccggttccaaggggacacaataggcgtaatgcagaagtgcatccactatctcaaggcaacaatattcagcaacactggcggacccagggcccggcgaccctgggcgcctgtccgggctctgaaaccgctgtctccgtagatttctattgcagaacattctacaaactacaaggtttatctggactcgaccaaggccaagaaaccacacccaccattttgttggaggtgtaa

SEQ ID NO: 26236 - DNA, 792 bp, Zea mays
  Peptide Sequence Number=SeqID_68015
atgggtctccagcgtccgagggcgtcccttcatgaggacgacacaccttcaccaatcgccaatgcagcgggacatgttttgatggggaaagataaaacagtccccgagggcagctaccctgcgggagcacgaagtgggtggatcgacggccgcgattctgctggatccccccccccccgaactgtgaataatgggccgaggatgtccctcgggctggacccgccccgttgcctggttgggccgcttgagactacttggccagtttctgtctcgccccaggtgccggttgggccgccggagacatgcattttgatgcctgtctcgccccaactgcgctatgggccgctggagacgaacgcccttacgtatgtctcgccccaactagtttctggataccctgagacgacgggcccaatttctggctcgactcatcagctgactgggatggctgggacggtggcagcaacaagcgatgaagcaacaaaggctctcaaggtctattttcgcagaagaactaaagcaaatctccttcaattcagtcagaatgaggggacaaaggaaggctcatttcagataattgataccttgcactcggccttgaggactacgaatcaacctccaacgaagaaggacgagttcttcagaaaaatcagtacaacaactgaacaattactgccggcaccgaagcaagatatgaatgacttattatctccacaatcttctcgggtagctgcacctaggcgaagtcgaagtattgctggtgctggggttgaatttaatatgcaggactag

SEQ ID NO: 26237 - DNA, 528 bp, Zea mays
  Peptide Sequence Number=SeqID_68016
atgtcagggctggtagacatagagataagagggatcccagaacatgcttggtttctgtctacggtgaagagtatactgaatgattcctgtttgatcgctgaagtgcaccctgatactatgtccaagcaagagctatcttcgtttgtagtcagagcctggtgcttcaacccggagaatctccaacgtacttcagtgcttcacattattgagcctgggttacagatgttcgagaaaagatgcctcacatacaagctccaaattagagtcctgcatgctggttcacacatcacaccagaaggtccccctccatccgcggacggcgataaacccccatgggatgatgatggaaacgacgctcatcagctcatgacccccatcctcgacgtccggttggctctctggcgctgcgcaagccactgcaccttcgcttgggcccactgccgtctgaaggccgcgacaccgaggcgtctgcgccgccaggcgcctcgaaggcggggactggggatcttaggcgagatatgcatttaa

SEQ ID NO: 26238 - DNA, 885 bp, Zea mays
  Peptide Sequence Number=SeqID_68017
atgaccgcgccacctccacccccacttccctccctcccccctggccccaaccctcccacctccatccaccatccttgcctctcgtcggcttccaccccggacccggcgaccaccccagataatccccttggcgtttttcctggaagacgatcagaggctccccaggtgggccgcctgaaggctcaacgatggagtgattctagcccgaattcatcgtctggtgattcttggtgggcgcctccgtcatatagggaggctctgttagcctgcccctcgcgtcctgcggctcctcccctggcgccaagcgtgaaggtggtgactgatatccaaccggaggtgcaaagtcggcgggctgcccctcggtgtgacgacgacggttggcaagtggtccagagtaagaggaggtgtcgaggtgatcatcggcctcgtcgagagtcccctgtggatcttcggggtcggtgtttcaactgcttctcctccgaccactttgctgctgtctgccgtcgacccacgcgctgtttcaagtgtttcaagactggacatcaggctgtcaggtgtccaggccgtcgagaagtgcagagcaagaagacagtgtggcagagattggaaaaacaacaagcaagggggtctgtgtggcagcgcctctcggtgcagcgcggggcctcgtcagcaacctcggcgtgtgctgtcccccgtaggcgacgcttggtgtgggttaagatcaacacaccagaggttgttgcgaagatggaggattcccctaggatggctgctgagggggagtctcatagatgcctccgcaacaatgaaagagaagacggccgaagcacgaaaaaggtgagggtcctatcgttgccctggtcaggcgtctctgacctcgtctga

SEQ ID NO: 26239 - DNA, 1755 bp, Zea mays
  Peptide Sequence Number=SeqID_68018
atgccgcggcggacggagccgcagaacaacctgccgtcgccgcccccctcgccagcctcgcgcacgcagggcgtctccaccgctccgatcgagcgcgaaccaccgggactcgcgcccacgcccgcgcctacccccgctcagcagccgcaccaggatccagcgatcgccgcggaggtcgctcgcctctccgccgcccgcgagaggctccgcgcggcgcacacgctccacgagaaactccgcgcgctcgacgctgagccccgcgtcgcggcgttcttcggcgaggagtccagccgcggggtgttgggcgtgctcgagccccgcgaggtgctcctgctgaaatgcctcgtcgcggcaggacaggagcacgtgctcggccatgagctcgattggtacggcggcgacggcggccatcacgagcaccaccaccgcaacggggtcagtggtgggagtgccctgcgggatgcgctgtatagcctggccggtttggtcgggaagtggacctcggagggagtggtggctgccaaggagagaagggaggaaatggaggtgctacctagactgctcaagttcctcgacaacgtcgaggagttctacgactgcattggtggcatcatcggtcatacaagaagctatcaaattatggtattggagctcctttcagcctctaaggatcgcatgcaccgacctagcaaagacaagtttgttgatttccatgttcccagtggacttaatttattgaaggataaagaatatgcatctcaagcagctctgtggggaattgagggtctgccagaattaggtgaaatttacccaattggtggtgcgggtgatcgtcttggtttagtggactcagatactggtgagtcccttcctgctgcgttgctcccttactgtgggagatccctgttggaagggctgatacgggatctgcaggctagagagtttctccacttcaagatctttggaggtcaatgtataaccccagttgcaatcatgaccagttctgtgaaggataatcatgaacatataattgcgatatgcgaaagacttgattggtttggtagaggccgtgacaatttccggttgtttgaacagcctttggtacctgtagtaaatgccaaagatggtaaatggttaatcagcaaatcacttttccctgttggtaaacctggtggtcatggtgctatttggaaacttgcatatgatagaggtgtactccaatggttacaaaattgtggcaggaaaggtgcaactgtacgccaagtcagcaatgtggttgctgcaactgatttgaccatgatggcattggcaggaataggccttcgatgcaacaagaaattaggttttgcatcttgtgagcgaagacctggggctactgaaggagtgaatgtccttattgagaaacaaaatcttgaggggctatggtcatatggcatcacttgtatcgagtacactgagtttgaaaagtatggcatcccagaacctacactaaccaacaggggaccaaggtacgagatgccaggtgttatgaccggtctcctacgtgcgccagaaaacgggccacacagttcgcaggttagctttccagcaaatacgaacattctctatgttgatctacaagcggtacaggaagttggatctcgcaaaaatgctagttgcttaccagggatggtgctgaatttgaaaaaggcagtatcgtaccccaaccatcttggctttgagtgtaggtacttcctttccagtaattcaccttaa

SEQ ID NO: 26240 - DNA, 195 bp, Zea mays
  Peptide Sequence Number=SeqID_68019
atgggaaggaggaacgaaaaagtacagacaaagcagttgctgcagcttcaaaatcaaatcttgggcttaaagaaaagcaaggacgaggatgattctgagggtgagggattatttcatgaagaaggagatgatgattcaagtgatcaggatgataccggtgatgataacgaggaagaaacctcaactcctaattag

SEQ ID NO: 26241 - DNA, 1743 bp, Zea mays
  Peptide Sequence Number=SeqID_68020
atggagaccctcctggctggcaaccccgccaacggcgtggcgaagccgacgtgcaatggcgtcggcgccctgcccgtggccaactcccacgccatcatcgccacgccgccggctgcggcgacgctggccccggctggcgccacgctcggccggcacctggcgcgccgcctcgtgcagatcggcgcctccgacgtcttcgccgtcccgggggacttcaacctcaccctgctcgactacctcatcgccgagccgggcctgaccctcgtcggctgctgcaacgagctcaacgccgggtacgccgccgacgggtacgcgcggtcgcggggcgtcggcgcctgcgccgtcacgttcaccgtcggtgggctcagcgtgctcaacgccatcgccggcgcgtacagcgagaacctccccgtcgtctgcatcgtgggcgggcccaactccaacgactacggcaccaaccgcatcctgcaccacaccatcggcctccctgacttctcccaggagctccgctgcttccagacgatcacctgctaccaggccatcatcaacaacctggacgacgcgcatgagcagatcgacacggccatcgcgacggcgctgagggagagcaagcccgtgtacatcagcgtcagctgcaacctggccggcctctcccacccgaccttcagccgggatccggtgcccatgttcatctcgccgaggctgagcaacaaggccaacctggagtacgccgtggaggcggcggccgacttcctcaacaaggcggtgaagccggtgatggtgggcgggcccaagatccgggtggccaaggccagggaggcgttcgccgccgtcgcggacgccagcggcaccaccttctgcgccgagatcgtggagtccgccgacgcctacctcttcgccgggcccatcttcaacgactacagctccgtcggctactccctcctgctcaagcgggagaaggccgtcatcgtgcagcccgaccgcatggtggtcggcgacggcccggcgttcggctgcatcctcatgcccgagttcctccgcgcgctcgccaagcgcctcaggcgcaacaccacggcgtacgacaactaccgccgcatcttcgtccccgaccgcgagccgcccaacggcaagcccaacgagccgcttagggtcaacgtcctcttcaagcacatcaagggcatgctgtccggcgactccgcggtcgtcgccgagaccggcgactcgtggttcaactgccagaagctcaggctccccgagggctgcggctacgagttccagatgcagtacggctccatcgggtggtcggtcggcgccacgctcgggtacgcccaggcggccaaggacaagcgtgtcatcgcgtgcatcggcgacggaagcttccaggtgacggcgcaggacgtgtccacgatgctccggtgcgggcagaagagcatcatcttcctcatcaacaacggcggctacaccatcgaggtggagatccacgacggcccgtacaacgtgatcaagaactgggactacacgggcctggtcaacgccatccataactccgagggcaactgctggaccatgaaggttcggacggaggagcagctcaaggaggcgatcgccacggcgacgggcgccaagaaagactgcctctgcttcatcgaggtaatcgtgcacaaggacgacacgagcaaggagctcctcgagtgggggtccagggtctccgccgccaacagcaggccgcccaatccccagtga

SEQ ID NO: 26242 - DNA, 426 bp, Zea mays
  Peptide Sequence Number=SeqID_68021
atgcaggcggcatgcaaccgcgccaagtggacgcgcatctccgactcccaacgcgcccagcctggaggcccaggcccacgcgtcatgcaaccggcgcgccggatgcttcatgcaagcaactgcaccgccacttgcgccaccacctcgcctcctcgattacggaaccaataccgcgactcgaggaaccaggctccgagcctccttactgatcagaggttcgaaggctggccccccgaagggtttcaacagccgcctcagatcgcgtgggccctacacccactactggtcagaggttcgaaggccggccccccgaagggttccacggccgcctcaggctactcgggctccgcgcccattactgatcaggggttcgaaggctggcccccgaagggttcacagccgcctcagacgccgagcgagggatga

SEQ ID NO: 26243 - DNA, 1031 bp, Zea mays
  Peptide Sequence Number=SeqID_68022
tgcaaccacctgaacccgaagaacctgtccatgatactgtggaggagaacaaggtggctgctgagggtgcagttgtgggtgtctcagaggacgatggaacagagcatgtggttacctcctgtggccacctcttctgctggccttgtttatatcagtggttgcatgtccactccagccataaggaatgccctgtctgcaaaggagaggttactgaagggaacattactcctatctatgggagagggaattcaggttcggctatggagaaggtcgcagaggatggtaacgcatctggccccaagattccaccaaggccacatgggaatcggctagagagcttccggcagcagttccaccatttgcgacccatatctagacggcttggtgaggcacatggttttttgtctacgtggaggcgcatttttgatcagcacttagcgaatagcatgagtagatttgaagggactcctgaactatctgtttcggaaactgctcagcatgcaagccgtcttggccgaatgactactaggttgagagcgaggaggttgcaaagggaagcggaaaaccctacacccattgtttcatctgcaccagatagtgggcagcctagaaacaatacacccgatctgccaaggcgctcttcaagcccatttccctcagaagggatggatttgttgcgacagattgccttcgctggtcttgaagactcagagaggtttgcgactgctgtcagtgaacttaggcgaatcgctaggccaagccactacggggcatcaacttcatcaaacccaccaaatcctgagcctattgatggaactcatattgccatggcactggctgcagatcaagcttctaattcgagcaccatggctgtcattcaggaagatgcagcttttgctgaaagtgctggagaacctagtaatgccgggtcttcaagatccctgagaagaagaagaggaagtggtgccttaggttctttggatgtggatggtggggacctacatcagaataagagaaggcgtctgaactaa

SEQ ID NO: 26244 - DNA, 609 bp, Zea mays
  Peptide Sequence Number=SeqID_68023
ttactttgtattccagagtggggttcgactccggagggttcactccttgatattatgcgtaatgctcatgacctcctttccagttgcggcatagatattcccatggttcaagacaacagtgaatatatgcattctggaccgccgtttctcatatttcttcatcctgctttaggcccattttgggatatcatacgacaaaagttcgtaggtggttctgtttctaaaggttcagagttgcaaatagaggtggctgagtttctatggaaagatgttgagctggatggaagctttattattctagctgacaacgtcatgggttcaaccaagaatagcaaaaatggtgaacagatactgcactatggttccaggtgtgggagatgcagactgcaaagtgttaaaattgttaatgaagggatcaattggacttctcccaataatgtctattggaagcatgatgtagagagatcagaatctgtaaagattattcttcatggaaacgcagaatttgaggcaaaagatgtagtcttgaagggtaaccatgtatttgaagttcctgatggtcatagaatgtgcatcattcaggacagagcagttgatgagtgggggtga

SEQ ID NO: 26245 - DNA, 264 bp, Zea mays
  Peptide Sequence Number=SeqID_68024
atggctcgagctacaccttcggttgagctggagcttgatcttattggtcacataagttcgcaggcgagtgtgagctggaattcttcatgcttatatagagggtgcagcagtaagcacacaaaggtacggtgcctgaggctttgcttctacttcaattcttgtagtggcaagcgaagggggagcagaataatggcaaggagctttattagctccaggtgcagtgcagaagatgtccatatggagagggcgagacagccagagtga

SEQ ID NO: 26246 - DNA, 330 bp, Zea mays
  Peptide Sequence Number=SeqID_68025
atggcggtagtggcggcgatcgcgcttgttcttctacccgtcggccgcggcgaggagatgcccaccgcagcgcacccgcacgggctctccttcgagagcccgctcgctctgtcgccggctgcttacgacttcttccaccccagcgctcgcgcccgacgagctcacggcgtcgcgccggtgccggcgctcgcgcctcgcggacaggagcagctgaggcctgagggagtccgcgcagccgcgctagtggctatcggcgtggcgtacgccgtggtgcggcgccgggtcgtagcggcgcgcggtggcgcgggcgcgcccaagtcgaacgcgtag

SEQ ID NO: 26247 - DNA, 798 bp, Zea mays
  Peptide Sequence Number=SeqID_68026
atggagaaactccgctcgggccgaattcagtccgcctggcccacaaatgaattccgtgcagcccatcccgcccgcgtgcgcctgccaactggcggtttgggcccaccggtcgaaatcggggatgtcacgccagcggggtcactgccgcgcgggacccgtttgtcagaagctgttcctcgggagcgtggactcagctattgttcctcttctccgccaaaatcgcgcgccgcgtgccccaccatctctgcgcgcgcaacggcttgggcgcaacttcctcgctgcgtgcctcgacctgggtataaggacctcgggcgcgtccgccttctccaacctatcttcacgcgagaatcgttgaccaccacgaacagtgagagaattggggggagcccgccgccgccgagtgacttcatcgtgccgccgccatccgagcttcttcacgcctactctcggctgttgggcgggaccataggggcatgtgcgagcgctcaaatggaagccttgtggtcgggcaagccttcggtacggcaccaccttgaactccctttctctcccctcgtcgtcaattcatgcgtggccgaggaagaacctgggagctgctcggcgtatagcgatgggcggcgttggatttggggattctatctagggtgcctgggaggggatgaactatggcgagggaacgactggtggcactcctcgtcgctggtgagagttccggtgcgtcggggggcgctgtgtgcgtgcgagcgatggagaagaaggctggtgaccgtgggatttctgattggcggctatgattag

SEQ ID NO: 26248 - DNA, 465 bp, Zea mays
  Peptide Sequence Number=SeqID_68027
atggccgttggaagactactgtcgcatggcgcaccggacagtccggtgcgccaccggacactgtccggtgtgccagccacgtcagccagccattggggttcgaccgttggagctctaacttgtggggcctctgggctgtccggtggtgcaccggacaggtcctgtagactgtccgcggttgtcgtggtcgcactcgacgctaggagtttgcgtggcgaagggcggcgacggttccgatggccggtaacatcacatgcgagcccgatcatcacggtattggctgtggccgcgccgttgtcctcgacaatcgcagagactgcggttccagtgaccggtaatgtcacaggcgagcttgatcgtcgcaatgaaggcatccatggtggaggatgcggtgatgatctcatcctcgacgattgcgatggtggctatggcggcgtcggttgcagttgggagagtagggcgtag

SEQ ID NO: 26249 - DNA, 612 bp, Zea mays
  Peptide Sequence Number=SeqID_68028
atggcccatcagcaagctcggccgcacctatctaactatcgccgtgggaccttcttgtcagagttatcgtcttcaacggattgggggcggatttcatggccgggaatgtcgcgacccaacacgcgctcggccaaatcgcaggcgtgcatgccgcgggactcgccagtcgccatggatcgttgggggccgaaaggagtcctagggtcgttccaatttctcgccgtgtccatttcgccgccatgggatccggactatgtcgtgggcggggtccctctgcggcactatcggccggtaaggttcttcccaatcgagtcgcctcgcttttctctacgtgtggcacccgctaatttgcgtattggggcaccttggcatcggtcgcggttgcgccggcgtgctccctactgtggccactgggcggcgccgccgtctagcccaagcggggagggagatggtgttctggccagtgatctggagatggatggctgggatttgatcggccaggtgaatgcgacgataaaggaatctgagtcgttgacctatagatctgcggcggaaaatagtttacgctatttgaaatcacgaccattggatctcgatccaaaggccagttga

SEQ ID NO: 26250 - DNA, 207 bp, Zea mays
  Peptide Sequence Number=SeqID_68029
atgactgcacaggttgcacaccaggcgcacaactcgtgcctctttctacgcaggcgagcgcccccatgccggcagcatgaccacgagctgcaggcttcgatgatccgcaccctttcctcccatcagcagattaggcgtgagaagtcgtggaagacccgtatcccttcccaaaagcacgacagaggaaacacacgagacacgatatag

SEQ ID NO: 26251 - DNA, 408 bp, Zea mays
  Peptide Sequence Number=SeqID_68030
atggaaaagaaggaaaggaacaattgtgaatgttggaagtattaccgctctggcacctggaccatgggctgggttgaactaagaagcttcggcataaacgtgatgaccgtcgccccaggagggacgaggtcgaatcttgggaattcttctgcagccaagtatgatcagatgcacgagtggaagtactacaagaaatacgaggaagggctccgagccaggactggcatttcccagggccccaggtccactccagcagaagagcttgcaaaggcggtggttgcatcggttctaaagaagaaccctccagcttggttcgcttacggccagtactctgctattctgtcgattttgtattatgcaccgctatggttcagagattgcctctataagtttgtcatgaaatgttag

SEQ ID NO: 26252 - DNA, 660 bp, Zea mays
  Peptide Sequence Number=SeqID_68031
atggcgtccataataacaggagatttcgcggaggcctacgtacggaagaacgcctgcgaagaggagacgaggaaggcagaagcaagcaccgccggcggggtggcggcggcggcgacaccaggagacaagaaggccgacgctagtgcatcatccgagaagaaagtggccaaagaggctgcagctggtagcaacaagggagaaggaggcagtctcttcgggctgctgaagaagaaggatcctacaccagttcgccacaattggaaggtcctcacgacagagtctgcacttccatatattggcatccgattggcaaagcgagttgtttcgcgaggggagctctttgcggaaaacgacggcgttacggcctttccagagttgtcaacatcaaaggagaacgaaggtgctgaacaatttgggggaggtttgggggccctgcaggctggggaggacattttgttcatccgagtcgatcctcacacccagaaacgaagcggttcatttcacatcttagctctccctactgatgaaaacaacttcaatatttggccctacaaagtccaacgtaaaaacgaagtcatgttttttgctaccgatattttgtccctacatgctactggttccaagtcttgctcctctttccatgctaggctcctaaagtga

SEQ ID NO: 26253 - DNA, 1374 bp, Zea mays
  Peptide Sequence Number=SeqID_68032
atgtacggcggcaacgagtcgctgaaagcgcggggcgcgctctccatagccgttcccggggagatcgccggcctgcacgaggcgtggaagcaccacggcaagctcccatggaagcgcctcgtcctgccggccgcgcggctggcgctggcgttcagggtctcgccgtacctgcggatacagatggaggcgaccagggacggcatcctggccaacaacgggacgcgggccgtgtacgcgccgggcggcgacatcctccgggccggggacgtgtgccgcaaccccaggctcgcccagacgctgcgggccgtcgcggagcacgggcccaccgtgttctacggcggcgcggtcggggcgcggctcgtcagggatgtccgggaggccggtggggtcgtgacgctggaggacctcaagaggtaccaggtgaaggtgcggcggccgctgacggggaacgtcttggggctccaggtggtcaccatgccgccgccttccgccggcggcgccgggatgatgcttgtcctgaacatccttgaacagtatggtgttcctgctggtttcgctggatctcttgggatccatcgcctgatcgaatccttgaaacattacatggccgtaaagatgaacctcggcgaccctgactttgtgaacaatagcgaggttgtgtctgatatgatgtcccccaagtttgctgccgagctgaagaaaaccatttatgacaacatgacatttgcgcctaaacattacggaggaaggtggaacatccttgaggaccatgggaccagccacctgtccatcgtcgacagcgagcgaaacgcggtgtcgatgacgagcaccgtgaacgcgtacttcgggtcactgatcctttccccgcgcacgggcgtcctgctcaacaacgagatggatgacttctccatgccagcgaacgcgtccgagaattctccaccgccggcacctgccaacttcgtcagccccttgaaacggcctctctcttccatggctccgaccgtggttgtcaaggacgggaagctggtggctgcagtcggtgccagtggtggcggcatgatccccgccggaacgatcgaggtgttcatcaaccatttcgtcaagaacatggacccgttggcttcggtcatggcgccaagggtgtatcaccagctgatcccaaacgaggtcaggtacgagaactggacgacggtgaccggcgaccacttcgagctcgacgccgccacgagggccgacctgcacaggagaggccacgtcctgacgccgatagctggagggaccataagccagcttgtggtgcacaacgtcgggcgccaaggcgacctcaccgccgttagcgaccccagaaaaggcggtgtcccggccggttactga

SEQ ID NO: 26254 - DNA, 450 bp, Zea mays
  Peptide Sequence Number=SeqID_68033
atggaggaggctgtgcacatgcgccagactgaggcgttgcatgatgactttcaaggattcacagcctgcatgggccatcccttgacccagtgccctcctccgccttcgtcccctacctaccatgcgaaccataatgaatggcaccaacaggagtttggtgtgccatttgttactcctaaggatgaggcccaggagtttgacgactccttctacgcatctactcctcctccctacccgggtcctggacccattcctggtgactccaggccttccggctctggtcaccctcctcctcctccttaccagggtcctagacctattcctggtgatcctagaccttccggctctagtcatcatcaccctcgtcctccatatcaagtctttcctcttcatcaagttttccttctgctgatgagccccatcgagaatcgtcaattggggaagatttga

SEQ ID NO: 26255 - DNA, 546 bp, Zea mays
  Peptide Sequence Number=SeqID_68034
atgcaagttgagttgactcctcaggcttcagaggaaaatctggctacacccaaagctagggtggccgctgaaattgaggaactaccttctacgggagccgaagaggcaaagattggagaagttgttgccatgaaaacacaaagagttacacctttggagtcgctcccagagagcaaagaagaggaagaggaggggagaatagctccagtgatgagttcattcttcgatgttgatgaagatgaaactaaggaaaaaagatactgctggtacaatactagcacgaaggccgaagagaaaggttcctccaagcttactctaacagaggacaagggtaaggggcctgctaagattgaagaggccaaaaaggcaattgaagatgatacaccgcttggcgaagaaccttttgaccaagaattgggtggtcgaaggtatagggttcgtcatgctgcgtgtaaagtcatgggtgcgaaggagctggtcgaagctatcgggtttgctaaacaacatggataccctttggggtctactatctttggggcgggctag

SEQ ID NO: 26256 - DNA, 192 bp, Zea mays
  Peptide Sequence Number=SeqID_68035
atggcggcggcctcccgtcgagcaacggtagcggcctcccgtcgagcaaagctggaaggaagtgatgtccgatgggtattacccaagcccaatgcggaacaaacactagcgacgaatcctactcctacatggaacagtgtcccttgggataatgtagttttactcacagcaacccatgccttttctttgtga

SEQ ID NO: 26257 - DNA, 708 bp, Zea mays
  Peptide Sequence Number=SeqID_68036
atgcgggtccaatcttcggcattgggagcaatccgcctactcgaccacgaaggttctctgaggcggtgtagccagagatcatgcgggcaacagggaaggacgatagctacgcagcccacatcacgaaggcatataagtgggagttcgccgaaagggaaggccaacgtcttgagttggaccctgtcaacacagggtgggtctatcaaggaggacaaacagggaatcaatgaatcagcccgaggcacatctgaaatagatcaaaacaaggtagtcgccttggtcgtggttccacatgataatccgccaaaagcaccttcttctaccagtcctggaagcgtggtgactagctggagcaattcagattctattcgctttcctgtttcttataggctattgttcagtggtgccgtcagtggtgcggattgggggcttctagagaaagggtctagcgtcgtgcccttcttgacgaacagtgtgttgatgtgtgccatcatcgcactgggaacgaacgtgatggctagcacggggagcatcttgagcatctgctttgtctccaccactcaccatgctctgagcctgtgttggatttggagatccatgcgggcactaccacagtccatagggtgctcatctcttgtgttcttggctcttgcaagcattaggtcgtttctaaaatcacattggcacaatgaactctatggtgtttga

SEQ ID NO: 26258 - DNA, 105 bp, Zea mays
  Peptide Sequence Number=SeqID_68037
atggagcaagagctggcgcacagcgatggcccatggatagaccctggctctagagatttccgcagggggtctaagaaaagctctatattacttgtaatattttaa

SEQ ID NO: 26259 - DNA, 327 bp, Zea mays
  Peptide Sequence Number=SeqID_68038
atgactggttggttcgagctcttcgccatcggctgcctcccagccatggcttcttcctgctgggaaatgcctctctgccatcgaccgcctctgaggtgcggcttcttcctggcaagaaaaaatgcctccccaattcctcgtggcttcctttcattacttactcatatcttgctaatgtgtttcaattgtgctggtaaaaccatcgagaagaggaagctggtcatcgacgtcaagtatttcttcttctatgtgcacttggaaccccgcgacatcggaggagagacttcatgcctagcaaccagagacttcatgttgtcccaccagtag

SEQ ID NO: 26260 - DNA, 870 bp, Zea mays
  Peptide Sequence Number=SeqID_68039
atggcggacgccgccgagatggtgcgcctcctctatctccggaccccgccgcggccgttgctcccgcagttcgctgtacatacacatcggccacaaagtctgctcagagtttccccccgcttccgccctcccatccgtcttcggtgccgcgcgctcgacgccagtagaccggttgcggtggagggggagcgggatgaggaggacggtctcgaggacgaggaggagtcctacttctcggtcacctcgtcggggctctcggaggtggactacctaggggaaagcaccaggggggatttgaacgtgaggagggagcgcctcgaggcgcttgggaacagcaagtcaactttgcatggtcctattgaggagatagcttggaaagaagcgggagaagctgaaacattgcttcatgacttgggaattgcagtacggttctatccttttaagcattatcttgtcattgttgatgttcggacactaaatcttcgatctatcagtgtagttggctacgatatggactatacattaattcattacaatgtgatggcctgggaaggacgtgcatatgactatgggatggacaacctcaagagcatgggttttccagtagatgaccttaaatttgaccctgacctggtcataagaggtcttgttattgataaagagaagggaaacttggttaaagctgatcgatttgggtacattaagagggccatgcatggtacccaaatgctttccactcgtgctgtgagtgaaatatatggaagagaattggtggacctgcggaaagaaattcgatgggagttccttaatacccttttctctgtttcagaagctgtcatgttcatgcaggcgaaagggcctctaacgtaa

SEQ ID NO: 26261 - DNA, 552 bp, Zea mays
  Peptide Sequence Number=SeqID_68040
atgttgttgaatgaggcggcaagggatgcctggtcccaaccgccacccaacgaaaaccaaggggttgaggcgggggtccccaagaacaggaagagaggcggagccgacgacagaaagacggccatgcagaaccatcgcctcaaccagtggggccaccgcccccgcgacgccctcgcggggccggtgaccgccgtcgaagctaggagcctaacgaggagctctaggggcagtgggggtaggagggtgcgtgccccccccacccgtcgtcgaagggcgaggggcctggccggtggaggacacgtcgtggtggacacgagggactcgacgtccatgggcggtgttggtgacgactcgctaggtgacgtcgccggcggcggcgcgctgatgcagggtagtgggagccgcgagctggaacaagggggaggaggaagcggtcgccgctgggaagggagggaagccgaggggcgggcgggtgccagccatggtggctggaggacaggggaggtggaagtgccagtgactgctacgggagggagaggaaaacctagctag

SEQ ID NO: 26262 - DNA, 462 bp, Zea mays
  Peptide Sequence Number=SeqID_68041
atggctaactgggcctacgacatgggtaagcaagccggcccatctatgggcgtgcgcggtccatttaagggatggcagttagggtttccaaccctaactgccctcaccagccgccgcttgccagccgcagggcgccctcgacgagccgccgcaccggtctgcgtgctgccgcgccggggccgcgtgctaccgcgccgggcgagccgccgcgccgggctggccgccacgtcggggccgcgtgctgccggggcgcgccagggagccaccgcgctgcgcgcacccgaggccgggcgagcccgtgccgcgtggagtgggcgagcagccgcgccgcgggtctgcaggggcgtgcgagccgccaggggcaagcccgcgccgcgcctggcgagcagaggccgcgcctggcaagcagccgcgcagggcggacgagtagctgcgccgcgggccctgtcgaggctgggctag

SEQ ID NO: 26263 - DNA, 1110 bp, Zea mays
  Peptide Sequence Number=SeqID_68042
atggggttcccggttcttggacggctccttcaactgggaatgggggcggctggaagcgtccacatcccggatggcgcacggttctgcccgcgacaccacccgcgcccgtctctccgaagccgcccgcgtctctacccgagaccccgaccctcccccgtcgccgcgctcgcgctcccccgcgacagccgccatgcgccctatctccgccgcctccccccccccaccccgcccgcccgagacccgccgtgttgcccgcctcctttcctcgcgccggcgcagccccctgtcgccgcggccccttccccaaacagcacggcaccacgtgctcccctgccgcgcccacactctccttccccaaacagcacggccccacatcgctggttgcctcgcctcgccggggacccagtacgacggtcagggagctggtgggtgggggagacagggaggagtggaggaggaggtcaagctcaacatgctgccttccccaccgacaccgacgactcactccacaacccggatctggggcccttcctcctcaagccatggtattgggcgagggtggcgccgcctcgcgtgcttgagttcgccgagcgcgccgccagggtgctcgagcgaagaggtgagggcaccgagctcgagctcgccatgaatctccacatcgctgctggcatccaccaagcccgcccctccctcgccgagacatcgctgtcaccctgcgcgcctgcccatccccgcatcacacccgggaggcacgcggccccgaggatccccacgctcctccccacgccgatccgccccttcctcctctccgtccgctgcgcgcgccgcgtcactctcgcccccgccccgtctgtctcgctgcgtccgctctccgtccaacttcgccccgcgtccgctccatccatggcagaactgcaagccatgcccagccgcgtccgctctccgtctgcgcgcagatccgcgcgcataaccgcccaacttcgccccgcgtccgcgccatccatggcagccaccccggatctgcgcgccccagcctccatggaagccctcagcgcgcagaaccttccaactgcgccccgcgtccacgccgtccatggaagccgcccctga

SEQ ID NO: 26264 - DNA, 167 bp, Zea mays
  Peptide Sequence Number=SeqID_68043
atggaagccgtcgctaacctcgatccaactgccaaatacggtgtctcccacccggatctgcgcgccccaaattatgatcatccggggcggacctataagatgtcaagtgtgtacgccccaacaacccagagatgcggctcgacgctctccatcgtctggtataccag

SEQ ID NO: 26265 - DNA, 720 bp, Zea mays
  Peptide Sequence Number=SeqID_68044
atggtgggcggcggagggcattcgtcgatggaccaccctggcgccaaggacctcgagcgcggcgagctgcgccgtggcgcgcctgagtttgcggacggcgacgatggagacggggaagaaagccagtacttctcggacgcggaggaccggtcgtggccgtcgcactcgcgccacgactccaccgcctacgaggactacgtctcgctgtgcgtgtccgcccgcgcgagctccgtcgacgccgacgccgatgccgacggcgaggccgtcagacaacactgcaggaagtcgtcgtgcgtgtcagagggctcgctggacgacgttgacctggaggccggactgagcgagatcatcaaggccagccctgagaaggccgaacagaactgtcgcatttgccaccttggcctggagagcacggcggtcgagtccggtgccggcatcacgctcggctgctcctgcaagggggacttatcctacgcccacaagcagtgcgccgacacctggttcaagatcagaggcaacaagtgctcgacatgcaaatatgtgatctcctctgatgatccggaagattgggactataggcagttggataatccacgtcacttgctgcatggtattgtacatgacaatgggtttggtcaccttgttcggataaatcaaatcagaacattcatccagatgaggactaacttgaaggtggtcgataactctggggccaagtga

SEQ ID NO: 26266 - DNA, 342 bp, Zea mays
  Peptide Sequence Number=SeqID_68045
atggcaaatctgatggggagaaacagaaaagtcaagaaaaggcagttccttgaatttttcaaaaagaaagatctttttaataatgacctcggtggaccctatgcatttcttgaggcatgtgttggcctcaatgggatgatgcttggtggacgtgtacatactgctgtgcatgtgtttcctaattctcctgtggagcatgaggcaggcaagaagagagccgctgaaagttccgtgctgaaaactcctctatctgataagaaagcaaaagttgccacaccgtcagctcagaagatagttgtgccattgaacagactaacaaaactgtcgtcaaagattgtatag

SEQ ID NO: 26267 - DNA, 306 bp, Zea mays
  Peptide Sequence Number=SeqID_68046
atgtgctggcgaacgacgtggtgcccgcccgacaccgacaccgacacggcgccgccgctgcgcgcggacggcgtcgacgacgacggctacgaggagctgccggtgtcgctaccgccgcatgtcccgagtgggctgtccagggacgacgcgctgaacgcaggcggggaggcaacgccgttcacggtggagccgcaggtggtggcgccgccgccgtgcaacggtggcttcgacatcggagggccgtggctcatctttgtctgcgcgtcgtccgtctacgccaaggtggcgggccctttccggtcgtag

SEQ ID NO: 26268 - DNA, 228 bp, Zea mays
  Peptide Sequence Number=SeqID_68047
atggctggccgtctccagctgctgggctcgctagtggccgctggccgggcaggcgaggcggacgcgcggctcggcaaggccgggcggcagcaccagagtgacgtgcatggctggggtggctgcggcaatgcagcagccatgggcatggttgggccgcaggggctgcgagcggggctcgctggtggctcgccagagaaggagcgagcaggcagcacagatgctctttag

SEQ ID NO: 26269 - DNA, 609 bp, Zea mays
  Peptide Sequence Number=SeqID_68048
atggcccttggtgacgatgcagtgggcagtgacaggaaggacatcagtgatgattttgcttctaaggtatcacattccgttgatgactttaccgctgagataggagagctaaacgttgctttggctagtcatgataagttgcttaggtttgatgctcgagagaggaaagagtttgaatccaacttgcagactgagctagctgagaaaaacgctaggatagcctcacttgagaagaaaccttctaccatccccaaaattgtcaagctcactccacccaaatctgccacccctattgtgatagatgtagttcctttggagcctatgagagctccacctcagaaacaagtgtggtgtccaaaacctaaccatctcaggaacatacttggcaccctgccagacatctctagtgatcaccctcctagagcaccccagccacccaaaaagctcgagtccaacaaacagactccacctaatatagaggacggagacctagagaacatgtggctcatggattccagtcgtttgcgccatgtgaacagaagctccaaatggttctccaacctcgactccatgattgataaggaatacatcacattcggggataagtag

SEQ ID NO: 26270 - DNA, 237 bp, Zea mays
  Peptide Sequence Number=SeqID_68049
atggagttacgtcaaggcctggacgtggtgaagaagaggacattgccaagggcgagatggaagagaggatattttaaaggctggtataagataaacatcaaggtaagatatagaggtggtaaggatcaaagttataatgatgaaaagcataacccgtggacagagttaaggcaagactcgcaaagtgatgaagtggagaaaacaatcaaggataagataagtgaggtttcgacataa

SEQ ID NO: 26271 - DNA, 750 bp, Zea mays
  Peptide Sequence Number=SeqID_68050
atggctcctcccacccccgcgacttcccacctcctccatcctggcgccccaaccctccccaaccccacgccggtgtctagtgcggacccgacagccacccccctagcaggccaccttgggcgacctggcctttctctccccccggcgtcgggggcttcccttctcccgtcgcgtgaaggtcgttcgaaggcccagcgttggaacgacgtcggcagtcctgcttcttccatcggggcggcctctgccaccaccggccgacgagcctcctacaaggaggcgctggtctccgtcaaggcccctgttatttccgcggaggctgtcgtcgtcaatcatgacgtaaacgtctccgccctccaaggcctcctcacaggacggttcccgctgaccttcgtggcaaatgtttcaattgttcctcgccctcccaccgcgctgcagagtgccgtcgacggattttcccctgcagagcaagcccctccaccgcccccgccggacagccctgctgatgatgatcgtgatcatgacctccataggcggcagaggtgtaggctgccggatcatccatcttcttcgaccccagtggcgtccggttccaatgcggctgtcgtcgcctttcgcgggccagtgcatacgcgccttggatcgtgccaaactaatgttgtggtcccggtggctggcgtggaaccggtggttggtgtgacacccgatgcgaccaccccctcggcttctgtggaatcgacgcggccgcagtaa

SEQ ID NO: 26272 - DNA, 1167 bp, Zea mays
  Peptide Sequence Number=SeqID_68051
atgcgccaagggccacaccccgtaggcaatgaattcctcgaccaggtcgcgccccgctactcaggcgggccacatatcgaagagccccttcgtcttcgtcttcttctgccacttcgaattgtggaaacgccacataacaatgtgagcacaaaatggcaggggcaaactcggcaggccttcgacatccccgggagccacataaaaccaaaagtcccaccaattgccccacttattcctagcataggggactatctcgacaacttcagccgaggtcttcctagtccttggcgtgatggctgcagttcaaccaccgccaagtcgctcaacgtctcctcggacgatggcgtggccgacgacgcgctcgcaacagacgaagaagaagacattgtcacgtaccgtcggcggtggcgcacggcgcggagcgacgcctcaggaaacccgcaatcccacagtaacacgtccaatcaacggtcacatttcaaaaacccccgcgggaccacttcgagcgagggcagtgttttcaccatctcaaggcagtcttcgacaccagctgacttggtcgaactggacccttggggtgaaggcgaacatgccacccatcgttcgatgacatcaacctcaacattctgcagaacgaaggccccgccggtcagactgcggacgtcgtccatgcgaaggcccaagcgccccccttcgccgcatcaagtcgagacgaagacacccaacgacttcaaggatcggacggccgaggccgcgaaaaccataaggttttgtctccctcagcgcgaggaggggcccatgtacaatttggcccatgttgtagggccccgccctcggatgccgtgtgggcagagcgggttgggccgcgtctgtaataaagtatccagctggcagttgtgctgcttgtacagagagaggctggcgacgtccgggcctggtcgggcccacgtgatcttccgccgttctggaggcgccggtggccgccgcctcaggttgcttcgccagcgcgccgtgccagcgggggagatggcagattcgcgcaccttatcgccgccccgccaaagaaaactcctgcgcgtcgcccggacccgccgacccgcctgcccgcctggtgctcgacctaatgccgcggcgccccccggcatccaatctttatatgaaggctag

SEQ ID NO: 26273 - DNA, 582 bp, Zea mays
  Peptide Sequence Number=SeqID_68052
atgaagattgttgggaagtatgctctgaagacggagactttaaggagttgggatattcgcggttataacgctaggttgaaccacgtttataagttgaaccatttgtcgtatggtggttacccgaagggagactgtgccgacattgctgaccgccgagggaaacaggcaatgccattggctgatgagggtccctcatgggacaaggctccggctcctggggaaacgatatcttcgcctcgagctccgggaaacatctgcgcgaatgctgaagcagtgatggagaaggatcgccaagatgcgcagcggaagaaacgacgggctcacgtcaggttggcggacccgaggcatgaggtgaagatggcacggcctagcgcgaagcctgccgccccagacgccggggcagagtctggacagctggctattgctccggcggcgatgtctgctggcccggtggacgcgacgactggggcgaagggtgacacgggggcctcggaggacccgtggtctaaattctgcgccagcggcgaaatcgtttctactgctgctgcgatggcgtggccgcctcagtcgcacagcagctga

SEQ ID NO: 26274 - DNA, 822 bp, Zea mays
  Peptide Sequence Number=SeqID_68053
atgcggtggcttgagggaaggattgagcacctccagacgcaacacgcggaggcagtgagggacaagtcggcggcggagaataaaagccgcaacttggttgagaagctgtcggcggaaaaagaaaaggaagacctcagttgtcggtttgctgaggaaaaagagggtgcggaaaaagctcgcgcggtggcccaggctgcccgcgcagaagctgacgccgcgcgcgctgaggctggtcttgctctcaagtgcgccaccgacgcggagtcggagctgaaaagtctgctcagctataccgagaagacggaggcctccacccgcgccggggttgagtgtgcgcacacgttgttcgtggatgcgtaccgcgagctcggcgcacagaccgccccttttgatagatctggggaggaggtgggtcttcgctttcttgggtggctgcgggaggagctggaatcactcccgtccatggcgacgggcctcatgtcctatgcatcgcttgttacctgcgaggggcagcgaatgccttgtcccccgagagatatgatgaatgaagaagatgtcgaggacctcgccggtcttgagagctcgatgacccggatgggtggcgcgaaggcgggagctgaagggcactcagcgcctcaggctggttccagcgaagaccctgtggcggccccaaagattctaggtccagcttgcggttttgattttcattttggtgataggcgctttgaagagatcggcactctgtcaccagcttatgctttagaggtcagcattttgtcctttggggttaaggattcattgggtgtagccactgagctttga

SEQ ID NO: 26275 - DNA, 147 bp, Zea mays
  Peptide Sequence Number=SeqID_68054
atggcgtctgcgcttgtgctgctcctgcctcctgtcggctgccgctcgcagtttgtactgcggaatctcgtcatcacgttcgagcaggccactgcggcaccatttctaggaacgacgagcggctccgggcggtaccggctgccctag

SEQ ID NO: 26276 - DNA, 180 bp, Zea mays
  Peptide Sequence Number=SeqID_68055
atgaggaggcgctgcagctggctctcgtctttgttccgccctcgccgggctgaccgctcgctcccgcaaccagatccacagggtcccgattccgagcccaaggtataccagtggccgctgcattcgtctcttgctgtggatgtttgtttgattgtttcgggaaacgacggcaaccattga

SEQ ID NO: 26277 - DNA, 1014 bp, Zea mays
  Peptide Sequence Number=SeqID_68056
atgagtttcagatccatcgaacaattacttaggaggaacagcaaaaccaaaatttctcgcaatatcgttgaccgcaaccatgaccagaaggaagagcagttagtacaatccttgagggagttacttcttgcaagcaaacagctcccagataagtttgatgactactatgtccttctacgctttcttaaaatgagaggcttcaacatcttaaaagcaaaagagatgttcttaaatatgttaaaatggcgtgaagattgttccgttgatgccattgcgaacgattttaaatttgaggagtatgatgctgtgaaaagatgctatcctcatggatttcatggagttgacagatttggtaggcctctctatattgaacgagttggctcagtggatctcagtaagctcatgcaagtgactactattgatcgatatgtaaaatatcatatatcagaacaagagaaaactatatctttgagatatcctgtttgctcacttgtggctaaaaagcacatagcatcgacaacagccatatttgatgtgaaaggactggggttgaataacttttcaaaatctgcaagagagatgtttgcagaaatccaaaagatcgatagcaattactatccagagacattaaatcaactttatataattaatgctggaactggatttagagcactgtggaaggtattgaaaacattcatggaggcaagaacattagcaaagattcaggttctggggaccaattaccttaacacagtattagaagctgttgacccaagcaatttaccagaatttttaggcggaacttgcacttgtccaacaggaggatgcttactccaagataaaggaccctggactgacccagaaatgattcgtgcttctaaggaagcattcggtaaaggtcagaagtctttcaatgaattggctgccacaattgcctgtgaaagctttacaggttgtcagactttcactgtcacacccggatttcggggcaccaagacccgggcgcgaacataa

SEQ ID NO: 26278 - DNA, 474 bp, Zea mays
  Peptide Sequence Number=SeqID_68057
atggcgagcagcaaggaagaagccctgatagggaaggaggctcgtccatggagggagctccgcggctggttgttgagatccgcccgcgagcccgatccatggcggctgggttctgggcgcacaacagaggggaaaggcgctggtcaaagcggacgcggacgcctgggtcttataacccaatggtcgggcatccgaacggaaccggggagatcgcggaggtggctgagctcgcgcccacggagtccgcgcctccgcggcgatggacacacgtcctgtgcgcgcgatgcgcgggccgttgcgcggaagaaggagatcctgacggcgcaggacccaccagccagtgagcacaagggcgcgcggagcgactgcccacagggcccagctgtcggcacgccgcgcaccatcggaattgggccgcacggatcaaaagaagagctgggccgaatgggtggctgccggcccatttcgaaatag

SEQ ID NO: 26279 - DNA, 336 bp, Zea mays
  Peptide Sequence Number=SeqID_68058
gagccttccgcaaaacaagtagattccacttctcgtaagagaagaactcttggcatgttgttcaaagatgatcaggttggatttgatacaggtgaaaatattctacggaaacaagtcgatgaacagatcttggagaagatccgagaacttgaacactgcgctgctaagagtggggaggtgagcaaaggaacccaaattcaagaaattgcagccaagaaaatatgctacatagcaactgaatgtagtttctttgtagttcagaccctgcagatattaatatgcaagcaacaagaactcactggccacatcgaacagctgaggaaaatccttcagtga

SEQ ID NO: 26280 - DNA, 231 bp, Zea mays
  Peptide Sequence Number=SeqID_68059
atggcgctcttccgcaagttcttctaccgcaagccgcccgatgggctccttgagatcaccgaacgcgtctatggggaatgctctctgcgtggtggtctgatttgcgttccattgtcgaatgccgtggtaaatgtgtcggggcaatgcggcgttactggaaaatgtttcggtgttttgttttttccccttattggtttgtcgtgcaaacgtcttttactttccttctggtga

SEQ ID NO: 26281 - DNA, 876 bp, Zea mays
  Peptide Sequence Number=SeqID_68060
atggagccgattacatcgaagattccgctgatggtgatagaggggaaccatgagattgaaccgcagggtcacggtggagaggtgaccttcgcgtcttacttggcacggttcgctgttccatccaaggagtctggatccaacaccaaattctactactccttcaacgccggtggcatccattttatcatgctcggtgcctacatcgactacaaccgcacaggagttcagtactcgtggttggaaaaggatttgcagagggttgatcgacgagccaccccttgggtcgtggctgcttggcacccaccttggtataacagctattcctcgcactaccaagaattcgagtgcatgaggcaagaaatggaagaacttttatatgaatatcaggttgacattgttttctcaggacatgtacatgcatacgaaaggatggaccgagtatttaactacacattggacccctgtggcccgatttacatcggcattggagacggcgggaacattgaaaaaattgacatggatcatgctgatgaccctggaaagtgtccctcaccaagtgataaccaccctgaatttggtgggctctgccatctgaacttcacttctggccctgccaagggcaaattctgctgggaccgacagccagaatggagtgcatacagagagagcagttttggtcatgggattctagaggtcctgaattcaacatatgccttatggacatggcaccgtaaccaggacgcatatgcagagaacagtgtgggagaccagatctacattgtacgacagcctgacaagtgccttctgcagccagctaatagccccattggaggatgcccttctctaagcggcagaatgcaagatgcaccttactga

SEQ ID NO: 26282 - DNA, 198 bp, Zea mays
  Peptide Sequence Number=SeqID_68061
atggcgcggtgcaccagacagtctggtgcaccagtagacaaggaaggctgggagcttccaaatgaagctccaacggctcctaggccctttggggctataaaagggacccctaggcgcatgaagcagcacaccaagcctccattgaacatcctaagacgcctagaccccgcaagcacgcatccggatcattgtgtttga

SEQ ID NO: 26283 - DNA, 374 bp, Zea mays
  Peptide Sequence Number=SeqID_68062
atggcgcactacgcagcagcgcgcaagcaggggaatggagcttgggcgccgagaggagtagccacggccatggaggcccttgctgctgggggggcgccatgggaaagctcggcctcggccatgggaaagaaggggaaaggaggaaggggagccagctgccctgcgtggaagaggaatagggagggcgccgggcagaggagatgggagcagggagctcggtggccaccatggctaggctatggagctcgcaggggcgaacgccaaaggtgccctgcgcgcgacgaggaggaagccaacagagaactctgcggcgagcgacagctaggggaaatggagatccgcgtgggggttgctggcaaactcgcggcagggag

SEQ ID NO: 26284 - DNA, 255 bp, Zea mays
  Peptide Sequence Number=SeqID_68063
atggctggagatttttctgcgccatgtacagggaaggagagagctgtgcgtgtgggggagaggacgaagaaggttgtggcggctgggaagaaatggagggtgggagtgaaaaattgccaatttgcaagggagagaggtgctatttatagaaggggcactaggtcggagaaggcgaatcgtggtaatttaaatttcctgtcgatacagggttttgaaatcagattggatacagagatattaagccggatcgaatag

SEQ ID NO: 26285 - DNA, 1656 bp, Zea mays
  Peptide Sequence Number=SeqID_68064
atggactaccccagacaatacgagggatgccctctccttacaatagaaatgattcatcattacttgaggtcaggggagagttggctctctctgggccagcaaaatgtcctaataatgcattgtgagcgtggtggctgggctgtacttgcattcatgttagcaggactgctgttgtatagaaagcagttcattggtgagcagaggacactggaaatgatttacaggcaagctcctcatgaactggttcagttgtggtcaccattgaatcctatgccttctcagataagatacttacattacatatctcggaggaacgtgagttcagagtggccacctcaggaccgggcccttactttagactgtgttatactaagaaacattccaggcttcaatgaagagggaggatgtagaccaatattccgtatttatggacaggatcctttacctgctacaaataacacacctaaggtgctgtttgcaacaccaaaaaggagcaaatatgttaggctttacaagaaggcagactgtgaactgattaagattgacatccattgccatattcaaggtgatgttgtccttgaatgcattagcattgatgttgatcaagaacgagaagagatgatgttccgagtcatgttcaatacagcctttatcagatctaacattctgatgttaaaccgtgatgaaatcgatatattgtgggatgccaaagatcgattcccgaaggaattcagagctgaggttcttctttcagaaatggacactgccaatcagttaggtcccatggaggtggcaggtataggagagaaggggggtttaccagttgaagcatttgcaaaggttcaagagatgttcagcaatgtggactggctagatccaactggggatgctgcagtccagcttttccagcgacttacttcatcagaaaatattcagctgaggcaaggattcttgtccccaagtaagaaagaagcagaatcgttagagcttggttcaatctctccaatagacaagcattttgacaatgttcaacaagaaccaagcaaagttgaacaccccacagtctatgtgaacaaactggaaaatgttggccaagagagattggtcttgttggagcaaaccactaattctgaagttaaaactggaatttctgttgtccaagaaaatcctggctctctagttcacaaggttgacagtaacgcaaaacagtcaatttcactggaaaaggctgttccctctaccatgaaatctattgatccagttcttaaggatcaaaatgctaaacttgatgagcaacatggttcaggccaacactcttttcccactataattatgtcacagcgatttccaatttctagttcatgccctgctctttctggctactccagtcctagattactttcagcttgtccaagatttaatagtgcaccttcagcccttggaattacagctctgttggaagaccatgctggaagtgctgagaatcgttgtggttcaactactttgacctttgacacaacaggtactcctgttgtaacaaagggtatgccactgctacgccctccaccatcgccactagatttgctggtatcagattctactatgatgtcagaagcaaaaggctcatcccaacctaccctcaacaattcaggttaa

SEQ ID NO: 26286 - DNA, 453 bp, Zea mays
  Peptide Sequence Number=SeqID_68065
atgggtaagagtaacaaacgcaagcgcgagccgactcctccatcggaggacttcggcgattcggaatactcggaggaggagttctcctccgagtccgaggggtcttcggctcccgtctctcccccggcgtcgtctgacgattcagatgattcccaggggcttgccgcagaggtctggacttatatccggtccatcgagcgctccgagctcgagggctcggatgagacggagtactcctcgtacgaggaggactcttcagactcgtccgaggagggcggcggcggcgatggcggggacgatgacgacgatggaggcgacggtgacgacgacgacgatggcggtgatggcggcagtaggggcggcaacgttggcggcaagggcggccacggcggcagcagcaggggcagcaacggcggcggcagcagcaagggcagcaacaaggccagtggctag

SEQ ID NO: 26287 - DNA, 357 bp, Zea mays
  Peptide Sequence Number=SeqID_68066
atggcgctgctgaagcccgccgccaaggccgcggcgcggtcggcgccgtccaccagcagcggcagcgtctcgctgcgcgtccggacggggcaggccgccaagaaggctgcgctgtccgtcagccaggccgtggccgccggcctgggcctcggcgccgccgccgccgccgggatggcggccccgcccgaagcctccgccgccgtggtgcaggacctcgcggcaatcgccgccgccgcgcccgccgacgacagccgcggcctcctcctgctcatcgtcgtcgcgcccgccatcggctgggtgctcttcaacatcctccagccggcgctcaaccagctcaaccgcatgcggtccgactga

SEQ ID NO: 26288 - DNA, 447 bp, Zea mays
  Peptide Sequence Number=SeqID_68067
atggcgcggcgagtgccgagtgtcggcatccagtgcgcacaacgcacctcctccctgctctctcctgtaactcagcagtcatggctcacccctgcagcagcagcagcgtcgctgccctgcctcctcctgctgctcgccgcagtcgcagcggcgctccaggccgcgggcgctgcgctgtgtggtggccagcggcttcatccgcaaatactgacgcgacatcgtacccgtcggtacaatcccacacctatactggatcctggatctgtcgtcgggtattctatatccaacggatacccatacatatatagagtggagttgtccctgtttgatttacttagtttagagcgaatagtgaccgtcgagggagaacattcggcctccctgtcttccatgcatctttcagatgcggttataccgcggcttggtcacttggattgcatcgtataa

SEQ ID NO: 26289 - DNA, 753 bp, Zea mays
  Peptide Sequence Number=SeqID_68068
atggccagcgccggcgggcggcggcggtccaaggcgaagccgcgggcgagggccgggggcaaggcgaagaagaggaccaagtaccttagcctcaccgagctgctggttaaggcgcacgcgcaggtgggagcgtcgccacggtccccgtgggaggacgaggaggcggtggcggcggaagtgaagccggaggacgacgcctgcggtgacgacgacgacgaccaccaccaccaccaccacgaggcgtccaccctgttcgaggccgtgccggcgccgtcgctctccgacatcctgggcccgtcgccgcccgagtcgccggccggctccggctccggggcgctgccgggcgccgaggaggaggacctcccgcgccgcgcgctgcggggcagggccagggagcgctgggtgtactgcaccggcgggccttcgccgccaccgccagcgacggcaaccggcaccgccaccgccaccgcgtcgccgtgctcgtccgccgcgagcacgggcgcgtcgccgcgctcgctgctgctcaagctggactacgacgagatcctcgcggcgtgggcgggctgcgggccgctctacatcggcgccgccgtcagcccgcgtccggtcctcgcggacgctgaggtggctgtaggaagggcggagagggtgaggcggtacagggagaagcggcggcggcggcggctcttcttcgcgaggcgggtccggtacgaggttcgccggctcaacgccgtcaagcggccgcggttcaag

SEQ ID NO: 26290 - DNA, 2163 bp, Zea mays
  Peptide Sequence Number=SeqID_68069
atgacgtcgccgaggaaggacgcggggttcctgacgcaggaccagcgggagaagctgcggatcgcggtgcagaacgcggagacgcagtcgctcgcctccccgcgctcgcccacggggggcaccacctccgcgctgctgcagcagtacgagctgcagatgctggagcagaagcgcgccgccgcggccgccgccgccgcccggggcggcggcggcggcggaggtgggcccaggcacgtgcgccggtcgcattccgggaaggccatcaaggtgaagaaagatggagctggcggcaaagggacttggggcaaactaattgagactgatgcagaggcatgccttgatcgaaatgatccaaattatgacagtggtgaggagccatatgagttagttgaggcccctgtttcaaccccactagaagactacaagaaatctgttgtccctttaattgaggaatatttcagcaatggggatgtaaaattagctgcttctgatcttaaagagttgggtcatgatggtttccactgttactttgtcaagaagcttgtttccacagcaatggataggcatgacaaggagaaagagatggcatcagtgcttctgtcgtatctttatggcaacgtggtcagttcaactcaaattaggctgggatttgtgctgctattagaggctgttgatgacttggctgttgacatacctgatgtggttgatgtgctcgcccttttcattgcacgtgcagttgttgatgacattctgccacctgctttcctcagcaatgcaaaagtgagtctgtcaggatcttcaaagggtatgcaggttgtacaaattgcagagaaaagctatctttcagcaccccaccatgcagagttaattgagcgacgatggggtggttcaacccacatcacagtagaagaggtgaagaggaggattgctgatcttctgaaggaatacatcagaaatggtgatacagctgaggcttgtaggtgcattagagaattggcagtgccgtttttccatcatgaggtggtgaagcgagctcttactcttggaatggagagtccagctgctgaagctcttattgtcaagcttctgaaggaagcatctgaagaatgtttagtaagctctagtcagatgatgaaaggattccaccgtgttgctgagagtcttgatgatctcattcttgacataccatctgcaaagtctgaatttcagttgttggtatcaaaagccatttctgagggatggttagattcttcctatgtgaactcaggtgtcaacggaagcgttgaagacgatgaacatgagaagctggctaggtacaagagggaggctgtatccataatacacgaatactttttctctgatgatacaacagaggtcatccgtagtgtcaaagagcttggttatccggaatacaatccgatcttcgtcaagaagctcataacaattgctatggaccgcaagaacagggagaaagaaatggcatcggttcttctcccttcattaagcatggagctgttctcgtctgaagacatcgccaagggatttgtaatgctccttgaatctgcagaagacaccgcgctggacatattggatgcctcagatgagctgggactgttcctagccagggctgtgattgatgacgttctcgcacctctaaacttggatgagattagcagcaagcttccaccaaactgcagtggggctgaaacattgaacatggcacgctcccttgcgtcggcccgtcatgccggtgagaggcttctgaggtgctggggcggtggaaccggatgggctgtggaggatgccaaggacaagataacaaagctcctggaggagtatgagagtggaggcgatgtaggggaggcatgcaactgcatccgtgagctgggtatgtctttcttcaaccatgaagttgtcaagaaggcgctcgtgatggcaatggagaagaagaacgagaggaccctgaacctgctgcaggagtgctttggtgaagggatcataaccatcaaccagatgaccaaggggttctcaagggtcagggatgggctcgacgatctggctctcgacattcctgatgccagggagaagttcctttcctatgtgcagcgcgcgaagaagagtggatggctcctgcctgggttcggtgtggcatcttcggcttga

SEQ ID NO: 26291 - DNA, 324 bp, Zea mays
  Peptide Sequence Number=SeqID_68070
atgggattgtcggcggccaagcgagcctacatccgatccatcgagcgcgcggggctcggggggttggatgactcagagggggaggaatccttgggggactctgaggaggaggaggaggactccgaggaggacggaggcggcagcggtgatgaggacgacggcaacagtggcgcgtgcggtggcggcgacgacaccggcggcgacaggggcggctgcgacggtggtaacaccggtgagtctgatcttcttcatcttgtccaaatcggtgttctcccgccaaggagcaatgctcttgggggatgtggtaggggatcactgtcctga

SEQ ID NO: 26292 - DNA, 144 bp, Zea mays
  Peptide Sequence Number=SeqID_68071
atgggcaggtggaataagccatctatcacggggggcgtcttcatgcaccacaagggtgtagagcacaggtacaatgtcgacgacgaaggtgaaggtcatgcgggttcctgtcgatggaccgagagcgatgagggacgagcataa

SEQ ID NO: 26293 - DNA, 198 bp, Zea mays
  Peptide Sequence Number=SeqID_68072
atggcgccgccgtgtgtggcctatgctgcctggctcggtcggcggaggagggaagaagtgaggtcacgaggagattcgaagcccaactcggttaagtacctggaaacacaagatcattttgttaattggaacatggagcgaccacccgagataacagtgctaccacaagggtggaatgggacacccttggctgattaa

SEQ ID NO: 26294 - DNA, 405 bp, Zea mays
  Peptide Sequence Number=SeqID_68073
atgcccagtacctctccactggcggcgcagcaggagcaaagggaggtcggcgagctggggaggggtcggcgggtggtcgaagcgagtaggagaggtcggcagtggtcggtcgagcagaagagacagacggcggtggtcggcgaatggcatttctacggcgggtcatccggggcgtcgagtagaggtcggtcggtcggcggcggcggtggacgacgacaaggagagaggagaagcgtgggagagctcggggtggccaagaatggatccacggcggtgcagacctctatttttagaaaatgggagaggagaaagggcgctggggacaaggagaggcgaggaggcggcaccatcaaagccatgctgatgaccatggtggatgaggtgggggagagggagagtcggtag

SEQ ID NO: 26295 - DNA, 411 bp, Zea mays
  Peptide Sequence Number=SeqID_68074
atgaagatgaagaacagggaaatcaagacaacaacaatgaacctaaccaatatcacaatcaagatgatgaaatttgacggaatgtggcctatttctaagcattacacttcaatgttcgagacaggctactttcccaacccgctgcaaaatttgctacatgagttgggcaactatgtttgtcctctctataacaatcgaatggtttctgagccccgtcgggtgatgagggataagccttcgtggcaaggtcttaactctgacatgaacagtgctaccctagagatcttgaagatgcatgagaaacttgaagaagcacatgaaaggattgctgagttggaggctcaacttgaaggaatggagcctccagaagttgaagcccctatcttagctctgtccccgcctcgcaagtga

SEQ ID NO: 26296 - DNA, 204 bp, Zea mays
  Peptide Sequence Number=SeqID_68075
atggcgtggaatgaaattgggaccgagattagggaggtcggcgccagggatcttggcgccatcctcgaagccagggatctcgacaccgaccccccgccacgtcagcaccacatcgtcctccagggtaaggtcggcgccattattattggcgccaagccaggggatccatttattgaaatgaaacatgaaagggtgtatttgtga

SEQ ID NO: 26297 - DNA, 663 bp, Zea mays
  Peptide Sequence Number=SeqID_68076
atgtccttcctcataacggcagcttctggcaagccgggttcctcggagcctgtaacactctcacgtggatcgacgggatctatgttgtcgtcgccgccgcctagcgtctcttgcggcgggatggtctccctctccggcacgggcgacttggacaaggtgggaggcgagttctgctgcatcagcgcagacgtgtcgactgggctggctgagaagagaggaaggcagctacggttagattcatggggaggatggataaaggggaactcgagcgcacgcaccgaagtctgcgaagagcttagcgagggaaacctctgcgatcaactggatccggcagggcacaaactccccagcccctacacctgcaccgccacggtcgccgttgtcagagcgcccgctgttggggtaggtggcggcggtgccgaggagcaccacgctgcacgccaggttattacggaaggaggaggtactgggagttctaggccaggtgggaacggagttggacgggaagaggtggaggatgcgggcatgcggggcgtggacggttctgcagaagtgccgaggttgaaacggcgcatggtcgtggtcatgggggaggaggtcgaggtcgtgggcagagtgcggcgcgccgtcgtggagtggagggcaccaccacaccgaagatga

SEQ ID NO: 26298 - DNA, 426 bp, Zea mays
  Peptide Sequence Number=SeqID_68077
atggcgaatcaagggatagttacacatcgaggcttttcgaaatgctactcttctggctccctcctggctaagcagttgaagaatgtgaatgaacacaaatgtcaaatctatggtgacactgtcgggttcttagcaacaggcgatatttttgttgcgtgcaacgaatgtgccttccctgtgtgtcggtcacgctatgagtatgagcgcaaagaggggaatcaatgttgtcctcaatgcaaaactagatacaagaggcacaaaggaagccctcaagttcggggagatgaggaggatggagttgatttggacaatgaattaaactatacagtatacacaaggcaatgtccaagggcctgtgttgcagctgtggggataaggggagatgttgacatctcttcgtattctcgacatgaaccccatcactaa

SEQ ID NO: 26299 - DNA, 369 bp, Zea mays
  Peptide Sequence Number=SeqID_68078
atggattactataactgtgatgaacttagtcatctttctcaccaatgcttcaagcctaagaaaaacaagtttaaggtcctaaaagatgacacaagtgatgatgagaaaaataaagccttcaagagaagaaaaggcaagaagagacaattccacaagaagggtggaaagaactatattgttggtaattggatcatcaacattgattcttcaaacggctcgtcttcatgcaaaagtggtaatagagaagataaggtggtcgtgcttgctattggattttcttctcctcatcatcaccaccaacatcatctacacacctatgccttatggccaaaggtggtcgaaaggtacaaggtgatgatgatagagtga

SEQ ID NO: 26300 - DNA, 1506 bp, Zea mays
  Peptide Sequence Number=SeqID_68079
atggtgggcgatgggatgaggacgaggagggggaggaggagcacctgtaggacggaggaggaggcacaccaggaagatgacactcagcaacaggtggagcagcaggccgttgtcgatgacgacgctcagcgggatgccataggttatggtgcctcagggggccacgaccgcaacccaatggcatcctcaaccttctgtgcagggaacacttccttggactggttgaacctcgacgccatgattcatggcgccgagcttggccacgtcgacgccgcgtcaacccgctgtcgccaacggagcgcgcacctcgcgccaagatctgcaccagctgacaccggcgtcgttggctcggcagaagcggcgttccgatccgagatggggggccagcagaacgcgctccaccagctcgtgtccttcatcctcggggcgtccgccgccgccgtcctgctcttcttcctcacgacggcgacgagcggagcgcggttcacggggatctcgagctgggccaacggaaccacgggctttgacgacgatgctcccgtccaggcggctcctgctacccgggcaaatcacgccgacgcaaagtttcttgacaccgtcgtctgtggatcctgtccggctcgatcacgcgtggtgaagcagggcgcggcggcggagcaggaggacgagctgcagcggctgctgcgcgcagtggcggacgaggaccggacggtgatcatgacgtcggtgaacgaggcgtgggcggcgcaggactcgctgctggacctgttcctggagagcttccgcagcggcgagcggatcgcgcacttcgtggaccacctcctggtggtggccctggacggcggcgcgctggagcggtgccgcgccgtgcacccgcactgctacctcctccccacggccgccgcgcgcaacctatccggcgagaaggtgttcatgagcaaggactacatcgacctggtctggagcaaggtccggctgcagcagaggatcctcgagctcggctacaacttcctcttcacggacgtggacattctgtggttccggaacccgttcgagcggatgtcggtggcggcgcacatggtgacctcgtcggacttctacttcggcgacccgtacagccctatgaacctgcccaacacggggttcctgtacgccaagtcgagccggcgcacggtgggcgcgttcgaggcgtggcacgccgcgcgggaggcgttccctgggaagcacgagcagcaggtgctgaacgagatcaaggtggagctgctggccacgcgcggcctgcgcatccagttcctcgacacggaacacaacgccggcttctgcaacaacacccgcgacttcaacacgctctacaccatgcacgccaactgctgcgtcggcctgggcgccaagctgcacgacctcggcaacctgctgcaggagtggcgcgcgtatcggcagatggacgacgaggaacgcgcccggggacccgtgcgctggaaggtgccgggcatatgcatccactga

SEQ ID NO: 26301 - DNA, 1104 bp, Zea mays
  Peptide Sequence Number=SeqID_68080
atgggactccagaaggcctatctccgtcgtatcgccttctttgtcttcgagatgtggcttgcaaccgtctttgccctgctcatcttgtttgcgctcgccagcatcggcaggtcctcgcgcatgctggagaagagctattacactgagactgaagtagcttctcgtggagatagtgtcacatctcaagatcctgccgagatgtcagatttggcccggctgctgcccaaggtggccaccgacgacaggacagtgatcatcacgtcggtgaacgaagcgttcgcgcgtcccgactcgctgctgggcctcttccgcgagagtttccaggccggtgaagggatcggccacctcctgaacaacgtcctcgtcgtcgccgtcgacgccaaggcgttcagccactgcagggccgtgcacccacactgctacctcctggaggtgaagaccatagacctcagctccgccaacaactacatgagcgaggcctacattgaactcgtctggaccaagctctccctgctgcagcgcatcctggagctcggctacaacttcctcttcacggacgtggacatcgtgtggttccgcaacccgttccggcacatcagcgtgttcgcggacatgacgacgtcgagcgacgtgttctacggagacgccgacggactggacaactggcccaacacggggttcttctacgtgaaggcgacgagccggacggtggagatgctgcggcggtggcgcgcagcgcgggcgcggttcccggcgaaccacgagcaggccatcttcaacgacatcaagcacgagctcgcccgcgacctgggcgcgcgtgtccagttcctcgacacggcgcgcttcggcagcttctgccggatcttccacatcgacatggccgcggcgtgcaccatgcacgccaactgctgcgtggggctcgggaacaagctgcacgatctaagggacgtgctgcgtcaatggaagaattacacgggcctgacgccgcaggcgaagaagagccagaagttcatatggaaggatccggccaagtgcgggactccggacaaaagaaaaaggacacatgaatctgagaaatgcactacatcagcatcaattgtgtga

SEQ ID NO: 26302 - DNA, 483 bp, Zea mays
  Peptide Sequence Number=SeqID_68081
atgctagccaccagggaaagactaacaacagtcacagcctttcccgagttcggcctcgggcgcaacagggagctctgcctcgttcgaccccaggcctcggcctcagctttggcctcgggagaaggtctccgcctcgaccaaccccgacctcggcctcagcctcggcctcgggagaaggactccgcctcgcccgaccttagcctcgggagaaagactccgcctcgcccaacctcggcctcggaccgactacgctacaggggatacatcattaccctacctctagctagccgcctcaggctacgaaggaacaagaccagagtcacatctagattactccggccacagaagtttttgaacgtaaaatgtatcataaaattggatcatttattgtgtaacaactcaaaagaaggcaactcacggttcatatcaagtaatgtgtaccttaagtctgcagcaaaccttgaaagaaaaataggacaatag

SEQ ID NO: 26303 - DNA, 1685 bp, Zea mays
  Peptide Sequence Number=SeqID_68082
aaaatgataatgttgatttacttgctaggattgatgagttgaatgtttctattgctagccttagaaatgagaatgagaaattaattgctaaggctaaagaattagatgtttgcaatgttacaatttctgaccttagaactaagaatgatatgttgcatgctaaggttgtagaattaaaatcttgcaaaccctctacatctaccgttgagcacacttctatttgcactagatgtagagttgttgatatcaatgctattcatgatcacatggctttaattaaacaacaaaatgatcatatagcattattagacgctaaaattgccgagcataacttagaaaatgaaaagtttaaatttgctagaagtatgctctataatgggagacgccctggcatcaaggatggcattggcttccaaaggggagacaatgtcaaacttaatgcccctcctaagaacttgtctaactttgttaagggcaaggctcccatgcctcaggataatgagggttacattttgtaccctgccggctatcctgagagcaaaattaggagaactcattctaggaagtctcactctggccctaaccatgcttttatgtataagggtgagacatctaggtctaggcaaccaacccgtgccaagttgcctagaaagaaaactccaaatgcatcaaatgatcatgttatttcattcaaaacttttgatgcatcatatgtacttactaacaaatccggcaaggtttatgcatccgggggctcaagttggatactcgacagcggatgcacaaaccacatgacaggggagaagaagatgttctcctcttatgagaaaaaccaagatccccaacgagctatcacatccggggatggaaatcaaggtgttactgtctttagaagaagtgatgattcaatagcatttaagggagtgttagagggtcagctatacttggaaaaatctcatacccaagagaccttaaagggattcttgagacgggctcaaaatgagttcggcttaaggatcaagaaaattagaagcgacaatgggacggagttcaagaactctcaaattgaaggcttccttgaggaggagggcatcaagcatgagttctcttctccctacaccccacaacaaaatggtgtagtagagaggaagaatcgaactctattggacatggcaagaaccatgcttgatgagtacaagacaccggatcggttttgggccgaggcggtcaacaccgcctgctacgccatcaaccggttatatctacaccgaatcctcaagaagacatcctatgaactcctaaccggtaaaaagcccaatatttcatattttagagtttttggtagcaaatgctttatccttgttaaaagaggtagaaaatctaaatttgctcctaaaactgtagaaggctttttactaggatatgactcaaacacaagggtatatagagtctttaacaagtcctcaggacttgttgaagtttcttgtgacgttgtgtttgatgagactaacggctctcaagtagagcaagttgatcttgatgagataggtgaagaacaggctccatgcatagcgctaaggaacatgtccattggggatgtgtgtcctaaaggaatccgaagagcctccacatgcacaagatcaaccatcctcttccacgcaagcatctccaccaacccaaaatga

SEQ ID NO: 26304 - DNA, 174 bp, Zea mays
  Peptide Sequence Number=SeqID_68083
atgaacgtatgtgagctcactcttgctgtctcacacccacccccacaggtcaagaacaggatctttaggctcgaagtctggtccaaccatgtgaaaaaaactctgatcgttacagaattcactaacaagacgaaagtacctttgatgaagcagtctaaagtgttctcctggtga

SEQ ID NO: 26305 - DNA, 1212 bp, Zea mays
  Peptide Sequence Number=SeqID_68084
atgacagaggtgaaggcatctggaaacacgtttggaaactactttcaggttgcaacctatggtgaatctcatgggggtggtgttggttgtgttatcagtggttgtccacctagaattccactcactgaggcagacctacaagttgaactcgatcgaagacggcccggacagagcagaataacctccacaaggaaggagactgatacatgcaaaattctgtcagggacacatgaaggggtgactactggaacgccaattcttgttattgtcccaaacacagatcaaataggcagtgatcaccgtgaaatagccaatgtgtaccgaccttctcatgcagacgcaacttatgacttcaagtacggtgttagagctgtacagggaggtgggaggtcgtcgggcagagaaaccgttggaagggtggctgcaggggccctcgccaagaaaattcttaagctcaaatgtggattagaggtgcggttctattctatcggtaatcccttgccctacatgttagccatggtagttattggccttggccaatgtgtaacagaagagcaccaccatatagagagcaacatcgttagatgtcctgatccagagtacgcagagaagatgatagacgcaatcgacagagtacgagttcgaggggattcggtcggtggagtgatcacatgcgtcgctagaaacgttcctcgcgggctcggttctcctgtgttcgacaagctcgaatccgaactggcaaaagctatgctttctattcctgcgagcaacgggttcgagattggcagcggattcgccgggaccgacttgacaggaagtgagcataatgatgagttttatatggataaggctggaagtgtcaggacacggactaatcgctcgggtggtgtgcagggagggatatcgaatggtgagattgtgcacttcaaagttgcttttaagccgacaccatctatcggggtgaaacagaacaccgtgtcaagggagcgtcagaacgttgagcttctagcaagagggcgccatgacccatgcgtcgcccctcgaggctgcgactgcgatacgaggtttgctcttgacgtggcttttgcagctgttcctgtggtggaatccatggccgcgttggtcctcatggaccagctgatggcgcacgtggctcagtgcgagatgttcgcgctcaatactgcacttcaagaaccagttggctctttctag

SEQ ID NO: 26306 - DNA, 1488 bp, Zea mays
  Peptide Sequence Number=SeqID_68085
atgagcatcgtgcccaaggagacgatcgaggtcatcgctcagagcgtcggcatccccagcctcggtgccgatgtcgccgtcgcgctcgcccctgacgtcgaataccgcctccgcgagatcatgcaggaatccattaaatgtatgcggcatgcaaagcggactgttctgacggcggatgatgttgacagtgccctgggcctcaggaatgttgagcccgtatatggatttgcctctggtgatccattacgttttaagagagctgttggacataaggatctcttctatcttgatgatcgggaggtagacttcaaagagattattgactgtcctctgcctaaagccccactggacacatcagttgtagcccattggctagcgattgagggggtacagcctgcaataccggagaatcctgctattgacgcaattgtaccaccaactgaaaataaaaggtctgagcatgggaaagatgatggacttccagctgatgtcaagcttcctgttaagcatgtattatctagagaactacagatgtactttgataaaatagctgaacttactatgagtagatctgatacgtccctttttaaagaagctttagttacccggagtttgggtgatcttcctgttttacttgctctaatgagagtagtccaaagtcttctccgtaatccacatattcatattgaaccttatttgcaccagctgatgccatcaatgatcacttgcattgttgcgaaaaggctagggcataggctctcagataaccactgggaacttagggacttctctgccaatttggttgccttggtatgtcagaggtttggtcatgtctatcacaaccttcaaaatcggttaactaaaacattgatccatgcatttcttgatcctgccaaatcactgacacaacattatggtgctgtccaagggatatctgcactggggcccagcgcgattagactccttcttttgcccaaccttgtgacatatatgcaacttctggagccggaactgcagcttgagaagcagaaaaacgagatgaaaaggaaggaagcttggcgtgtttatggtgccttgctgagcaacaaaagggtcttaaccaacaacccaaataagcgaaaatctagcacagatctctctgcaactcagccacctctgaagaagatggcaacggacgcaacagccaactccatggcctcagcttccatgggaggaaacatgcaaggtgccatggatggctttcccaaccagttaggcaaccctggcatgatgcaggcctcgtcctctgggcagacggtggagagcatcccatcagctgcggtccggagggatcagggcagtgatctcgcgcagagagtttctgcagtgcttaggcaagcctggaaggaggaccaggacaccggtcatctcttggggtctctgtacgaggtcttcggggaagccatcttctcctttgtccaaccaccagagatatccttgtttgtgtag

SEQ ID NO: 26307 - DNA, 192 bp, Zea mays
  Peptide Sequence Number=SeqID_68086
atgggggatggtgttgctggcggtaatgacggtgggtgcgctgcaaagggggtgtgggcggttgtagtgcgctgcaaagggagcgtgggcgacggtagtgcgcatggaggtgggatacgcgtgcagggggcacagcttattacaggcttcaagggtaaatttcccggtatctttttggaaaacatttcttaa

SEQ ID NO: 26308 - DNA, 225 bp, Zea mays
  Peptide Sequence Number=SeqID_68087
atgacgtgcggtaactgccgcggggagctggacctggatcggaggccatccgggtcgaggggggagtgcgcgttcccggagctgcggctccttgagacgagggggtgccctcggctgaagaggattcagatgcgcccggcgcgcgggcagcaggtaggaggacggagctgcaatttttggggacagctgatattcgacgaccactggagctgcaatttattgtga

SEQ ID NO: 26309 - DNA, 222 bp, Zea mays
  Peptide Sequence Number=SeqID_68088
atggagcaggtgacacgtatgatgggggatggtgttgctggcggtaatggcggtgggtgcgctgcaaagggggcgtgggcggcagtagtgcgctgcaaagggagcgtgtgcggcggtagtgcgcatgaaggtgggatacgcgtgcagggggcacgggggcagtgctttggttcttacggtcgatcctttttgactaagcggctcgacaggttccttctgtag

SEQ ID NO: 26310 - DNA, 186 bp, Zea mays
  Peptide Sequence Number=SeqID_68089
atggccactgaccaccggacagaggcgcagtcccgtggaactccaatcctgttgagccctctcagcctctcaggtgagccgccgcagccaagaggaagcgcgggcataggagctgccactgggagcaagcacggggaggtgcgcaggtggcacgctcaccacgacacagtggctaggttgtcctag

SEQ ID NO: 26311 - DNA, 543 bp, Zea mays
  Peptide Sequence Number=SeqID_68090
atgacgcctcctgttgacgtggctggtctacgccctaggttgggcgatgtggaagctcctccgaggccgaggtcgagtctgtcttctgtggtcgaggccgagtccgagccctgtgtcgggcggagcggagttcgtcgtcttccgggacttagcccgagtccgagccctgggtcgggcggagcggagttcgccgtcttccgggacttagcccgagtccgagccctgggtcgggcggagcgaagttcgccgtcttctagggctgagcccaagtccgagccctgggtcgggcggagcggagttcgtcgtcttctggggctgagcccaagtccgagccctgggtcgggcggagcggagtggcgccgcagtcggagtggcacaggcagcgctgtcctcctgccagatcggtcagtggagcggcaaagtgacggcggtcacttcggctctgccggctggggggcgcacgttaggataaagctttatgctgatgggggttaccagctaagaattaggagccttgagggtacccctaattatggtccctga

SEQ ID NO: 26312 - DNA, 408 bp, Zea mays
  Peptide Sequence Number=SeqID_68091
atgggcaagaacaagaagggcagaagttcgtcgcaccacactggcgacaagcggaagcgcgagccaagtcccccttggaagactttggggattgctgccgaggtgtggacgtacatccgggccatcgagcgctccgggctcgagggctcagatgagtcggagatctcctcggacaaggaaaactcctctgactcgtccgaggagaagagcggcggtgacggcgacgacaaggatgacggcggcgatggaggcggcgacggcgatgatggcgacggagacggcaagggcgacggcgacggtggttacggcgacggcaagggcgacggcgacggcggcaagggcgacgacggcagtggcaagggcgacagcggcagcagcaaggccagtggcaaagcgccactggtttaa

SEQ ID NO: 26313 - DNA, 1614 bp, Zea mays
  Peptide Sequence Number=SeqID_68092
atgtcagggcaaggccgccaccggcttccagtggggtcggccaacctggcagcagcagcaatacttctccgcgcgatgccggagccatcaaccaccgaagggcggcgtatccagggagagctcaagaatctcctggaggatgtcgtggtccgacgggccgaaagatctacctcccgaaggcaggggtacccctcgaagcatcgtgccgcgacttctcgattcatgcgggaagccttggtccacaccgggcgcacgcgcaacacagtgcctgcggccccgggtcgcctcggcaacgagcaccgtcacggcaaccgtcgaacccacctcgacgagagggtgcgccgaggctaccaccccaggcgtgggggacgctacgacagcggggaggatcggagtccctcgcccgaaccacgcggtccacaggatttcagccggggcatacgacgggcgccgttcccgatccggttccgaaccccggaatactatcacaaagtactcgggggagacgaaagccggaactgtggctcacggactaccggctggcctgccaactgggtggaacggacgatgacaacctcgtcatccgcaacctccccctgttcctctccgacaccgctcgagcctggctggagcatctgcctccggggagagtctctccgggactacatccggcgattctcgaagcagcgcaccgagctgcccaacgtcaccgattcggatgtcatcggcgcgttcctcgccggcaccacctgccgcgacctgcgcggcaccaagaagaaaggcaagaagaagtcgcaagcgaaacgcgacgccgctgacgcggaccttgtcgccgccgctgagtacaagaaccctcggaaacctcccggaggcgccaatctcttcgacaagatgctcaaggagccggcccacaacaacgataagaaggaggatcacaaggcaggggagttccccgaggtccacgactgcttcatgatctacggtggcaagtggcaaacgcctcagctcggcaccgcaagcaagagcgtcgggaggctcaccaaggtcctcatggacggaggcagcagcctcaacatcatctacgccgagaccctcgggctcctgcggatcgatctgtcctcggtccgggcgagcgcgacgccttttcacgggatcatccctgggaaacgcgtccagcccctcggacaacttgatctgcccgtctgcttcgggactccctccaacttccgaagggaaaccctcacgttcgaggtggtcgggttccgaggaacctaccacgcagtgctggggaggccatgctacgtcaagttcatggccgtccccaactacaccaacctcaagctcaagatgccgggccccaacagggtcatcaccgtcggccccacatatcgacacgcgtacgaatgcgatgtggagtgcgtggagtacgccgaggccctcaccgaatccgaggccctcatcgccgacctggagagcctctccaaggaggcgccagacgtgaagtgccatgccggcaacttcgagctagcggagacggtcaaatccgtccctctcgaccccagcaacgacgcctccaagcagatccggatcggctccaagctcgaccccaaatag

SEQ ID NO: 26314 - DNA, 276 bp, Zea mays
  Peptide Sequence Number=SeqID_68093
atgggtcagcggtgtgccgagggcgtgggcgcgttggccactggatcacagatcgaaggctctggttccatgtacagtgcgaaccgttactcatgcatccggaccctcagatcaaagattggacagttaggattgggcgctaggggttttatctccatggacacggaggcacagttgctggaggtgaggcaggccggggtggtctgggtagctagagtggttggggaggactcgacaagcactattgtgaggtctgggtggcgagaacgggactga

SEQ ID NO: 26315 - DNA, 222 bp, Zea mays
  Peptide Sequence Number=SeqID_68094
atggcgcactcccgctccagcttgcctctgctcggagctccttccttcccctcccatggcgtcctggcccctgctcggattgccgactctactgcttgcttccctgcgcgtcgtgctcctctgctctctgtctgcgcgcgtgctgtgctcgacgtcttcccatggcgctcgactgttggccgtgccgtggagcctgcgcgctcagtcctgcctatctcgtag

SEQ ID NO: 26316 - DNA, 195 bp, Zea mays
  Peptide Sequence Number=SeqID_68095
atgaagacgaagctagcagcgatattccccaagcgcttgacaaattgcctgaatcggaaaatcgctaccgatctcgtggattcatgtcagctgtggaaacggtgctcaataaattgcgcaagtcatgaaactctcgtcgacttcgcagttcttgcgattatcgagccagattcagttatagttcgagaagtgtaa

SEQ ID NO: 26317 - DNA, 207 bp, Zea mays
  Peptide Sequence Number=SeqID_68096
atgtgtggcccgctccaacggtcggaagggacaccggacagtgtccggtgcgccaaccgacgccagagttgcaacggtcgaccgcgccagattaggaaggagatccgcaccgaacatgctacagtgcctgtccggatcacctattcacccctctctaggtgctctcaaaaatatggtaaatcggtactccttaggatgattggttga

SEQ ID NO: 26318 - DNA, 327 bp, Zea mays
  Peptide Sequence Number=SeqID_68097
atggcgcggctctgcgcagagggcgaacggtttggtcgacgtaactccattaacgcacggacgacgtggggtggcggtgcacggggcgtcggttcggttgacagcgggtactcggctcggacgtcgcggcagtcggggcgtgaggcgcgcggtcctcggcggggctgcttcggtcggtcctggtcgcgggcggcctggatcgcggctgcgcgggtggccgagggacgtcggctggggatcggcagggtggcggcttggcatccgttcctggcgggcggatgcagaggcggggctcccggggcggtgtgcgcggctcctggcggatga

SEQ ID NO: 26319 - DNA, 231 bp, Zea mays
  Peptide Sequence Number=SeqID_68098
atggcggcggcagctggccactcggtcgagtttcgcatgtcggtccgcgcataccgtgctcgtgcctggtgctgtttcgcacgcgtcatcgtggtgatgaggaggatggttatgattatgactatggtaatggttgcctttggtgcaatctatgctcaggtaaagaagaaagagaacattgtcgaggcggatctccgggagttccaggacttcgacgagttcgaggattag

SEQ ID NO: 26320 - DNA, 237 bp, Zea mays
  Peptide Sequence Number=SeqID_68099
atggggctccgtgcttcgggcggcgttgccggagtttaccgggaggaggatgatggcggggtcccgttggatctccttttcatggccggatgtggtgactgcgtagcgtttcgaataggggtaacgggaaccgtccgatcgggatcggatgatgaagagcctgtgactgagaatcctggtgaccagcagaaagaagtagctgagcaggagctcattgaaggcaagttgtgcccttga

SEQ ID NO: 26321 - DNA, 657 bp, Zea mays
  Peptide Sequence Number=SeqID_68100
atggaggagagcgagcagagaggaggaacagctgggcagggtcgaaatccgagtagagaccgagggacacgcgtggggagcatgagcctcggctggggagagcgcgcgacgcagcgaaagacgggaaaatcgctcggccgaacggagtcggacgcgcagggagcagaggcagcagaccgagcgaggccagggaaattggtaggaacgaccggccatggagggatagggaaatccgagctaggcaccgaggaagaaatccgggagcggcaaccgggaaactgcgcgggccaacagggagcagcgcgcgcgaagggagagagacagggcgcgcagaggctcgcgcgcagggagcctgaacccgagcagaagtccgagcgccatgggagctcgagaccactcgccggccagtacggaagcagggacaccggcatggaggagcttgacgaggcgctgggcgtgtgtcgtgagcagacaggcgagctccagggagccgcggccatggctggggacgccgaacgccatgggagcttcagcgaggagagagagagatgggcgctgggagagaagataaggaagacagagaatgtgcgatggatttatacaacagataagcggcgatggcttgaagaatatcaggggaggacggcaatcggatga

SEQ ID NO: 26322 - DNA, 390 bp, Zea mays
  Peptide Sequence Number=SeqID_68101
atgggcccagagtctttcgcgacgccttccagccttctagtggacctggggatatctgtcccccacagataccagaacacgtgtttgaccggcgtgttatcattcgaggaggtaagtccatacaacaggtcctcattcacttgtcggctacggatgaagcactgttgtcctaggaagatgaagaagctctttgaactcgatttccagccgcgccagcttgaggacaagcggcttctcaaggggaggagaatgtcagagacctaccagcgctaccacaaggtgaagggggcacgggaggaaaggagccaaaagaaggtgtttaaatggtggtcgggccgtcgcattcgcaagcctaatcttcgagtcaaaggagcagaatggatcgagtaa

SEQ ID NO: 26323 - DNA, 453 bp, Zea mays
  Peptide Sequence Number=SeqID_68102
atgccgcgccaagccaaacatgtgcccacgcctgcgctcgcgcatataaagtcgaccgaggcctcgaccgtacgcccccgctcgctctcaacatcgccagagcgcaaagccaggaatcaagctctacctcgctggagacactggatcgacgtcgtcggacttcacccgatcgccagcgtacgtggactgagctccacggccggagcacacgccgccaatgagcccgcccacctgcgcacgtggaccaaccgatcccggccatcacagtcaatgagtcgtacctcaacgtcaccgcaaggacttcccggagctaaccccacccttcgccggacctccctcgccaccggttctctagaggacatggttgttggcgtgacttggtcgtccatcttgccaccggggtggacagtcaagtgggaccctacctcggtagaggaggaggacgaggagtga

SEQ ID NO: 26324 - DNA, 465 bp, Zea mays
  Peptide Sequence Number=SeqID_68103
atgggcaagaacaagaagggcaggagttcatcgcaccactccggcgacaagcggaagcgcgagccaagtccccccttagaggacttcagtgacttcgagtactcagaggaggagttttcctccgagtccgaggggtcgctggtctacgcctctcccctgatgtcgtccgatgactcgaacggttcccaggggatcgctgccgaggtgtggatgtacatccgggtcatcgagcgctccgagctcgagggctcggatgagtcggagatctcctcgaacgaggagaactactctgactcgtccgaggaggggagcggtggtgacggcgacgacgagggcgacggcggtgatggaggcgatggcggcggtggaggcgatggcgacggtgacggcggcaagggcaacggcggcagcgacaagggtgacagcagcagcagcaaggccagtggcaaagtgccactagcttaa

SEQ ID NO: 26325 - DNA, 438 bp, Zea mays
  Peptide Sequence Number=SeqID_68104
atggccgaccggccaccgcccccaggggccttccctccccggccttcttcctccctggagctggccccgcgccttctggtcattcgttgtccttggagaccgtcgggtttctccctcgttgccaccggtgctccggtcgcaggcaacctctgcaccggcgtgaccgtcactagtgccgccccctctccccttgacatggcccctccccagtcggtcgcggccaacctcggcgccgacaccccatatcccctcgatgtggcccctccctctacggttgtagtcccttctggcatgcctgcccctagcatcgcttcatctcacctcgacgcgcggagatctggtgtgggaggcctcggcgcaggtccccttgccccggacgcgtgcaaccttggctcgggccggatctggccatgccagcactgtcacacccagatttaa

SEQ ID NO: 26326 - DNA, 183 bp, Zea mays
  Peptide Sequence Number=SeqID_68105
atgactcggcagctggtgaaccgggcccatgaaacacagagagagggagcgaacgggcgaaggaaactggcgccgacagcacttctgtcatttgtcgtagcactagcatttgggcggcaaccactagatcggttccagccagtgcaggatttggaggattcatttctgtttgttgttgcttga

SEQ ID NO: 26327 - DNA, 276 bp, Zea mays
  Peptide Sequence Number=SeqID_68106
atggcggttggacccgtgggtatggatacccacgggtttcgtacccaccggatatggatacgggtacagaaactcacccgtgggtcctatcgcgtcggatacccgaaatacattaggtcggtcaactgtaatgtaatcgagaccaatgagacattggacattgacaatgttataactgtcaactgtcatgaactcattaagcttttattctctgtactaaaatttaaatttattggatgtgataattatgagttgagatattgtatcgacgtgtag

SEQ ID NO: 26328 - DNA, 303 bp, Zea mays
  Peptide Sequence Number=SeqID_68107
atggtgaccaccgcctccggcgccaccatcatgaccgtggaacgcctcaacctcgggctcctcgtggacgaggagccggtcatggagcgggtcgagtcccgggagagccctccgcgagaaggtgttcgaacggctcagcaaagaaagcgccgtgcccaacgacaccgtcgcctccgccaacgtagaggtagagcgtgggagaggcgaccatgtcggcgatccaagacaggagtaaagatgacaggggacttgctccttggtgacgacatcttcaacaccgacggggagctgtggaggaagtag

SEQ ID NO: 26329 - DNA, 315 bp, Zea mays
  Peptide Sequence Number=SeqID_68108
atgaagctgtggaaggagacttccaggagtttcaagactacgacgagttctaggcgtgggttagcggcaacccccagtcggctgcctgtgaaggccgcgtttatctacgtttcttttccgcactttgatttattaatatcatcgataaagaccactacaaatttgtctaattctggcatgaacgccgaattcattaagtatgtgaaatgggatggagcatttgttaatccaaaggacataaccaaatacttgaataatccatatcgagttgtgaaagccatcttaggtatatcctcgggtcgaatccttatttga

SEQ ID NO: 26330 - DNA, 147 bp, Zea mays
  Peptide Sequence Number=SeqID_68109
atggcgagaatagcgtgtaccctctatggcaagaggctggacggtactagatttgtgctattgttgatggtgctaagtgccggtgggctcggacttcttataggtctaagtagctcttctatatttcttattgaggattgtctctga

SEQ ID NO: 26331 - DNA, 678 bp, Zea mays
  Peptide Sequence Number=SeqID_68110
atggccatgatgggttcaacatcggaaaagatgtacctctgccaggaccttctcgatgtaggcttgctgatcaaggaccctttaactggtcacatgccttgtcatgggaggcataacaccctacgtctttgtgatggttttggtattgggatgaagttacaagctatagactatgagaatggtgggatgagaggtttgcctgaggagaagaaacaaacatatttccggatgcaagctatctctaatgacactgagatgaatgcagtcctgagtgcattggctggagaatcatttgggtctgcccaagctgagtcagagaattctgtccccgggcgctcgtgtgacggggaggaaggaatttgtagccctgagttgggtggtgtgagggccagtattgttacaaaagaggaggaggatgatggtgacgaagaggatgtgccttccctggttcatagggatcatcgcagtaaggctagcattgatattacagaccttggtctctcatggctagttagcctccagggaatgacaatgtctaccattgacagcgcgctggagaaggttactctcgaggaccttttgctggacctttctgaagctatgggtaccgacgtccgtgtagggtgcctgtacggtgcaccctcttctagttttttggctaggcaagaggcaacctga

SEQ ID NO: 26332 - DNA, 171 bp, Zea mays
  Peptide Sequence Number=SeqID_68111
atgaagcttgtgtatctgacagaacccttcggcgttggcgctctttccttggcttcgaagagcccagatatatatgttgagcctaacaattgcgttcgaggtgctaaaggttcaacacaacaacaacaacaacaacaacaaagcctttttgtcccaagcacgttggggtag

SEQ ID NO: 26333 - DNA, 315 bp, Zea mays
  Peptide Sequence Number=SeqID_68112
atggtgcctccgctcatcgagcacatcatcgacgccgagctccccgacgcgctgctccccaccatgggcggccagaccgcgctcaacctagtggtcttgctcaccgactcgggcgctgctcgtcgggatggatcgccgggcgccgccaccttgggtgctcacgccgccacggttcgtgaccagggggagaaggtgacctggggagcgtcggattggaatgaagggccaggatttgatcagatgaagcgcttcgttcgtggccgtggatctctgatccagcggcacatactgcaccggttaaaatgttgcacttag

SEQ ID NO: 26334 - DNA, 219 bp, Zea mays
  Peptide Sequence Number=SeqID_68113
atgggggcacagctgacagcgtcgaggcgagcagggaagggtggcgggcggacggccgagagggcgaggtcggacgccggtggggaaggtcaccgggaccagacggacgacagcgagtggcgtggtgtgcaggacgtcaacttcagcgagcagaccgacaacgaactccacgcgcggacggaagcaacggcgacgaggagagcagatgcgttgttgtga

SEQ ID NO: 26335 - DNA, 408 bp, Zea mays
  Peptide Sequence Number=SeqID_68114
atggcggcctctctgtccgttctccctgttgcgcatgttgcctcggtggtcaccggccggtgggccctcgcgttcagatccgtccccaacccagcttcgcaacaacctccgctgcgtacgctgtttcggtacgggagtccaccagatcaacgcgtcgcgcggctccacgcggatcgatggctcggccagggatgtagcgattcgcccgcctgcccttgcggaatccgcgacaccatgaatcctgagcaccgtgagccgcaacaaaatgaccgcaacaatcgtgagcttcgaaacaaactccgaaccccactccgtgatcccctctggccggattccgccgcgacactagaaatcacgaggattatgactccccaaccagccgaagccgtgtatagcttggtgccgtag

SEQ ID NO: 26336 - DNA, 357 bp, Zea mays
  Peptide Sequence Number=SeqID_68115
atgggggcagcagagggcgcagaacacggcgaggcggcctacgacggcgcggatcaactcccggtgaagaatttcgcgggcactggggcggtacttggcgcaataaaggtatgggtaggttgctcacctcgagtgcaagctacggagcgcttggggaacggcagggatgcgatggagcctcaggtcgacggcggcggacttcgactgcacggggaagactccggtgaacgtggaccgaacaaactagaggggttaggggcgaaccgaggggtgtcccaagctactggtggtgctgcggagcttaccgaggaaacgggtgcgacaagggctcaacgccggccgtggaacgggcgatga

SEQ ID NO: 26337 - DNA, 210 bp, Zea mays
  Peptide Sequence Number=SeqID_68116
atgaagcttcgtgcccggtggccggtcttcctgtgcccgacaatggccgctgccatactggctttgcgcgccgccgcgctgcgtggtcgggcggggaagacacttggactgccgttgatccagccgctaacggctcggatcgggccgggcgtacgcgttcggctatatggcatcgcgaccgttggacctgcagtcaacgcgcgggattag

SEQ ID NO: 26338 - DNA, 2481 bp, Zea mays
  Peptide Sequence Number=SeqID_68117
atggcggggaccttccgcgagggcgcggggccgggggacgcccatgcgcccccgcccacgcctacgccgcccctctcgcagttcctcgcgctggatgcgctcccgtcctggggctccgaccccaagcagccgcactggcgccaccccgagctccgccgggcgctcgcctccgacgaccaagccgacgagctcaggcggatccgtgccagcgtccaggactccgcgggcaaggccaaggagaaggtcaggtcgctgcacgaggcaatccagaagctcgacaagtacaagaacattgtcacccgcaaacgccagcgcgccacagaggcgtcggccgcgcccgacaagctgggccctgccggcgcctcctcctccggcgcgctcaggatgggcgcacagaacaactctgctgtccttagcaagcgcgtgcgctcgtcgctcgccgatgcccgggtggaagggcgtggtagtgttcctacaaggcaaggccctttgattagtactgagaaaaattcacctctagagaaggaaaagagcagcgcaagaatatctgctacagtttctggcctttctgatgacaaattgcggggtctatctactggcagtgaagggtgggaaaaaaagatgaagcgtaagcgctctgttggaacaatgctcagcagaggcagtgatgtggatcgagatgtcaaatccgcgggccagcatagaccagccaatgaagtacgcccacggtctagtgatggccttgggtatagggcaaattcttctgatgatatgcaaaacgtaagcttaaacccattgcccaaggctaaagcatgcagggcaccaagaactagttcacttgctatgaactcgtcttctaatttccaacgttcaactggaggaagtgatgagtgggaagaaacaccttacccaaataaagcctcgcctttgggaggcatgacaaatcgcaaacgttccacacattcaaatgcttcctcacctcctattgcctgggttgggcaacgcccacagaagatgtcaaggacaagaagagcaaatgttgtttctccagtgtcaaattttgatgaagcgttatctgaaggatcaccacttgacactgccactagatcggcacctatagagtctggcagtgtcttgctgacaaagaacacatcaacaaccaaaatggataacatctcatctcctgctgggttgtcagaaagtgagggatcggctgtgaatgaaagcaagtccaaggagaaagccatgcatagtggtgaagtcgggaacgagggtgcaaatgcagcccataatgcaatgggattgatattttcatcaaataaaaataggattcctttgaaagaggagcttgaagatggcagtattcgtcgtcaagggaggagtggaaggggagctatgcatgtcaaggggtgttctcccataccaaaagaaaaactggacactgcagaaacaagaaagccaacaaaaggtggaagacctggatctgaaaagaacgagagtaagttggggcggccaccaatgaaaaaagcctctgaccgtaaagcttcatcctggcattcacaagctctaaatagtgatattacagacataacaggtgaaccagaagatgaccaagaggagcttttagctgctgttaatgctgctcgcagcgctattgtttgtggtcagatcaaccttgttgaagagcttgaagtgagcatgtcctgcatgtctgacggtgaacatgatattatagcatcagttggtcacagaagaatgtcaaagatggaggagcattcatctcagggactggttccatctaatttttctccctcatctcagcaaagtaaaactaatggagtcggagaaaaaggattagtcggctgtttctctcatggtgacgaaagtcgtactggaccacaaaagctggaagctgataaatggtttaatgaaatggctccaatgacacacagactcctttcggctttaattatggaagatgacctacctgattccaatggggtgcaaagagatatacttgttgaatttccaaatagccacaatccttacactgtcaacagatacttagaaaatgaacttcaagctagtgccataacatctaattttgggctgagcgtggatttcgtgcactcaaacagtacttctgtggtacatcagagcatgtgcaatggttttacagcttcaagcaatttcattaattcaaacagtgaaaattcagttcatagtgagaatttatcagacggactaaattttacagtatacccagaaagtggccctttgcatgacttgataccactgactccacggcaatgtcaaaatccagggaaagatttccctttgtctccatatgagtatcaatatgggcagatgtctatggaagataagattttaattgagctgcaaagtattggcatttgtccagagacagtgttttttaatggaagtctatatgcattgcctaccaggaaacacgacaaatag

SEQ ID NO: 26339 - DNA, 876 bp, Zea mays
  Peptide Sequence Number=SeqID_68118
gtgaaccagaagaaatgcagattacataagctagataaatcaattcaagatacaaagaatattgaggagaggagcttggagcaacatgctatgaacaaattggttgaaagagcatacagaaaactcaagggtgggcggattggctctagtcacaaggctggtgtcagtaaatctgccaacaaagctgcaaaacagctagccttggcttttgccaaacgcactcttgttcgatgccacaaatttgatgaaacagggaaaagctgcttcagcgagccttctctttggagtatcctgtctgcacccttgccaagcagtgattcaaaatgcacagagggtgtagagaggctgaagcatcaaaagcttgacagaactccattcgaccaaggtggtgcaaaatggaaaaaggtcgacagggaacgggaccacaacagggatgcatccgcgaagggctccggattgaaatcgggacgtcattcatcaggtggtagcggcaggagcggcgagcgcaaaaacaagacaaagccaaagcaaaagcttgcacagctatcaacctcggggaacgtgctgggtagagtcgttgagccattttcgtctccaacagtgcaggagccccctgaacctgcaagcgagaaaaagacccagcatccaactaggggtgcttccagcagcgctgcccagcggcttaccgtggacgctggactgccagtgttgcctgggttagatgacatattggacgtcccggaagggcttgacgggcagggcaacgatatcagctcgtggtttacggatggccttgacgactcgttgcaagacattgatctttctggcgccctggaaatcccagacgatgacctcacccagctgggatttatgtaa

SEQ ID NO: 26340 - DNA, 264 bp, Zea mays
  Peptide Sequence Number=SeqID_68119
atgagcaggccagagcacttgccgccgacgaactcccccgcctgcgcacgtggaccagccgactccgaccacctccgacgccgacccgtacctcaacgtgaccgtcgtaacctcccccaacctccctggacgcctcaccggagctatctcaccgccggtacgctacatgatatggttgatggtgtgacttggccttccacccttccaccgggctggacagttaagtgggatgctgcctcgacaggagaggaccaggaggagtag

SEQ ID NO: 26341 - DNA, 552 bp, Zea mays
  Peptide Sequence Number=SeqID_68120
atgaagtgggcagaaagccagtgcattggtggcgcaccggacagtgaacagtacctatccattgtgcaccggatagtctgcgtagagaggttgtatagtgtgatgggaagtttagctgggacggatgcggagttggataacaatcctcctcaaaaagctctatgtcggaccatccggtttgctttaagagattggagttcgttcgtgtcgcttaccttgggggtagctgcagtgggtgggagcgaagccagatcagtcgccctttaccgaatgaccttattgttcctgtccactttgaagttggctaggaacttcgcctttgcttccttgatcagctactcctggtgctcctcaaattcccgctattcttcatctggcaaggtttcccaagtcggctcgatgatgttgctgggggagatgtcggaactggccattgagggtcgatttgataggtctttacgcgaagtcctcggtggagtcgcaaaaagtgtgttggcgacgatctgggcgccaatcactgtgatgataaccggtggtgatgctctctgctga

SEQ ID NO: 26342 - DNA, 378 bp, Zea mays
  Peptide Sequence Number=SeqID_68121
atggcggctacccattttctctctcctctgctagaacggcgcgacctccagggagagcggctgcatagccccagccggcttggtgacgctcgaattaatggtcgaggaaggaggaaggagatatccccgacagacggggcccacatgtatgtgaccgaagcagaagcaggcgcgcgggtggacaatagcgggctgcgcgggagcaggagggggcctaagctgctgaagcatgagaatttatgttggcaaggaggattttcaaagttgtcaaaaacttgttctaaggaacaaagtacaatttattcgaagcaacaaaaagccgttcctaagggagcgcagtgtaagttttctgagcctacagcgaaaaataagcgctga

SEQ ID NO: 26343 - DNA, 318 bp, Zea mays
  Peptide Sequence Number=SeqID_68122
atgacctatgattatggaatcaacttttcgttgatcccctacctcccacgtatactattatttggcactctattacccgactacaaaagatatgttactacaagaaaggatcaagcactaagtaatgtccaaagagacgggcttcgctccgattaccagctgtcacggaacctcctgagaagcagcagaactcagccgtttcatcacctacaacaacatgggtttgaaaaccttgagtacggagtgtactttcgcaagtcttacctatcaaaggaaaagactctcaaggatatgctgaccgttgggaatcaaggttaa

SEQ ID NO: 26344 - DNA, 339 bp, Zea mays
  Peptide Sequence Number=SeqID_68123
atggccgctagcgctgccttcggtgccaaggctagtcagaccatgagttcgtcgaaggcgatgttggatcaccagaggaatgacgacatcaaaaagaagggcaagtcagagctctaccaagacgtggtgctgagctcaggaagctactgttggtggggactgctcatccaaggggacgttggactccaagaagagaaggcccaaccaggtcagcgctcttcttgtttgtcgtttcagaaacttgtcgatggtgtcctcgacgtcaacattatatccatgttgaggtccaactttttatatgaaatccaaaaggcactaggagattatgcatttgtgtga

SEQ ID NO: 26345 - DNA, 291 bp, Zea mays
  Peptide Sequence Number=SeqID_68124
atggccagattgttcatgcccgattatcatccgccacgaaagtcgtgcctcgacgaaattggacaattcggtggaaaatctctgggtaggaaactcaccggggcggcgttggggcgtactccgacggcaccaccatcacgcagagagctcttctcgccgtggctcgccgtcgggaggatgatgacagcgggtggccgttggattaaaatgaacggctgtgatcaattgctacgtcacgattcagctggatcgtttgggaccatggatcataggatagagggacgagattag

SEQ ID NO: 26346 - DNA, 243 bp, Zea mays
  Peptide Sequence Number=SeqID_68125
atgggaaaccaaaaatttgctaagcccatagtaagggtggatgccttgtccaagagacaggaaaaaggaattaagggtggatacctgagtcaagcttttgaacgtactaagcacatgccaggaaaaatggtaaccggtaccattcaggaaatggttgatggtgtgacttggcctaccaccctgccaccgggttggacggtcgagtgggatgttgctccggcaggagaggagcacgaggaatag

SEQ ID NO: 26347 - DNA, 435 bp, Zea mays
  Peptide Sequence Number=SeqID_68126
atggaagcatgtagacccatagcctacaagctgaagataccatctagactatcagcaatacgtaatgtgttccacatatctcagggaagagaccctacacgagatcctcgccgagatatgcacgttagggaagctaaacaggcatttggacaggggcagaagcgatcctccacgggttcgaccgcagctgacactcgagagcgttctatgaccgcgcctatgcacgccatgagctctagtcggctcgaccgcgtgcctagcaccaagcctgtgcccaagccctcgcttataaggatccccaaccccacgtccttaccctctcacacgccccatactctttgccggcgactggacgccgttaatcgccaaaataatgagcgcggcaccgcccacaagcttaccaaagctttgggcaccgtatcccggccactctag

SEQ ID NO: 26348 - DNA, 243 bp, Zea mays
  Peptide Sequence Number=SeqID_68127
atggcaccagctccccgcacatacttgatttctatctccctccattcttctgatcctggcggtgagttgcgccatcccagagccaaggcgccgggccacgagtacataaatacagaaaagcaacgcaccggcggtcaggttgatggcttctggagggacgcagactccgttgacaagatgattctgtccagcttggcctatagaacaactactggaatggaagcgagttcgtgcacgatgtga

SEQ ID NO: 26349 - DNA, 270 bp, Zea mays
  Peptide Sequence Number=SeqID_68128
atgtacaacaatcgggaccccaatagggacaacaacgacgctgctgtaggggagaacgatagtttgctaaaggacatcggtgcgagttgtagagagtacggcggtgttgtccgctacagcgacaaaggtcaaggcggtactggaccccacgacggtgcgatcgagggcaatgtcaacctatggggcgactatgacgctggcagggacgctggcaaggcagcgatagtcacagcaaaggcaatagcggtgaactctagggtagagcaatag

SEQ ID NO: 26350 - DNA, 198 bp, Zea mays
  Peptide Sequence Number=SeqID_68129
atgaaggatgcaaaggccgcaaagacaccgatgggaacggacgggcacttggacctcaacaaaggagatgcaaagtacgtgttgattcaggagcaagggactgaacaagaagaagcccaggagccagctcccgaacttgtcgtcgaggaattccctgccgtacctgtaccagaaggcaagccccggttatatgcataa

SEQ ID NO: 26351 - DNA, 519 bp, Zea mays
  Peptide Sequence Number=SeqID_68130
atgtggtgtgaccgagtgagccatggcaaggatgtgtgggccatgcatcttgaccaggttgggaggatcactgtccagtgcatgagtgtgttgtgtcgtcagcatgctctgcacaacgatgctatggcacacttaaccaggttagctcagactaccaatacaaccctcgatgacagggaggtcttcgtggttgatttatcctttgagttggtggagaaggatcttcaaattgagcaaatgggtaaccacacccgtgagctagagcagcaagtggagattcagaaccacaccattgaggtcctaaagaatcaactccacgacgtacaggtggaactagataaggccaatgctcatttggaaatgcaccaccaggagatgcagcaagacacagagggagatgaggatagcaaggaggaggaggaccccgaggagattgagccggcttctagcctagacattgctcactctggaggaccccttcacctgagactagtgttgcctctgctcagggttagatga

SEQ ID NO: 26352 - DNA, 1206 bp, Zea mays
  Peptide Sequence Number=SeqID_68131
atgcaccttgttggtatggatactctattaattctattaagtcttgggctagcatatcaccatcttaggggccatgatatcacagatcttcactccggttatcatcaaatcaagatccagacgagtgaaattccaaagacgatcttctcaaccagatatgggctctatgagtttctggtgatgtcatttggattgaccaatgcacctgcatacttcatgtacttaatgaattcagtattcatgcctaaattggacaagtttatggtggtcttcattgacgacatcttagtgtacacaaggagtgaggaggagcatgtcggccacctgcacatggtgaaggaaattaaattcttgggagataccgtctcacaagaaggtattgtcgacgatccaaacaaggtgcatgaggtaatgaattggaaggctcctaccgtcgtccgccagattcagagttttctaggattggttggatactatcgccgattcattctgaatttctctaggatcaccaaaccaatgactgaattgttcaagaaaggaataaaatttgagtggtgtcagaaatgtgaagaggctttccacactttaaggcaacatcggaccaccgcaccagtgttagcacagtctgacaatgctaagccattcgaagtgtattatgatgcttcgggcactagactaggttgtgtttacatgcaagacaatcgagttattgcctatgcatcccaagcactaaggccacataagcagaattatcctacacatgatttggagctagtagccatagtccatgctttaaaaatatggagacactacttgctgggagcccactgtaacatctacaccgatcacaagagcctcaagtatatttttacccagactgaccttaacatgagacatagaaggtggctagaattaatcaagtataatttagaagtgcactaccatcttagaaaggctaacgtggtagccgatgcactaagtcggaaggcacaatgcaattgttttaccatggattctcgtgtcaacacattgtgcgatgagttgaataagctgaagatagaagtggttccttttgccaccttggatttcatctccattgaaccaacattgctagaccaaattgttatggcccagctcagtgataaaggagtgctaatcatcaaggaaattgaaagggaattaggcttacacctagttcctatataa

SEQ ID NO: 26353 - DNA, 324 bp, Zea mays
  Peptide Sequence Number=SeqID_68132
atgtggtgcaggaagccaagcagcacggcggctgacgacccgaactccggttggtgctcaaggagggaggcatgtgcccacggcagcaccctgctgatgaccaaaccccacagcggctggggcgaagtggtggccgagcacaagtacaaactccatggctcggtcagcgacgaccggcgctggagcggcccaaccacggacgatgggcacctgctagggaaggaggagatggaggacgcagatgtccgtgccatggagatgcgaggctcggcggaagggaagccgcgatgcgcaggagcaggggatatgggcgcgcgcgcatag

SEQ ID NO: 26354 - DNA, 429 bp, Zea mays
  Peptide Sequence Number=SeqID_68133
atggctgatgaagactctgcgctgccgagtgccatgaaaaatggggcgcgcgcgggggatggcaaggcccgagctggaaaccaagcgccgacgagctggagcgccgcagggacagagcataggccaagctgggcgacggcggtgactttgggcaacaggaagctgagcagcacagcggctgacgacccgaactccgattggtgctcgaggagggaggcatgtgcccacagcagcaccctgctgatgaccaaaccccacagcggctggggcgaagtggtggtcgagcacaagtacaaactccatggctcgaaaattgtagatattttggatcccgatttgaaatcgcagatatttcaaacggttggattattagcgatgtatactgggtcgacacgctacccgaatacacatttcattctccaaatttag

SEQ ID NO: 26355 - DNA, 1500 bp, Zea mays
  Peptide Sequence Number=SeqID_68134
ctggtgcgaagtcccgtcttcgccgtggatcttcgcggtcgaaacgcggccgtgtttgtgcgtgaggtcgaggccatgaagattgttgggaagtatgctctgaagacggagactttaaggagttgggatattcgcggttataacgctaggttgaaccacgtttataagttgaaccatttgtcgtatggtggttacccgaagggagactgtgccgacattgctgaccgccgagggaaacaggcaatgccattggctgatgagggtccctcatgggacaaggctccgggtgccaccgccagaaaaagaaaattaggtacagcagctgagtatttggggctgaggggctctaatcattttgtaagggatttgctagagacgtgcgtagctcctggggaaacgatatcttcgcctcgagctccgggaaacatctgcgcgaatgctgaagcagtgatggagaaggatcgccaagatgcgcagcggaagaaacgacgggctcacgtcaggttggcggacccgaggcatgaggtgaagatggcacggcctagcgcgaagcctgccgccccagacgccggggcagagtctggacagctggctattgctccggcggcgatgtctgctggcccggtggacgcgacgactggggcgaagggggcgctgaccttggagtttgtcgccaagatgcggtggcttgagggaaggattgagcacctccagacgcaacacgcggaggcagtgagggacaagtcggcggcggagaataaaagccgcaacttggttgagaagctgtcggcggaaaaagaaaaggaagacctcagttgtcggtttgctgaggaaaaagagggtgcggaaaaagctcgcgcggtggcccaggctgcccgcgcagaagctgacgccgcgcgcgctgaggctggtcttgctctcaagtgcgccaccgacgcggagtcggagctgaaaagtctgctcagctataccgagaagacggaggcctccacccgcgccggggttgagtgtgcgcacacgttgttcgtggatgcgtaccgcgagctcggcgcacagaccgccccttttgatagatctggggaggaggtgggtcttcgctttcttgggtggctgcgggaggagctggaatcactcccgtccatggcgacgggcctcatgtcctatgcatcgcttgttacctgcgaggggcagcgaatgccttgtcccccgagagatatgatgaatgaagaagatgtcgaggacctcgccggtcttgagagctcgatgacccggatgggtggcgcgaaggcgggagctgaagggcactcagcgcctcaggctggttccagcgaagaccctgtggcggccccaaagattctaggtccagcttgcggttttgattttcattttggtgataggcgctttgaagagatcggcactctgtcaccagcttatgctttagaggtcagcattttgtcctttggggttaaggattcattgggtgtagccactgagctttga

SEQ ID NO: 26356 - DNA, 438 bp, Zea mays
  Peptide Sequence Number=SeqID_68135
atgtcgtgccgggatttgatggggacaccagtacagagcggagcggggcgagagaagatcctggccgccgcatgggcatctcaccggcggcgcagctctaggattggcatgcgattagggcgggtcttcggaattggacccatgggcctcatcatgctgctcggaataccgtcgtggcctcatcgtggatggagctcttggaatcgcttgccatggatacgtcgtcgccgcagatccgcctgtttccgtggccagcctgctatgtcagtgaccaacgccgcgcgaggttacgagccacctgatgatcatcctggtacctggaatctcaagtcccaggcaagttgtgcccttgatcacttctttttacccagctatgttctgattaatcataatgatctgcataggttaattttgatgggacccaataggttaccctag

SEQ ID NO: 26357 - DNA, 429 bp, Zea mays
  Peptide Sequence Number=SeqID_68136
atgccgatgacctcgccatcctctatggtgtcttcgccttctgggggagcgaagcctggtggtggtgcccgcggtgcgccctcagaactgcaagtaccgcacagtgtcgtcgggggtggggttatcctggcgttgtcacttgctgttgatggtgtcatcttcgaaggcctcctgaaggacgcggcccaacccgctctgcccatacggcatccgagggcgcgaccctacaacatgggtcgaattgtacatgggcccctcctcgcgctgagggggacaaaaccttatggtcttcgtggccttggctgcccgatccttgaagtcgttgggggtcttcgtctcggcttgacgcggcgaagggggcgcttcgaccttcgcatggacgacgtccgcagcctgaccgacggggccttcgttctgcggaatgttgag

SEQ ID NO: 26358 - DNA, 201 bp, Zea mays
  Peptide Sequence Number=SeqID_68137
atggcgccttcggcttttcctgagagcgacaagttcgtcgccgaagacttaggcgcgggcgtcgatgactcaccggacagtctggtgatttatagccacatcgccccgccgattcctgagagcggccacttcgccgtcgagccagcctggggcaccggacagtccggtgtgccaggctggtgctggttttggctgtcctga

SEQ ID NO: 26359 - DNA, 303 bp, Zea mays
  Peptide Sequence Number=SeqID_68138
atggagtttgctcaattgaagggtggttgtgatagccggaccacggtggtcgggctcgggcaacaagggcggccagtggcgctctctgctgtggtgaaatcccggcgaggttggctcgacaacggtcgaggagaagtgtccgagcgcggggcaagatttataggcgagggtgtgcagtcgatgctgcgttgcccaaccatggtgcagggcacgaacgtgggcgctggttggcgcgcgtggaacagccaatggcgtgctctgtggctcagatctgcgggccgaacaattggctcgttgcgttag

SEQ ID NO: 26360 - DNA, 384 bp, Zea mays
  Peptide Sequence Number=SeqID_68139
atgtataacatttccttgtattatagctatggtgaagggcttgcacaggatccagtgcatgctaagaggtggcttccactagctgctgattgtggtcacaagaaagctctttatgagtgcgatattaagctttgtgcggcaggagacaaggttaagtgtctcatgtatctagagctggcgacacggcatggagaagctgctgctgctcacatgagggatgtaatacttgaatcgttctctgttgtgaatgcgcagcgtgccatgtcggatgctgataaatggaagcctaggacactccatcctagacctagaagcgtgaccatcaactcgaatgaactattctatgtccgggcagtgaccgcagttgaccatctactctactag

SEQ ID NO: 26361 - DNA, 171 bp, Zea mays
  Peptide Sequence Number=SeqID_68140
atggagtcacgcgagcgaagaaagggggaggtgcctgatgatctgggcccgcctggcaacgactcgaggaagaatggcacacgcctgcagagaccgaagagtgggccccaaatgttcttcgggtttagcttctacttccacatggttgacctgaccccgattgacggataa

SEQ ID NO: 26362 - DNA, 195 bp, Zea mays
  Peptide Sequence Number=SeqID_68141
atggccgtgatgggttcaacatctgaaaagatgtacctcagccaggtaagctttgcctcgatcggaccaatactagaaatgccaccatgcaatgggagtggagagatggctagagtagcgtgtaccctccgtggcaagaggctggatgatggagtatctatgctctcggttggcgtgaacctattctggtcttga

SEQ ID NO: 26363 - DNA, 126 bp, Zea mays
  Peptide Sequence Number=SeqID_68142
atggagggagtgtctgcggcggcgttccacggtggcaacacgacgttccggggttccggctatggtagagttcaatcgggcgggtcgatgagcatcacgacatatgatgtcatgccaaagttttag

SEQ ID NO: 26364 - DNA, 2081 bp, Zea mays
  Peptide Sequence Number=SeqID_68143
atggcctcgttccacgatctcaccgccaccgccgtgctcctcttgctcttttccatcctctccggcgggttggcgccgctgcaagtccaggcgcagcagccgtacggcagccagatcgccgactgcaccaaccagcacaactcctccagtctgcttggctacttctgcggcgccgccggcagcgcgccgtcgtgcccgaccttcctcaccttcacagcccgggcgcagtactcgagcctcgccaccatcggggcgctcctcggcgccgaccccgccagcgttctggcgcccaacgaggccaccggggcggacgcgccactcccggcgggcaccagggtgctcgtcccagcgacgtgtgcctgcacggccacgccgggcggccggttctaccagaggaacgccacgtacgtcgccgtggccggtgacacgctgctcatcatcgccaacaacacgttccagggcctcacctcgtgccaggcgctcgaggcgcaggccctccgcggcgcgccgccgcagagcctggacgtcggtcagtccctccccgtgccgctgcgctgcgcgtgtccgagcgcggcgcaggccgcagcgggggcgaggtacctcgtcagctacctcgtggacgtgttcgacgacctcaccaccgtggccgctcggttcggggtcgacatggggaccgtcgcggcgtccaaccagttgcagccgccttttaccatagacccctacaccacactgctcatccccgtcagcgcgcagcctaacgtgtcgcgcatccagacgccgccgtcgcctccgccgcctccgccggtggtagcgcgcgcgcctgctccgggcaagaagagcagtaaccatgtcggggtctacattggcgttgctgtggcagtggttgttgtcgccgcgattgtctcagccggagctttcctcgcagtgagggcgaggaggaggcgagccggcgccgttctagccaccggcgaagtggccaagaaggaaagtaaggcaggcaacgacagggcggcgacgtcgtcgggcttcaccggcggcgagttctccctttccaccagcgaggcgttctcgagcatttccgtgacggacatcaagtcctcgctgaaggtgtacacctacgcggagctcaaggcggccaccgacgacttcagccctgagcaccgcatcggcgggtcggtgtaccgcgcggcgttcaacggcgacgccgcggccgtcgaggtggtggaccggaatgtgtcgacggaggtggagatcatgcggaagatcaaccacctcaatctgatccgcctcatcggcctctgccaccaccgcggccggtggtacctcgtcaccgagtacgccgagcacggcgcgctccgggaccgcctcctcgcgtccgccacgggcacggcggcgccactgacgtgggcgcagcgggtgcatatcgcgctggacgtcgccgaggggcttaggtacctgcacgagtacgcgcgcccggcgtgggtgcacatggacgtcagcagcggcagcgtcctccttgccggtgacgggccccgcgccaagctccggggcttcggcgccgcgagggccatcacgggcgccaccgccggcgtcgacggcgaagagggcgccgaggaggcgctgttcacgatgacgagccgcatcgcggggacgcgcgggtacatcgcgccggagtacctggagcacggcgtggtgtcgccaaaggccgacgtctactcgctcggcgtcgtgctcctggagctcgtaacgggcagggacgccgaggagctggtgggcgacggcgtgggcgatccgttcgtcgccctgcgcgagctcgcggaggagctcgatggcggcggcgacgccgtgctgcagcggctggaggaactcgtggacccggcgctgccggcggggagctgtccgcaggacgccgtggtcatggtggtcaggctcatcgagaggtgcgtcaggcaagacccagcgcgccgtcccacaaccggggaggtggcgcagcgcctcctcaagctgtctggggtctcggtggtcagctggcggaactcgccggagtcgccccgcagctccggcagtggaaaaggcctcat

SEQ ID NO: 26365 - DNA, 880 bp, Zea mays
  Peptide Sequence Number=SeqID_68144
acggacagatcaaccaatgagcgtcttccgggtaggccctcgaagccagtggactggttctgccacgtgggtttgctccccgtcgcagttcagcaccacaggctccatatgggctccttggttgcctggccggagaagtcgcttctggcagccgtcgccggagctgaggagcgggaaagcctgacgctgacgtgcgcacggtcaaaaaaccagcggacctccatggcgctgaggcctagagtccgcaccttgctgtatgaacttgcaatgctagaggacagcgtgcacaactgtgctcagcattgtggcgaatgtgctttggtaaataagattatgactggaaatctcatacaccgccatgataagataaagcgtgaagctgatatcagtggcaatattaagatttttacggaagatgagattgaaagaattaccaacaacttcagcactcttatcggaaaaggtggctttggagaagtttacaggggaacccttgatgacgacaacgagcctgtagcagtgaagaaatacatcaacgaagattcgagggaagtgttcatggaagaggtacgcatccacagtaaaattggccacaagaacgtggtgaagctcataggctattgcatcggggaaagcactctcatgatcgtgatggagtatatgtccaaaggaaatctcaacgacctgctccactctgaaatctcgatccctttggatgtgagattgggtatcgctatagggtgtgcagaggcattgagctacatgcactcgatgcatgtatcatccggcaaccttgtctgtcatggtgacattaagccggccacccttcttttagacgacaatctgacagcaaaattgaggaaacatctcaaggcttctg

SEQ ID NO: 26366 - DNA, 819 bp, Zea mays
  Peptide Sequence Number=SeqID_68145
atggctctacctacaagaatattttcaccaggatcatggggagatctaatgcaaggtaatcaggagtattctaggtgtccttgtggctggaagatgcttccagtcctgaaggaggagttaggtttatgtgtgagctttggaagggttctaccttcctggttttgtatccatctgaggccgttaatgtcaaggattggtgcatgtgggcccgatgacttgggagggttgtcacactcggtggactggttggccgacagcctcgtctcgctgggttgctcagcgggcaggttggtcggcagcctcgtctcgctgggttgcttggcggacattcgctcgatgggtcatccctgggtggccttttgggccttctcgtgcgaactgcttgacgggcggttcgtttttgggaggtcttggaagccttctttgggtgccctgttaccaggtatgttagacccatcaaaatcctatgttttcattatggtttgccaaaaagctacaaaacgtcgtatcgagaccccctcaagcgatagcggtggtggatctattcgccgccggtggcctgatgctctccagctatttcgactcgcctacgtcctccaagatcgacgctgccagaatggagggcatcggcggttaggcatgggccacatagagggcatcggtggcaagtcaccaaccttaggcacgatgatgggcattaggtgcaaggcgccaacatttgacacgatagcggacattggtggctgcattacttttggcatgacggcagattattgtgcaataggcagagacatctttatggttatatctgtccattaa

SEQ ID NO: 26367 - DNA, 177 bp, Zea mays
  Peptide Sequence Number=SeqID_68146
atgacttcatcttctcctgagcagtggttacaatgtggacagcctcgggggtttggtgttgtaaagcaagggactcgcatctacgactatgcgagaaaagaaactataacaatcgaggctacgaccgaaagacatagcaattttgttaagaagctatgggttaaaatacttatctaa

SEQ ID NO: 26368 - DNA, 1050 bp, Zea mays
  Peptide Sequence Number=SeqID_68147
atggagggatccgcagcagatgggccgctccgcacgcgcgtatgcatcatcgggagcggccccgccgcgcacacggcggccatgtacgcggcccgcgcggacctcaagcccgtgctgttcgagggctggatggccaacggcgtggccgcgggcgggcagctcaccaccaccaccgtcgtggagaacttcccgggcttccccgcgggcatcatgggccgcgacctcatgaagcgctgccgcgaccagtcgcagcgcttcggcacccgcatcctcaccgagaccgtcaccgccgtcgacctctcggcccggcccttccgtgtcgtcgcctccgacaagtccacgaccgtgctcgccgacgccgtcatcgtggccacaggagccgtcgcccggcgcctcgacttccccgggtccgacacgtactggaaccacggcatctccgcctgcgccgtgtgcgacggcccggccccgatattccgcgacaggccgctcgccgtcgtgggcggcggcgactccgccatggaggagtccagcttcctgaccaagtacggctcccgcgtctacatcgtccaccgccggagcacgttccgggcttccaagatcatgcaggacatggtgctcaagaaccccaagatccaggtcgtctggaactcggtggttgtcggggccttcggcggcgcggacggggacggtggccggccgttgttggctggcgtcaaggtcgagaacctggtgagtggcgaggtcaaggatctccaggtggctggcctcttcttcgccatcgggcacacgccggcgacggagttcctcggtgggcagctccagctggactcgccttctggatacgtggtgaccaagccggactccacccacactagcgtgaagggggtcttcgctgctggcgacgtgcaggacaagaagtatcgccaggccattactgccgccggatctgggtgcatggccgctttggatgttgagcactatctgcaggaggtcgcggtcgtcggtgcacaggagggcaagtctgttcagccgttgacgatgctggaataa

SEQ ID NO: 26369 - DNA, 291 bp, Zea mays
  Peptide Sequence Number=SeqID_68148
atgggacgagcggcggaggaggagggtgacgtggagtttgctgactacgacctggacgacgaggacgccatggaggaggacggccgcgccgcccgtgcgctccccgtgccccgcatcgtctcccccgccgtggtgcgcacccgcgggcgcttcgttggtcgcagcccctccgttctcacctccagccgctaccgcttcgacttcaccactaacaacggagaccatggtcccatcccactaccgcagcgctgtgaggaccccttgctcgaccactttttggatgatctctag

SEQ ID NO: 26370 - DNA, 204 bp, Zea mays
  Peptide Sequence Number=SeqID_68149
atgaccccaagacaatgcaaattccactatgttatcctaaaggaaaacctaagtctaaaggattgtaatcttgctgacggagagtacatcctcgtgccggagcaaggagctgctcaggaggtagccccagatccagcacccgagcctgtaccagaggacctgcctgccactgctttggaaggcaagccccggttttatgcataa

SEQ ID NO: 26371 - DNA, 744 bp, Zea mays
  Peptide Sequence Number=SeqID_68150
atggggcctcacttgaagctgtggaagcatctattcagcccacaggtgaacctcggtcgaggcaaccaatcatttgttagctccttcaacattcagctctatgggtcgcgaaatgtgtcctacctgaggatctctctcctatcctctatccacaaatacgagcgcaagtggttctatgtttggaacctcgaggggagtgcgccagtgttcaccggtcggatcttggtggctaagcccgagtggacttacaacgtggagaagaggttaaagttgaagattgactatatgctagatgccatcaccaagcagcgtggatggggcctttctggtgagaggttcactgatgataacgattatgaccgccactccaccgtgaacctggagaaggaggagctcgtggcccgcgtccttgctattatgatgggggttacgtcggattctctagatgagagcggccctctgtcgttcaaccaagtgtggttgagtgacctagcagagaggaagcggaagcgtgaggcggacgaggcggcacacaagaagcatcgtcttgaaagaaaaagggagaagaagaaagcacgactagctcgtaccgggctggggagcatctccccatctactgatatggaggacatgacctccacggccttcggtggggtggaactcccgacgtgcactagtacaatttggctctatacaagtggtaggctttttacatcccaggcggttcggataaaaaccgcctga

SEQ ID NO: 26372 - DNA, 1590 bp, Zea mays
  Peptide Sequence Number=SeqID_68151
atggacacggagccgttcgacgaggcggagctcctggcgctcccaccgtcccccgtcgcgtccccgcctcgtcgcctcaagcgtctcaagaaatcctcctcccaagccaccgccaccaccgccactaccaccagccctcatgtcggctccccgcctccgcctttgtcgcctccgcctccgccgctgctggcggaggcgacgccgggcgaggaaaccctggcgttcccttcccgcgacacctccccacacccgccgacgccgccagatgcggatgccccgactccgctaccgcatccctctcccgcccccgtgtcgccgccgctgcagccgaccgtcacccccgacaacgacagcgacgaggaggacgacgggctcgacccgctgttctccggggccgccggcgtcgcgcagtgggacccgctgggcgcgccggccgaaggggacggtgagggcgacgacgacgacgacggactggggggcggcggcctcatcgaggagctacggagggaacagaggtctgcgaagaagcgtctcgacatggacgaagcggacggggaggtggcttcgggtgcgggggcgagggcggaggcaaaggggaagaggagcaagaggaagaggaaagaggaggcaccgaccatggagtcggcccgggagaagaagcgatctgagaaggaaaggagggcgcagcttgattcgatccatgccgagtcacagaggctgctgcgggagacgaggaaggcgtcgttcaaaccaactgtgcagccagttcacaagcccatctcatctgtcctggagaagatccgccttcgtaagatggaggttctgaagaagtacagatttttctctctgagatcaaatacttctattgaagacagtgatgacaatgatgctgttccggagccagtggttgatttggctgagcaattggatgtgcctcagtctaaagaagtggcacttgataaagacttgaggattgatggcgctgaaaaggagcttggagcaaatggccacagccttgatcggtgtgatagtgttcaagaggatgaggatggtttgagttgcaaggagaaatatctctataactgtggtaccaaagcttcagatgaggaattttctgatagattgcaagagaatcacgagaacacccagccaagtaataatcataacgattcagtagatcagagtcaactgcccccttcttcaagccctactgagagtacagatgaaatttcatcagaagacgaagaaaataatgataaagagaacatggatccaagcgctcagaataatgatgtacatactcttgaacacctccaacaagccatcggaggaaactcacgtccagatgatgctatcttaaaggattttctagatgatgaagctgaggaagaggatgatagtgacaatgacatgactagatttaaggacaatgaagaagatgatggaagcgatgaaaacgaggtgttcaatgacctaatagcagctggttatgaagaaaaagaagtagatcacgagaagcgtaatgaactccaccaaaagtggcttcaacaacaggatgctgctgaaactttttggttgtccctccgttga

SEQ ID NO: 26373 - DNA, 2172 bp, Zea mays
  Peptide Sequence Number=SeqID_68152
atgctcttggggttcatcgtctccaagcgggacatcgaggccaacccggagaaaatcacggccatcaccaacatggggcccatcaaggacttgaaaggagtacagagggtggtcagcgccgcgatcgtggtcgaaagacgagaagaagggcatgcattgcccgtccagaggccggtctacttaatcagtgaggtactgttcgagaccaagatccgctacccacaaattcagaaggtgttgtacgcggtgattctgacgcggcggaagttgcgacactacttcgagtctcatccggtgactgtggtgtcatacttccccctgggggagatcatcccgtgccaagaggcctcgggtaggattgcaaagtgggtagtggaaatcatgggcgagacaatctcgttcgcccctcggaaagccatcaagtcccaagtcttggcggactttgtggctgaatgggtcgacacccagctcccggcagctccgatccaaccggaactctggaccatgtttttcgacgggtcgctgatgaaaacaggggcaggcacgggcctgctcttcatctcgcccctcgggaagcacctccgctacgtgttgcgcctccatttcctgacgtccaacaacgtggctgagtacgaggctctagtcaacgggttgcgcatcgccatcgagctaggggtccgacgcctcgacgctcgcggtgactcgcagcttgtcatcgaccaagtcatgaagaactcccactgctgcgacccgaagatggaagcatactgcgacgaggttcggcgcctggaggacaagttctacgggctcgaggtcaaccacatcgcccggcagtacaacgagactgtggacgagctggcgaagatagcttcggcgcgaacaacggttcccccgaacgtcttctcccgggacctacatcaaccctcagtcaagacaaacaacacgcccgagcccgagaaggtctcggccctgcccgaggcaccctcggctaccgagggtgaggctctgcgcatcgaggaagagcggagtggggtcccgcctaatcgagactggcagaccccgtacctgcaatatctccaccgaggagagctacccctcgacacagccgaagctcggcgactggcacggtgcgccaagtcattcgtcttgctgggtgacgggaaggagctctaccaccacagcccctctggcatcctccagcgatgcatatccatcgccgaaggccaggagctcttacaagaagtacactcgggggcttgcggtcatcacgcagcgcctcgagcccttgttggaaacgctttccaacaaggtttctactggccgaccgcggtggccgacgccactagaattgtccgcacctgccaagggtgtcaattctacgcaaggcaaacacacctacccgctcaggctctgcaaacaatatccatcacctggccatttgttgtgtggggtctggacctcgtcagtcccttccagaaggcacccgggggctacatgcacctgctggtcgccatcgacaaattctccaagtggatcgaggtccgacccctaaacagcatcaggtccgaacaggcggtggcgttattcgccaacatcatccatcgctttggggtcccgaactccatcatcaccaacaacagcacccagttcaccggcagaaagttcctagacttctgcgaggattgccacatccgggtggactgggccgtcgtggctcaccccatgatgaatgggcaagtagagtgtgctaacggcatgattctgcaaggactcaagccacggatctacaacgacttcaacaagttcggcaagcgatggatgaaggaactcccctcagtggtctggagtctgaggacaacgccgagccgagccacgggcttcacaccgttctttctagtttatggggccgaggccatcttgcccacagacttagaatacggttccccaaggacgagggcctacgacgaccgatgcaaccagaccaaccgagaagactcactggaccagctggaagaggctcgggacatggccttactacactcggcgcggtatcagcagtccctgcgacgctaccacgcccgaggggttcggtcccgagacctccaggtgggcgacttggtgcttcggctgcgacaagacgcacgagggtgccacaagctcacgcctctctag

SEQ ID NO: 26374 - DNA, 636 bp, Zea mays
  Peptide Sequence Number=SeqID_68153
atggggaaaggggcgaggaggcgcagccgtgcgtctggcgccgacgggggtggacgcgggagcaagcgcccgtggcgggccgaggaggaggaacaggaggaagaggaaatggaaccgctggtgggggaggactattgcttcggctgcaaggacggcgatgacctccgcgtctgcgatttcagcatgctttgggttttgggaatctacaagtccggaggatgcctgtgtgatggtgagtgctgtggcattgctagagcaggtttagggaccgtgtggaatgcagcaattttattggaactggaagcggttcaatttcacatggcgaaaaaccctcgcaacaggaagaaaaatcccgcattccaaacaggtcttcaaaactcaggaggtcctcgcgacgttcctgatcccgtcgtcagtggcggtgctctggcctctggtgtttggctgttcgcgcggtgccctctggtgttggcaattggcatacgatgcatctggattctggcctatgggcatctggcggactggctgggcggcacttgcagctgccagctggttgggccttctcgtattgttgaatttgattataacagtactaatgatgctgatgaatcatggtttgaaaatgttgttgtctaa

SEQ ID NO: 26375 - DNA, 192 bp, Zea mays
  Peptide Sequence Number=SeqID_68154
atgacacacgagggcaacgtcgggccgatgccggcgtcaatggacggagaggacgtggcagccacggggcacgccgacggacggaggcggccgcggccagagaaatccccgttgggtgaggacgaccgaggcgacgtgcggtggatctggcccacccgctcccaccaactccgtcgtctcggttgtgtctaa

SEQ ID NO: 26376 - DNA, 429 bp, Zea mays
  Peptide Sequence Number=SeqID_68155
atgaaggtaggtgtaaacaaacgcagccttggaagaggagacccttgtgcaggagcagacacggaacaggaggagctggtgtcgtcggaggtggagcataaggccaagcacgacgaccagcgccaccaggcgcttgaaatcgacgacatgcatggagagggagggtgctcttaccaaagtgctcttaccaaagtgctcggggacgtcggccggtgctcgcggcgcttgggctcggggacggcgatgcttggcgctcggggacggcagcgctcggcctcgggctcggggacgacggcgctcgacctcgggctcggggacggcggcgctcagcgctcgggctcggggacggcggcacagttgattagcctggcggcgcaactgtgtcagctcggtcgggagttagctagggttcctgccggaagcagctag

SEQ ID NO: 26377 - DNA, 279 bp, Zea mays
  Peptide Sequence Number=SeqID_68156
atgaccggcgatgcccgcgccatcgccgcagcaggctgccaccgcgggctcgcgtggccaggccacctggagctgccgccggcccagccaactccttggctgtgcgcgcgctccaccagggacggctcggctggccccgccgcgctcggccgacgccggcgagccccgaccaggaaaggccgatcccctttccctgtacgttccaaggaagaagacgatggaccaatctgcaaattccagaacagcaggggggcacgtttgtttcagggacctgggtga

SEQ ID NO: 26378 - DNA, 549 bp, Zea mays
  Peptide Sequence Number=SeqID_68157
atgaagactgggatgctaagaagctggaatttatgtagttcaaatgttaggctgaatcgtgtgtttgagctgaacggcctccgctatggcccatatcctgaagagggctccattgatgtcgaggatgctgaggagcgcaagaagaagggtggattcaagcgttgtggggtggatgagcggtgctccaagggtaaggatgtagtgttgctagtgtggaagacgaggaaggtggagacgaagatgaaggcactagcaagggcagctggagtggcggaggcctcgaacaagtttgctgaggagctagccgagacttgcactgagctgagagaggtcatgtcttcgcctgttctacgagaagcatctgcttggatgctagaagtgactaggggtgagtggtgtagagatgactgcattcctatggcttctggcgaggacgattctacatcttttctagcttggtatttcaaagtttttccttacaagcgaaatgttggcgctgttgtaacagctgtgctggacaaggactaccaggagtctccaaaaaaataa

SEQ ID NO: 26379 - DNA, 423 bp, Zea mays
  Peptide Sequence Number=SeqID_68158
atggcgggagcagtccgatggttgcactgggtctactcgagcaatctcccagtggtctgtctttctctccagcatggctttatctcgcccgaacccccggcttggtgcgctggagttatttgggggtggacttacccaagcgaggatctctccgtcccctctggctcgtgggccattgggttcagggatctgatccccgatagtagccctgaagcccctgaggggagtgtatttccccttagtggctctctttttttatgggttaggtggtgtttaaccttgttgtctctcgattatcgcacctcgggagatatgtcgaaggaagttcttgaagacctggaggacgacttcgatgatgttgttgacactgtggttgatttcttcccattggaggaaatcgtctttggccctcgcatggattaa

SEQ ID NO: 26380 - DNA, 1341 bp, Zea mays
  Peptide Sequence Number=SeqID_68159
atgtattcaggaacatgcaatgagcttgcaaaggacattgggggctataagcatgtgacggtcatacatgatattaaagttgtagatgaaggaacggcacaggctctgcaaaaccttccattaggatctgcccctgctgaggaaaaattccccactttgaagaagtattcggacaaagctcctccaaatgataaatttgcttctcatgaagtcaaagttgattatgagtacaagagtgttgttgagccagacaaagttgttccaccagaccaaaggattaaggggtatctctatggtcctcaagttattcctgtatcaaatgctgaatgggaggcagtcaagttcaagccagagaaaggtgtgaagcttctaggatttacagatagatccagcgtaccacggcaaggtcaagggaatgttgctattggtgtattgacgccaaacatttcatcagtgaacaatatccaagattcattttacttcaatgtgctcccatttgctgaggacatcagagagtttcagtttcggtccttcagcagcctgccatcatcatctcagcccactgaagaacaacaagaagctgcagataacctagtgaagatgttagacctagcaccaccaggaatagaggtcctcaagcctgagtttacgccaaatcccatcttggagagattttacagttaccttgatctcaagtcaaagcagccagatgcaaatgtcccaccgcttgaaagatctctaaggaggataaccgaacctgatcctgatgtggttggccaacaaacacaattaatccagaatttaagcaaagcttttgtgctgaaggataaccccaagaaaaagaaagcacgaacacaggacatgttggcatatactggtgcaggtgatcaagctaaatctgtagaggacagagttctggaaaatacacatccttcaacagagaatgttgtggcaatcagagattcaaatccagttcaagattttgaggccatgctggctaagagatctagctcaacatggactcagaaggctattggagatatgcagaattacatagcagctttgttacagaactccagtgatgggggcaactatcaaaaagcacttgaatgttttgcttctctgcggaaggcctgtattattgaacaggaaccacaggaattcaaccagttcctaacgaagatttacgagagattgaaggaaggtgatgctgccaagttctttcaacttctctcctcaaaaaacatttcacttatcaacaaagaggaagcgcctgacagtgatgtgactgaagagatggcaagaagtttctacctgaaacgagaaaaggcgtctcagtag

SEQ ID NO: 26381 - DNA, 240 bp, Zea mays
  Peptide Sequence Number=SeqID_68160
atgcaggcggcatgcaaccgcgccaagtgggtgcacctctccgacttccagcgcgcccagcatggaagcctaggcccacgcgtcatgcaaccggtgcgccggatgctacgtgcgagcaactgcaccgccgcccgcgccactgtcacgcctcctcgactgcgggaccgggaccgggaaagggggataccccgaaaaggatccttctctgtgaaggaaccaggctccgagcctccctactga

SEQ ID NO: 26382 - DNA, 699 bp, Zea mays
  Peptide Sequence Number=SeqID_68161
atgggcgaggaggatggaactgacgagtgggccctggctgccagcgagaggaatctgcgcgagagggaggggtgtatgcacatgagaaggggttctaagggtagggttaaggggaaagcgaagctcttatatgagctgatgagatggacacttctacccaggatgggatacagagaggccaccactcatattcagctatggctacttggtgctttggtctcacattcagagtttgatgtggttgacttccttatctgtgagatcgaggacacaatattggatggtcttcgtgctcgccgacagctgccatatgctcactatctctgtcacatctttgtgcagctgattaggcctcctcagttccacggcacccttgaggcctctcgccttcagttcggttcctatcgtccagcccgtgaggacccagtccctgtgccagatccagtattagatgttcgggctgaagatgagacctttatacagttcgacacccagggtgccgaggatgacacttctttagatgttgatgagggccttgggatctcgccaccgcctcctatgccacctcgctcacatgatcacgaggcgggtagttctagtgctgctcctgctgcccctccagctattgaccctactctggccatgattcttcagtcactaacgcagcagcaggctcgtctggcaacagagcaggcttga

SEQ ID NO: 26383 - DNA, 453 bp, Zea mays
  Peptide Sequence Number=SeqID_68162
atggcaaaggtgagcaaaagtcaaaggcagcaggacttcgacctccggatggagtccctgaaataccagcaaaggggggcaaagactgcaaggcgaagaggaccaactcgccaggccaggctctcggattgtgtccctgcatatctagagtcttcatcgcctagtcgcctgagttatcgtcgaatgccaagcccttcgggtgtttgcaactgcatcatccaacacattcaggcttcaacaacgcttagctcggacatcggtcttcatcagcttgggtcaggctcacctgagttggctatatcctgctggtccatcctacagggtgactcaacagacagcccatcagttaagggggcgtttgacagagctctcacaacttcgctcacagcgagaatcactcctgccaagccaaacgataaaaacctgaactgcttcatggtgggagtggagtga

SEQ ID NO: 26384 - DNA, 1956 bp, Zea mays
  Peptide Sequence Number=SeqID_68163
atgaaccgtcttgaaacttgcactttttgtacctacatgcccattgaggtctcctatcgaaagcttctcactaataggattttacgactccaagatgtgccttttacaattctgaaaaccgtaccaagttcgtgcaacatatttgtcgtgtcccggcgcaggttaacaataaaaattgcaaatcaggctcgaagtagcaagccgaacgcttctattcggattcagtcaataagtcataaagcatttgatcaaatacagagggactggctacaagacaaacaggctttgaataatctggctgatgatgagataccaaaatattctgaaaattctatttcaggctcattctctcaagtctgcagttctataagcacttcttccatcgccgttaaaagttcagaaagtcatagaagaggtttcttaggaagtttaggacgaaggacacctgggagagaaaggaacaaagattttgatgctatcggccaattgaaggaagttcattatgttgccttaagctcagttgaagagtaccaacatatagatgaagaagaaaaactgaggaaggagctgaaggatactttgatgatgtatgacagagcttgtggaaatctcgcccatgctagtaaaaagattcagttattttctagtgactgctgtgaagatgtgaataaggtgcaagacgcactacagagagaggaagtattgaaacagacggttccagatgagaaaaacaaacatttagaagcaattggagcagttgagatggcaaaaaatgcatttacacacgagacctattccaagcaccaggctgagaatgctaaggctgtggatgcccttttatcaacaggcaaaagttgcaggcggtactcgaaacatgaaatagagctcgccactgattacttttctgatgcaaagaagattggtgagggtggctatgggaatgtatacaggtgtacccttgaccacaccgaagtagctgttaaagttgttgaacaagattcgatcaacaagattgatgagttcttgagagaggtggagattctcggccaacttcaccatcccaacttggttttactgcttggcttttgtcctgaaattggatgccttgtgtatgaatacatggagaacgggagtttagaagatctacttatcaacgataaagggcagccactccattggtttcttcggttccaaattatctttgatgtggcttgtgggcttgctttcttgcatgggacgaaaccagagcccattgtccatcgtgacctaaagcctgggaacatcttgctggacaagaactacgtaagcaaaattggtgatgttggttttgcaaagcccatatcagatcttgtgccagaagggctcacagagtacagagacactgtcatcgctggcacactgtattacatggatcctgagtaccaattaactgggactgttcgaccaaaatcagatctttatgctttgggtattatcattcttcaactcctaactggcaaacgtccacctgggctggtaaatagtgtagaagaagggattaaaagggggatattatcagacatcctcgacaagtctcaacctgattggccaattgctgaggctgagatgttggcaaaacttgggttgtggtgtactgccttaaaatgcagggacagacctaaccttgagtcagtggtgcttccagagctcgaaaatatcctgagcagggttactgtttctctcaaactcgaaaatatccttgcaccaagccacttcttctgtccgatattgcaggaggtaatggaaaatccttacgttgctgcagatgggcacacctatgaacacagggcaatcaaagcttggctcgaaaaacacaagatatccccaatgacaaatcagaggcttccacatctatccataattcccaaccattccttgcatgcagcaatacagcaatggaagttacgagcatcttaa

SEQ ID NO: 26385 - DNA, 432 bp, Zea mays
  Peptide Sequence Number=SeqID_68164
atggaggagggtgcgtcctcgccgggcgacggcgggggcatgcagttccaggtcgcggtggccgtgcgcggggacggccgcgccagccgccgagccgcgcggtgggccgccgccagcctggtcccgcccggcggccgcgtcgcgctcgtccacgtcatcccgcccgtctccttcgtgccgtctccatccggggagagggtgccggtggacaagatggagccggaggtggtggagatgtacgcgcaggacaaccgcgcgctcgcgcaggagatcttcctccccttccgccgcctcgtcggccgcggcaaaagcgtggagacggtggttctggaaggggacagcgtcgccgaggcgctggtgaggtacgcggcggagtccggcgtccgcagcctcgtgctcggatccgcctccctcagctggttccggaggtga

SEQ ID NO: 26386 - DNA, 1536 bp, Zea mays
  Peptide Sequence Number=SeqID_68165
atgcaggtgtggaagcagaggctggtgcagatggggggccgagtcgtggagaagcccacgaagggcgagctggcgggggtcaaccacgtgttggccatggacgccaaggcgctactccgggagcttgacgccgcttggctccaccgcttccgcgggagtgtggtgtccttcgaatggattgaggagtgcctcaagtctggggagaggctgcccatccacaactttgcaatcaattacgaaaaggaatttaagccaaagaatgcggtttgcactggaaatctagttgcgtcacggccctctaaaaggaccaaaatgtcgtctgagtatcctggggaccaccagataattagtggaggggatagggagaaggaactagcagctggagggcctccaggtgcaagtgcacatgtggttgaaggatcaagtgcggggaagcagcctaaccagtatgcaagtagccaaagtagctcagcagattccaaggacaccataggttcgcatggtacatttggcatagaggaagcctcttctggaggacccagcatatatgctccagcagacttgaacaagaacatcaccaaaatttttggaaggcttatcgatatatatagggccctgggagatgacagaagatcatttagttattacaaggccataccggtgattgagaaattgccattcaaaatcgaaagtgctgatcaagttaaaggtctccctactatcgggaaatctttgaaagaccatataaatgaaatagtcaccactggaaaactttccaagctggaacactttgagaatgatgaaaagtttgggggagttggtcctgcaactgcgctcaagttatatgagaagggacaccgtactcttgatgatctacagagagatgagtcacttacaaatgcacagaggattggattaaagttttttgatgatatcaagcaaagaataccccgacatgacgttagcgagatggagaaacttttacaagatgttgggactgatatcttgcctggggtaacaattgtttgtggaggatcatatagacgcggtaaagcatcttgtggtgacatggatattattataactcatcctgatggagaaagccatgtaggatttttatccaagtttgttcaacggctgaaggaaattaactttttgagggaggatcttatctttagcatacacagtgttgatgggactgatagcggggttgacacatactttggtctttgcacataccctgggcgtgagctgcggcaccgcatcgacttaaaggtgtacccgaggaacagatatgcatgtggtctgcttgcatggactggaaatgatgtactaaatcggcgatcatgcagatttaggctactagcagaatccaaaggatatgtacttgacgatactggattatacctagctacacgcggcagtggtggaaagcatgctggcagatcagacgccatagttaactgtcacaccgagaaggatgtgtttgagacgcttggattcccttggctggaaccacatgagcgcaacctttag

SEQ ID NO: 26387 - DNA, 219 bp, Zea mays
  Peptide Sequence Number=SeqID_68166
atgtattttaaacagaacttgcaaggtgtcaaagaagggggagcagccaatgatgaaatagatgaggcattatcctcgaatagagatggaaaagagaaggcttcaaaggatagattcaaggtgatggtgatagcaaataaaaacacagcaaaggatggaattaagacaaaacttgtaatgcgacaaggagtgaaaagaaatcaagggagagttaggtaa

SEQ ID NO: 26388 - DNA, 801 bp, Zea mays
  Peptide Sequence Number=SeqID_68167
atggcttccggagcaggggcagcgccggcgttgttcgacgtgaactatgtgaaggactgggggcgcctggtcgatcatgggactgaggttaacctcatcttggatcagagctccgccgctcgtggtggtgggttcaagtctaagtccacgtacgggtcagggttcttccacttgaggatgaagctgccgtccggctacacggccggcgtcgtcacaaccttctacctcatttcgcagccggaagacggcacccgtgacgaggtggacttcgagttcctgggcgacaaggacggcgtgcccgtcaccctccaaaccaacttcttcgtcaacggcaagggcggcagggagcagcggctgcacctctggttcgaccctgccgccggcttccacgattacaagatcttgtggaacccctaccagctcgtgatgttcgtcgacgagacgccgatccgggtggtgcgcaacctgaggggcagcgtgccggggtacgagttcccgacgaagccgatgctgatccgcgggagcatctgggacggctccacctgggccacggacggcggccggaccaaggtggactggtccagggcacctttcacggctgggtaccaggggttcgacgtcagcggctgcgccacggccagcgcgacgccgcggtgtggctcgccgggcctgtggtggaacggcgtcggataccggaacatcaccgcggcgcagcgggcggcctacgagggcgtcgtcaagaagtacatgacctacgactactgcaagagctcccgcaaaatcgagtgcgcgtatatttga

SEQ ID NO: 26389 - DNA, 1008 bp, Zea mays
  Peptide Sequence Number=SeqID_68168
atgaactcaacaaagaaagttgttcagttgtggcagggaactgggatagcggaagaggccgatgaagatacctctacagaagatgatttcagtggtgaaccaccagggttggacaatatcataatattcggtgaagctgaatttgacagtgacagtgttcctctagtgtttaaggaaaaccagactgttgctgcaccagcaaccaaaaaggtaaagcccctggttgatttggccatcaatgcagagcatgaggaaggtcctaaggagcttgctgctactaaaaaatctgtgaaagaggttgacaacagtgtgcaatccctggatgaattcatcttcaagaaaggagcaccagccatttttctcgctgaggcagcagagggttctattgtattcaagcaaggaaaactttgttcatgcctagcacaacgacataaccctgtcagcaactacttatcatgtggcacaattgtgtgtgaacaagagcgtgagggatcctatagtttctgtggcgcgcttgtcttgaaggaaggtagttcttatgctgggttaagtgtggttgggctacccttttcaaaagttgcagctgaagcatatgctaagaggcttgttgactatgatagaaatgctgcaacaaggactgaagtttgtgatggccaaagtgactactataaaatggaaggaaacaattgtctttctgcaaaggaggggtcagttctaaagcagcagcaagaggaagccgatgaagcggctataagctaccaggggaaagtgattattataattgatttagggggttgtaagaggattttgcacaaggatggagctactgagatggatgagcttgtggggtatgaaatgttcatacatgattttgcatgctctaacaagaggggtggcaccatcgatggagaggggatgcaagaatggatcgttctcattggtcttcgcctgcaacagccacatttgcttctggctgtttctgttctttcttctctcttttctaactag

SEQ ID NO: 26390 - DNA, 765 bp, Zea mays
  Peptide Sequence Number=SeqID_68169
atgtcccagcctagagggacaagttggccatcgaccctgccgcgcttgcagtatcctcggagtgtcgcatggaggtcaccggacccggttgcagcgagggggagtagcacaggtggtgtcgtgccctccggtatccttggtgtcgtcaaggcatcgcatggggaaagagcctatggaagctccttcctccatggcggaagtggcatcaagggtgctgcggcctccggtgccttcggtggttgctcgaaaagaggtgaccacccgaagcgctcctcgcggtatgctgagtctttctcgctctttttgtctttggttttcgtcctcgcttcaaatttttctctgatttctttggttagcgtgtatgtgtcgtctagggcagaggcgctactggccacccagcgggaggtggaacaggtgcgtacgaaggccgcctgctttgaggcaaaggagcgcgagcttgccgagcttcatttcgaggctgagcgactccaaggcgaggcatcatgcttgtgctcggagtgccacaatgctcatggcaacgtggaccgcctctgggaggaggggtcccgactccaaggaaacctccgcgagacgagtcttcgggctgaggaggttgagtcgtccctcaaagaacctaactgtcgcctggagaaggcggacttgaagctcttgaaggaacacaacacaaccagaggtcagtattttcctcgcccttatgtcttatttatctggttaaagcatgatttagaagattattggtcctag

SEQ ID NO: 26391 - DNA, 414 bp, Zea mays
  Peptide Sequence Number=SeqID_68170
atggaggacatcacaaacatgttgtggagagtcaacattcggttccggaatcctcggtctgccgcgacggacaagggcgaatctggcgggggcgagaccgcgcatggactgaccaggcgaagaatacgggagagctggcgagattcaaaagctgcggaagatcccggcgaaacggaccgcagagaaatcgctgcgtctgtttcggtggggaagatgctcctgacgaagggggctcacaaacagagaaacatgagtctgcgcgcatggaaggggctttctgacgagcgggcccacgtggcggtgacagaagggagcgcgagcatgcgcctggggatagggcaatggggcctagatggcagtggccgcggtgcacgtgtggagagggaaaaactaggcagcgggtcccgcccataa

SEQ ID NO: 26392 - DNA, 300 bp, Zea mays
  Peptide Sequence Number=SeqID_68171
atggatggtaatcttaatgtatggaaacttcgtcatgaactgccatttgcatgggaggagaagggcctcaatgaactatgtggcatgctgaaaatagtagatggtgacataaagaaatgcgctgacaactgtggacatgtgatggcggtccaaaacaaacccaactttaagaaggataaatctcaaaagaagaatgacaaggctaaagatacgatctccaagccaaaccaaaagcccaaggctggaccagttgtagatgctgaatgtttttattgcaaagcagtacttggcctctattaa

SEQ ID NO: 26393 - DNA, 384 bp, Zea mays
  Peptide Sequence Number=SeqID_68172
atgccgttcgctagcccaatgaagcgcccacgctcgagcccggtggcgccgacaggacgtagtgccccacggtggacagctgcaaggtcgacctcagcaagtgccacgactaccactgctgccacaaggatccagaatcaaaggttaatcttaatcccacgtctagctaaaggacccgggtactacctcgctgatgagcctggggtgcactttgtttggcagcccaaccaagaatcatcggtactcgtcatgtcgcgcgcgttcgacgacttctatatcgaggattgtggcgtcatcttggctccggaggtgacacagaggaggatcgacaacagtgaccagttctcaaatgttggggacttgttctcaaatgctatgaattaa

SEQ ID NO: 26394 - DNA, 240 bp, Zea mays
  Peptide Sequence Number=SeqID_68173
atgacgcgaagcaaacgggactgcacgcgtgttggtgacttcgagaaggcccgtcgagaagggcgtcctttggtcggtattatcaaggccgaagccatgctcgggcgaggcggaagtcttcctgaggctgtggccgagcctgctctatggctcgcagctgtgcagaacacagttgaagaagtggccttctgtgggatccgcgggggtagttggccgaggccgagctcaggcgaggcgtag

SEQ ID NO: 26395 - DNA, 1110 bp, Zea mays
  Peptide Sequence Number=SeqID_68174
atggccgccgcctccacgaagacggcgaacatccccgcgacgatgcgggccgtgcagtacgactcctgcggcgggggcgccgctggactcaaggccgaaaaatactcgttatgttttgagaatcgttcctttgtcttcttgcaaagaaaccagtcgacggagtttcaaattcctctcatgcagcatgtggaagttccggtcccttcggcgaaaaagaacgagcttctgctgaagctggaggcagcaagcatcaacccagtggactggaaggtgcagaaaggcatgctgaggcctttcctgcctcgtaaattaccttttatcccagtgactgatgtggcaggagtcgtggctgatgttggtccaggaatcaatgggttccaagccggagatcaagttgttgctatgctcaactcatttaacggaggtgggcttgcggagtatgctgtggcatcagaaaatctgaccgtcaagaggcctcctgaggtatctgctgccgaaggcgcagggctgcccatcgccgccggcactgccctccaggcgctcaggaccatcggcgccaagttcgacggtactggaaagcccatgaacgttctggtcaccgcggcatcaggtggcgtcggcctctacgccgtgcagctcgcgaaacgggctggtctccacgtcactgccacctgcggcgcgcgtaacgtagagctggtgaagagcctgggcgccgacgaggtgcttgactacaggacgccggagggtgccaccctgcagagcccctcgggcaagaagtacgatggcgtcgtccactgcactgtcgggaccagctggtcgacgttcgagcctgtgctggccgccacggggaaggtgatcgacatcaccccgaacttgactgccatcctcaaatcggcgctgcacagtgtgaccttcgccaggaagcggctcgtgccactgctcctgtcgcccaacaaggcggacctagagttcctggtcgggctgctgaaggacggcaaactcgagacgctgatcgactcgaggttcccgctgagcgaggtgagcaaggcgtgggagaagagcatcgagggccatgccactggaaagatcattgtcgagatgggagactga

SEQ ID NO: 26396 - DNA, 363 bp, Zea mays
  Peptide Sequence Number=SeqID_68175
atgtggtggtcccatccgtggactgagtatgatgaagagtgcgtacgatccggcatgatgaaagaggaggatggctcatcgcgtgaggaaggcgatgggagccagacgtgcgccggttcaagaatgacgactagccgaggcgagaaagacgagtcgcactggggttcgaggagaacgagcgggagcgatttgtctgtgggagaggggagagtgattgtgggagaccactgggggagtcgtcggcggctccaatacttctcgctccacgcgcgtggggagcatgaggcgagctgggtcctcggattggccgcgcggggggagtcggggcagtccgcggctgggagccggttggaccgcgtctag

SEQ ID NO: 26397 - DNA, 357 bp, Zea mays
  Peptide Sequence Number=SeqID_68176
atgctgctgtctgcctgcctgccggtgatggagccgtcggggtttgcaagtcgcgacctgggctgggccgacgtcgggaacacggttgcatcctcccgccttgtgctctcttcttccaggaacaaggtgaagccatggcagggcaaaattgccgtcgccacgccgctcgccgaagttcgctgttggagatgcactatcaaaggcgcgcagttgcgttgttcctctggacagtgccgtgatcacaggttgacgaagacgcgttcgttgcctaggtctggggatccgttggctgttaattcgaagagaacatatctaaggcacatagtgcacatattaaatcatcaccattcattttaa

SEQ ID NO: 26398 - DNA, 384 bp, Zea mays
  Peptide Sequence Number=SeqID_68177
atggcgtacacagccgaaggggtatttctcagatctaatcccagctgtacctacacgattcgacggtgcataaccccttccccatgtccgacaggaacgcgctgtggcgcgtgggggtccacgacggacgccatcgctggaataccctgggcactatacgggggtatttataggtacccaagtgtccaacgtcccaaggcaaggacgttaatgccctcgggtacccggactatcctcagaatattcccacaatgggaggttacagaccgtcattacgaaaaagctattacagatgagacacgtaacatgcttgtccgcgcggggcccgttacagtgggccgaatcccacgtgggcctccgggcgagatgaggacgcgggactag

SEQ ID NO: 26399 - DNA, 906 bp, Zea mays
  Peptide Sequence Number=SeqID_68178
atgcgcaagcccgcctccaccgccgccgccacgctctcctcgcacccgctggccctacgtcgtctggcccgcctactcgcgctccttgctcgtcctcctcagccttgcggatatctgctcccaatcttgcgccgcggcctccacatttcacgcagccgatctctgctccctgcggctgatgctgaccaacagccttggatgccacagctgttgtccgttgcttgcctaaccattacagccaagatggaggagacagtggttcttcgccgtctggacatccatcagaatcaggttcccagcgagaagtacaatttcgatttagatgctattcagaggatggagatttacgttctagactctctgaattggaggatggaagttgtgacgccattctcttacatcaactatttcgtggacaagttcactggcgggaagccgctaagttgcggattcatttctcggtgcaccggcagtcttgaagcaacgaagctcctacagttcaggccttttgagatggcagcagtggttctgtcagcagctgctgagtctcaagaaaatgtaaggagatgccatgaagcattgcaagaagtgggattagtgaagaagaaaatagactacactgcgagtccatctcgcgtgctggatgcctcatgctttagcttcaagactgacgataaccagacaaccggctcagcactcaccgtcctatttgcttccgatatacgtacagtgtttgtgatgagattgagttttaacagagatgcccagtttggtctgtttgatggagatggtaaaccggctaaggctctggatgcaagacctcttactaatgttgtcaacgacctcgaagccaagatgaaaaggtggacagtcaagttaaaggggctgggtctttcatgcagatag

SEQ ID NO: 26400 - DNA, 2361 bp, Zea mays
  Peptide Sequence Number=SeqID_68179
atgctcccgtggctcgtcgtcccgctcattgccatctgggctgctacccagctactcctcccggccgcctaccgcttggaggtcacctccccgcgcctcgcctgtgtctccgtcctcctcctcaccctcttctggtatgagatcctcctcccgcggctctccctctggcgcgctcgtcgctccgcgcgcctccgggaggagcgccgcgcccacgccctcgagctccacaagctccgcaagattgccacccgacgctgccgcaactgcagcaacccctacagggagcagaaccccggcggcggcaagttcatgtgctcctactgcggccacgtctccaagcgccccgtgctcgaccttaattcgaccgggaaggcctcctccaggtggccctgcgctcaagattgtggagactggctcgacctgcgctgctctgccagccccagtacctccttctgggggttctcatggcacctactgttgtcgttttttacaacaacagtgaggtggctcttgaggaagacattcagatttacatcgtcaggtgacggtgagggcttgggcccagatggtaagaggttggcaaaggcaggggataatggaggaaaagctgaggagagcagggtcgagaaggcgaggaggaaggcagaggagaagaggctggcaaggctggagagggaaatgctggaggaggaagaaaggaagcagcgggaagagatgacaaagctggtggaggaacgcaggagactgagggatgagaaagctgcggcagaggagcggtccaaaagcgctacccctgttggggagaaggatgctaggaaggaggcagagaggcggcgccaggagaggaggaagaaagaggacaaggggccaagcaagagtaattcagattgtgaggacattgatagacggttgggccgagaaggcgacatgaagcgggccttcgatagaaagattgagtctgacagacgtgagggttacaagcctcattactttgaagctaacaatcgtagtaataagacagtggagagcagggcaaagtactttggccgtatgacgggtggtttcttatcttcgtcaagagggtttggtggtggttccttctttggcagaagtatccaggcccctgcccctcaagttaacaaggttagtagacccatagttcctgcaactgaccagggcaatgcagccaaaagggatgtccaacatgcatccacacaagctgcagccaaatctacttcagctggggaaaccagaaattcatggactaattttaatcgaccggtcagcccaaatgtgcagccagcccctaccagctttaaaaagtcatggcatcagctgtttagtcgttcagcatcagtctccccttgtcctgatgctacaacttcagctcgtgatacgaatcagaagccagagccaaatggagcgcaactaagcaatgcttatacattcctctttcagtaccctcctcttgacagcaagccaagttcgagccagtccatgcaatttccaggttttccaccgcttaatggagcacctcccaataagccactacctcattttcctgctggacatatgccattctatgatgatgcagaatctgtggtatttgaagatccagaacagtttgaggacccatgctatgatcccgatgcaatcgcattgcttgggccagtttcagagtctttagataatttccctccagacttggattgtggattcatctcgagtgatgttgtcaaggaatcacatgggaggccttcaccaattgagtctcctctctctaggtctcgtatggttgaagaaaatcctatcaagcccctgcacttgttagttgcaaaaaggcctggtggtcctattcagcctgaggctagcagtgagcaacgcacatggcaaatgtggagcacaccattggttcatgaaagtttaggtctccaaggtcatcaaagtcagtggcttcaacagacaaatcaattaaactatagtgccaatgttttcaatggcagaacaaacgcccccctgggtactggtttgaatgacagtgatccttggctgcagaaagcacctttcaagcaattgccacctgatactccaagcctgttccttccacatgaaataccagggaaattacacaacgacttggtttttgggtctccaaacaaatcagcacgtgaacacccctttggatcacctggtccttcttggcccaaggaggaactgtcgttgagtggagcccaggaaggtggtggccatttttcattgctgtcgggcgcacatgttggcggcagcggagacttattttgctccacaagtcctgatgtgcagtccttggtgtggtctttcaacgaaaaggagacagcatag

SEQ ID NO: 26401 - DNA, 738 bp, Zea mays
  Peptide Sequence Number=SeqID_68180
atgaggcgctctaccagcgacgcgacgccgacggtggcggcggcgctgacgagcccgaagcccggcgccaccaagcggcagcgggaggcggcgccgctcggcgacgtcaccaatatcctccccgagaccccggccccgagtaagcccagaagaaatgcacgccgccggcccttctccgcgccctccgacgcctccactgcctcctccacctgctcctcctccgcctcgttcaccccggcgctcaagacgtcctcctccgcgtcggccacccccgcgcccaagccgccgccgtccttcactgcctccgtcacgcccgcgcccaagccgtccttcgccgccgtcaccgacgaggaggggagcgcgttcaaatctccgaccatttgcacggtctatgcgaggcgcaggactaccgaggccgaggctgagggacggagcaaccccaccatcaccaacaggggcaaacaacccatcggtgctgcggcgagttgccctcctcttggaaaatctacgaggaacattaggaaaaaggatgctcgacccatctcgtcgtcagctacctgcggtgaagctaaaaagaagctgcggccgcttgcgaggacacccaagttgccagaggaatttgtgaagaagcaaaaggcatacttcgcagatgtggatgcctttgaactggcggaggaggagcgtagtacaacacggctacaggcatgtggaatggatggtggtgatatccggatctag

SEQ ID NO: 26402 - DNA, 570 bp, Zea mays
  Peptide Sequence Number=SeqID_68181
atgcggagttcgtcgtcttccggggctgagcccgagtccgagccctggggtcgggcgaagcggagttcgtcgtcttccggggccgagcccgagtccgagccctggggtcgggcaaagcggagtttgtcgtcttctagggtcgagcccgagtccgagccctggggtcgggcgatgcggagttcgtcgtcttctggggccgagcccgagtccaagccctggggtcgggcgatgcggagtttgtcgtcttccggggctgagcccgagtacgagcccaggggtcgggcgaagcggagttcgtcgtcttccggggctgagcccgagtccgagccctttgggcgatgcggagtttcctatggcgccagaggccggacttggctgctgtcagcctcactctgtcgagtggcacaacagtcgaagtggcgcaggcggcgctgtcctcttgtcaggccgtcggtcggcgtggcgacttggccaaggttgcttcttggcgaagactgggcctcgggcgagccgaagcttgcctacaccaaggagtacattgatgggcaattctctggaaaccttggatag

SEQ ID NO: 26403 - DNA, 504 bp, Zea mays
  Peptide Sequence Number=SeqID_68182
atgggtagtaatgctcgtcgcgtcgcgcgtgcgtgcgtgcagcaggggaggcggcgaggcgccgccgacggtgtcgtccacgcggccaagctggctgcggctgcggcggcggcggagcctcaccaaggccacacgcagaccacgaggcggagcaaggtggccgactccggagcctacgcgcaggccgcggcggcggcgaggaggtcctgcttcgcgctggccaagcccgtcgacgacgacctgtacggagtccctcccgacatgctctacggaaagccgccgccgccgggagcgaggtttctcatccgaggcatcgagaaggtgatacaattcccacactttttccagcggtggctccccttgtcctaccaagtcaaaatctacttccccaccgaggacgacattcaacatcacatgtatcatggtatcgtcattgtcctggtttaccctctaggccacgttgcaccgactcgccatgtgcacgccacggtactaggtagttag

SEQ ID NO: 26404 - DNA, 312 bp, Zea mays
  Peptide Sequence Number=SeqID_68183
atggagatcatggaggcactgcacagccaggacatcgcacccgtctttagtctctgcgccaagtacattgtcaacctactacccggctccgtcgccaaggtcctcgccctcttcctctcaaacgtcgtcaggagttctttcctagcagcattaggttatgtccccttgcgtttggttgaagctaagttgcaagtggtgcagctagatgcaaatctgctaagtataaggcgagctctgttggagcaaggaatagaagcagtactcagtcgtgcagtacgattttttggccactgtatcttgtgctacttatag

SEQ ID NO: 26405 - DNA, 288 bp, Zea mays
  Peptide Sequence Number=SeqID_68184
atggtggccgggttccgtcgcacgatcttgttcccaatgcccaggtccccgctgccgccaacgagaggcgcggggccgagcggcgccaacaagtatggcgcctaccgcgcgcggttggcaagcctgccgtgccggttccacctgctagtgctccagcttgacgacgatgtcgccgacctgcgggagctggtaggccgcctggcgtcgaaggcctccgcggaggccatggccgagggtgcggcgcaactgggccgcgtggtcttgtcactctctgagctgctgcattag

SEQ ID NO: 26406 - DNA, 1245 bp, Zea mays
  Peptide Sequence Number=SeqID_68185
atggccggcctcctccacctccagtccacgcttctaccctcggcatccgctctccgccgccgcgcgggcgcgccggtgccctgttcgtcccgccgccgatgccgggtcgaggccaagatccgggagatcttcatgccggcgctcagctccaccatgaccgagggcaagattgtctcctggacggccgccgagggcgaccgcctctccaagggcgaccccgtcgtcgtcgtcgagtccgacaaggctgacatggacgtcgagaccttccacgacggcttcctcgccgccgtcctcgtgcccgcgggcgagtcagcgcccgtcggctccgccatcgcgctgcttgccgagtccgaggaggagatcccggtcgcgcagtcacaggcggcctccttctcctccagctccccctcgcctccgcctccgcaagaaactgctcaagaagcatccccttcgccgccgccacctcctccctcggcgccggtggcagtctctgctcccgcgctaccttcgccagcaacacaaggcgggggacgtgttgttgcttcaccctacgccaagaagctcgccaaggacctcggcgttgatcttttctctgtcacggggtcaggccccggcgggcgaattgtagccaaggatgtcgaggctgcccttgctgcgcccaagaaggccgcaccagtgactgctgcacggccggatgtgccattggggtcgacagtaccattcacgacaatgcagggtgctgtcagcaagaacatggtggagagtcttgctgtcccgaccttcagggttgggtacaccatcacgactgatgccctcgatcagctctacaaaaaaattaagtcaaagggggttacaatgacagcactgttggctaaggcgacggcaatggctctggttcagcatcctgtggtgaactgcagctgcagggatggaaagagcttcacatacaacaaaagtataaacattgctgtggcagtggccatagatggtgggttgattacaccggttcttcaagatgctgataagcttgacatttattcattgtcaaggaaatggaaggagttggttgataaggcgcgagcaaagcagctgcagccccatgagtacaactctgaacagaacatggtgattggtattgacgttaaggatgttgctgtttattataattataatttccctatcattttaaaatcccaacaccttgctccagaggttcacatgaaaatccttgtgtctttgctgtag

SEQ ID NO: 26407 - DNA, 321 bp, Zea mays
  Peptide Sequence Number=SeqID_68186
atggcgccgaggtcaggaactggaagtctggaagattccatgagctacgggttctgtcctcctctccctcctaatctttctctgaaatggtatgaagcaagagcatttactgctgccagacacctctcaacaacatcgctatcctgcaccagacaaatgagatggggttccttggtttcgccaaagtcaggtgaatggtcctatgtcctccaaactgattctgtcacattacattgcattctggactacaaaaatacatgtgatgaaaaaaataaacagcaagccgagatgtctgggggaatatccattgccctttattga

SEQ ID NO: 26408 - DNA, 201 bp, Zea mays
  Peptide Sequence Number=SeqID_68187
atgccctgggcgatcgccagcctatcgccccccgcgtcgtcgacctccacaacggcgcgtctgcaccttgcaggggagctcgagtcgtcatcggcaccggatagcgatgttgttgagagacttccagttcctgacctcggcgccatggacctggacccagaggggatcttccgcgacgacagcgatgaagacgaagactag

SEQ ID NO: 26409 - DNA, 618 bp, Zea mays
  Peptide Sequence Number=SeqID_68188
atgaatgcacgtcactggggaggagttgggaggcaggcaactgtaggccgccgaggcacagagccggcggccggcgcctcggctatgcggcggtcagagtgggaggaccggtgcaagcggcacccggagcaccggacgtccaagggcgtgtgcccctactgcctccgcgaccgcctcgcgcacctctccgcgtcctcctcggcgaccaccaccacgcgcgcgtcctcgtcctcggcgcccacgtccccgtgctcctccggcggctcgtccccgccgccccagtaccgcgccgcgctctccgcggacgtcagctccgtccacgtcgtcgttgccgggtcctccttcgccgacgtcgccgccttctcccagccgctcatgccgacctccgccaacaagaagccgccgcccgcgagccaggacgagccggccagggggaagggcgaggcgaagaggaggaagagcggcaagaagaagaagatcgggaggttcctgtccaggctcgttggcgcggagaggcggcggcacaccggcgacggcggcggcgacggcgacggcgccgagctcttccactccagaaccatgaaggagaagacggcgtccaaatgggtgttcttctga

SEQ ID NO: 26410 - DNA, 174 bp, Zea mays
  Peptide Sequence Number=SeqID_68189
atggacgacaagatgtcacgcccgaagtacattcagaacaccatcttgcgcgttgcgaccaactttgtgactactagttcggaacttgccagccgttgttggctgctggagccaggcctagtaccgtccatgatctgtggcaagaagaaggcagttccagacagacagagatag

SEQ ID NO: 26411 - DNA, 267 bp, Zea mays
  Peptide Sequence Number=SeqID_68190
atggacgcctacttcacagcggactcccccgccagatgccgcatctgtggtgccaccgtcgtggggctcggtgccgacacggtctgcctcggcgccgcacactacgtgctcgcaggggagagggtggggttgggtggcaatgacgggcataccttcctgcagctaggacgcgggactgaggacgcgggcttgctacctactagtccaattgaggtcgaggagccgcacagcagggcagagccagagcccattcaggtcgaggagtag

SEQ ID NO: 26412 - DNA, 150 bp, Zea mays
  Peptide Sequence Number=SeqID_68191
atgtggctaccgagattgttgttgctcaagtccagcaggctctgcaactcctgtagcttgctgatatccgaagggatcaagccggacagacctgagatctggttgtgtgcgagattcaacatgttgaggacaccaagctgtcgagtttag

SEQ ID NO: 26413 - DNA, 1083 bp, Zea mays
  Peptide Sequence Number=SeqID_68192
atggcggaggaccggagccccaagcccatccactgcaaagcggcggtgtgccgagccgccggcgagccactcaccatcgaggagatcgtcgtcgacccgccgaaagcgtacgagatccgcatccgggtcatctgcacctcactctgccacaccgatatcaccttctggaaagctaaggtggcaccggtgtttccaagaatactagggcatgaggcgtacggggtagtggagagcgtgggggagcacgtggagggcttcgcggcgggggacaccgtggtgccgacgttcctggggcagtgcgagcgctgcgccagctgcgcgtcggagcacagcaacgtgtgcgacgcggtgccgttcgtcatcggccccgggatgcggcgcgacggcaccacccggttccgggacgcgcgggggagcccgctgcacgacctcctcgccgtctccagcttcagcgagtacaccgtcgtggacgtgaaccaggtggtcaaggtcgaccccgccgtgccgcccaagctcgcctgcctcctcagctgcggcgccggcaccggggtaggagcagcgtggaggtctgccaaggtggagccaggatccactgttgcaatctttggcctcggatctgtcggtttggcggtggtccaaggcgcgaaaatgtgtggcgcatccaagatcatcggcgttgatctcaaccctgacaaggaggaagtgatcgttgagatgaccggcggcggcgtggactacagcttcgagtgcatcggcgtgccgtcggtgatgaccgacgccttcagatgcaccaagatggggaagggcaagacgatcgtgctggggctggggagggacagcgacgaggtgtgcctgccgtcgctggagctgctgttcgggaggtgcgtcatggggtcgctcttcggcgggctgaagcccaagacccacatccccgtcctcgccaagaaatgcatggacaaggagctgcagctggacgcgctggtcacgcatgagcttggactgcaggacatcaacaaggccttcgacctgctcctgcaggggaaaagtctgcgctgcatcctctggatggacaaggacaagtaa

SEQ ID NO: 26414 - DNA, 321 bp, Zea mays
  Peptide Sequence Number=SeqID_68193
atggtctacgtcgacgactttgttataaagatgaagaaattcgacgacttcatcaccgacttcatcaccgacttggaggaaacattcgccaacctccaaagattctggatcaagttgaacctcgaaaaatgcgtcttcagggttcctaagctgaagtggggctcgatgactcttggtcaggggagattccaagttggtcgtcgaccaggtcatgagggcgatggagccacgcaacccatagataagcccgtccctgatgggatcttcgcatccgacctctatgagccctctatgaagatcaagcagacgaaagaagagtag

SEQ ID NO: 26415 - DNA, 1542 bp, Zea mays
  Peptide Sequence Number=SeqID_68194
atggagaaccagggacccaaacccatccgatgcaaagcggccgtgtgcagggccgccggcgagccgctggccatcgaggaggtcgtcgttgacacgcccaaggcgcacgaggtcaggatacggatcatctgcacgtcgctctgccacagcgacgtcacgttctggcgcatgaaggatctccctgacaatatccccagaatatttgggccacgaagccttcggcgacacaagctgactactttgtcaaccgctgagcggatggaatttgaagactacatgaagaagtgggacaaggagttcaagcaacaacaagctaaggagcgcgagaagatggagagttggtacctctcgcactttaggatagatcaccaccagaaggtccaagagagggaagttaagctcgcttccctgatggccctgctgcagcctgcagcagccctcaaccaccatctggcaccttacgctggacaattcggagctgcacagagcccaccacatggctcacaggagaagcctagcacaactggacagtccagttatagtaccgaaccgttcggtatcggtccttcgtggaccgtctggtcccttcgtggaccgttcggttacccagacgtgatcgtccggctgattctgggtatggccggacaatccgagcacgacctcaaaccgtataggcacctcgtggaccatccaacacctttcgtcggattgtccggagaaggtcggcatgaggataaccggtcacctaagccctatgttccaaagactggtggggtggtggagagcgtgggtgaacaggtggacgagttcgcggcgggcgacgcggtggtgccgacgttcctggggcagtgcagcgagtgcgtggactgcaggtcggcgcgaagcaacatgtgctccaagtaccggttcgcggtgcgcccggggatgccgcgcgacggcaccacccggttcaccgacggccaggggcgcccgctgcaccacttcttcggcgtgtccagcttcgccgagtacaccgtggtggacgtgaaccaggtcgtcaagctcaaccccgccgtgccgccggcactcgcctgcctgctcagctgcggcgcctccacgggaaagaagttcggcgtgacacatttcatcaatcccaaagagctcggtgaggagaaacctgtccaccaggcgatcgccgagatgaccgacggtggcgcggactactgcttcgagtgcattggactggcggcgctgatgaacgacgcgttccggagctcccgagacgggtggggcaagacgatcattcttggggtggaaatgcacggtgcccccctctgcatctctcctcacgagatcctccacgggaagtctgtcatcgggtccatgttcggcggggtgaagcctaagcaggatatccccattctcgccgacaagtacatgaacaaggagctggagcttgacaagttcataacccatgaagttggcctcaaggacatcaaccaagcttttgacctcctgctgcaagggaagagtctcaggtgcaccatatggatggacaagtga

SEQ ID NO: 26416 - DNA, 384 bp, Zea mays
  Peptide Sequence Number=SeqID_68195
atggaggagagcaccacccacggccgggactggaactcgacctcacctgctatctatgtacttcggtggcggctactcaaccttgcggctgtaccgagacctaacgaaaccttggctccctacgtccatgacccttcgtcgctcgactggatgaacgaggggagggagggcttatatccgtgcgggcacgcgcccccgcaggaagccgcaggccgggaactcgccgcagatttcgacgtgactgttatggggctgggtagtgggcccgtgccgatcgggtcgcggccggattccacgcgccgactgcggcggtgtttgttgcggtgcaagattggggacgaagcctgccagcgcggacccaccctccagcggcacaggaaatag

SEQ ID NO: 26417 - DNA, 273 bp, Zea mays
  Peptide Sequence Number=SeqID_68196
atgaggctgcgaattgtaatttcatcaaggttgtactccgagtctataaatatagaaacagtaccatgcataaagccatcatttggaaagggtggtgggcctcgttttaacccattcttcaacatacctctggttattacctgtgaaaagctgaaggtacctgatctcgacgggccaacgctacgtgacctggacgcctacttcctcacctaccaattcaagtccacacagtttccaggtgtcagcaacagcccccaaaccgacgacagctag

SEQ ID NO: 26418 - DNA, 498 bp, Zea mays
  Peptide Sequence Number=SeqID_68197
atgggtagaggcaggagaggtcggggtttgcctcgccatgctggtgacaagaggaagcgtgctccgagtcctcccttggaggtcttcggcaattcagagtactcggaggaggtttcctccgggtctgaacgatcgtcggctcctgcttctcccccgcgcgctagactcggaggatcagatgagtcgggggtctcctcggatgaggcggactcctccgactcctccaaggagtggagcggcggcgacgatgatgacaagggcgatggcagcagcggcgatgacgacggagacgacggcagcggcgacgacgacggcgacggaggcgacggtagcagcggcgatgacgacggcggaggtgacggcggcaagggcgacgacagcaagggcggcggcggcgacaacaacaacagcggcaaaggcgacagcggcgacggtggcggcaagggcagcggcagcggcagcaagactagtggcgcaatgccactggttaaatattag

SEQ ID NO: 26419 - DNA, 423 bp, Zea mays
  Peptide Sequence Number=SeqID_68198
atggacccaagtgagcaacttgatgtaaaatggtacaagtgtgaggatagtgaacagtgcattgtccggtgcaccggacatcatctccaacggctctctccgtgggtgggcgtcttctgccaaaggctagctaatgtggctgctgtccagtggcgcaccagactgtccagcgccatgacggagaaggaaaccagcaaatcagatcatcgggcggccattgctcgccgaaaatccaatggcgcaccggactatccggtgagcccacagacaaagaagttttccatctttcttgtggagaaggcaacaactcctatgcctctaatgcttaaaaaggagcccctagacgccctctcttggtactcaagcatcataagtgcacactataactctgatactccgcgaccacattgttcagtgatttga

SEQ ID NO: 26420 - DNA, 168 bp, Zea mays
  Peptide Sequence Number=SeqID_68199
atggatgcacacggcgacgccggccacgacttcccgagcgttggtgtcgcaacacactccgcgaagcctggtcggcacgacggactccgaggatgtgagatcttcggtggcgggtacggcgggcagctaatgcagggagagggggaaaccacaggtttggctgactag

SEQ ID NO: 26421 - DNA, 288 bp, Zea mays
  Peptide Sequence Number=SeqID_68200
atggagagtcatgatctccgggcagaaagggaatcacgacttgtgggtggcaatgagattgatggttgtggttatgactctggtactggtaagtggtattctttccgtttggaaagggttgtcagcattgcaaccactgctcaggagaagatgaagccgtggaaggagacttccaggagtttcaaaaatacgacgagttctaggcgtgggttagcggcaacccccagtcggctgcctgtgaaggccgcgtttatctacgtttcgttttcgcactttgatttattgtaa

SEQ ID NO: 26422 - DNA, 375 bp, Zea mays
  Peptide Sequence Number=SeqID_68201
atgtgctcgagttggcgccgacatcctgggcccactggtcggtctcccttcggacgagatgctggtgctgcgctcgttgatctggtggcaatctggcaactgggcccgcatgtcggccactcatgtgcacgctccgagtctaccactgccacgtgggatcagtctgtcggacaggtcctctcttccgcggaaccggtctcaaccgaacgcgacattggcgggagctctgcggggattcgtttgggggtgctgggggagataaagttcgaccccgtagcgaccttaaatcgggcgccgagtcttcacctcctttcctctctcgcccaggtggaaattgctgagcaggagatcattgaaggcaagttgtgcccttaa

SEQ ID NO: 26423 - DNA, 1029 bp, Zea mays
  Peptide Sequence Number=SeqID_68202
atggccccctgtgacgtggtcggtccgagccctgggtcgggcgaggcggaggctcctccgaggtcgaggtcgagtctgtcttccgaggtcgaggtcgagtccgagccccgggtcgggcgaggcggagacggtcggctgaggccagggctgagtccgagccctcgggtcgggcgaggcggagttcgtcgtcttccggagtcgaggccgagtccgagccctggggtcgggcgaggcggagttcatcatcttccggagtcgaggccgagtccgagccctagggtcgggcgaggcggagttcgtcgtcttccggagtcgaggccgagtccaagccctagggtcaggcgaggcggagttcgtcgtcttccggagtcgaggccgagtctgagccctagatcgggtgaggcggagttcgtcgtccgaggccgagacgagggccgagccctggggtcgggcgaggcggagcttcctatggcgcccgaagccggacttggctgctgtcagcctcactctgtcgagtggcacagcagtcggagcggcgcaggcggcgctgtcctctcgtcaggccgatcagtggagcggcgaagtgactgcggtcacttcggctctgtcgactggagggcgcgcatcaggataaggtgtcaggccatccttgcattaaatgcttctacggtgcggtcggtcggtgtggcgatctggccaaggttgcttcttggcgaagactgggcctcgggggagccgaagggagaaatattacagactcagctagaagaagagaggaggcaacgtgaggagtttgaggtgaggatgatggccgagcagacgactcacttggccgatcagcagaggatggtggagatatttgagtacatgcagagccttggtacgacatcatgttttgctcctccaccttcgttgttccctccagctgaccctgctcagttctctactcccggacaatcggcggcatcaaacaaccctgatggatcgcctagcccttcgctgaaccaatccaaccacccacctcactga

SEQ ID NO: 26424 - DNA, 408 bp, Zea mays
  Peptide Sequence Number=SeqID_68203
atggcgccccgcatactctgtgacgacggcggctctcagcccccttacagaagcaagaggacggaccccccggtcttgaaacgccaacagaatccttcttcattatttgttgtactgatgaagggctcagactcgggctcagccccgaaagacgatgaactccgcttcgcccgaccccagggctcggactcagccctggcctcagccgacggtctccgcctcgcccgacccaggggctcggactcgacctcggccttggaagatagactcgacctcggaggagcctccacctcgcccaacccagggctcggaccgaccacgtcacaggaggcgccatcattaccctaccccaagctgactcaggctacggggaacaagaccggcgtcccatctggctcgctccggtaa

SEQ ID NO: 26425 - DNA, 1164 bp, Zea mays
  Peptide Sequence Number=SeqID_68204
atggcggtggcaggcgagcggaagcagcggtcacgtcgtcagccaagctcacgtcccctcatgggacagcgggagaaccctctcccacggcgtgaagacggcgcgcccgtgttccattcctcaaacggctcgcgcacgcgcaacggctgccccggaccgggaaagggggataccccgaaagggatccttctccgcgaaggaaacgggccccgagcccccctactgatcagaggttcgaaggctggcccctcggaggggttcaacagccgcctcagaacgctcgggctccgcgcccactactggtcagaggttcgagggccggcccctcggaagggttcaacggtcgcctcaggccactcgggctccgcgcccactactgatcaggggttcataggctggccctcgaaggccaagtccggcctcgagcgccataggaagctccgcctcgcccgacccagggctcggactcgggctcagcctcggaagacgacgaactccgcctcgctcgacccagggctcggactcgggctcagccccggaagacgacgaactccgcctcgcccgacccagggctcggactcgggctcagccccggaagacgacgaactccgcctcgcccgacccagggctcggactcgggctcagcccctgaagacgacgaactccgcctcgcccgacccagggctcagactcgggctcagccccggaagacgacgaactccgcttcgcccgaccccagggctcggactcagccctggccttagccgacggtctccgcctcgcccgacccaggggctcggactcgaccttggccttggaagacagactcgacctcgacctcggaggagcctccacctcgcccaacctagggctcggaccgaccacgtcacaggaggcaccatcattaccctaccccaagctgactcaggctacggggaacaagaccggcgtcccatctggctcgctccgggccctcttacggaggttggccgcgcggggaaggacgggacggcgctcgcgcaaggctgctcgctccctcccgcgtggacgcttgtaaccccctactgcaagcgcacccgacctgggcgcgggacaaacacgaaggccgcggggaccccccgggttccaaacaccgacaattttaacttcacatcacttaattga

SEQ ID NO: 26426 - DNA, 216 bp, Zea mays
  Peptide Sequence Number=SeqID_68205
atgtggtcgttcggggcaagcttggagatctcgagagccagggaatctgctaggcggaaggaagaccagcgccctcgtcctccgcgcacgtcgtcgaggtgcggggtccagtggaacaggtctctaagggttgtgtccttgggcgcgaaatcggggttcaccggcgtaggagccgtctgtggtcaacgcggccaccgccgcagcgtttctgggtag

SEQ ID NO: 26427 - DNA, 321 bp, Zea mays
  Peptide Sequence Number=SeqID_68206
atggtatttttagtgtctggttcaacaacttcaacttcaaccaagggacgcatctatcacaagatgtatggttgccaaatgaatataagtgacatggagattgtgctttctatcatgaaaaatgaaggaatgcaagaaacttgtcattgttcacctatccgagaatattttgttgttctaaggaatttaaaactgtatggtgttccactatttgaactctgcaacaatgttcaggttactgcctccattctacagggtattgctagtatgatgattgaaatacacaatttattgatatttagacttaatatattcttgtga

SEQ ID NO: 26428 - DNA, 780 bp, Zea mays
  Peptide Sequence Number=SeqID_68207
atgaaggacgccaagcccgcaaagacgccgatgggaactgacggacacaccgacctcaacaaaggagtcgctacgccttgcttcgggatctggtatccaaaggggtctaactttgacttgattggatattcagattccgactatgctggatgtaaggtcgataggaaaagtacatcgaggacgtgccaattcttaggaaggtccctggtgtcgtggaactctaagaaacaaacttccgttgccctatccatcgctgaggccgagtacgttgccgcaggacagtgttgcgcgcaactactttggatgaggcaaaccctccgggactttggctacaatctgagcaaagtcccactcctatgtgacaatgagagtgctatccgaattgcgaaaaatcctgttgagcacagccgcacaaagcacattgacatccggcatcactttttgagagaccaccaacaaaagggagatatcgaagtgtttcattctcaaaggaggtttgaaagggaaacggtggacttggaccatgaaagacttccactgcactccgatgagagggtgctctcaaagacgatgaccgaggaaaagatgactgaggagaagaagctatacgaagtgaaaaaagctctggaccctttcattgctggattttatgagtctatggcaaatatgaatacagagaaaattactaaggagataatggagggtttatctgaagattctgatgatagtgatagttatgatgtagaaagtggagatgaagattctgaggaccggcactag

SEQ ID NO: 26429 - DNA, 333 bp, Zea mays
  Peptide Sequence Number=SeqID_68208
atggtggtggcagtggaagctgaggctaggaagcttgtgaatggcttgccgaagcaacagaagctgcaggttgattgcacacatattctgccccaacacccaaagtggccattggggatggctgctgtcgtatggcgcaccagacagtccggtgcgccactagacactgtccggtgcgccagccacgtcacccaatcgttagggttcgaccgttggagctctgacaagtggggccaccggacagtccggtggtgcaccagacagtcactgttcactgtccggtgcgcttctgcgcctgctctgacttctgcgcgcgcagtccgcgcactgtag

SEQ ID NO: 26430 - DNA, 474 bp, Zea mays
  Peptide Sequence Number=SeqID_68209
atggtgggaggcaagagcatcaaaggcaagcacggcaagagcaacaaggctagcaagcggaagcatccttcgactccgccgttggaggacatcaaagattatgagttcccggaggagcagctttcctccaagggcgaggagtctccgccgctaactcctcggtcgccctcatttgaggacttggaggactccatggggatctcctttgccaagagatcctacatccggtccattgaatgggccaaactagagggctctgatgatttggaggatgacttcaaggagagctctgaggagcaggaggatgacaacgatgaggacgacagcagcaaaggcgagggcggtggtgacagcggtgccagaggcgacggtggcgagggcagcggcagcaaaggcggcggtggtggtggtggcgacgatgacgacgatggtggcaacggcggcaacggcggtggcaaggcaccaccaacttag

SEQ ID NO: 26431 - DNA, 429 bp, Zea mays
  Peptide Sequence Number=SeqID_68210
atgtcgtgcacgttcgacgactactatatcaaggactatggcatcatcttggcgccagaggtgacgcagaggaggaccgacaacaatgaccactcaccatcgttgggtcttccacaacaatctctcttcgacactacaccgattagaggagcaccaggcggcctgctgaccgggagccacgccttggaactctccccctcgacgggatctctcccggggcgagttctaggattctttgcgaagaagaagaccctcggcgccatcacagaccattcggccctaggcatggaccgttcggaagcgtgcagaggaggatctgctcctgcatccaggtcacggaccgtccggccctgtgccgcagaccatctgcgtccagtggtggacccagaaattggccaagacccaggccgaagcgactataaactctaa

SEQ ID NO: 26432 - DNA, 567 bp, Zea mays
  Peptide Sequence Number=SeqID_68211
atggcgcttcctgttgacgtggtcggtccgtgccctagactgggcgaggtggaggctcctccgaggtcgaggtcgagtctgtcttccgaggtcgaggtcgagtctgagcccccgggtcggatgaggcggagaccgtcggctaaggccagggctgagtccgagccttggggtcgggcaaagcggagttcgtcgtccttcggggctgagcctgagtccaagacctggggttgggcgaagcggagttcgtcgtcttccggggctgagcccaagtccgagccctgggtcgggcggagcggacggagttcgccgtcttccggggctgagcccgagtccgagccctgggtcaggcggagcgaacctcactctgtcgagtggctcagcagtcggagtggcgcaggcggcactgtcctcttgtcagaccagtcagtggagcggcgaagtgactgcggtcacttcggctctgtcgagtggagggcgtgcgtcaggataaagctttgtgctgatgggggttaccagctgagatttaggagccttgagggtacccctaattatggtccccgacagtag

SEQ ID NO: 26433 - DNA, 504 bp, Zea mays
  Peptide Sequence Number=SeqID_68212
atggtgccagagaaggataccattgatgccgaagctaagactgttgatgccgaagctaacagtgatgatgaagatgatagcatcctgagtccgagcaaacctagccatattgaatttggtaaatctacagtgaagcctgaagatccggttttaatgaagaaacttggctattttggaaagaatgatgatgggtttgataagggtccacgcaccgctcgaccaaccccttccctgattttctcgctgccagtccggactgtgcggtgggtagctaacaacttcaccgttggccgcgcggacttaacaatcgccgtgcgaaacctcgccgcgcatctcggatccctcaaccggatgcatagcaatcggtggggaaaggttggcactgacccggggtataaaatcggccccgcagccccccctggaacccagtcggcccaccgtggtctgctcgcttcgtgcagagagaaaacaggagtggatccgccgccgctgcccaatcggtga

SEQ ID NO: 26434 - DNA, 243 bp, Zea mays
  Peptide Sequence Number=SeqID_68213
atgatcagcatcctcgcgcaggagcgcctcctcgggttcgccctgggttccgtctccatcggcggcttcgtcctccaccagcgccgggccatctaccgttcaatcgctgaagccgacgggtcgccctacttttaccagcttgacaatagacaaactataatctcagcaggtttcatttcttgggggcaattacagattgttagcttgaagaattatcttggcctttttatgacagtgcagtaa

SEQ ID NO: 26435 - DNA, 174 bp, Zea mays
  Peptide Sequence Number=SeqID_68214
atggggaggaaggacattgccaacccgcacgctaagaagctagctaagcagcacagggtggaccttgccaaggttactggcactaggacgtatgatcaaattacgctggcggagaggatctccatcgtgtttcgcaagatgggagccaccaagcacctgttcggttttgtgtag

SEQ ID NO: 26436 - DNA, 408 bp, Zea mays
  Peptide Sequence Number=SeqID_68215
atgtcgagcggcgcggacggatcggatccgatcacgggccttggcccgtcgacgatcccagagccgccggaccgtgagccgcctcatctacagtctccgtcgccggcggcgcagcaggaggtggcggcgtcgcaagccgagacgccggtgccagcggtgaccatcgtgatctcgcggccaggggaggaggttcagacgcctgatgcaatgggtggctccccggcgtgctccacgcaggccggtgacggcaaggctacagccacctcggtttcgttgaccgcttcggcggctgccaaggaggccgagttggcaaggtccgacagcttcgacgactacgagcaatgcaggctaactggcagctatgagctgcaggtgaaaaacaatacgaggaagaatgctggaaactga

SEQ ID NO: 26437 - DNA, 453 bp, Zea mays
  Peptide Sequence Number=SeqID_68216
atggaatctagaaaagttgagtacaaggaatgtagagaacaaaggggagattgttgggtgtgtcctctacagccggtcaatagagactggattgggcttaacccaactatcgttcctttaatcgggcccttgatcgggagggcccacgctaacctcggttggagcccccagacacacgacgctatatataggactaaggggtcgcaggaaagactaacgctagtacctcgccccaaaaccctagtcctcagaggcccccatcgcctaggcgtcggagtgtttggaaatgcgacaacctacagcggctcggatcccaatgcctgctgcttctctgcagggcgacgatatgaagatagcaacagcaacaaagatctcgaacgggttatggatgataagggagtgcatccgccagagatattttggaagtacgtcggcctcgccgagacgcagtag

SEQ ID NO: 26438 - DNA, 2220 bp, Zea mays
  Peptide Sequence Number=SeqID_68217
atggcctggcctcgaaaaatatcccaacacctcggcggaccggacctatcgctcgctccgctggccggtatcctacgacctacactgctgctacgcgccggccgtttcaaaggtgtggtggagctgacacgtggaaggcagccgtggctccagagtccggcgcggacgtcagaatatccagtggatgtgaatgaatggcacggcgccgcacggcaacaaagaagaaagaagcctccatctccatctgcgatgactgatctccaagagggcgtcgccgggccgccgcaagtccagccgcggtcggtgaccccgcacgggctcggcggcgaggagggggacgtatactacgcgcgcaagatgctccagggcgcggtgctgcggccgccgccgcacctcccgcagccagaggcgccgccggggctggccagggcgcggtccacgccggcggcgccgcacgagtacgcggcacaaggggatggcgaggacgaggagcgggagagcaagaggcccgtcgagcggtcggcctccgcgaactcggcctccacggcggtcgtggacgtggagtccatcgggcggttcttccgcgaccgccgcgacgtgctgtcgtcggccataacccgccgcatctcgtcgctcaaggagtcgacctcggcggcgaaggccggcgcctacggcgtgcaggagatccacctgcccaacgtcaaggtcacggtgcgcctcaaggacgcgatcgccgccgccgacgacaccgacaccgacacctacgacgtcgggtacaccttctcgggcggccgcatcaaaggccgggtcagcttcttctcccgctcgggctgccgcgactgcgccgccgtgcgcgcattcttccggcagtccggcctgccctacgtggaggtcaacctggacgtgttcccggagcgcgaggccgagctgggctcccgcgcgggcgccgcggcccgcgtgccccagatcttcctcaacgagaagctgctgggcggcctcgtggtgctcaactccctgcgcaacggcggcgagttcgagcgccgcgtgcgcgacctcgcgggccgccggtgccccgactcggcgccgcgcgtgcccgtgtacgggttcgacgacgacgccggcaaggcggacgaggaggccgaggacgccatggtgggcatcgtcagggtgctccgccaccgcctgccgatccaggacaggttcgtcagggtgaagctcgtcaagaactgcttctccggaaccgacatggtggacggcatcgtgaaccacctggactgcagcaggaagaaggctgtggagatcggcaaggagctggcaaggaagcacttcatccaccatgtcttcagggagaacgacttcgaggacgggaaccagaacctgtaccgcttcttggagcacgaccccgctgtacccaagtactacaacttccggggctccaccaacgacggcgagcccaggcccgccgcggccatcgggcagaggatgaccaggatcatgctcgccatcctcgaggcctacgcctccgacgaccgccgccacctcgactacggccgcatcgccgccagcgaggagttcagaaggtacgccaacctggtccaggaactgcagcgggcggacatgacccagctccccgcggaggagcggctgcccttcttcctgaacctgcacaacgccatggccatccacgccgtggtccgggtcggccagccgggcgccgtcgatcgacggcctttcttctcggacttccagtacgtcgtgggaggccacccctactccctcgcggcgatcaggaacggtatcctcaggggtaaccggcggcagccttacacgctggccaagccgttcggctccagtgacaggaggctggagctggcacagcggcgcgcgaacccgctggtgcacttcgcgctgtgcgacgcgacgcggtcgagcccgaccgtgcggttctacacggcgcagggcgtggagccggagctccggcacgcggccagggagttctttctccacggcggcgtggagatcgacttggagagccggacagtgcacctcaccaggatcatcaaatggtacagcgctgattttgggcaggacagggacatcctccggtggctcctcaactacctcgacccgaccaaagccgggctcctgtcgcatctcctgaacgagggcggcccgatcagcatctcctacatgaactacgactggtctctgaacgtctga

SEQ ID NO: 26439 - DNA, 333 bp, Zea mays
  Peptide Sequence Number=SeqID_68218
atggcccaaatggcacttataggtaaagccctccccaagaccatagtttgtccagtatcttctggctcacgggaaaagggaaagcaggaaaatgttcttgccatgctacatgaagctgatttccatgttgatattgatgtgagtgacaggacaatacaaaagaaggtacgggaagcccaggtagctcaattcaactacattcttgtcgtaggcgcacaggaggccgagactggaaatgtctgcgttagggtaagagataatgccgacctggccacaatgagcgttgatggcctcatcacacgtttgagggaggaaatcgtagccttcaaatga

SEQ ID NO: 26440 - DNA, 573 bp, Zea mays
  Peptide Sequence Number=SeqID_68219
atgggctgggagattcactgggccatgcctagggctacatgtattggaccacaaattttcaacgtggagttgcctcttcgcatggctgatttcggagtgcttcatagaaatgagcttagtggtgcacttactggtttgacacgggatgatgctcatatcttctgcagagaggaccaaatcaaggacgaggttaaggctgttttggaattcatcaattatgtttacgagatatttggcttcaaatatgagttggagttgtctacgagaccagagaagtatctaggtgaaattgaaacttggaacaaagcagaacaacaattgacagaagctttgaatgagtttgggaagccgtggaagaagacttatatagatgccttcatgcagattaatgaaggggatggtgctttctacggtccaaaaattgatattggtgtgtttgatgcccttaagaggaaatttcaatgtgcaaccttacagctggattttcagctgcccattcggttcaagctgacttattctgctgaggatgaagcaaaaattgaaaggcctgtgatgatacacaggcaatcctag

SEQ ID NO: 26441 - DNA, 585 bp, Zea mays
  Peptide Sequence Number=SeqID_68220
atggaagctcgttgcctccttccgctgcagccgcgggtcgcggacttcacccgctgggccgagaccttcggcaccgagaaggccgacgccgccaaggctgcccctaaccttccgcccacccaccttggccacctcatctgcctccgaggcggcttctgcttcctccaaggccgcgtcctccgcatatgcggccgcctccgacctcaccctcgtcgccaaggtgatggccgccccaattcccctcgcgtcggtcgatctaggcaccattttctgaaagcaaaaacctcactgtcttattcgcaggaggagctggaatggttcaagacggagtactctgctcacgagcagattgtgttcggcaagatcaaagggccaaggagctaccttattcaacgagtacggcacatgtttgttagcaaggagaccctactttctggagtacaggctgaagtgaatcacatgcggcagactgtgaatcttgtatccaatgaacgccaaaagctgttggtaattttttatttgaagataattgaaccatttgtcacttttttgtctattttaaccttggatgctattcacgactga

SEQ ID NO: 26442 - DNA, 939 bp, Zea mays
  Peptide Sequence Number=SeqID_68221
atgggctggggtgactgcaagcctacggcaacaatggtgtccgtcgttgtggtgttcgcggtgctcaacacgctgacaaagatggccttcaaccaagggatgcacaccactgtcctcatcacgcttcgtcagctcaccgccttcctcttcctcgcaccaatcgcctactaccgggagaggaagacacggcctaagatgacacttgagatctttgtctatctcttcttcagtgcagtgcttgggatggagaaactggacctcaagactggagccggcatagcgaaggtgattggcacagcagtagggttcacaggagccatcgtgcttgcgctctaccaaggtccatcactgaccaaaccctcaccagcccaagcagcagcagcccaccatgttcttgctcaccatcagtgggcgattgggtctgtggccctgctcgcaggcgcagcgtgttggtccttttggttcatccttcagtcgagactggggaagaagtatccggctctctactctggaaatgcgctcatgttcttgctcagcttccttcagatggctgctgtggggctggccacggagaggaaggacctctcggtgtggatcctcagaaccaagctgcagatcatcactgtgctctttgtgcaaagaggtccagtcttcaccactgcattcacgcctctcatacaactcatagcaggagctatcaacgtcgtcgctctccatgaacagctccatgttggaagcgccctgggctctgctctggtaattgctgggttatactttgtcctctgggcaaagaccaaagaggcggcatcagatgctcctccaaccaccaatattgttaaatcaaagcaagcaacgacggaacaaggagagatgatagatgaggtcacgaggatatacaaggagatatcccttgatgtatgcttttcgctgacgatgtaa

SEQ ID NO: 26443 - DNA, 108 bp, Zea mays
  Peptide Sequence Number=SeqID_68222
atgggcgtggatctcgccttccatagaagggggtgcctaccatggaaggtcgcactgtgccgcgccgtcgcctccgagtttggaagcttctggccaccagaagctgct

SEQ ID NO: 26444 - DNA, 378 bp, Zea mays
  Peptide Sequence Number=SeqID_68223
atggccgccgcgccaacaagctccggcgactcgccgccgcctgcgcagccggagtacggttccatctcctccatggtagcctcgtctgcctcctccgctgcagccgcggtcgcggacttcacccgctgggccgagaccttcggcaccgagaaggccgacgccgccaaggctgccctaacctccgccaccaccttggccacctcatctgcctccgaggcggcttctgcttcctccaaggccgcgtcctccgcatatgcggccgcctccgacctcacctcgtcgccaagggaagcgccccaatcctcgttcggcgtctctcatttttcgtcgcaaaacgtcctgtctatccagatacgagagacgagtagctgcgactga

SEQ ID NO: 26445 - DNA, 1566 bp, Zea mays
  Peptide Sequence Number=SeqID_68224
atgaacttcaaacttgcggtcgacgccggtggcggcagcggcgccacgggaggcaccgacgacgccctcaacgacgggggtggcggcgtgggcagcggcatgatgcttcacgttggcggcggcggcggcaacgacgacgacgaggcggccactgagagccgcctccgccgctggacgggcgacgaggagacctccatcaaagaacccacctggcggccgctagacatcgactacttgcacagctcgagcagcagcaagaggacggggaaggagaaggtggccacgccggagtcccccgcgccgccggctgccgcggccaattacttcaagaaaggcgacgacaatgccgcggccgccgtggccgcgggcggcggcaactacaagctgttcagcgagctggaagccatctacaagcccgggagcggtggtgcgggcggcgcccagacgggctccggctccggcctcaccggagacgacaatgccatcctcgagccggccatgcccgacctcccgggcataacggccgaggacgcgggcccgcagctcatcacgtcggagacctcggccggggaggaggcggcggcggtcgtgcagccgcagccgtcggcggacgcggcgcggcgcaagcgcaagcggcggcggcagcaggagcagctgagcgcgtcggcgtccttcttcgagcggctggtgcagcggctgatggagcaccaggagagcctccaccggcagttcctggaggccatggagcggcgcgagcgggaccgcgccgcgcgggacgaggcgtggcggcggcaggaggccgacaagttcgcccgcgaggccgccgcgcgcgcgcaggaccgcgccagcgccgcggcgcgggaggccgccatcatcgcctacctggagaagatctcgggcgagtccatcacgctgccgccgccggcgtccggcgacgaagacgcggcggcggccggaaaggagctggtgccgtacgaaggcggggacgcggcggcggcccccgagggtggcgggtcgctgcacctcagctcgtcgcggtggcccaagcacgaggtggaggcgctgatccgggtgcggacggggctggaggggcggttccaggagcccgggctcaagggcccgctgtgggaggaggtgagcgcgcgcatggcggcggcgggctacggccgcagcgccaagcgctgcaaggagaagtgggagaacatcaacaagtacttccgcaaggccaaggagagcggcaagaagcggccggcgcacgccaagacgtgcccctacttcgacgagctggaccgcctctactcccgcttgggccaggcaaagcaggcgagctcggagctgctggacgcggtggtcaagtaccccgacgtgcgctacggcccgccggggttcgggatggacagggagcaggcctccggcggcgggggcaataataataacactaataatgaaggtggacaggacggcggcgctgaggatttcgacggagaggaggacggcattggcaaggggagggccggcgatggtcaggacgacgaggtggaaagccatggccacgaggatgagtag

SEQ ID NO: 26446 - DNA, 165 bp, Zea mays
  Peptide Sequence Number=SeqID_68225
atgacgaaggttgatgctttgccgaaggttgtggaagtgagtacatcggagcttggtggagctgctggtggtggtggtggagtacctgcatttgggtggcaaccactggatcaattccagccggtggaggatttggaggattcatttttgtttgctgttgcctga

SEQ ID NO: 26447 - DNA, 477 bp, Zea mays
  Peptide Sequence Number=SeqID_68226
atggtgcacgttctgctctctcccaccgtcccaccgatccgcctcccccttcccctaatcacgtgccccctgcctcgccactgcattgaccgctccaagccacaaagaatccaccccctcaaagcctctgtcctcgccagtccaatctccaacgtccaaactccgaagaaccacccccaaattacacaacagccctacaaatctccgctcgccatggacgtcgtggcctcatctcggaacaccgttgcactggcggcgcccgcggcggtgccgctggaggctcatgcccaaaaccctagcattgccgtcgctaacccgccgtcgccggagatggaggctacagcggaggcgctcacgcaggaggaggtcctttgtcggtgccggcgccgcgcggtctggctagctggtgtgtaccgtcggctctactgggccatggtcgaggaggtgcacgcgcggcactggcaagtacgtctgtga

SEQ ID NO: 26448 - DNA, 862 bp, Zea mays
  Peptide Sequence Number=SeqID_68227
atgcaggcagaagtaaaaagtgggagaagtctacactatgcaagcagaagtaaaaagtggaagataaagctgcaatgggaccaagacgcctcctctccccttcctcccacatgtctcccaatcaccctccacttaccactccatagtcccaacgccaccgcgtcccgacagtacacgtcatttggcaccactccctcccaacgtggtgtatccatcatagccgcccatcacccagaactcatcctcaccaccatcccctgctccgcgtgccaggaacccaacacacccagcccgatcacgaggcatcgaggcaccaaggtgccacgagtgcgtggtggcatcataccactcggtgctgccggtgcggctgccgttggaggggaacatggggtgtcgggacccgccaccggcgacgaggagcccgccagcactgggcgcgtgggcacacgcgaagcttccccgcgggagctgcatgtcgggaaggcgttcccagcaatgtcgagagttggcaaggtcaagccggtagaccgccgccgaggcggagggttgccccaaagggtagctgcgggcgtcgaagcaagacccgccgaggacgtagaggtggcggccaacggcgagggcggtaaagttggcgaggccgtaaagctgcggcgaacaggggagcggcgggaggggccaccaggtggtaggtgcggcggggtcgagcaggatcggggaggcgagggatgggtcggtggggaagaggcagagaaggtggcggcgcgggagacggaggctacggcggagcgggaggagcgtagccgcagagaggagcaagcaccaagcgcgcgaggtggcgcggaggcgggactggtcggggaag

SEQ ID NO: 26449 - DNA, 174 bp, Zea mays
  Peptide Sequence Number=SeqID_68228
atggtgcatccttgcactacgcgaggactcgcccacggggtcactgtgtcggagaccgggtgcctcgttgtcgacgtcaagagatccggcgcgccaccagtctccgtggacaactacactggtgcctcgaaaacgatcccgaccattgatctggctgctggcgacccagattaa

SEQ ID NO: 26450 - DNA, 384 bp, Zea mays
  Peptide Sequence Number=SeqID_68229
atggtcgacgtgaggatgaggggggacgacagcgggcgcatggcggagcgtgtcaggaggcgactcgggctggcgacacaagtgtggcaagggggagagggagcaggggggcagcaggcttgcaagcagccgaatttgcaagtagcaagcagcaaagcaagcagcaacacggccaacgccaatgcaactacgcaagcaactaagccaacttgccaagcaagcaggcaagcagctgaagcactgagcaggctaacaagtagaaaattaagcaaagcaagcaacctacaaccaagcagtggcggagcagtggagcacggccagcgcgcaacgggccaagcagcaaggcaggaagcaacaggccagactgtcacacccggattttaa

SEQ ID NO: 26451 - DNA, 288 bp, Zea mays
  Peptide Sequence Number=SeqID_68230
atggagacactacaccgagactcccttctcgtgcaagtcaaccgcccggtcttagctttattattttcaacccaaagtctggtacctggcagagtgcggatgatcggatggatcaacatgttccgaacaatcgacgacatggatgaccaaattgaagcttggagaagcttcacgggttcaccagaggttgtgcacatgctagaatttggagtgggcaagagtagaaaagtgggtcgacagagagggtgtcgcagcggcgttctacggagcagatgggtgttccggtga

SEQ ID NO: 26452 - DNA, 1533 bp, Zea mays
  Peptide Sequence Number=SeqID_68231
atggaagagcagcagccccgcccccgcccaagcatcatgttcgtcctgtcgtcgctcgccaagaataacccagagtccgtgctggcgctcatcgcggtgctcaccgtcgtcgccctgcgccacttgatctcctcatggcggcagcaggcccggctgcccccgtcaccgacgagcctcccggtgatcggccacctgcacctgctccgcccgccggtgcaccgcaccttccaggagctggcgtcccggatcggtccgctgatgcacatccgcctcggctccacgcactgcgtggttgccagcaccccggaggtggccagcgagctcatccgcggccacgagggcagcatctcggagcggccgctcacggcggtggcccgccagttcgcctgcgccccgtccgccgcgccggcaccgtgtccctgctcgccgacctgctggcgtcgtccggcgcggggggagacggtggacctcacccgccatctcatccgcctctccaacacctccatcatccggatggtggccagcaccgtgcccggaagcgtcaccgacgaggcgcaggaggtggtcaaggacgtggccgagctcgtgggcgccttcaacgtcgacgactacatctccctagtccgtggctgggatctccagggcctccgcaggagagccgctggcgtccaccgccgcttcgacgcgctgctggaggacatcctcaggcacaaggaggaggcgagggcggcgcgaaggctcgaccaagacgacgacggacgtggcagcagcaagcaggacaagaagcaggccacgcacagcaaggacctgctcgacatcctcatggacaaggcagacgacccggcggcggagatcaagctcacccgggaaaacatcaaggctttcatcatcgacgtggtgactgctggttcagacacgtcggccgccatggtagagtggatgctggcggagctgatgaaccacccggagacgctgcgtaaggtggcggaggagatcgacgcggtggtcggcggcgacaggatcgccagcgaagcggacctgccacagctgccgtacctgatggcggcgtacaaggagacgttgcgtctgcacccggcagcgcccatcgcgcaccgacagtcgagcgaggagatggtggtgcgcggcttcacggtgccgccgcagacggcggtgttcatcaacgtgtgggccatcgggcgcgacccggcgtactgggaggagcccctagcgttccggccggagcggttcatgcccggcggcgccgccgagagcctggagccccgtgggcagcactttcagtacatgcccttcggcagcggccgccggggatgccccggcatgggcctggcgctacagtccgtgccggccgtgctggcggcgctcgtgcagtgcttccactgggccaccgtcgacggcgacggcggggtgaacaagatcgacatgtcggagtcggacgggctggtgtgcgctcgcaagaagccgcttctgctccgccccacgcctcgcctcacccccttcccggccgtcgtctag

SEQ ID NO: 26453 - DNA, 780 bp, Zea mays
  Peptide Sequence Number=SeqID_68232
gccatcttccggaaggacaagcagccccagggccgccagccggaagatgtccccgaggcatccactcagcgcggcaccaagaagaagggcaagaagaagtcgcaagcgaaacgcgacgccgccgacgcggaccttgtcgccgccgctgagtacaagaaccctcggaaacctcccggaggcgccaacctcttcgacaagatgctcaatgagtcgtgcccctatcaccaggggcccgtcaagcacacccttgaggagtgtgtcatgcttcggcgccacttccacaagaccgggccacctgcggagggtggcagggcccacaacaacgacaagaaggaggatcacgaggcagaggagttccccgaggttcgcgactgtttcatgatctacggtgggcaagtggcgaacgccttggctcggcaccgcaagcaagagcgtcgggaggtctgctcggtaaaggtggcggcgccagtctacctagactggtccaacaagcccatcacctttgaccagggcgaccaccccgaccgcgtgccgaacccggggaaatatccgctcgttgtcgaccccatcatcggcaacgtcaggctcaccaaggtcctcatggacggaggcagcagcctcaacatcatctacgctgagacccttaggctcctgcggatcgatctgtcctcggtccgggcaggcgcgacgccttttcacgggatcatccccgggaaacgcgtccagcccctcggacaactcgatctgcccgtctgcttcgggactccctccaacttctga

SEQ ID NO: 26454 - DNA, 222 bp, Zea mays
  Peptide Sequence Number=SeqID_68233
atgtggcaagaaaagatgatacatccgaggatgtatcagttggaccggacccccatgagggagcaccggacccctgtacgcataacccggaccccccgattacggcctgggactcccaaggcgggtgcactccgccacccggctagagaattccctctccaacagttgcttagagggatcttcggcaacacacttaggaaccacgagctgctcgttgtctaa

SEQ ID NO: 26455 - DNA, 282 bp, Zea mays
  Peptide Sequence Number=SeqID_68234
atgcaggcggcatgcaaacgtgccaagtgggcgcacctctccgacttccagcgcgcccagcatggaagcccaggcccacgcgtcatgcaaccgggaccgggaaagggggataccccgaaaaggatccttctctgtgaaggaaccaggctccgagcctccctactgatcagaggttcgaaggttggcccctcgaaggattcaacagccgcctcagagcgcgtgggctctacacccactactggtcagaggttcgaaggccggcccctcggaagggttcaatga

SEQ ID NO: 26456 - DNA, 411 bp, Zea mays
  Peptide Sequence Number=SeqID_68235
atggccatgagggatggggaggcacacgcgaggggcttcgccggaaggagaggaactgttcggcaggggcagagaaggctgctcgccgaggaagaagaccgacgtccagcgatggttggctcacggaagggaacgggcggtcgcgctgttggagaaggtagccaggggcgcgcctgggctaggggatttcatcgaggcatgggggtgagcagggggaaaagaaaaaaaggaagaaaagtggtaaatgagagagtaacgcctgaatttggtgaatatgagaaaagaaaaattatacccccaaattcagggtgttacagatctaacccccttaacaggaatctcgcccccgagattcaagaagaggctagccagaacgacgagatgcttgagaccgatcgatgcaattcttga

SEQ ID NO: 26457 - DNA, 327 bp, Zea mays
  Peptide Sequence Number=SeqID_68236
atggcggcgagaatggctggaaagcacgggctcgacggtcgcaaggggagggggcccggctcgtatgggggcgggggcgcgatgatggcagcgagaatggcggaggggtcgcggttcacgggggagtcacagacaaggggagggcgggggcatggcacacgggcacgcacgggcacatacccacgtgcgtcggggcgggcggagcgagggatgcagattgggcgacatcgacgtgcgggatggacggggtgggggcacgcggcgggacgggagcacgagcggcgtcgatggaaggaggtgccaaggttggaaggtgttacaacatga

SEQ ID NO: 26458 - DNA, 483 bp, Zea mays
  Peptide Sequence Number=SeqID_68237
atgactgtggtatatgctatgctggtcaaagtcagtgttcactatttccatggaaatttcaaggaagaggaagacaggcagctgctactgctgctgacatttgtgacgccaacgtcaaggactgagagatttgtttgttccgttctatttcattccttgtttgacgcagttgacgatgactggctggttaagtttggcagatgggaaattgaagtggttgctactccttctgttgaatatatgaaggaaaacaacgccgctcaccccactccgactgctgtgtcaaccaccggggtaagactgacaacagccgagtttagcctcgagcgcaacagggagcttcgccttgcccgacccccggcctcgggaggagtcacgtccttgcccgaccccggcctcggcctcaggaagaacctctgcctcgcccgaccttgggctcggaccaaccgtgccgcaggggatacatcattaccctactcctag

SEQ ID NO: 26459 - DNA, 468 bp, Zea mays
  Peptide Sequence Number=SeqID_68238
atgtgggcagggcacttaccaacaatggacacaacgactaggttaattttggcgaacggtggcttcctcccggtggtcggatggcggcacgcggcccggtggtatgatgtagcgacccactcggtgaagcccagcaatcccttcctgaggtacttagtaacacccttggacacgaccccaaagctgaggaggttacggatgcgtgggcagcgacgacggctctccactaccctctgttcttgtgaccacggtggccctcggcgttcgggtcaccaacgatcagcgtcgatatatggatggggcaaggcgaacaggtcaaagcggtcaagttctcaatttatatggcccgaggggtggcaacaaccatcccgagatcaatggattccgttgggagtcctggtcatggagaaacaaactcggcgagcaggcgctcctggagtctggccaaggggtcccacactgcattga

SEQ ID NO: 26460 - DNA, 138 bp, Zea mays
  Peptide Sequence Number=SeqID_68239
atggcctctaccagtgtgggagagcattattatacacttgcagattttccaaggccacactcagctcctccacctgggctcgggcagtcgcctcacaatcccaagctatggatcacgaattcacagcctagacaatag

SEQ ID NO: 26461 - DNA, 237 bp, Zea mays
  Peptide Sequence Number=SeqID_68240
atggcggggagggagacattacatttcatgattgtcctgtgctctaatggagtagcgaataagcgatggttgctccggacatttgaaattccagtactgatctgcctgccaccagtggagtcgctgattggcctatcagccacagcgtcacaactcacaacagccagcagctggtggaagtggtggctcgggagactgcagaggcatggtggggccagagatagtaggagtcggtga

SEQ ID NO: 26462 - DNA, 660 bp, Zea mays
  Peptide Sequence Number=SeqID_68241
atggcggggtcgaggttcgggtcgttcaagtcggagaagggcgactccgcctccgcagcggcggcagcgggtggagcggcgcagaggagggacccgtacgaggtgctcggggtgggccgcaccgccaccgaccaggagatcaagagtgcgttccgacgcatggcgctcaagtaccatccggacaagaatggcgatgaccctgttgcatcagacaggttccaggaagtcacattctcctataacatcctgtcagatcccgataagaggcggcagtacgatacatcaggatttgatgcaatcgaatctgatagtcaggaactggagctggacttgtcgagtctcaacactgtaaacacggtgtttgcagctctttttagtaagcttggtgtgccaattaaaacaactgtttcagctacagttttagaggaggcattgaatggttcggttatggtttctcaactccagctaggaaactcagtgcagagaaaggtggaaaagcaatcggcccatttctattctgtggatataactgaaaaacaagctaaaatggggctagtttgtcgtgttcactcaaacgataaaagcaaattcaaggtgtccaggcgagtgctgggtccacctggaatcctagtggacgcctttgaaatagagggattttaa

SEQ ID NO: 26463 - DNA, 813 bp, Zea mays
  Peptide Sequence Number=SeqID_68242
atggcgtgtctcggcctcggcggccccgatgcggcgcacccgcctcgctcggccatggcgcgcagctcggccccccaccccgtctcggcccggctccctctccctcggccccccgttccggctcggcgagcctgcctcgtctggccccggcgcagccggccatggcgtggctatggcactcgtgcccacctcggcggcaccctcccccgcggcgcgctcgcccgccccgacgcgcgcggtcccacctcgccacggagtggcctcacctcggcatggcctaacttcgcttccccggcagcggacaagttcccccggctcggcggcgcggtccctggcccccctccctgcgcaggcccggggcaaacacgacggtggaacgcctggcccctggctccgcgggcgcccgggcgtgcgcgccccccgcctcgggggtgcccgcccctacccggcgcgactacggcatgtccgcctcggcgcggccttgagctcggccagcgtgcggcccagggcgaggcccccgaagatgccccgctgcgcagcgtgtgcgcgactcggcctcggcgtgtgcgcggctcgtccgcgacgcgtcagtgtggcctagcgcgcgcgtgctcgcgtggtgcacgcagtgctttggtgcggctcgccgtgcctttgacgcgacgcatagcgccctatcgcgggcgacgtgtttgtctacccctagacgtgcccgtctaccccctagccacccgtctacccctccccgtgtattctatgcgcattggtcacgttgtttatattaatgaaatggaaactcaactgagaaattga

SEQ ID NO: 26464 - DNA, 258 bp, Zea mays
  Peptide Sequence Number=SeqID_68243
atgacagtggagcagatgttcttcatgcaaacccaagtagtgcaagctatcatgcaaactctagcaactatgcagcaagctcaagagcaaccccatccacagccacagatgcagataccacaaattgaaagggaaatgtgcccttgggccatttatatttttggtactaatcatgtttgtccaagtgccatgtaccatatgaagacgaaccaaaaaggagcacacaagttcggctatgtgtggccaagcctgtgctag

SEQ ID NO: 26465 - DNA, 195 bp, Zea mays
  Peptide Sequence Number=SeqID_68244
atgccctggcgtctgcaagccgatgtgacggtgaactatggtgttgactcgcacctgctgatttcccgtagagggccaaggcttcttacggagtgcgtcagcgtcctggcatgggatgacgtcgagattccctgctacgcttatcgagatcaaagcccatgcttggttgaggcggaagtcttcctgtggcattag

SEQ ID NO: 26466 - DNA, 291 bp, Zea mays
  Peptide Sequence Number=SeqID_68245
atggcggagttcgtttctgggtcagcgctgttcttctgtgtatggtccaaggagcaaggtcgatctggtagcgttcagccgcgattcctggcggcaacaacgcattttgccgagcttgcgcgatttctgcgtgagatggagaagacacacctgactagcgggtcccacacgtcaaacacccagcgcccaggcggcttccggttcaacggggaagaggacccgacaggtggggttcaattttatttcaaactctttgtgaccaaaataatctcagacgatattgtgccataa

SEQ ID NO: 26467 - DNA, 471 bp, Zea mays
  Peptide Sequence Number=SeqID_68246
atgcagtcctttcgcccccacttgcggtcgcgggggggggcccccctccggggctccggggtggccgtgctcccgggcctgacggagctggagctggcgcgcgccgaggccgaggtggggttcgcgttctcgtccgacctccgcgccgtcctcgccgcgggcctgttgtcgaggcccgggttcccggactggcggtcgcgcgtggggttgtggtccaccttcgacctgcccatcgcggcggcgtcgctgcagatcgcgcggggcgcgctgtggccgcgctgctggggcacgcgcaccgccgaccccgatcgcgcgctgcggctcgcgtgctccgccatccgccgcgcaggagaagcatcgatctggagattatgggttccccgctcgccgccgatgaagggcggccgcctacaccgactggagccagtgccagcatcgaccatcatccctaggttgcgttcggttttgtga

SEQ ID NO: 26468 - DNA, 237 bp, Zea mays
  Peptide Sequence Number=SeqID_68247
atggcggcggtcgtagcgagcgaccgtgccacgcaagtggaggtcgggcaaaagtcggaggtgggtgttgtatcaagattgttggtgaagaatcggaagctgtctcgtttctttagaactcttggtcttgggagatgggaggtgctgaaagttgaaacctctatggattttgtcggaaacttgcttgaaactgccatcttgaaacgtcaacattcgtggaatttgctgcacaattga

SEQ ID NO: 26469 - DNA, 276 bp, Zea mays
  Peptide Sequence Number=SeqID_68248
atgccacaacaggccccaaccgctgccgcagatcctcagcgcacaaaggtcagggagagcatatccagggtgcgaggtggcaaaatccaagtccccatggggcgaatctcgccgggcacgccgccaacgccattgctgggaccaccacaaagagagcgcgaggagaggaaggaagcggaggaggagagagggacagaccctcactgccaccttccttgcggccgcgcagacttcctgcggtcactcgggcgacggcaaggcgaggtggaggcctag

SEQ ID NO: 26470 - DNA, 1392 bp, Zea mays
  Peptide Sequence Number=SeqID_68249
atgggctcatcggcggcatcagccagcacatctggagcatcgtggacgaggtcgaacacacgacctcagggctggcacttcgacctcatcatcaaggcgaggatcaagcacttggatccgttacctccgctcgtccccaacaccgacgcagaggaggaggaggttctcacgaccacgtccaccagcgccgtccacggcggcgacgactatgagctgtcccacagcgaggcaggcagtgttctcgcgaccgccgcgcttcccaacccgcgcgagaagatccgttgtcagctcgtcaacaggacgaggctggcccgcgacgtccgcctcatcttctccctgacatcgtcgaaccaggtgctcagccttcacatgagcacacatgactttgactgcgccagcgtcgacaggaagtcctgcttgcgggcgtacacgctgacgagcatggaggacgaggttggccacttcggcctcgacgccaaggagtacatcctggacgagcactccaagttcctcaatggcgagctcatgaaccaactcctggacctgctccccctcgatccttacatcgaagctgctctatccccgatttcttctatcgtacagttggtggtgttggcagaggaggaggttatcaccaactcgcccaacaggtgtttgatgatttgcttcaacctcttacaaagatgtttcagctgggatgcagcaccacatcgtcagctttggccaccacctcatattcatgttgagttttggtgtggcagtgctgctctacgttcaattccatggccaccacccacttccttggatagtttgtatactaaagaattctattgtagagtgcaatttcctggatttggtagaacctttgtgttcaatgcagagattctaaaaagagttggacgtacatctgaagccaaagattcatctcgcgtggctctgaaatcatcatgggggacacttggctgcagtcatgaagaggctgctgaattagcttctttggtggatggatatcagttaatgcgtgcagcgtcagcatctgatcgggtgtcttcgctgaagaattatcaccacacactggggttatgcgaccattgggctgagaagaggtttaatggtcacaaatgtgtgcagttccacgccatcgaagaggagcgcatgcggctgctacattttgtcttcgagattcgattcagcagcaagacgtattggtactgggtgatcaggcatcgtttatcaaggaaatcacggcaatcgtttgtcgagctggttcaggaattgcttggggacaagctgtatttcaagcggtggggaatgtcagcatctcagacaggagcaatgagcatacagcgagaacaagtcacgggacacgagagtccgtcgtccaaacgctaa

SEQ ID NO: 26471 - DNA, 2772 bp, Zea mays
  Peptide Sequence Number=SeqID_68250
atgccgttccccaccgccttcaccgcgcggcggcggcggcacgagggcgccgcgggtcgttggtgcgggctcgtggtcctggttctgatggcgctcgaggctggcgcggcggcggagacgtcgccgtcggacgtggcggcgatgcgggctgtggcgaaggcgcttggcgcggacaagacgctgggatgggacgtcgccggcgacccctgctcgccgaagcggtgggacggggtgtcatgcgactcgtcgggccgcgtcaccgcgatccaggtcggtgcgcgcggcctcacggggaccctgcctccggaggtgggcgacctcaccgagctcacccgcctcgaggttttcgacaacaagctctccggcccgctgcccttgctcccggggctctcctcgcttcaggttttacttgcccataacaatagcttcgcctccatccccgccgacttcttcaaaggcctcaccgggctcaccgccgtcgccatcgactacaacccgttcgcgtcgtggacgctccccgcctccctcgccgcctgcgcctccctcgccaacttctcggccatcagtgccaacgtctctggcacgctcccggacttcttgggtgcgatgccggcgctccagcggctgtcgctttcctttaaccagctgtcaggacccgtaccggcgtcgctggccggcgcgccgctggtgcagctctggctcaacggcgcgcacctcaatgggtcgattagctttgtcagcaacatgacgtctctggagcaactgtggctgcattctaacgaattcactgggcccttgccggacttcgcggggtttgatgatctatgggatttgcaacttcgcgacaacatgctcacagggccggtgcctgagagtcttttcaagctgaaggctctgaagaacgtgaccctgacgaataatttgctgcagggtccgatgcctcagattcccaatggacttcatgctgatatcgaagcagatacagagcggttctgtgtgcaggaagccgggaagccgtgcaatccccttgtgagcctgctgcttgaggttgcggctgggttcatgtacccaaaggcacttgctgaggattggagggggaatgatccatgtatgtttccgggtgttacttgcatccaaggtaacattactgggctgacttttgccaacaagggtctcagtggtagtatctcaccggccattgggaagattagctcacttaaggtgctagatcttgctaacaataacatcactggtactgtgcctgaggaggttgccgtgttgcctttgctgacaaaaattgatttgtcaaacaacaatctctatgggaaacttcctacctttgcttccaagaatgtggcggtgaatactgctggtaaccctaacataggcaaggatgctcctgcaccaactgcaggaccaggtagtagcaacaacagtccatcgggaggaagcagtagcggaagcagtggtaacaatgggaatgggggctcctcttcatcttctgttggagtcattgctggctcagtggctggtacagttgctggactaggccttgttgctgcattaggattctattgttacaagagaaaacagaagcctttcggaagggtgcagagtccacatgccatggttatccatccgaggcactcaggttcagatgacatggttaaaatcacagttgcagggggaaatgctaatggtggtgctcgcgcaagtgagacatatagccaagcgagcagtggtccacgggacatccatgttgttgaaagtggaaatatggtcatttcaatccaagttctccgcaatgtgaccaacaacttcagcgaggacaacatccttggtcgaggagggtttggcactgtttacaagggtgaacttcatgatggcacgaaaattgctgtaaagcggatggaggctggtgtgatgggtaacaaggggctaaatgagtttaaatcagagattgctgttttgaccaagagaacaatttgcgaccattggaatggaaaaaagcggcttagtattgcacttgatgttgcaaggggcgttgagtaccttcacagccttgcccagcagacctttatccacagagacttgaagccatcaaacatacttcttggtgatgacatgaaggccaaggtggcagactttggattggtcaggcttgcaccagatgatgggaagtgcgtctccatagagacaagacttgctggcacttttgggtaccttgcaccagagtatgcagttactggacgagtgaccacaaaagctgatgtcttcagctttggtgtcatcttgatggaactgattacagggcgcaaggcacttgatgagactcggccagaggatagcatgcatctagttacatggttccggagaatgcagctgaacaaggaaacattccgcaaagcaatcgaccctgttattgaccttgatgaggagacatatgctagcgttagtactgtctcagagcttgctggtcactgctgcgctagggaagcacaccagaggcctgacatgggccatgctgttaatgtgctctctaccctttcagaagtttggaaaccaactgatccagactcggacgacagctacggtattgacctgaacatgaccctccctcaggctctgaagagatggcaggcttttgaagatagcagccactttgacggcgcaacctcttcattcgttgcaagtttggataacactcagacgagcatccctacaaggcctcctggattcgcggagtcgttcacctctgctgacggaagatag

SEQ ID NO: 26472 - DNA, 633 bp, Zea mays
  Peptide Sequence Number=SeqID_68251
atggcgcacgggatcatcgggagccactaccactccatgttggcgtcgcgcgtgggcatggtcgcgcacgtgctgttccctgaccaccgccgtgctcatgctcgtctggctgctgcactaccgcggcggcatcaacatacagtccgaggaccccgagcagattttcaatcaatcctggcatactcgacgatcccttcgcacatagaccaccggacgcagaagatggcgcacatgctgatccacctggtggggctcatcctggccatcttcggcgtgtacgcggcgttcaagttccacgacgcggccgtggcgccggacctgacgagcctccactcgtggctcggcatcgccgccgtcgcgctcttcggcctgcagtggctgttcggcttcgtcaccttctggctgcccgccgcgcacgccgacacccgcgccgccgcggcccccgcgcacgtcatggccggcctggccatcttcatgctcgccgtgtgcgccgcgcagaccggcctcgtggagaagagcgccgcggccgcctccgccgccgagctgaagctcatcaacgtcacggggatcttcatcctcctctacgggctcactgtggcgtccgccgtcgcgctgcgcaaggcattcttgtag

SEQ ID NO: 26473 - DNA, 210 bp, Zea mays
  Peptide Sequence Number=SeqID_68252
atggcgtccttgttcctacgccatccagcatgcatggttcttaaaccgtacaccatcaacatcaacgctgttagagtggacgcagtaaccagttcaactcaaaagcttaagctactgagagaagccaagggtctggacaagcatgaggttacccccatcatcaagattgagggaagccactctgatgcagctcggtccaagaactggtaa

SEQ ID NO: 26474 - DNA, 231 bp, Zea mays
  Peptide Sequence Number=SeqID_68253
atggcttcgatactcgaaaaagccggctgcgaccatgtcaaggctgtcggagaaactaacttccgcatggccattgatgatatcaaagctcctttgaagactatactgaacgctgcaaagagattttgcttagatctatgggacaaaggaggccgacagctagctgccctggaagctgaagaatacaccacgaagaacaaggagttgaaaaagacaaagaaagcaaagtga

SEQ ID NO: 26475 - DNA, 423 bp, Zea mays
  Peptide Sequence Number=SeqID_68254
atgaggttgtccaccgcggcccgggcgtactggtgttccatcgagcgtgtcgggctcggtgggttggatgagtcgggggtctcctcggacaaggtggactcctccgaatcctccgaggagtggagcaacaacgatggtgacgacaagggtgacggcaacagcagctgcgacgacgacgggggcgacggcggcaagggcgacaatggcaagggcgacggtgatggccgtagcggtgacgacaagggcgacggtgacggtagcagcggcaacagtgacggtggtggcgatggcaacagcggcagcagcaacgacggtggcgacggaggcaatggcggcggtgacggcggtaggggcgacggcggcagcgacgggaagggcaacggcggcagcggcaaggccagtggcataatgccactggtttaa

SEQ ID NO: 26476 - DNA, 747 bp, Zea mays
  Peptide Sequence Number=SeqID_68255
atttatagtagtggtaaccctacaaatattgccaatcccattgttgatgtaagtgttaagattgatataaaggcacttggtgggagattaaacttgtttaagactactgcttgtgaaaaaataccttggaagtacttgaaggcctatgatgatgttgatcctctagattaccttggggcatacaatgtggatgacattcagctgatttgctgccagcctgatgcatcaacaatgtggttgatacctcctccagtccaaaacagattcatccagtcccttgaggagagagagatgctttttggaaagatggaacttattttaaattgggattttctcagagctagaccaaaagggaaggaattagtgcgatatgaatcccctattgaacactgcccgagtgtagatgatgttaaacgagtgcttaatggaactgcaaacagcttcagtataattgatgcttacccaaggtactttcgagttactggatcaggtgaagtccggcgattagaagcagcgatagattcagtaagtggcgaattgctattaaataatggcactccttggtggtcattctatgatacaaacccatcagatttggcaggctgtcaagggctgaatggtcccatggctatagttgtttctgaggagacacctcgtatatcagatatatgtgagaatgggcaaaaactggagttcagtcaagcttcttgtgcaatcaccatacgatcaaactaccaaaagtcataa

SEQ ID NO: 26477 - DNA, 852 bp, Zea mays
  Peptide Sequence Number=SeqID_68256
atggaaggacagcgccgcctgcgccactccgactgcggtgccactcgacagagtgagtctgacaggcagtcaggccttgccaaaggcgccacggcgaactccgctccgcccgaccccagggctcggactcgggctaagacccggaagacggcgaactccgctccgcccgactccagggctcggactcgggctaagacccggaagacggcgaactccgctccgcccgaccccagggctcggactcgggctaagacccggaagacggcgaactccgctccgcccgaccccagggctcggactcgggctaagacccggaagacggcgaactccgctccgcccgaccccagggctcggactcgggctaagacccggaagacggcgaactccgctccgcccgaccccagggctcggactcgggctaagacccggaagacggcgaactccgctccgcccgaccccagggctcggactcgggctaagacccggaagacggcgaacttcgctccgcccgaccccagggctcggactcgggctaagacccggaagacgacgaagctccgcctcgcccgaccccagggctcgaactccgcctcgtccgaccccagggctcggactccgccctggcctcggacgaacgacttccgcctcgcccgaccccagggctcgggctcggcctcggcaacagaagacagactcaacctcggcttcggaggagcccccacgtcaccctgcctagggcacagacccgccacgtcaacagggagcgccatcatcatcctaccccaaatcgactcgggtcacggagaacaagaccggcatcccatccggccagctccgccggatgggcaatga

SEQ ID NO: 26478 - DNA, 996 bp, Zea mays
  Peptide Sequence Number=SeqID_68257
atggacatcatcaacggggccgtgctccctcgctgccacgccgcccccgtcacgggcgccgcggcggcctccgtcgccgacgcgagagtgagcggacacctccagcttctccggcgcgtgcgctgcagaggaagcggaagcgccagtgccgggctgctgcatgcgacgacgccccgagccggcgtggcagcgcgcaggttcttctccccaccgctggggaacgggaacgggaatgggaggaccatcggctggcggccggctcgctgcacccacggcggctcctcctccgacggcgacggcgccgccgccgcggacttcgacgcccgtgaggaggagttcgttgactccagcgtcatggaggccgttgagctcaggagcgtgtcagacggcggtttcgtcatcaagatgcgcgacggcaggaacctgagatgcgtccagaacaacccccgggtgctgaggctccgggactccgcgccgcaccacgcgatcgtgctcaagatggaagacggcagcgaccttctgctccccatcatcccaaggccaaccatctacaatgtggtgctggagatgactacaaggatgggatatgaggtgcgtttggtgcggatcacagaaatggtccatgacgcatactattctcgactatatctcgcaaaggttgggaatgaccaagacactatcagtttcgacctcaagccatcggatgctatcaacattgctttccgctgcaaggtccctatacaagtgaacaggcgtatcgcgtataacaacggattgaaagtcctacagccaaaggcggccgggagttatttaggctccgacgacattcaaatcacaaggcttgacaggcctgacgaccagcattgcagcgaggcccaagagttcgatctggtccggaacatgctcattgctgccgtagaagaacgctacaaggatgctgctcaatacagagaccaactttccatgttgcggtcaaagaaaaagaacgcgatatag

SEQ ID NO: 26479 - DNA, 321 bp, Zea mays
  Peptide Sequence Number=SeqID_68258
atgaagacacccgctgcgcacgtggaccgagcgattccggccatccccgtcgtcgagccgtacattgctatgaccgctagagcctccccgagccaaccccgccccttgccggacctatctcgccgccgtttttgccatttaatttacaatatgcttaaggttaagaaaaatagaaaagactgcaaccttgctgacggagagtacgtcctcgtgccggagcaaggagctgctcaggaggtagccccagatccagcaccagagcctgcaccagaggacctgcctgccactgctttggaaggcaagccccggttttatgcataa

SEQ ID NO: 26480 - DNA, 396 bp, Zea mays
  Peptide Sequence Number=SeqID_68259
atgcagagaggccttgggtcaacggcgccggagcttaggctgcacgtggagaaagctggtgagcgcggaccgggtgaaacagaggggttgggggcaaaccagagggtgtcccacgttgctgacgaagaggcggagctcaccgaggcaacggacgcgacagaggctcgacgatggccacagaacggacggtggatcacgataaaggtccacgggtacacacacagagcgagagagagacgagggtgttcagctgagggcgcaactgagcgaggggagcgagtgagtgggtgtgagctccaaaaaagggctcgggcgcgtgggggtgtggccaggaaacgtgcgatcgtgggcgcgtccacggcggagagcgcaggcgggaggttagggaaaggatag

SEQ ID NO: 26481 - DNA, 204 bp, Zea mays
  Peptide Sequence Number=SeqID_68260
atgggcgatgagttagaagagtcaggtcaactaaaaagacaaaagaagaaggtgcagtcggccttgatgcaacgcgtgccgggccagggactgtcgctgtccaccatccctggcgaagaggtagagcaactggagccagaacggtcggcgaggcagcggcggccggcgggattcggcctttctgatgtggaatctaacgtctga

SEQ ID NO: 26482 - DNA, 149 bp, Zea mays
  Peptide Sequence Number=SeqID_68261
atggtggacagcgacagtccctggcccggcacgcgttgcatcaaggccgactgcacctgtcaagcaaagccaaaaccccgcaagctcagttttccattgagaagatgcctggagattgcagggtggacagctgttgatgaggttccgag

SEQ ID NO: 26483 - DNA, 345 bp, Zea mays
  Peptide Sequence Number=SeqID_68262
atggatatgacatgggagccggtcttggataagatttcccagctcactaacctatgcagacctccacaaaacctgatggcacacttctcattgcgaagaattgtcatactactggaacaatcgcggtctatgtggacgtactctaggattgagggccccatgcgtgtcgagaagggccccaactcgaagctggctcgagtcgcggccttggaggaggaattggtcggtcgaaccaaggaggaaaaactcctggcctctctgcaagctcatgtcttttctggtcagctatacaagggaaattcaacgctgccaaagggagcttcatcgaggcgcaaggccgcctag

SEQ ID NO: 26484 - DNA, 459 bp, Zea mays
  Peptide Sequence Number=SeqID_68263
atgacgcctacgcagggtgaggctgagagcaacgagggcttcccaaacggtgtcggagttctcgggcagagggggtcgggcgggcgccactctgaccatatcgcccgcccggttgatgaaaaaatagaggcttccgaagcgaatggccgttttgggggtgcagtcgatgcggtggccgctgctggcccctacgatcgtgtcgagactcctcaatggaagggtagagcaaatagcattaagctaatcatactatcccaaaaggtaaacaaggataagacaaatgaacaatacacaaacatatacaaacaagtgagcacatctcaaaagaacaatataaactcaagagggaccttcggccttgggatggagctatacatgatgagaagcgtggtctgggaaaaggtcaagccagttccgaagctacgcgtggagaagcttcgacttactggtggaaaatga

SEQ ID NO: 26485 - DNA, 258 bp, Zea mays
  Peptide Sequence Number=SeqID_68264
atggcaggtgtttcatcgttctacaactcagaaggggtgatcaaaaattttggggaaatgaagaagttgctttctgcggttcgtgttggaatgaacccagtgttaccgaagattgagcaaaccggtcccgaagaagtactccatgtccatttggatgggtgcattcttggtactattgcttctgctatgattgagaaagcagttaattatcttcgtacattgaaacttctggcacaatcacttgctattactgactga

SEQ ID NO: 26486 - DNA, 300 bp, Zea mays
  Peptide Sequence Number=SeqID_68265
atggcgtggaggggcacccacgagatcaagtgcaccccctcgccttcccctggttggtggatactggatacaaaggcattgcagacgttcaccacttgctcggtggcaattgcagttacttatcttgcagttacttcaaacatggtggccgcatcttttgatctgaacccaactgaaccttcaacttgcttgttctgggagatctgtgagcaagcgagttgtcctagaacagttggctcctcgcaatgggtactcgacgctagcctcatccctgccacagacttgggaaaggcacagtga

SEQ ID NO: 26487 - DNA, 756 bp, Zea mays
  Peptide Sequence Number=SeqID_68266
atggatcctaaagggaagggaatcgtgatcaacgacaaggagaaggagtccttcgtcaacgagccaagggatgacaagtccaacgactcgggctcgggccacagacgcaaagatgggaagaagaagaagacaagacgcatcaaggagatcgtctactacgacagcgatgagtctacttcctcccaaaaggacgacgaccacaacgaatacgagagaaagaaaccgattcataaaaatgcacaagctactactgtgttgctagcctctttgtgcagggacgagtatcacaaggtgagcggcttggacaatgccaagcagatctgggacaccctcaagatctctcatgaggggaacgacgtcaccttgctcaccaaaatggagttggtggagggcgagcttggacgattcgcgatgataaggggcgaggagccaacccaaacatacaaccggctcaagacccttatcaacaaaataaggagctacgggagcacgcgatggacggaccacgacgtcgtccgcctaatgctaaggtcatttaccgttcttgatcctcatttggtgaacaatattcgtgaaaatcccaggtacaccaagatgtcgcccgaagaagttcttgggaaatttgttagcgggcgaatgatgatcaaggaagcgaggtacgtggacgacgccttgaatggcccgatcaacgagccgcaaccccttgctctcaaggcaacacgaagcaaggaggcgttacctagcaaggtggcatag

SEQ ID NO: 26488 - DNA, 564 bp, Zea mays
  Peptide Sequence Number=SeqID_68267
atgggggaaaatcttcagggaaggagcatgctcgcgagcaggatccgcgacgagggagctgaggcaacacgcggcaaggaaagcaggcgctgcatgaaagaaagcaagggctccacggcgcgccagcgccataggaagctccgcctcgcccaaccaagggctcggactcgggcttggcctcggaagacgacgaactccgcctcgcccgacccagggctcggactcgggctcagccccggaagacgacgaactctacctcgcccgacccagggctcggactcgggctcagccccggaagacgacgaactccgcctcgcccgacccagggctcagacccgggctcagccccagaagacgatgaactccgcctcgcccgacccagggctcggactcgggctcagccccggaagacgacgaactccgcctcgcccgacccagggctcggacccgggctcagccccggaagacagactcgaccttgacctcggaggagcctccgcctcgccctacccagggctcggaccgaccacgtcacaggaggggccatcattaccctacccctag

SEQ ID NO: 26489 - DNA, 594 bp, Zea mays
  Peptide Sequence Number=SeqID_68268
atgggatcggaggtgaaagaacggcggagagggtgctctgggcgggtagagatgattcctacgaggaatcccggccgtggagaggggagatcgggcacgctaacgcttgggctagctccggtggaggacggggaaagctatgggccacaatcagggcacagggcaaggctaaattggccagatagcacgcgggtgtggcgagctggcatggccaaactccgacgagggcgaattggccattctacggtggagttaaaggaaaccaagcactggagcgagttcctcacctcaggacagtgcttgggaaggccgagcgcggctcctggcggcttagacggccggcacgacaggcgaggatctccggcgggctctggcggcttagacggccggcacgacaggcgcggatctccggcgggctctggcggcgacggcagagcgtatgagagagtggacgttgatgaaatgaggcaggggagagagcgggtgcgagcggtgctcaaaagggagctggggcgcatgggtaggctacgtggccagagttctcggtgtgcatacgcgctggtcaacggtggtttgcaacggaggcggagctga

SEQ ID NO: 26490 - DNA, 240 bp, Zea mays
  Peptide Sequence Number=SeqID_68269
atgggtgactcgcaactctcaaactgggttgaaagaaaggggaggcttttaaaggataagttcaaggcgataacagacaagggtgtaagggaagaggtgaaaagtgcaggggaacccaagggtacgagtacagtaaagaatgaagctaagggaaccaagggtatgagtacaacaaagaatgaagctaaggccaggctggcgcgtggcaaatatgaggttacgaccaaaaggcgggattag

SEQ ID NO: 26491 - DNA, 225 bp, Zea mays
  Peptide Sequence Number=SeqID_68270
atgggtccaaattcctgttgccattcggagcacgagctcgacccagtgagcttcaccacgccaccaagtttctccttcgggtcttcgcgggcaaaacggtgcaagggcgcgcggcgaactgctcgtcggatcttcagggccgtggctcaccgtgggcaggaaatcccactgctccgatcgcggtcacgtgatgctctgaccgtggatcctagatccaagggctga

SEQ ID NO: 26492 - DNA, 399 bp, Zea mays
  Peptide Sequence Number=SeqID_68271
atgtgccaagtcacgatccaaaagcagaaggagatcgctgaagtcgaagcgcgacagaatcagccgaagaaggtcggtcttcaacctcatggactctgccccaaatctcaactagatgccgaccttccgcccgtggattccgtggtgattgatcctcggtcggactccacctcagcttataaaaccatgctctatggcccttcgcccatcccatcttgcctcggcctggcaccatcatcggtgctgtgtggaggaaaacccgctgccatgtgcgcctcgctcgggaccggagatttaccgccgccacagtcgtcgactcaccggtgttcggtcgcggggcagggtccggaggggtgttcatgggcgcgcacggatgatgaccacgccttcgccatatag

SEQ ID NO: 26493 - DNA, 312 bp, Zea mays
  Peptide Sequence Number=SeqID_68272
atgacgaaggggctcatctacgaaaactccctagacccagagggtaacccgagtggactgcgggttgattttctaaaaaggggagggctcttaagcaaaaacgacagggcgaaggggtatgcatttgagaacaagtccccaacattggcgcccacctctgatgtactcacttccacaatctttggcaaagcatcgaccttcttcatgccgccgaagaagataacagcgccaggggctgcactgcagccacaagacacaaaccaggagactctctctccgagaggctcgaagccagaagagaaaggccactag

SEQ ID NO: 26494 - DNA, 282 bp, Zea mays
  Peptide Sequence Number=SeqID_68273
atggcccaagtcggcccacgtgctggcgaaagcgcacccacgtgcgcccgtgctggcggatttgcacagtggtccccggaggtttggatatctaaggaagagtcctgcgcactacttaattgggtcactgacatttacgaaaaggtccctgaacttctatttcttcacagtctgaagcccacgacgcggtccggcggagagtcgagctccggcgagcttgtaccggctagaatacttgatgactggtgttctactttggcagagaccgaattcaagccctaa

SEQ ID NO: 26495 - DNA, 630 bp, Zea mays
  Peptide Sequence Number=SeqID_68274
atgggggcaggggacgagctcacgtggggatggggggtccgccaagagggggaggacaggggctggcccaggcagcctggcggcttagccctgtgctgctggtcggtcggctaccgcgccggggagctgggctgccgcaccgccacggcgagagggtgggctgtcacgccggggaggatctcccacggtcccagatggcggagattagcacagggaaagactcaacgcggttgtgggcgaggacgagcgataggagctcgtagtgggcggttctggcggagatacacgcgtgcacagctgagaaagaggaggcagttgcaagagatgacaggtggggccaaaaaactgcggcaccaggccggcagtgttcggctgggcgttgcccacacaggcgcaagccgctggggcgcatggcgcgggcgcctggagtgtgcgggcacgaggcaccgcggcccaagccagctgggccgaatggaagcgggaggggggcttgggccagtgcagggcaggtcgaaggggtcaaggcatgtgggccacgctgggccgacgagaaggccagccaaggggggagggcgcgctaggcctgcgaggagggatgtgccacctgggccgagtcgggccgcgggatga

SEQ ID NO: 26496 - DNA, 1155 bp, Zea mays
  Peptide Sequence Number=SeqID_68275
atggaggtgaggtccgagcaagggctgatggcggggagggatctattcggcttgacgaagagcccgccggcgcccgcgccgccgtcgtccgccgccatgcagagcgtgcgcatggcgtacaccgcggacggcaccgccgtgttcgctccggtgagctcttcgcctgcgacgccgtcttaccagccgcagggcgcagcccacggcgctagcatgtccgcggcgacggtcgttggaggcaatggcgctccagctgcgccgagcatgggtgagccgctggccaagaagaagcgcggacgaccaaggaagtacgggcccgacgggtccatggcgctggcaatggtgcctgcttcggcggcttcagggtcgccggcgacagggcagggtttttctgggccgttctcaccgcctgcgttaaatccggcgagctctctggtggtggcgtcgccagacggattcaagaagcggggccggcctaagggttctaccaacaagccacgcgtggacgctgctgggtcatcaggagctggatttacacctcatgttatcacagttcaagctggggaggacgtggcatcaaagattatgtcattttcccagcatggaacacacggagtttgtgttctttcagcaaatggctccatatcaaatgtaacgcttcgtcagactgctacatcaggcagaactgtaacatacgagggtcaattcgagatactgtcgctgtcggggtcattcttcctggctgaggatggtgtccagcgcagccgaaacggaagcctcagcgtgtcgctggctggtcctgatggccgtctgttgggtggtggggtcgcaggacttctagtagcggcttcaccggttcagtttctaccgccttactttgttgggtctgctacggacgcgtcgcgtacacccaagacaaggatgctgatcatctctgcttatgctctgttctctgcagatagtactgggaagcttcaattctggaggcggaaaggagccacaaaagcaggctccttcagaacccacatcggctccaccgagggttgctccgacagccgggatgggaggacccagcagcccttcttcaagaggcacattgagcgagtcatccggtggcgctggaagcccaccgccactgcatcgagccatggctgctag

SEQ ID NO: 26497 - DNA, 333 bp, Zea mays
  Peptide Sequence Number=SeqID_68276
atggggaacgacgagaagcagcacctgcaatcccccgaagtacgtgtggtagatgtcgactgcattatctgcggcagcggcttctccttcaatttgtttggttggatgcgtgctgacagccaggcacggcaaccaaacataaactcagataaagtcaacgcacatggtggcgtgggacgagacggtacagctaaccaatcacatagattgtgtctcccacgagccaagctcggacaagcctgcaagaggccgcccgttgagtccgccgtgttccactacagattggttctcaatgagctagtgcctgaaactcatgagcctgttctactatag

SEQ ID NO: 26498 - DNA, 261 bp, Zea mays
  Peptide Sequence Number=SeqID_68277
atggtttctgcgtatctgctggatacatgcttactttggagggaatttattaaactccaagaaaaagaagggacaaaggattgcaatacttctgggcgcagtgggcacgggaaagagtttctttggctgatctccgtggtgaggtgtcttccgtggaatgatggtagtgccatcaaagagatcaaaaatggaaagaagggtcgcaggtacaaggatgattttactgttgatctgacttccatgaaacttggatctggatga

SEQ ID NO: 26499 - DNA, 2253 bp, Zea mays
  Peptide Sequence Number=SeqID_68278
atgaaagagtccgaccagctcgcgacttctttcatcacacccttcggcatgtactgctatgtcaccatgccattcggcttgaggaatgcgggcgcgacgtaccagcggtgcatgaaccatgtgttaggcgaacagattggccggacggtcgaggcctacgtcgatgacatcgtagtcaagacgaggagagcctccgacctcctttccgaccttgaagtgacattccgatgtctcaaggcgaaaggcatgaagctcaatcccgaaaagtgcgtcttcagggtaccccggggcatgctcttgggattcatcatctccgagcggggcatcgaagccaacccggagaagatcgcagccatcaccagcatggggcccatcaaggacttgaagggcgtacagggggtcatgggatgtctcgcggctctgagccgcttcatctcacgcctcggcgaaagaggtctacctctgtaccgcctcttaaggaaggccgagtgcttcacttggacccctgaggccgaggaagccctcaggaacctgaaggcgctcctcacgaaggcgcctatcttggtgcccccagctgccggagaagccctcttggtctacgtcgccgcgaccactcaggtggttagcgccgcgattgtggtcgagaggcaagaagaggggcatgcattgcccgttcagaggccagtctacttcgtcagcgaggtgctgtccgaaaccaagatccgctacccacaagttcagaagctgctgtacacggtgatcctgacacggcggaagttgcgacactacttcgagtctcattcggccatcaagtcccaggtcttggcggacttcatggctgaatgggtcgacacccagctcccgacagctccgatccagccggagctctggaccatgttcttcgacgggtcgctgatgaagacaggagccagcgcaggcctactcttcatctcgcccctcgagaagcacctacgctatgtgctacgcctccatttcccggcgtccaacaatgtggccgagtatgaggctctggtcaacgggttgcggatcgccatcgaactaggggtccgacgcctcgacgctcgcggtgactcgcagctcatcatcgaccaagtcatgaagaactcccactgccgcgacccgaagatggaggcctattgcgatgaggttcggcgcctggaagacaagttctacgggctcgagctcaaccacatcgcccggcgctacaacgagactgcggacgagctggctaaaatagcctcggggcgaacaacggttcccccggacgtcttctcccgagacctgcgtcaaccctccgtcaagatcgacgacacgcccgagcccaaggcaccctcggcccagccctatttaccctcggctcagtccgaggcaccctcggctcggcccgaggcgccctcggttcagcccgagaccccgtacctgcaatatctccaccaaggagagctacccctcgaccgagccgaagctcggcggttggcgcggcgcgccaagtcgttcgtcttgctgggagatgggaaggagctctactaccgcagcccctcaggcatcctccagcaatgcatctccatcaccgaagaaggcacccggggctacacgcacctgttggtcgccatcgacaaattctccaagtggatcgaggtccgacccctaaacagcatcaggtccgagcaggcggtggcgttcttcaccaacatcatccatcgtttcggggtcccgaactccatcatcaccgacaacggcacccagttcaccggcagaaagttcctcgacttctgcgaggatcaccacatccgggtggactgggccaccgtggctcatcccatgacgaatgggcaagtagagcgtgccaacggcatgattctacaaggactcaagcctcggatttacaacgacctcaacaagttcggcaagcgatggatgaaggaactcccctcggtggtctggagcctgaggacaacaccgagccgagccacgggctttacgtcgttctttctagtctatggggccgaggccatcttgcccacagacctggaatacagttccccgaggacgagggcctatgccgaccaaagcaaccaagctagtcgagaagactcgctggaccagctggaagaggctcgggacaaggccttactacactcggcgcggtaccagcagtccatgcgacgctaccacgcccgaggggtccggtcccgagacctccaggtgggcgacctggtgcttcggctgtga

SEQ ID NO: 26500 - DNA, 147 bp, Zea mays
  Peptide Sequence Number=SeqID_68279
atgagggcgtacgactatcactggttaacctccacggctcaaagcgatgtggtaaaccgcctaaggcgtggcacaaccgagggaaacggcggcaaccacgacgacgatcgtgcggccacgtcgccgggcaagtgggtacggcgatag

SEQ ID NO: 26501 - DNA, 255 bp, Zea mays
  Peptide Sequence Number=SeqID_68280
atggaggtcatgcgtgggagccgacacagggatgacatggtgggtagtagagccgaatcgacgagcaggggcagggaagcggcggatctggagggaggcggcatcggagggaagcacggtggagccactggcctcgacgaaggtgactatgggccgtggtggcgagccttcaacgacagtgcctggtctggcacaccttcccgtacccggacccgacgcagcatgccctgccgccgtccgtcccccttcgtataa

SEQ ID NO: 26502 - DNA, 261 bp, Zea mays
  Peptide Sequence Number=SeqID_68281
atgcaccggaatgctcatggtgttttggtttctgtagcttgtaatggtgtacaagcataccttgatggtcttacatttgtattgtcggcattaccttgcagcacacctattcttgctacccttctgggatatgttgccacttcaagagacccaattattggaggaagtttattgttgacatacacaacgggctatgttgcgcgtcttcctactatagcttcttttgctagagcactgcagaaagacgaagctcgagtttag

SEQ ID NO: 26503 - DNA, 727 bp, Zea mays
  Peptide Sequence Number=SeqID_68282
ccccgcgccctacgcgctgcctcggccacgccccgtgacgccccctcggcctccccacgcccggcctcgcctctccccggcgagcccctgcgcgcgcgcccttctcgcggcccagcaagccctcccccgcgcgactcccgcgcccccggcgagcccttccccggggcggtttggccccccccccccccccggcgagtccctccccacgcgctcgcgccccccggcgagccctccccacgtgctcgcgaccctggcgtcccctccccagccgcgcgcccgccctcggcgagcccctccccggtcgcgtcctccacggcggctccccttcccgaccgtgctcgcccccggcgagcccctccccggccgcgagcccctcggccccgcgtctcgccctggccgcgcgcccccgcacgccctcggctgcgcccctgcccgcgctcgtgcctcggcgactcgcgtcccgcgcgcctgcactgtccacccgtcgtgccgtcaatggggctcagtgtatgcggctcgctctgccaaggttgatttgtcccttggggaggagtgcgtgatcaatgagagtcatgatctccgggcagaaagggaaatcacggcttgtggagatgttcagattacaggtggcaatgagaatgatggttttggtattgattatggtaatggagaagataaatttgtggaaggagacttccaggagttccaagattacgacgaattctag

SEQ ID NO: 26504 - DNA, 270 bp, Zea mays
  Peptide Sequence Number=SeqID_68283
atgggatcggccagccagggacccttcttccctatcccccaaccctgggtcgttcattctaaaatccacggcaacagaatcttcttcctcccagcccaccagacggcggcgcctgggtactctgcggtagcgccgccacggcaagcacttgccctagcgcatgagccgatcgacgacattggctccttgacttgcacggtggcaccttcagcgcttgaaaatcttggcggctcccacgaacgtcttggcgatggggaggccacggcttaa

SEQ ID NO: 26505 - DNA, 219 bp, Zea mays
  Peptide Sequence Number=SeqID_68284
atggcgtggcccggtgccccggcactgcagcgcggcggcccaatggcctgccagcgcggcacgctcggtggctcggcagcgcgccagcccccggccagccggtgtgactcgcctacgcagcgacccggttgcctttggtgcaatctatgctcaagtaaagaagaaggcgtcgaggcggatctccaggagttccaggacttcgacgagttcgaggattag

SEQ ID NO: 26506 - DNA, 375 bp, Zea mays
  Peptide Sequence Number=SeqID_68285
atgagagtggagcaatgtaagaacaagatcgacaaccttaacaaacactacaagatggagtgccaggggctcaccagttccggtggggggccatcagccactggccctggttcaaaaagatggacaaactctgtgtctcctgcctcctcgaagcctcttgctgctgccgaggatgagaaacctagacagcagcgtggcaaaaaggtgattatgctgattgctagaggagttcaagtggcgtgccatcatggtgtggagggaacacttgtcaagttaatattacttccaatcctatcaggtggcaatcgtggggcaggaatcaggaataatgatgagcatgcaacaaaagtatgtggatgggtcctggactactag

SEQ ID NO: 26507 - DNA, 237 bp, Zea mays
  Peptide Sequence Number=SeqID_68286
atggggagggagagctcgcccacgccatggacagcagagggaaacaccgggagctcgacccaagaggttgttggccgaccatggagacaccctgctgccgagcgctatggatccgcggggattgaaggtgctgctgccctgtgctcacttgagcttggggagggaggcgtccatggcagcttctgctcctgcgcgagggaagccaaggaggagggcgccatggaggggagcacgtag

SEQ ID NO: 26508 - DNA, 615 bp, Zea mays
  Peptide Sequence Number=SeqID_68287
atgatccagggcggaacaaggtaccatgtagaatttctggatgggtgtggagcaacttcatgccatgaaacttcgagtggtggaaatttattgatgtttggaattacaatgcaggggaggggttcaaaagtatgggatgttgttcttgacacttccaccatagagatcagttgtggttgtagaaagtttgaaaggatgggtcttctttgttcgcatgccctcaaagtcttcaccctgcagaatgttaacacaattccagaaaagtatgttttgaaacgctcgacaaaagatgccaggagaagcatgtatacacttgctcaggatgattcaacccaacaggaatgcacagaggctgaacttgcatatcgcaatcgggcaatgcattatgcatataacctaattataaagagccaggaattggaagaatcacgaaaaatattctgggactcccttgaaactggagagaaggcactggaagtgttctttgaaatgagaaacatgcgcactcaagcagcaaaggatgctgataagagtgtaaagaagaagaaaaaacatcaaaaggaacaaacccaaaaaaagctaaacaagccccaggagtttcctcaactggtctag

SEQ ID NO: 26509 - DNA, 156 bp, Zea mays
  Peptide Sequence Number=SeqID_68288
atgggagttgacttctgtaagaagctctgtggagtctctattgtgcgaagtggtgagagtatggagaacgcattgcgtgcttgttgtaaaggaataaaaattgggaaaattctaattcatcgtgttggagataatggacagcaggttaatgcttaa

SEQ ID NO: 26510 - DNA, 402 bp, Zea mays
  Peptide Sequence Number=SeqID_68289
atggcctggggtccattttccttacagaatcctagtgattcaccattcagatcatcagcatttgctaaaggtgagaccttcgctccttggagctgcatcaccttccgcaccctcagcttcttcgccaccgccgctggagagcttagcctcgtcgtccccaacatgcccgacaccatgggcacccaaccaacatgcccccaccaagagcaaggtagagaaataacacctaaaaaggcgcgacgccgcccaaaagcggtgcctcaatatgcacaccaggacaaaggtggtggaagccccgtcctcgaccctagtggcagctatcgatcgctagccgacgttcattctcaacctgctcaaggacgatttgagccacaattcgactggggccaactccgatgctga

SEQ ID NO: 26511 - DNA, 606 bp, Zea mays
  Peptide Sequence Number=SeqID_68290
atgggtctatttcgtttcttccacgcgctcaggctagaacccctgcttacatgtgggtccctccaggcagccatagggcattggtctggcgtggctagaaccgctgaccggtgggtccgccatgtcggactcgtcctgtccgtggagatctttgtgagcaccgtagaacccgccaacaattcatcgtcgatctccgaccattgcgagtgtcccacgggtatttatgccaaccctctcgaccccctttgcaccctgtcgaactaccaatccctggcgccaaataccaccgcaatggcgtgcgccatggtgggaattgcagagggcgtgcggagccgccacataggtgcttcaagtcctcggatactggcctggggggcatcgtcggtaggccgcgcggcccagaggccttatgtctggctccgcccactggcttacgtcacaggcagcgggccacgtgacagcatcgggtctccgcttgagcggggagtggttgcgcacgctgtcggtgttttgggtccgaccgcgcacccgggggatgacgattcattgggtgcaccagaggtgcacccaatgggtgtagcccccgagcttcgagtggatttttga

SEQ ID NO: 26512 - DNA, 225 bp, Zea mays
  Peptide Sequence Number=SeqID_68291
atggactcgccgtgtaaaaaccatggtttccctgtccgacgcaagctccgggagtgtgagctcctaaagtgctttatctccaaccctcacgccaagaaggcaaggtcggaggagccgacaaagccagcagagcaggaggtccccaccgaagattcccctgagacaacggggtgccttatgatcttcggtggtgtggtggaaccgaccagattatttcagctttaa

SEQ ID NO: 26513 - DNA, 249 bp, Zea mays
  Peptide Sequence Number=SeqID_68292
atgaccacaccaccgacccgtgcggccaaggaagggcgccgcgccactgtgcacggtgcgagggcatctccaacgagcgcagcggaaggaagggtcggcgccaccatcgattgggctcgtcgtagcatctcacaccaccgcggggcgagtggatctgcgctcccagactcgataaaggatcctgcagccagcatcactggataccctttcggctctggaatcttactgaagagtccctggacaatttaa

SEQ ID NO: 26514 - DNA, 987 bp, Zea mays
  Peptide Sequence Number=SeqID_68293
gtgaaaagaactgtccaagcagatgggattagagctctcaaaaaagcagaaagagaagcatatgcccctccagcaggctcaggattcatctctagtttcatgtttggctcaggaaggtcattgatagacaagatctcatcgattgacgactctatgtttggctctacctcgtatctatcagaacaggcaagagtagttgatgattataccatttcccaggttattacgagagaacttagtgatggagatgtttcacggttgctaattgttgtgacgggtgcaagccatgttatgtacgggccacgaggaagtggtgttcctgggagaatatctaaaaaggtgccaaagaaagaccaagttgtggtactgcttgatcctgaaagacaggttataaggagggaaggtgaagtccccattgctgatttcttatggtattcagcggctaaaccttgcactagaaattgttttgaccgtgccgaaatcgctcgagtgatgaatgctgctggtaggaggcctgaagctttacctcaggatcttcagaaaggactagatcttggtgtagtttcacctgaaatattgcagaacttttttgacctcgagaaataccctgttatgacagaactgattcatcgatttcaaggtttcagagaaaggctgttggcagaccctaaattccttcaaagattagccattgaagaggtcatatcaataacaaccactctactagcgcagtatgaaaggcggaaagggaggttctttgaagaaattgactatgtcctcacagatactattagagggtctgttgttgatttctttacagtgtggcttcctgctcctactatttcagtccttcagtatgctgatgatggttctggttcgagtttggagtttgtcaaaggccttttaggatcattgccagataatgcattccaaaagaacatcttgggccaggattggagtatcaagcaaagaattgcagcagtgttg

SEQ ID NO: 26515 - DNA, 618 bp, Zea mays
  Peptide Sequence Number=SeqID_68294
atgaggttgctctcctcgacggcgagcaactctgagcatgatgacgttgatccgcgagatcttgccggcgccggagggcagctccgacatggactcgacgtggcggagcttgtcaaaggaagcaccctctaccggcttttggccgttggccgtgcccatggcggtggctgtcgatggcagcttgcgagctggggcggagaggcagcgagatccgggcagagctctgctgtgcccatcagcgacggctgcgcgaggtgctggtgcgcagcgaagtcggcagaggcgctcgggtcggccatcgcagcgctaccctttggaaggcccggaattattgctggtctagtggagtatcgactaggagagagcctggtgacatactacaaccaaccccttattgctggtttgttgtcattcgtggctaggacactgaactcatactggggaacacagcaatgggttgatcttgcgcggtacactgggttacagagaagcgaggaaaagcctcctgctgaggccactatgccacctgattcagcacatttggagggttgtacgacggaaggacatgattttgatgacagcagcaataacaccaacaaatcgactggtccgagctag

SEQ ID NO: 26516 - DNA, 243 bp, Zea mays
  Peptide Sequence Number=SeqID_68295
atggagcagggagggcgcggccatgggcatcggcaccaggaaaacttagtgcgtgagccaaggaagaagcaggatcacgcagcggacttcgaacggcttggggttgaagtacacatcgatctcgctcgtgtcctccggtggcggcgcggggttggcatcgggctccggcttgaaggagaccagagagagaagcaagaagggagcgctgcgacgagcacaggggctccacggcggggtatttga

SEQ ID NO: 26517 - DNA, 306 bp, Zea mays
  Peptide Sequence Number=SeqID_68296
atgcgtcttggatgcaccctttctaaggtatcggaactaagtgcgactgtggaaactggtaaaacaaacccacgtgtttcagggcagttgagtagtatggcttcgaccaaaaggtccggtccacccctgtctggagaggacgacgagcaagagcccttccgaccacctcgacctaacaaaggcaaggttgtggtcgagcaggagaggcaaaagcgtcaacatttggataaagcccaagaggaggttactgttgttgcagtcattgtggagtgcggtgagaagggtgggagaggaggaactgcatga

SEQ ID NO: 26518 - DNA, 276 bp, Zea mays
  Peptide Sequence Number=SeqID_68297
atggccgctcatcccgccgccctgccctcgccttgcccgcggatctcgctctcgcgcggatggacgcggatctcgcccacgcccgcaggctcccagcccccgccatgcccctgccccggcccagaactggccgactacgacgccgtcacggaccacttcgcgggcacgaccgccttccacctctcctcttcgggtgcctcacgccatgggatggtgcttatgtgttcttatgcgattctaaatccgcgccagattctcactgccaatgaaatttga

SEQ ID NO: 26519 - DNA, 318 bp, Zea mays
  Peptide Sequence Number=SeqID_68298
atggcggaagtggcggcgcggcgcgccgtcggcgtcccagcagggggcggcggcgaccaggcgaaccttgcggcggtggcggcggctatgcgggggcgcggcgaggtggacacgtcgtcgccgttccagtcagtgcgccaggccgtcgacctgttcggcggcggggctgccgccgtctcccagtggcgccacccgcaggctccgccgcgcgtccacctccgcccagagggtggcggtggcggcggcggcggcatgattgccagcgcaccgctttctcagccaatacctcctttttcaaagcgccttggcatctcttga

SEQ ID NO: 26520 - DNA, 210 bp, Zea mays
  Peptide Sequence Number=SeqID_68299
atgaagaaggcaacaggccaagagctcgatatgctgtcgagtaagcgatccatcgattattcatcaggagcagcgctcaaggaggtaaggttggactcgccagcgccgctagagtcaacgtgcccgcggggaaaattcagattccgcgttgcgttctgccaaccccaggaggccaggccagaggccacagatctagccgaaaatctatag

SEQ ID NO: 26521 - DNA, 1635 bp, Zea mays
  Peptide Sequence Number=SeqID_68300
atggcctccaatggtaatggaaatctcaaagctgatattcaacaagtagagtcaacagcttcagataatgttcaaggcgcaacaggcgtcaacactcttgccactcagggtgtttcacgaaatgaaaagcggtggagcgggtttagggatttctggaatcgcctttgtactggccccaagttaaagaagcttggtccctccacttcgttcaagtttcaacagatcgcacttcaacgtgatgagttctcacgttcgatccattcggacaaccatgttagccacgagcatttccagtttatccggaagattaattgggaacaactgtgggtgatggctaggaactggataaaagagcctatgaatatggccctttttgtttggattgcttgtgttgctgtatccggtgcaattctcttccttgttatgactggaatgctgaatcgtgttttgcctagcaaatcaaaaagagacacctggtttgaagtgaacaaccagatcctgaacgcattattcacgctcatgtgcctctatcaacatcctcaacggatctacaactttgtgcttctttgtcgatgggagcagcaggacatcttaaggcttaggaagatatattgcaaaaatggaacatataaacctaacgagtggatgcacatgatgggtaccgcagatctgaacgccccgctatcggtgttggtctcactatttctgttgcaattggggctgcagcattcgctgggtctgtacaatatcatcagccctcttgggaaggattacgacacagaacatccagatatcgaccaagaagcacagatccatgccacctcaaccgagagcggcagaccaacttcacggcttcagtcattcgagaggagatactctttcatccagagcgacgaacgccgttttgtggagagaaggcctcagtgggttggcgggctaatggatttctgggaccagatatccattgcgtatttgtcacttttctgcagctgctgtgtctttggctggaacatgcagaggcttgggttcggtaacatgtacgtccacatcgcaacgtttctgctcttctgcctggcgccattcttcatcttcgtcctcgcagccggcaacgttgacaacggatccgttcaggtggcgttggtgctcaccggacttttcctgtgctttttcggtctactgtatggcggcttctggaggatccagatgaggaagagattcaacctccccgaaaacagcttctgctgccacaacccggacgcgtcggactgtttccactggttattctgctgctcgtgctcgcttgcccaggaagtcagaactgcggattactacgatatcacagaggacaggtcgcacacagggcaggtagttggtgaaagccaccgcataatgtccccgttgcagcgcgaagacggtctgcctcttttcaagtcgagcccaagctcgccgtacaggagcggcaacgttagtccgtcgatcttcatcctggagagcccgtcaccgtcggccccacgtaggtcgtctggttcgtcgcctcagggtggtggttcaccgacgatgggccatagggcgatgaaggcgccagttccatctgttcttcaaagagagagtggaccagatcatgcacaggggtga

SEQ ID NO: 26522 - DNA, 357 bp, Zea mays
  Peptide Sequence Number=SeqID_68301
atggtgtcgatgacagcgtacacgcaggttccacccacacggcgagctcgagcaaggtctggcagggagcttagggaagccgcgacgcaggaagaagccggatggacaggagctaggcgcagccacagagagatgctgggagcgcagagggagagagagagagctcagccggcagaggagggctccgcgagcagagcacgacacaggagtttacgcggccacggcgagcctggagctgcgcgcggccatgggacccgagcaggaactggaagacgccatgagaaggacgtcggggagaggaagaaaaaaatgcagctgcttccaggcgcccagtcacctgcagagagcgacggctga

SEQ ID NO: 26523 - DNA, 276 bp, Zea mays
  Peptide Sequence Number=SeqID_68302
atggctctccttggcgtggtgcaggcaggtgatgacgcgtcgagcgctacgccaggacatgcgtcgagcgcggggtcaccggcaccgagggtgcctcaggctccgctcggcgtccaggttgaggccggcacgcggcagcgggcggtagcgcgctcgattccagcgtggaaggaagcaggcttgtcagggcgcgactgtgttggctcctattccgaggagaagctggaccatcatgccggagagaaggaagaataccttcctctcgaagatctatag

SEQ ID NO: 26524 - DNA, 387 bp, Zea mays
  Peptide Sequence Number=SeqID_68303
atggaggcgtccagatctgcttacgagccctccctgtctctctccttctccgcctctctctccggcctaacctacctctccttccctgtcgtctcctacccgccacgcccctccaatagcgttgtccctcgcgcgccccgttcctcgtcgtcttcgcctgcgcaggagccaggaaggtaccctgtagccagcctcgccttcccggccaaatccttcttcggcgcgccactggccaccatcgcgacctccgtcgctcccacgccagccggccgcctccagctcgctcgaggttgtcgtagcagggaagaaggggccttcccgaccaaatccttctttggcacgccgctggccgccaccgcggcctccgtcgcgtcgctactcccatga

SEQ ID NO: 26525 - DNA, 180 bp, Zea mays
  Peptide Sequence Number=SeqID_68304
atgggagagagcctggagtggggagatctcgctcgccgggactaccacctgacggcgagcatggtcgtgaacaccatgaggtggccggcatccatgggacagagcctgtgtgtgtttgcctgttcattacaattccagactattcctcaaatgcttccgaaatatcgggacaactactag

SEQ ID NO: 26526 - DNA, 375 bp, Zea mays
  Peptide Sequence Number=SeqID_68305
atgggtgcgcgccaggtcgaaggcgtccccgaggccggctcgctcgtcgagaagctggacgcgctgaaccgcgtggcggcggcggcctcgcgcctcggccgtcggtgcgtggccccggcgctcgtgggcttcggccacgtctacgccgacctcctggccggccgcgccgatgcgggcgcgctcgctgtcgtcgcctcccgctccgacgccgcgccgctcgtgcgcaggcgcgaccgcgtcgccgccgccaccgtcgcgctctacgccgagctcgacgcgctcgccgagctcgagcagtcggcgcggaggccgcccaccgaccaggcccgccgcgcactcgagcagcgcgcgtggggctcgacctgctggccatga

SEQ ID NO: 26527 - DNA, 1030 bp, Zea mays
  Peptide Sequence Number=SeqID_68306
ggacaacttccgtgtgctgcgagtccaagtaggaggaagggagaaacgtgttgtcaaacaacagtacgaggaggaactatttgatttcattgctgctgcattggctaaatttgttgatactgaaggtgaagatttccacctcccagaggatgttgtttctgagttgagcagggccatggagaggcagggactagatatgaaagttacggcattggtcaatgatacagttggcacattggctggtgggagatatatggataacgatgtagttgcagccgtaatattgggcactggtacaaatgcagcatatgtggagcatgcaaatgcaattcctaaatggactgggttactgcctaaatctggaaacatggtaattaatacggaatggggaagctttaaatccggcaagcttcctctctcagaatacgacaaagccatggactttgaaagtttgaaccctggagagcagatatacgaaaaaatgatttctggcatgtatctgggagagattgttcgaagaattttactcaagttggcacatgacgcttctctatttggagatgttgttccaactaagctggagcagccatttatattgaggacgccagatatgtcagccatgcatcatgactcttcgcatgacctcaaaactcttggatctaaactgaaggatatagttggggtcgcagatacttccctggaagtaagatacattacccgtcacatctgtgaccttgtcgcagagcgtggagcacgcttggctgccgcaggtatatatagcatcctgaagaagataggccgggacaaagtaccaagcagtggcagtaaaatgccaaggactgtaattgccttggatggtgggctctatgagcattacaagaagttcagcagctgcgtcgaagcaactcttacagacttgctcggcgaagaggcctcttcctccgtggttgccaagctggccaacgatggctctggcattggagctgctctccttgcagcctcacactcccagtatggcgagagtgactag

SEQ ID NO: 26528 - DNA, 1203 bp, Zea mays
  Peptide Sequence Number=SeqID_68307
atggctttgccgtcgcgggcgcggctcctcctcctcctctgcttcgtcgccgccgcggcgctgctcgtcgcgccgggggaggtgtccgccaccgccgccgccgccgacgccggggggcacgggaagcggcgcgggcacagcacgcacacgaggcgcctgcggcccgggaagggcgcggcggccgcgaagccgtaccccgcgaacgcggcgcgggtggaggcgatcgagcggcagttcgcgcggtgggtgcggtccatgggcggccacggccacaacagcagtagcaccgcctacagccgggcgctcagccgcgcgtccctgcccgcgcgcacgctcgtcgtcgacaagaacccgggcgccgggaacttcacgtccatccaggccgccgtggaactcgctcccgctcatcaacctcgcccgcgtcgtcatcagggtcaacgccggcacgtacacggagaagtgagcatctcgtcgatgcgcgcgttcgtcaccgtggagggcgccggcgccgacaagacggtggtgcagtggggcgacacggcggacacggccggggcctggggcaggcccatgggcacgttcggctccgccacgttcgccgtcaactccatgttcttcgtcgccaagaacattaccttcaagaacacggcccccgtgccgaggcccggcgccctgggcaagcagggggtggcgctgcggatatcggcggacagcgcggcgttcgtggggtgcaacttcctgggcgcgcaggacacgctgtacgaccacctcggccgccactactaccgggactgctacatcgagggctccgtcgacttcatctttggcaacgcgctctccctctacgaggggtgccatgtgcacgcgatcgcgcggaactacggcgcgctgacggcgcagagccggcagagcctgctggaggacacggggttctcgttcgtgagctgccgggtgacggggtccggcgcgctctacctgggccgcgcctggggcaccttctcccgcgtcgtcttcgcctacacctacatggacaacatcatcatcccgcgcggctggacggtgttctacgggcagtataagtgcacggggccgggcgcgaactacgccggcagggtgcagtggtcgcgggagctcaccgacgacgaggccaagcccttcatctcactcgacttcatcgacggcttcgagtggctccggctgtag

SEQ ID NO: 26529 - DNA, 1143 bp, Zea mays
  Peptide Sequence Number=SeqID_68308
atggggcgcgcgatgaggtggctcaagaaggtgctcaccggcagcagcaagaaggaagcgtcggacggggttcgcaaggcgcgcgatgccgcgtgcgccggcgccggcggtggcggtgaccacgggctgggcccgccggcatcggagaagaggcggtggagcttcgccaagccgaggagcagcgtgtctggctccgcccggaggccctccgtcgccgccggggagctgtcgcaggtgcgcccgtgcagctgcggccttgagcgcgaggtggaggccgccgccgtcatccagaaggccttcagaggctacttggctcggaaggcgctccgcgccctcaagtcgctcgtgaagctgcaagccctggtgcgaggctacctcgtgaggaagcagacggccatgacgctgcgcaggctgcaggccctcatgcggctccaggccaacacggcggcgtcccggagatccactgaacaagagcgtatcgttgcgcgggtgaggccactggccgtgcctgctgctgcggtgcaccgccggcggctgtccgacggcggggacgccgctggcggcttcgaccgcagcccgaggatcgtggagatggacacgtgcgagctccgctgccggtcgtcccggatcacgagccggtccgccggcggcgacccggcgggcgactcaccgctcctcctgcgctgccacgagccggcgtggtgtctccaggggcgagagctcgagcccccgcctccgcctccgcctccgcaccccaagacgacgcacaacacgccccgcctcggcgcgttcgcgggctacctcggctcgccggcgaagcgcgcggccgcgtgccgggactccgggagctgcccgcggtacatggcgggcacggcgtcgtccgtggcgcgcgcccggtggcagagcgcgcccaggcagcggcgcggcgagcagcagcagcaggcgcccgcgggggatgcagacggggcgaggcccagccccagcgtcggccgcggcgggtcgaggatgcacgcgcggccgcaggagctgcaggcgccggacagcttcagcctcaagagctcggaggccagccgcgtggaggtggagggctcggagctgagcgacgaggtcaccagggactactacctggaccggctctggtga

SEQ ID NO: 26530 - DNA, 708 bp, Zea mays
  Peptide Sequence Number=SeqID_68309
atggcgttggtgccctctcagccgctcccatccttggcacacaaaactctcggatctgtcgctcctccacgctctcgtcgccctgggttcctctacaaggttgagctctgcctcatccactgtaacctccctaccttgccctcgattgtggccccattcgcttcccctccctctgcgcatccgctcgacctcgctactgcctcctcgcttgccgccgttgaggacggcgactgcaagtctacgactcgcccgaggccaacctcggacgggagacacagtcacaagtcgcccgacgccaagcctgtgaatgagacgcagtcacgactcacccgaggccaacctcggctctcagacggcaagacgatgctgccgccgaggtccgccgccgccgcgccgtgctcggttgcaggacttctgttccaccgattctcatcctactcgtcctcttctgtctattctgtccgccaccacgcctcgtctgctctctcctcccagccctccacccgccccaccaccacctggtcctcttccccccattccagcagccgcaggatcagggggtttgcggcctgggcttcggcgccggggccggcggggtctgcggattccctcgctacaaaggcgctagaggctaagatcaaggagcagctggaggcggacacagtcacggttgtggatacctctggagatggccgccatgtttggtga

SEQ ID NO: 26531 - DNA, 246 bp, Zea mays
  Peptide Sequence Number=SeqID_68310
atggagacagccaaggttctacctcctccacctcctaccacgcaaatggtggtgctccccacgctgcttgccccaagggaaggatctagggatccccctcttttactattgagggctcaaaggcagaggagcagaggatttcttgtcagagtatcgctcctggttgtagcgtctcctaaccgggttgttgacacggagcgacacactattggcggcgtagtgggaggtggagcacctatgcactga

SEQ ID NO: 26532 - DNA, 321 bp, Zea mays
  Peptide Sequence Number=SeqID_68311
atggcggagttcgtttctgggtcagcgctgttcttctgtgtatggtccaaggagcaaggtcgatctggtagcgttcagccgcgattcctggcggcaacaacgcattttgccgagcttgcgcgatttctgcgtgagatggagaagacacacctgactagcgggtcccacacgtcaaacacccagcgcccaggcggcttccggttcaacggggaagaggacccgacaggtgggccccacccggcattgagtgcgcaagctggcaggcgccccggccccagctgtcggcgcacggacaggggtgggctgcgcggatggtgctag

SEQ ID NO: 26533 - DNA, 162 bp, Zea mays
  Peptide Sequence Number=SeqID_68312
atgtccctagcggcgatacatctggtagtcatagtgcccgaggaaaagactagttctatgaagcctgcgactacatatgataaggggaaggggcctactgaaattgaggataccaagaagaccatcgagaatgacacactactagggcctgattttaagtaa

SEQ ID NO: 26534 - DNA, 342 bp, Zea mays
  Peptide Sequence Number=SeqID_68313
atggcgaccacacgctcatcacagggttactcgaagcatttgaggccgaaggttgaagcagccttagctcctttggttgagggtgaacgtactgtggaacacaaggttcttgttgtgtggcatttatcctcaccacataacaaacaaaatggcttccttataggtgcattgaacctgccactaaagcttcagcctcctcgccccctcttgggtccaacaagcagaccatgctctgagaatgctgctgctgagaacttgcttgctgttggtctgactgccctagagattggaccattttttctccgttctatgctaggttgtgaatgcttcggacatatctag

SEQ ID NO: 26535 - DNA, 409 bp, Zea mays
  Peptide Sequence Number=SeqID_68314
atgacagtgacaccagaggttgttgcccccgccgtgacagccgccctcgtgtcctcatcacgcgcctgccccatcctcagcgcctcttccctctccccgtcgccacatctcctcccactctcggattcatcacctcttcccccctccgacggtgacctcccgcgcatcacttcccagtccttcgactgcgacgactttggcgatgccacagccgatggcgccactccatcggccccacctcctcaagggatctgggttcatctctgccgaggagctcggcaccgtggtgtgctcgctcgacctgcgcactacctgaagacgcattatgctgctattgtctccctcgtcgttgcctcgtgggtcacagtgctcctccactccctcgtcagccacaatgacagccaacaag

SEQ ID NO: 26536 - DNA, 318 bp, Zea mays
  Peptide Sequence Number=SeqID_68315
atgaattgggcaaaagaatccaaaagttcaccttcttgcactaattgtgactcgttcatctttgagacgcagcgccacaatggcataagggagctttgccctgcgaatggagagcacaagctaatccgtgcccgtgctctcatccccctgcatgaacccaattctgttgcgatcaaccatcaagggttgtcctattgtattattcagttcattgaaaaggactacaaattagcagatactatgatttggggtctactcaagcattggccagtcagaaactgccaagaggtaattggttttgaccaaattatcaactag

SEQ ID NO: 26537 - DNA, 339 bp, Zea mays
  Peptide Sequence Number=SeqID_68316
atgcgcgactgcaacgaatctcgagacttggtcggcgaagaaggccaggtccaccatgacacggatggtgctaaaggttcaacacaaaccaataaaaagatcaaattagagttcaaaaagaaaggagcaaaagaaaaagaagagaaccctggactggcgcaccggactgtccggtgcaccagggtcgatcgacttcaaacttgccaccttcgggtttcagaagcgtcgttccgctataattcaccggactgttcggtgtgccaccagactgtccggtgcaccagcggagcaacggctagccagcgcaatggtcgactccaacggtcgcctgcaacgtga

SEQ ID NO: 26538 - DNA, 222 bp, Zea mays
  Peptide Sequence Number=SeqID_68317
atgcagcaagcagatcgagagcgagggcttgcactcacatcgtggcgctggcgtccgtcgccggccgggaagatccggccatctggtgatggtgatgatgcagggggagcgcgcgtgccgagcgagagtagtgccaagaggcttgtattgcaagctgcttctgttgccaaaggtcagacagcatcgatcgaccaaggaggtgatcttgggcagcactactga

SEQ ID NO: 26539 - DNA, 447 bp, Zea mays
  Peptide Sequence Number=SeqID_68318
atggcgcagtacatggcggaggacctggcctcgttctccgtgcaggatctgagcaaccttgagcagcagatcgagttctcgctgtacaaagttcgcctcaggaagcatgagctactcgaccagcagctgctcgagatccaccaaagggtacgccgcagatgcacgggtacaggctccagccacggcagcccaacctgcagcaggacgccgacgtccatggctggctgtggtaagctgccgccgcctgtgcctggacactcatttgctgttgactgttgtggcagaggagtgcgttctcaaatctcaactctgacggatgacggggatggtgttgatgcctgtagatttgctttggtcgtgggtgtgcgtcctcaacaagacgacgctgaacgtgcagctctgttcattctagagtctttgatcatgtctcatgagctgcccccataa

SEQ ID NO: 26540 - DNA, 528 bp, Zea mays
  Peptide Sequence Number=SeqID_68319
atggaccgcgtggattcttctgcgttcgcctcgatggggcctatcgagggctacgacaacgagaaagatccgtgccggggccgaccgctccgcctctgtgctagccatctctgccccgccagctcgaccttgacactggatctctccgtgccctcctccgtgtcagggcatgtcgcgcgcatcgcctcggtggtcggccgtactgctctctcaacctcgtcacggcaccagcagaggacagctactctagcatggaggtgcacatgcgcctgctcgccactgctgctcgagcgagctccatcttcctctatcaaccccgttgtcatttcgccccaccacaccacacaagacgctgctgaagatgagacccagttggcggcgctgaagcggttgtcgcggtctcatcctcgtcttgaacgtgatgacgatttggcattcatagcgtttcagaaacgatttgacgaatttcctgaacctacagaaaaaggagagcaccaaaggaaagaaagaggatcattactcgtctaa

SEQ ID NO: 26541 - DNA, 435 bp, Zea mays
  Peptide Sequence Number=SeqID_68320
atgcagaccccactgctagagtgcctgctcgcgcgcagttgggttacttgctacgttgtcgtgtggaccctcttggccagtggatctacctccttctcacctcgttgtgtcgcttgcatgtggggtcaccccgtcaaccctgtcacccacctcggaacaacctcgcgagcgcacggtaacaacccatgcgtggcacgcggaatccgtggtcctctgcctaggattcgcggggtcgaccctataaaaccaagacccatggcatcacagttctcccaacctaaccggccgcgggaatcgagctcatcgctgaggcagagggaaaggtgtgagttcaccgggaaatccgccgtcgccatatatccgtgcctgcgggctcacgacgcaccttggttgcggacccgagaaatctccttcgcacgtgggctcttgccctaa

SEQ ID NO: 26542 - DNA, 816 bp, Zea mays
  Peptide Sequence Number=SeqID_68321
atggcgggcctggaggtcgtagcggcggcggctggcagccactgcatctccgctaggctgtttctctgggttaaatctgcttgctcgagttcctttcaccgccagccatccatagctgccacccgccggcctcagtgccggaccggacaccgtcgagcgtctgcaccgcacctgcctgctcgcttcgagtctttactgctgtcacccgttcccatctggctgtctacctgttactcagctgtaggtgggttgtcagatcaaataagggaactcagagaatccattgaattacctcttatgaacccagaattgtttctccgtgtcgggattaaaccgccgaagggcgtgctgctctacggtccacctggaactgggaagacgctcctagctagagccattgctagcaacattgatgctaattttttgaaggtggtgtcaagtgctatcattgataaatacattggtgaaagtgcacgcttaattcgtgaaatgtttaactatgcacgtgagcatcaggcactaaagcgttcatggattgctttagggcataagacgtccactgcggcggagtgtcgtcggatcgacgccttgggggcgagcggcggtgagaagggcacggtggcatggcgagcagggcacgtccttggcggcgtgcgtggtctgctccctgcctccctctcaggcagtggtggcgcggccgagcgcgcaggtcacggtggggcggggcggcccgcagggagaaagaggagagctgcagggagggaggagtgctatggggagggagagggaggggacggagaaggaactggcggttga

SEQ ID NO: 26543 - DNA, 960 bp, Zea mays
  Peptide Sequence Number=SeqID_68322
atggaggaagatgatattggcctaactaccattgtccacgagggccttgcgaatttcccagcctgctacattgtagctgatgaccatggcatcgatgtagctattggtagtttggctggtattgtgggtagtgattgtatgcctcttgctgatgttgaaactatggttggaagtaagacttgtattcatgaggtggacctcatccatgcccccttccccttggggacctaccacctcttgtcggctggtagctttggtagtagctgtgatgggtgtcttcgggttgatgttgctgttgttgttgctaaatattgtggatttggggctgcggcgaaagctgttgcgtttgcacccaagttttggagcttcctatgtgtgaaggctcctttggcttgcattgtgcttcgaccttgcgataatggaggtcctcgaactagagacaactcagtgaggatgtcagcctgcggcatgtacccttggatgttgaggaggaatttctctagaagaagaagccactacgacttggtagctgaaagggaaatcaggggcgtgctccactataattcactagaatgtctggtgagccagcggagcaacggctccctggcgccaacgatcgactctgcgaaaagcaacattgatgaacagtgtcgtgcagaagtcagaaagcaccagactgtccggtgtggcaccggactgtccggtgtggcaccggactattcggtgcagctagaagacaaggtgctccaatggtcaactgctttgaaccctaatggatacgctgacgtggcgtgcaccggacagtgcacagtgcctgtccggtggcgcaccggactgtccgatcacgccaagagggagatcgcgaccggcgaaaagcccgtagagtcggggaggactctctcaagggagtccaacaacaagtataaggaggaatcctcttcctccatcaagtcacattag

SEQ ID NO: 26544 - DNA, 3099 bp, Zea mays
  Peptide Sequence Number=SeqID_68323
atgtcgctcccgtccatgacgaaaccggggaggaacagcactacgtccgtggaggcggcgacggagagcgcgctgcgggttacgccgatgaagctgctggtgcgcgtggtggaggcgcgtggcctccccgccgtgcacctcaacggctccagcgaccccttcgtgaagctcaagctgggcaagcggcgcgccaagacggccgtggtgaagcgcagcctgtcgcccgcctgggacgaggagttcagcttcctcgtgggcaacgtcgccgaggagctggtcgtgtccgtgctcaacgaggacaagtactttagcaacgacctgctgggtcaggtccgcctgccgctgtcccaggtcatggagaccgacgacctctccctcggcacccagtggtaccagctccagcccaagagcaaaaagtccaagaagaaatgccgcggagaagtttgtctgcacgtatcgttgtccacaagaacccacgtatccgaagaatcacagagcgttccccatcctgcatcagacgacctggcgtccagttcagacagcaccatcgagcacaaaacgctgtcgacaacatatagctgcatcgacctatcagccgtccccagcatcgaacgagcgtctcgcagcagcttcgagcgattcccttccagcattctggagcagccagaccggagcagcgtggaggacttagcagcccctgaccctggtggaccagcagcagccgcagacaccgacgcgatgccaaccccgtcgtcagtggtggaggtcctgtcccgctacttcttcaggaaacccgagaacgccaccgtgcagcaggtgcagcattctgtcgcatcggacaccaccgaccatccagtcgtcgaccgtcagctgcaagagccaaacgcgagctcatcagaagaccgtgagatccccgagagagtcacggtacctgagccaagcctcgacgagctgctcaaagtcatggagtcaaaagaccaaggcagcgaaatgccggccgccttgcctggtggcacgctggtcgacgagtcctacgtcgccgctcccaccgagctcaactctctcctgttctcggcgagctcagacttctggccagcagtggcggagctccaaggaacgagcgggttccagatcgagccgtggaagctcgacagcagcgagagcttcgtgcagaggacactgagctacacgaaggccgcaagcaagctggtgaaggccgtgaaagccacggaagagcagaagtacctgaaagcggccgggaactcgtacgcggtgttctccgtcgtcagcactcccgacgtcccctgcgggaactgcttcaaggtggagatactgtactgcgtcacgccgggtccccagctcccgtccgaagagcagacgtgccacctcaccgtgagctggagggtgaacttcgtccagagcacgatgatcaaagggatgatcgagagtggcgccaagcaaggcatggccgaaggtttcgcccagttctccgaggtgctgtcccagaagctcaagacggccgagcttgacgacgccaactccaacaaggagaagattctggcttcgctgcacgcgcagaaggaatcgtgctggcggctggtcgtccgcttcctcgggaacttcacgttcattttctccgtcgccatagcgctctacgtcatagcgcaccttcatctgtccaagcccgacgtgatgcacgggctcgagtattttggcctcgaccttccggactccatcggggaggttgtggtctgcgcggttttgatccttcagggacagaacatcgtcaaggtaacacggcgcttcttgagtgcgtggaaacagagaggcagtgatcatggggtcaaagctcacggggacggttggctgttgaccgtagcgcttatagaaggcactggcatcatagctactggctcatctgacctctttgatatctacgttgttttcacatgcaatgccaagaggaaaacgagctcgattaagtttcagacgtccgatccaaaatggaacgagatattcgagtttgatgccatggacgatcctccgtcaaggatggacgttgcgatctatgactcgagcggacagtgcgtcattggccacacagaagtcaactttctgaagaacaatctgtcagaactgactgacatatggcttcctgtcagtgggaagtgtgaccaagcgagcaaccctaggctgcacttgagaatattcttgaacaactcgaggggcaccgaagtcgtcatgaactacctagcaaagatggggaaagaagtcggcaagaagggccgcctctttttctccccgagaatagttgggttttattccaacatatttgggcacaagaccaagttcttctttctgtgggaggacgtcgacgacatccaggtcatccctgctacactgtccatcggtagcccgtctctgatgatcatccttcggaaggatagagggttggaggcaaagcatggtgccaagggaacagatcatcatggaaggctcaagtttgttttccaatctttcgtttccttcaacgatgcttacaggataatcacagcaatctggaaaatccgagcgctcagccccgaacagaagggggaggcgactgaaaaagacgaagtgaaagaactgctgcctgaagaagccggaaccttgttcactaacgcggacgttaaaatgtctgaaatattctcatcagttctttctgttgatcagcggcagacgagctacaagctcgacaagaacctatctcggcacggaggagaagcggccaccaccgagcagaagtacagcttggtgaaccaggatggctgggccatcgagaaggtgatgaccctccaaggtgttctgctcgcagaccacttcaatctccagatgaagtactgtatcacgaacgtaccttcgaagccaaacacctgtagtgtgctggttttgctggggattgcctggttaaagagcaccaagcagcagaagaaggtcaccaagagcattatttccaatacctcgaatggattgaaggaactgtttgctgaagtcgagaaggagctcacatcaagcagcagtagccatcctaatgtagcagctggtcccactactgcttaa

SEQ ID NO: 26545 - DNA, 1596 bp, Zea mays
  Peptide Sequence Number=SeqID_68324
atggggcatatcaaagacttgaaaggagtacaaagggtcatgggatgccttgcggctctgagccgcttcatctcgcgccttggcaaaaaaggcctacccttgtaccgcctcttaaggaagaccgagcgcttcacttggacccccaaggccgaggaagccctcggaaacttaaaggcgctccttacaaacgctcccatcttggtgccctccgctgcgggagaagccctcttgatctacgtagccgcaaccactcaggtggtcagcgccgcgatcgtagtcgagagacgagaagaagggcatgcgctgctcgtccagaggccggtctacttcatcagtgaagtgctatctgagaccaagatccgctacccgcaaattctgaagctactgtacgcagtaattctgacgcggcgaaagttgcgacactacttcgagtctcatctgatgactgtggtgtcatccttccccttgggggagatcatccagtgtcgagaggcctcgagtaggatagcaaagtgggcggtggaaatcatgggcgagacaatctcgttcgctcctcggaaggccatcaagtcccaagtcttgacagacttcgtggctgaatgggtcgacacccaactaccaacagctccgatccaaccagaactttggaccatgtacttcgatgggttgctgatgaaaacaggagcaggtgcgggcctgctcttcatctcacccctcgggaagcacctccgctacgtgctgcgcctccatttcccggcgtcaaacaacgtggccgagtacgaggctctggttaacgggttgcgcatcgccatcgatctaggggttcgatgcctcgacgcttgtggcgactcgcagcttgtcattgaccaagtcatgaataactctcactgtcgcgacccgaagatggaggcctactgcgacgaagttcggcgcctgaaagacaagttctacgggctcgagctcaaccacatcgctcgacggtacaacgagactgcggatgagctggctaaaatagcctcggggcggacaaaggttcccccggacgttttctccagagacatacatcaaccctccgtcaagatcgacgacacgcccgagcccgaggaggcctcggcccaccccgaggaggcctcgtcccagcccgaggtatcctcggccgccgaggcacctcgagccctcgtcgggaacgccttccgacaaggcttctactggccgaccacggtggccgacgccactaggattgtacgctcctgccaagggtgtcaattctacgcaagacagacgcacctgcccgctcaggccctgcagacaatacccatcacctggtcgtttgctgtgtggggtctggacctcgtcggtcccttgcagaaggcacccgggggcttctcgcacctgctggtcgccatcgacaaattctccaagtggatcgaggtccgacccctaaccagcatcaggtccgaacaggcggtggcgttcttcaccaacatcatccatcgctttggggtcccgaactccatcatcaccgacaatggcacccagttcactaggaagaagttcctggacttctgcgaggaccaccacatccgtgtggactag

SEQ ID NO: 26546 - DNA, 744 bp, Zea mays
  Peptide Sequence Number=SeqID_68325
atggagaaggcatcaagggcagggagaacagttcctgcgaaggtgaaattccacgaaatgactgaaagtggtatcacaatggacaaatggacatacaacataggtcttagtgaacattttaaaaacagatgctctgttgaagcaatcttgctttttgaagaattacgtgcaatgaatgtaaagatcaatatcaaaactctcaataccatgatagctggaatgtttcaaaccaggagagttgaagaagctaaggatctgtttgcttctatctcgagaagtgggctggtgccttctgttgtgacttacagtataatgatgacaaatcttataaaaggattggtggaggaggcagatgatatgttttcatccatggagaatgctggccggggctcgttaatgttcgattgcaagcagcagtcggtgatccagcagctcctctggcgcaagggggcgcctgatagtgatgtgttcgagggggacgcctctgctgtatgccccagtggatcctgcagagtcattcaagttctagagtttgtagattgtctccagccagtgattaacataatcccattacaggtcaaatttattattgggaatcatatacatctaaccagctttcaactcttctttcctccttataagatctatgatatcttcaagtttcttccgtcgaagattcagagaatagctggagcttcaaccaacgatgaggccttgttcggttataggattgagatgtattga

SEQ ID NO: 26547 - DNA, 654 bp, Zea mays
  Peptide Sequence Number=SeqID_68326
atgaccgccatcaacattcagaacccacgtcttctcatcaaggagatggaggtgggaggagaggtcctggatacgccaaggggagcctacgggacgtccccatggccgatatgctgcgataggatgaaggatggtggggttcttgtaggtggactgaaggaatatctcaaaacaattaggcgctgcagaaaagggtgggttttattttattggttgtggaacaagttacaatgctgccttagctgcaagaccctttttgtggaagaactgactggcatatacaagtcaaatagtagcaatggtgatgatggcgttggctatcggatccgaccaataatatatctactcgagctagaaggaaaattatcatcagtggacttaacaacctttcaacaagcagcagtcggtgatccagcagctcctctcgcgcaaggggacgccgccgatagtgatgtgctcgaggggggacgccaccgcgctgctgtatgccccagtggatcctgcagagtcattgaagttccggaggttgcatgttgtctccagccagtgattaacataatcccattacagttgctcgcgtacaatctgactgttctccagggattcgatgtggaccaaccacggaatctggagaagagcgtgaccacgcagtag

SEQ ID NO: 26548 - DNA, 210 bp, Zea mays
  Peptide Sequence Number=SeqID_68327
atggcacccggcggggattgctgcttgtttgggaacacgaacaccgggacgccccgggcggagagcgaggagcagcagcgaagagacgagctcacctgcgggacggcagcgccggttcggaggtcgacccccgggaggctcgctcagcgcggggatctcggcgccattgcgcggggaggcagcagcagcggggcagtgggaggggagtag

SEQ ID NO: 26549 - DNA, 3165 bp, Zea mays
  Peptide Sequence Number=SeqID_68328
atgaccagcttggcccttaagctaggcgacctgctcatggaggagtatgtcgtgcagaagggcctcaagcccgacatcgagtctctctccagggagcttgtgatgatgaacgccgctctcatcgacgcgtcccgggttccacctgaccagctcaccgaggtggaaaagctttgggcacgcaaggtccgggacctgtcgtatgacatggaggacgccgtcgacgatttcatcctgcgtgtggctggtggtgacgactctgccgccgactcaaaattcttcaagaagacccttgccatggtcaaggacgtgatgtcgatgaagaagttcaaggatcggcgccagatctccgacaaggtcaaagacatcaagaaactctccaacgagttagctgaacttcgtgccaagtacacggtaaggggtgtgggcgctgatctcgccgcgagcaccggcatcgaccctcgtgtcatcaatctgtacaagaaagagacagatctcgttggcatcaagaagtcaaggaacaaagtcattaggatgctgtctatggagaccaaagatgatgatgcacttgagtcccatcaggctctaaagatagtgtctatagtcggggttggaggactaggtaagactactctagccaaaacagtgcatgacatgcttaagaagcaattcgactgttctgcttttatttctattggtagaactcctaatctgaataggacattcgagaagatgctattgaaacttgatcgtgagtataaacaagttgacatggccagatgggatctagaacaatttaaaaacgaactggatgaattcttgaaggacaagaggtacttgatcgttgttgatgacatatgggatgttgactcatgggaagcaatcagatatgccttgaaggacaataattgtggaagtagaataatcatgactactcgtaattttgggattgtcacgaaattagaagaggtttatagattaaaacctctttctaatgcaaactccaagaaattgttctacaaaagaatagagagtcaggaaggagaaagccttgatggtgaactctctagtaaaatcatacataaatgtggcggcataccattggctatcattgcaatagctagtttgttggttgaaagatcacgtgaggagtggtcagaagtgtacgacaagattggtcttgggaatgaagacaatacaacaaagataatgtcatacagctactatgatctgcctccttatctcaagccatgtctgctgcaactaagcatatatccagaagactgtatcattgatacaaactctaccatatggaagtggataggtgaaggtctagttcatcttgagaaagaagagggtagcctatttaaggttggagaaagatacttcaaggagcttgtgaatagaagcatgatccagccgacagaggacaaaaatgatcggtttgtagaagggttccgtattcacgacattgtgtttgatctcatctgtaagttgtccaaggatgaagacttcattaccattagcgggcaacattcatctcgggatagtttaagaagagagaagaaaacatgtgtgcctcgctcagactgcaagctacgtcggctggccgtccgaaatcaacgtgtgcagcgcttccctgaagaaaccatcgacatgccagaggtgttgagatcacttagcattatagattgtaatattgaggttatggccccaattgatagcttcagggtttgccgtgtgctgcatctggggaagagctacgtacccatcagcctaaagcatctggggaagctgttgcatctcaagttcctagagatagtatacacgcctattgatgagctccctaaggaaattgggcatctgaggtctcttcagacactgatattagaccgtactggactagacgagctgccaccggttgtttgctcgcttacacggttgatgtgcctgatagcccaggggttcgaaaggttgccagctgacaggatggggaacctaacgtccctggaggagctacgactacgtagggtagttggccggagtgccacccaagccctagtggcagagcttggcaagctgacgaggttgagggtggtcgacatcaccttttcagagcagctagaggagagcttgcaagaagcattggtgcaatctctgtccaatctgcggggactccaggaactaacgcttttgtttaaaatgacacggtggggaagcgatatgtggggagactgggagccaccaaggcagctccggcgcctgattattgaaggcatcatcgtcttctcacgacagcctcgatggatcaaccgctcctgtctgccacgcctctgctacttatctctgatggtgcacactcttgaagcacaggacctagataatctagcgaggttgccagagctccagtacctcacgctagatggtctcagctggcctccaaggtatactgttggcccagacgacttcaggaatctgaggttctgcaaagtgggcacaacgttcgagtttcgtaagggcgccatgccaaggctcgaagtgctgcaatttagagtttttgcagggtactattgttgggcatacaatggtgtgccgttcgagcagttcccaacgaaggatcttgacttggacctggataacgtccttttacttcagcaagtaatagtcaaagtcaactgcgtaggtgctactgtcacacaagtggaggaggtggaggccgtggtcatgcgtgccgtggaaaatcatgccaaccgtccaaccataaaaatgaatcgagcatatgaaatagctatcctatccgacgaagggcgggaggctctgcttcggcgacacattgaaaaggattgctgcgtgcgcacgatgaaggataaatctgatgctttcttcatcagccagctgcggaggtatcgacatcttcagaaagccattattttcatcgactgttcgggtgccagcatgtgtgaggtgcagaaagtggaagcagcttttagacatgcagccgaggttcatcctaaccatccaagtattgaacttatcagaacaaacaccgacggaatggcctcctcctcatctgaccatcccaacacagagggcctcccaccttgtcatgtgatacttccttttcttgctagttccataaaaagagatctgattgagtctagcatctag

SEQ ID NO: 26550 - DNA, 3144 bp, Zea mays
  Peptide Sequence Number=SeqID_68329
atgtcgatgaagaagttcaaggatcggcgccagatctccgacaaggtcaaagacatcaagaaactctccaacgagttagctgaacttcgtgccaagtacacggtaaggggtgtgggtgctgatcttgccgcgagcaccggcatcgacccccgtgtcatcaatctgtacaagaaagagacagatctcgttggcatcgaggagtcaagggacaaagtcattaggatgctgtctatggggaccaaagatgatgatgcacatgagtcccatcaggatctaaagatagtgtctatagtcggggttggaggactaggtaagactactctagccaaaacagtgcatgacatgcttaagaagcaattcgactgttcggcttttatttctattggtagaactcctaatctgaataggacattcgagaagatgctattggaactcgatcgtgagcataaacaagttgacatggccagatgggatctagaacaatttaaaaacgaactggatgaattcttgaaggacaagaggtacttgatcgttgttgatgacatatgggatgttgactcatgggaagcgatcagatatgtcttgaaggacaataattgtggaagtagaataatcatgactactcgcaattccggggttgtcactaaagtagaggaggtttatagattaaaacctctttctactgaaaactccgagaaattgttctacaaaagaatagagagtcaggaaggagaaagccttgatggtgaactctctagtaaaatcatacataaatgtggcggcataccattggctatcattgcaatagctagtttgttggttgaaagatcacgtgaggagtggccagaagtgtatgacaagattggtcttgggaatgaagacaatacaacaaagataatgttatacagctactatgatctgcctccttatctcaagccatgtctgctgcaactaagcatatttccagaagattgtttcattgatacaaaagctgtgatatggatgtggataggtgaaggtctagtccatcttgagaaagaggagggtagcctatttgaggttggagaaagatacttcaaggagctggtgaatagaagcatgatccagccgatagaggaaaaatatcattggtttgtagaaaggttctgtattcacgacattatgtttgatctcatctgtaagttgtccaaggatgaagacttcattacccttagcgggcaacattcatctcagtcactgcaatctctgttcaatctgcggtcagactgcaagctacgtcggctggccgtccgaaatcaacgtgtgcagcgcttccctgaagaaaccatggacatgccagaggtgttgagatcacttagcattatagattgtaatattgaggttatggccccaattgatagcttcagggtttgccgtgtgctgcatatagaaaacaactacgtacccatcagcctaaagcatctagggaagctgttgcatctcaagttcctagagatatttgacacgactattgatgagctccctagagaaattgggcatctgaggtctcttcagacactggtattagtcagtactggactagacgagctgccagtggctgtttgctcgcttacacggctcatgtgtctgatagcctatgggttcgaaaggttgccagctgacaggatagggaacctaacgtccctggaggagctacaactacatagggtggttggccggagtgccacccaagacctagtggcagagcttggcaagctgacgaggttgagggtggtcagaatcaccttctcagagcagctagaggagagctcgcaagaagcattagtgcaatctctgtccaatctgcggttactccaggaactagtgcttttttctgaaatgccagagcggggaagcgatatgtggggagactgggagctaccaaggcagctccggcgcctgattattgaaggcatcgtcttctcacgacagcctcgatggatcaaccgctcctgtctgccacgcctctactccttatatctgatggtgcacgctgttgaagcacaggacctagataatctagcgaggttgccagagctccagtacctcatgctatttggtttcagctggcctccaaggtatactgttggcccagacgacttcaggaatctaaggttctgcgaagtgggcacaacgttcgagtttcgtaagggcgccatgccaaggcttgaagtgctgcgatttggagtttgtgtgccgttcgagcagttcccaacgaaggatgtgatcgaagatcttgacttcgacctggataacgtcattttacttcagcaagtcagggtcaaagtcaactgtgcaggtgctactgtcacacaagtggaggaggtggaggccgtggtcatgcgtgccgtggaaaatcatgccaaccgtccaaccataaaaatggatcgagtatatgaacaaaatatcctatccgacgaagagcgggaggctctgcttcagcgacacattgaaaaggattgctgcgtgcgcacgatgaaggataaatctgatgctttcttcatcagccagctgcggaggtatcgacatcttcagaaagccattattttcatcgactgttcgggtgccagcatgtgtgaggttcagaaagtggaagcagcttatagacatgcagccgaggttcatccgaaccatccaagtatcgaacttatcagaacaaacaccgacggaatggcctcctcctcatctgaccatcccaacacagaggtaaatataaggatgatattatctttgtatttgaactctagatgcttaaatgaagtgatcatcctggatggagataagtatggtcagcagagggttgcctggcgcagcatatgggtatctggcttgtttttctaccggtctggtgcacggcggccagcgctgtgtatttgcaggaaggcagtgaccactgaccagtggaccgaatctggtggtgccgccgaatgcacgggtctctggagattgaaacagattgtaagtgtcttcgagatactctcacgtcgaatgagattgaaacagattggagaggcaaaagagttgccttccaatatattagataataaggagaaaacactgtacaaaaactggcacaaaaaaggcgccaacaccaaaaaacactag

SEQ ID NO: 26551 - DNA, 192 bp, Zea mays
  Peptide Sequence Number=SeqID_68330
atggctggaaaggacggaggagctgtcatcacgcatatggctggaaatgacgaagcagctgtcaaccaagtcagagacctgatcaaatgtgccggggtcactctgcagcctgcactcttccgggattggggaaagagcaagaacaagcagaggaggagcgagaaccagccaggaccaggagtgttcacctga

SEQ ID NO: 26552 - DNA, 357 bp, Zea mays
  Peptide Sequence Number=SeqID_68331
atgaggttcatattaactcgagcaattaactcgagctatgcagccacggtaggatcttggctcctaccaggctatcacaaaggggagaccgggctcatcaagcgtgtcattcgctcgcagaatcgcgtcatcgtcgagggcaagaacttggtaatttgccgcccttatatgttcttccccagcctgacctttggaatcagggcagcagataacaacaaatcgctggacactagtaggttacagacccaggcaaatggtcttgccacagcaaaggaccacttttacaatgtgctgattgagcttgtgctgaagagaagctacgatgataaagctggaatcggcatgcccgatctatag

SEQ ID NO: 26553 - DNA, 438 bp, Zea mays
  Peptide Sequence Number=SeqID_68332
atgccgggtcgcctcctccgcgctcgggggattaaaagccggagctcttgggcctcacgacttctctctttactctcgcctccttctcccatcgcgagttacccaaacgccgtggctctgcgctatcgccatacacgccggagcaggagctcgcgccgctgccttggtttcctccctcctgctcttcccggtgtccgcacagaagagattgaggttcgccagcgggtggtggttgcgtgcgctcgcactccaacacttgggggtcaccggagtttggtgaatttctcaccggaattcagtggcgccgtgaagccacctatcggcgtgaaccggattccccacggcaccatcgacgacgagcaagccactgtggaaactgaggttcaacaagtagaagtagctgagcaggagctcgttgaaggcaagttgtgcccttga

SEQ ID NO: 26554 - DNA, 225 bp, Zea mays
  Peptide Sequence Number=SeqID_68333
atgggcgttattggtgatccagggcggtctagttcaattgaattggtcgaggagcttgaggaggacttaaggatgctagaacaaaagagcagggagtacgaacagacctggaatacgctgatcgcggatgccaacgccggtgagcttatctgcgctggccgcaagacaagggggtacggcggccagccaccggagttatccccaagcgaagatctttttacctag

SEQ ID NO: 26555 - DNA, 192 bp, Zea mays
  Peptide Sequence Number=SeqID_68334
atggggcaagacagacttgcaccagcctacggcgcaccagactaccgaacagtgtccggtgcccaggctggcgcgcccaacgaactggccgctcttgggaaaactcagcgtccgcggctaaaattcatcggactgcccgatcatggggacaagcagatccaacggacgactgctgcaaaccctaatggctag

SEQ ID NO: 26556 - DNA, 270 bp, Zea mays
  Peptide Sequence Number=SeqID_68335
atgggttctgccggcatcgggaagggagtactatgggggaattgctcgtcggagttcaacaaccgcgccgagccacagttcgtcacggaccgggctcctaagcacgccatcctcgtgttacatgttgcaaccggtagattggaggttagtgcggtagagtgggtgatcgcggtggttcacaaatggcgccgccgtgcagatgaatggggggaaagccatcgcgccggtgtttgcattgaggaagataagttctgggccgctggatcctga

SEQ ID NO: 26557 - DNA, 1230 bp, Zea mays
  Peptide Sequence Number=SeqID_68336
atggattatatgctgactcattgccacattggcccctcaaccatcctccctccacagatctctccggggaggcagcaacagttatgtcatatcattgtcgcgtcctcgtccccgttccatttcattatccccccggagctggtggcggcgatggaagagcaaggcggccaggcggcgctcgggtgggcggccagggacgactccggcgtcctctccccctacagcttctccagaagggttcctaaagacgacgatgtcacgatcaaggtgctctactgcgggatctgccacaccgacctgcacgtcatcaagaacgactggcgaaacgccatgtacccagtcgtcccggggcacgagatcgtgggcgtggtgaccggcgtcggcggcggcgtcacgcggttcaaggccggcgacacggtcggcgtgggctacttcgtggggtcctgccgctcctgcgacagctgcggcaagggggacgacaactactgcgcggggatcgtgctcacctccaacggcgtcgaccacgcgcacggcggcgcgcccaccagggggggattctccgacgtcctggtcgcgagcgagcactacgtggtccgcgtccccgacggcctggcgctggaccgcaccgcgccgctgctctgcgccggcgtcaccgtgtacagccccatgatgcgccacggcctcaacgagcccggcaagcacctcggcgtcgtcggcctcggcggcctcggccacgtcgccgtcaagttcggcaaggccttcgggatgaaggtcaccgtcatcagcacgtccgccagcaagcgccaggaggccatcgagaacctcggcgcggacgagttcctcatcagccgggacgaggaccagatgaaggcggcgacggggaccatggacggcatcatcgacacggtgtcggcgtggcacccgatcacgccgctgctggcgctgctgaagccgctggggcagatggtggtcgtgggcgcgccgagcaagccgctcgagctgccggcctacgccatcgtgccgggcgggaagggcgtggctgggaacaatgtcggcagcgtcagggactgccaggccatgctcgagttcgcggggaagcacggcatcggggccgaggtcgaggtcatcaagatggactacgtcaacacggccatggagcggctcgagaagaacgacgtccgctaccgcttcgtcatcgacgtcgccggcagcctcggctctgccgcctag

SEQ ID NO: 26558 - DNA, 306 bp, Zea mays
  Peptide Sequence Number=SeqID_68337
atgggcgcactggacaaccaccgttcactgtccgataatgttatgaaggcctctgggcaacccatgtcaatcaaattaacttccctagccaagacctcaagaaactcaacagaagacatattccaagctcaaatgttgctaaactactccctacaagctccccctagttcacaggattgggcgggtgcactccaccacccggttggagttttctctccgacattgggcgcgccaggatataggttcaacggaattttggaaaataaaaatgataccatcaggagcgagaagctcagtggtggttga

SEQ ID NO: 26559 - DNA, 240 bp, Zea mays
  Peptide Sequence Number=SeqID_68338
atggcagggggatccggccatggcgtgctcctggcagggggcgagctcagccacggcaagcgcagggaaggggagggagatgctgctgctgtttttggattgaagaactgggcacagggaactcagacaccatggacagggaagtgcgcaggcttgggcgccatggctgagggcgccatccatgggaagtggagctcgcgtccaaggaggagaggacagggagcagatgcgtcgaggtag

SEQ ID NO: 26560 - DNA, 486 bp, Zea mays
  Peptide Sequence Number=SeqID_68339
atgagcgggagcgcgttgcgcgtgccgggggcgcgcgaggccgcgaaggccgaggtggggccacacgagccacgctgggggacagcgctgccgagggcaggggccgcgcgccagggccaggacggccgcgcgcaggggaccgggacggccacgcaagggccaagggagccgcacgcatgggggggggcaggatggccgcgcgccgggggcgccgagggggccgcgccgagggtcaccggggactgcataggggtcggggggcaagggggtcgcgccgcgggggtcaagggagccacgccggtggggccaaaggggccacgccactggggccggggagccgcgctggggggcgagggggccgcgccgctagggggcgcgagcgggggagaagaagaaggcgcgcgcagggaagggaaggggaggaagaggaagagagagagggagaggggaggggagctcaccttagggatccaaatccggcgataa

SEQ ID NO: 26561 - DNA, 798 bp, Zea mays
  Peptide Sequence Number=SeqID_68340
atgcccccgcggtggcgcgtgggccgaaagggcgcactcgtgcctgcgctcacagtgggcggcgtgcaacgcgggatccatggggaggagagggtgcggccgagggatggccggagcagggaggctggcggagggaaggttgtattacaagatggcaggtcagagcgtctgactgtttgcgctggttcaaatactgcttctgttcaagatgctttgacagagtaccgtgtgattgagtcttttcctcaagatatcaaatcagatgtggatagaaacaaattcgttcaagtgatgggtgtgggaattgggtcagtaagcagcaaaatatgtggtgcagtgaaattgcttttagttaagtccaccacaatatgtttgctaatgattttagggtacacttggttagaactattccctcgaactggaaggaagcatcagctccgagtccattgtgcggaggttctgggaacacccatcgttggggattacaagtatggacgccaagcacaccagaactggatgcctctccccatgccacaaacaatcgacaaggaaatgctgaagaagaggaagcttccctttggtcttactttgggcggtggaagcgtagctgagcagcagcctcagctgcatctacactgcaagcagatgatccttcctgacatctcagcagctatgcaacagctgcggtcttcagatgctgaccacgatttctctgatctggagaagctgagctttgtcgcgccattgccattgcacatgcagttaagctggaagattttgttgtccgtaggcaagtag

SEQ ID NO: 26562 - DNA, 813 bp, Zea mays
  Peptide Sequence Number=SeqID_68341
gcacgagtgcgccctttcggcccacgcgccaccgcgggggcatgcttgcccgccgtcgccatagggaccgcggctgacctcttccccgcctccgaccagcgcgccgcctcaggtgtatgccatcccgccttctttgcttttgccgcatcgaccgcgggcggcctcctccccacgactgctgacctgagagcgggcacctcctcccctccagttcactcctgttttcgtcccccctgcagcagcacgcacgcctgggatgccccccctccgtcaccgggccttgggaccctttccggagctccccctgcggccctcgctgttgcgcagcacgccgccgcctcctacgactacgtggccccttgcagtggaccttatgcggacatgaccccttatggcacgccgctactcctcaccccctcaccgggcagctccgtcgtgtcttcctcgttgcaccgcgcaaccctccctctcgtcgatgtggtgacctcatgcgccgctacgcagccacattccctgctcggcacagccccctcgggatggggccctttcacctcgcacccgcccgcgatgggtcctttcccctcgccagagcgtcgcttgtgttggcccctagtggcccggcctccccacctgcgagccttgttgcacccacggtcacggctctgcatacggtacctcctcccagcaccgagaggtctgcctttgccttggccgtcggtgccacctctctttgatgtggcaggccaagacttcgtctatttggtgcctttcttcatcagagcaatggatgggggcgacagagcttttatagag

SEQ ID NO: 26563 - DNA, 477 bp, Zea mays
  Peptide Sequence Number=SeqID_68342
atggagatattgctaagggatggtggtattcaacttctgcttggtccaagtggaatgggagaaggagagctgaaaaagtatatcatggattggagaagtaggcagcaattcttacttgaagctgcccatcggtgtcaagaggttgggctctatgacaaacattcaagagaagatctcatttctgagcaacaaactgtgttgagacatcttgaagctattctccatatttataggctagctcgagctgggcaaactgtagatgctttgagggaaaccatcaggctacccttccttcatctggaccctaaggctccaaatgtgactgttgacattttcaggaacttgtcaccccatgttcaagcttgtgtgccagatctcctgatggttgctctaaattgcattgacaatgttagagatactgatgggaccttgcgtgctgtcaaaacaaaggttgttcagttgatgtccttttcgtga

SEQ ID NO: 26564 - DNA, 231 bp, Zea mays
  Peptide Sequence Number=SeqID_68343
atggggtggaggagatttgcatcagaggggcaggggcagagggcgccggatccaccttcgcttcctacaacgacaatggtggcgaggtggtggtcgtcgcttaagaggaggaaggcgagcgggggcttgaagacgatgttggtccccgccatgccgtcgtggggattgcatcgcggggtgggtgaaagggaaatgtgcctttgggccatttctaagtattttggtgattga

SEQ ID NO: 26565 - DNA, 951 bp, Zea mays
  Peptide Sequence Number=SeqID_68344
atgtactgctacgttactatgccatttggtttgaggaatgcgggtgcgacgtaccaaaggtgcatgaaccacgtgttcgacgaacacattggtcgaacggtcgaggcttacgtcgatggcatcgtagtcaagacgaggaaagcctccgacctcctttctgaccttgaaacgacattccggtgtctcaaggcgaagggcgtaaaactcaaccccgagaagtgtgtcttcggagtcccccgaggcatgctcttggggttcatcgtctccgagcagggcatcgaggccaacccagagaaaatcgcatccatcaccaacatgggacccatcaaggacttgaaaggcgtacagagggtcatgggatgccttgcggctctgagccgcttcatctcgcgcctcggtgaaagaagcctacctctgtaccacctcttaagaaaggtcgagtgcttcacttggacccctaaggctgaggaagccctcgggaacctgaaggcgcttcttacgaacgcacccatcctggtgcccccagctgccggagaagccctcttgatctacgtcgccgctaccactcaggtggtcgacacccagcttccggcagctccgatccaaccggaactctggaccatgtttttcgacgggtcgctgatgaaaataggggcaggcgcgggcctgctcttcatctcgcccctcgggaagcacctccgctacgtgctgcgcctccatttcccggcgtccaacaacgtggctgagtacgaggctctggtcaacgggttgcacatcgccatcgagctaggggtccgatgcctcgacgctcgcggcgactcgcagcttgtcatcgaccaagtcatgaagaactcccactgccgcgacccgaagatggaagcctactgcgacgaggttcggcgcctggaggacaagttctacgggctcgagctcagccacatcgcccgatga

SEQ ID NO: 26566 - DNA, 1650 bp, Zea mays
  Peptide Sequence Number=SeqID_68345
atgggcgacgagtcttcgaaagatgacctagattattttgtggcactagatttgtctgtcgcggagtgttcgctaagggtcacccccactatggtggtggggacattgcccagggttgccctgggtgagccacggggtcaaagaaggattggggtgtcaaaacgaaatgtgggaatgcttggtgagtcttcgcaagacattgcagtccctcgaagacgccgccaaatgggaatgaagaggtctcatctccggaatggaatgcggttggaggaggggacccgtcggatcatccttgctccgacggtcgggtcatgttttggagaggggggtctgcgagatctttttggtagtgaggagttgaaactgatgttgttcaatttccgtgaagccgaccttatcctgaaagaagagcagattatggcttccgctgcgcgcttcctggtggtcgtggtcgtggcgtgtgcactcctggcgagcaacaactgccacgcggcgcgccacttggccgacacggccgcggctcccgctgctgctggtgccgtccctggcctccccgccgtgccgaccttgccaacggtgcagccagtgccacaggtggcgctgccacctatgccggccgtgcccgcggtcaccgtgccgcagatgacgctgccgcccatgccagcggctcccaaggtggccgtgccgctgccgcccaatgcccgccatcccatccgtgctgccaaagctgaccctgcccccgatgccccgctgtcgttccatccgtcgtccccaagagcagaggtggtggtgaccggtgctggtgtaccggactaccggttctgccgctctcccgcggatcgttcacctccactccattccaaggatatcatcaacacgctctcctgcggccgcccgggcgccgcgctcgccgtcttccgccgcatcccggaccggtcgctcgtgtcgtggaacaccgccgtcgacgcgctcgcgggcaacggggaccacctcgccgcgctcgacctgttccaggagatgcagcgcaacatgcccgacctcgcgcccgacgcctacaccgtgcagagcgtgctcggcgcctgcgcggccaccggcgcgctctcgctcgggttctacgcgcacgcgctgctgctccgggtgctcggcggcgcctcgccggtgtcgcgcgatgtgctcatcaacaactcgctcgttgacctctatgggaagtgcggcgcggtggagctcgcgcgcgaggtgttcgaccggatgtccgagcgggacctcgcgtcctggaacaccatggtactcgcgctcgccaaccacggccgcatccaagactcgctcgatctgttcgatcgtatgatgagggtggagggcctggtgccaaatgccatcacgttcgtcgcggtgctcagtgcctgcaaccacggtggactggtcgacgaagggaggaggtactttgctgccatggtcagtgagcacgggatcaggccaaggatcgagcactacgggtgcatggtggacatccttgcacgggcggggttcatcgaggaggccctcgatgttgtggccaggatgaactgccgtcctgattccatcatctggaggagcatgcttgacgcgtgctgcaagaggaatgctgggctggagctcatttatgttttgtaa

SEQ ID NO: 26567 - DNA, 483 bp, Zea mays
  Peptide Sequence Number=SeqID_68346
atgtgtgcctaccgcgagaaaacagagtcggccacgcgtgtcgaggttgatcgggcacacacactttttgtggatgcgtaccgtgacctcagtgcgcaaactgctcccttcgacaagtcgggggaggaggtggggacccgcttccttgggtggctgcaagaggagttagagtcactcacatccatcgtgatgggccttatgtcctacccgtcgctcgtgtcctgtgaggggtctgcgaatgctttgtcccgcgagggctataggcacttcgagaccttcgatcggagcaacgaggacttcaatgctggtgtattccaggttgaagacgacatgctaaagcgttctgctggggcactttacgataggatgtcgggtcctcacggcagcgatgtcattcaggagagggccgaccgagaacttgcacaggcgatgagggatgaagaagtggaggacctcaccggtctagagagctcggtggcctga

SEQ ID NO: 26568 - DNA, 393 bp, Zea mays
  Peptide Sequence Number=SeqID_68347
atgggccttatgtcctacgcgtcgctcgtgtcctgtgagggggctgcgaatgctttgtgccgcgagcgttgtaggcacttcgagaccttcgatcggagcaacgaggacttcgatgcgggtgtattccaggtcgaagacgacatgctaaagcgttctgctggggcactttacgataggatgtggggtcctcacggcaacgatgtcattcgggagagggccgaccgagcacttgcaaaggcgatgagggatgaagaagtggaggacctcgccggcctagagagctcggtggcccgaaaggacgccgatttggagacgggagcggaagagcagtcctcgcttaaggaaggcgacgctgagggccctgcgacggcggggacttctgcatgggtttaa

SEQ ID NO: 26569 - DNA, 567 bp, Zea mays
  Peptide Sequence Number=SeqID_68348
atggggtccaggcacagtgcttgctctgtcgaggctgagtgccgagatggttcgagatacaatgattatgtttatgggtttggttcgactatgatgatggtgttcctcgacgaggaaatggagaaggcgaagccgtggaaggagacttccaggagttccaagattacgacgaattctagggctcggactcggcctcggctccagaagacgacgaactccgcctcgcccgaccccagggttcgaactcagccttggcctcagacgatggtctccgcctcgcccgacccggggctcggactcgaccttcgacctcggaagacagactcgacctcgacctcggaggagcctccgcctcgccctttccagggctcggaccgaccacgtcacacgggggccatcattaccctacccctagctagcttaggctacggggaacaagatcggcgtcccatctggctcgccccgggaccccccggggtcaaaacgccgacagtcttcaatttcaatcttttgggtttcggcctaggctttgaagctagcttcatcttctttgactttattaactag

SEQ ID NO: 26570 - DNA, 309 bp, Zea mays
  Peptide Sequence Number=SeqID_68349
atggcccccaagagagcgattacgaaggccaccacttccatcgacgacgcagcgaaggcggctcttctcgctaaaaagaagggcaaggcagcccacgctgacgacatccctcatgaggccttcgaggatgaggcagtcaacagcaacaggcatcgccaagacaatcggcccaccccagagggcaccgttcgcacagacagctctgatggagtacctcggtcctcgggcacccccgccagtcttcaccccccagaggtggacaacatcatcgaagacggcaaaatcttaggcatttcagccgaagactag

SEQ ID NO: 26571 - DNA, 138 bp, Zea mays
  Peptide Sequence Number=SeqID_68350
atggctgggaaaaagctctggactgggcctcaatttctggataggtcaggggctagcgcagaagattccctagactcagtgcacactaccccaggacgacgggttctatttcagaaagacgcaggggttcttttgtga

SEQ ID NO: 26572 - DNA, 414 bp, Zea mays
  Peptide Sequence Number=SeqID_68351
atggattgccacccaagcaagctcacccatgatcctgactccatgggtaagagtaccggggggcgaacgtccttcatcgcccgcccgaagcccaacggctgggtgcgtaggcttgtaatgcctacggcggcgtcggcggacccccgacgcatgtttgatttctatctccctcctatggcgcggcggtcaacgaggacaggttggaaggagaggtaccggcgacttggttttataggccccccagcgaagcctggcttcaggttgttgcaacgatattccggattccgcggaggtctttggcggccgcgaatggaggagagggatgacgagctgggcccatatgtcaaaggaacgcgcgaggccgagcggctggggcacgggtcccgcacgtcagggacagacacggacaagtag

SEQ ID NO: 26573 - DNA, 300 bp, Zea mays
  Peptide Sequence Number=SeqID_68352
atgggcaaggacaagaaaggtcgagctgccaaggtgtggacgtacatccggtctgtcgagcacgccgggctcgagggctcggatgagtcggaggtctcctcggacgaggaggactcttccggctcgtccgaggaagggagcgacggcgacgacgaaggcgacgacagcagtggaagtggcggcggcgacgacggcaacgatggtggcaagggcggcggtggaggcagcggcggcggcaggggcgacgacgacggcaagggcagcagcagcaaggccgatggcaaagcgccactggcttaa

SEQ ID NO: 26574 - DNA, 1026 bp, Zea mays
  Peptide Sequence Number=SeqID_68353
atgacgaagtcacgagcaagggaggacgggttcaatagctcgacggcaaacacgagcacgcgcgaagctcgatggacgaagagcgagcgcacggatgggctcgggctgggacaagaggacgacaaacgcgcagagcttcaaaatcacgcgcgagagatagaaagacgcgtgaccagagacctaagcatccacgctggcaatttggacgaaagcgaactagtggcgacaactcccgaccaggcaacgatgcatcggcacgagtgtcgcgggatagcagcaccacaacagcaagcgagctgcgaagcgaaattaacggcgggccagagcgaccaatcggcgagatccaatcggcgagatccaaataccacgaagccgcgacgaggaagctcgacgcgcagactgggcgagctgggcacgcggcaaaagaagaggagcagcgcgcgtagggagagggaaaaacagggacgcgcaggagagaaaggagctcggaaccgagctggagcgagcgcacggggagacgggcggcctggcgcggttgagggagaagcagagaggaaggagccgagcgctggaagccgcggtgccggaggagcagagcgcgagctgcagcaggggctgagcgccatgggaactccgcgagctgcgggggcgcaacactgggagcttggggaagatcacggcgcgctgggacgagcaggaccgagccagagagctcagcctccatgggagggagcaacacgagctggggcagagggtgctcggcgagggacgctggggaggagcggctgggcgcgccatgggagccgccatgggcgcgaacctcccaggtggccgacgagcagggagagagagagggtcagcatggggattgaagaagagagagacgagctggagatgccatggcggggagctcgggaggaatcgccggcgagcagagaagtgcgcaagggcgagctcggccatgggcgctgcgagcggaggggaggcaagttgtgggagatcggccagggagatggcggcgcctga

SEQ ID NO: 26575 - DNA, 501 bp, Zea mays
  Peptide Sequence Number=SeqID_68354
atgtggcttgttctacgccgcttgaaggaagaagggaaggatggtgttaagtttggacagtacatctacgaaatgtacaaccacgatgtagagctcagagtttctaaagctggggttaacttgctgttgacaaaatggatgaaggagctagagaaaatattctatggaaacattgtgaagtatgatgctgcgataagcccagaggctcatcaagatgatcttgtaaatgtcatctggagaaatatttatgctgaggaaggttcagaggctatggatgttgctgctgcccctgctgtgcagagattctatgttctctggaaacttcaaattcacaaccctggtgccggcaactcccagccccagcccaaagaagcatgggcgatgaactgccgtgattatagtgctcaacatttccttgagcaccacgatttccacgccgaggtaattgaggaacacgaacaccaggagctcggcgtcgccattgggcgacaagcatcatga

SEQ ID NO: 26576 - DNA, 294 bp, Zea mays
  Peptide Sequence Number=SeqID_68355
atgcccgacgcggtggtagagttcagccgagacctcgatgtggtagatgtccccaagggagagtcccccacggagccatcgatcttgagcggggtgtgcaagggctatgtcctccccgatgagcccgaccttgccgatgccgagatgcagaggctcgttgataccgtcaaggggctagggtccttgctggctcaccactacgagcatgaggtggttcttcccatctcgtcgcctaccgccgttgtgccctctagtgactccaagggtggcatccttcctcctccgacttcgtag

SEQ ID NO: 26577 - DNA, 1040 bp, Zea mays
  Peptide Sequence Number=SeqID_68356
atgaacttgttcgcgggggtcggcggcggggcggcggacggtggcggcacaggcacggcgctcctggagctgacgccgcacaagatggcggtgtgccacctcgtgcaggtctttgcgccggcggcgcaggcccgggggcgacgtcgtgccgcccttccccttcgagtccctcactcaccacaaccgcctcggactcttcctgtttacgctcaacccggatggccgtcacggattgcacagtcagtcaatgttgcagttgatattgtgtcatgcgatgattttctggagcctccactggaagaatttttgaagcagctgagggcagtggatgatttgactaatggttggttctgcgagcagctgacaagtgccctgtcagcactcaactcacctgatgacttgttcaacttctttgataagctacgaggtgtgttcactgcaccagagggtgcgagtgcagaagatgtattcttggatccaaatagccaacttggagtatttcttcgttgctgcatacttgccttcaactcaatgacctttgagggtgtatgccatctgttggcagatcttgtcatgtactgtaactctgctgatgcttcatatgacctggcagaacatgaggacttcaatagtgaaatgggcaacttgatggatgcagacataggttcgcacgctggtatatttgacaaatttcatcagggttatgcctctgagcatcatatgggggagagttcttcaactttaactcgtgcatcaatgtcaccctatgactttgacaacgctaatacttttaaagcagatgacaacccaacctgtctgagatcaaggtggcaattagaggcatatcttaaccaacaagctgatattcttgagaaggatcctggatcagtgcctttgaatttatttaatgccactatgacacagcttcaaacattagctccggagcttcatcgtgttcaattcttgcagtacttgaatgctctttaccatgatgactatgttgcttcactggataatcttcaccgctactttgattacag

SEQ ID NO: 26578 - DNA, 585 bp, Zea mays
  Peptide Sequence Number=SeqID_68357
atgcgaagctgggggttctatggcttcttctcctgcgcccatctcaccccacccgtccattgtgaggatctttgccacgccgatgaagcattttgtttcgcatttggtgtatcaggaggaaggatgcgaatggcgcttctcaggaaggcagttactttgaaatcgaggcaaaaggctatattatccttccttaaacaagataaagagacagacttaatgtcgattgtctatgaaacatgcaaggctggttcagcagcgaactcgctgctctcgggaatcggcgagggcgtcgtggctaaaaatcaccggactgtccggtggcgcaccggactgtccggtgagccagcaacgcccatgccaatagtcggtaacgcgatcagcgagcgagcgtggccagagccaacggttaccaggccgcaccggaatgtccggtgtgcaccggacagtgtccattgcgccaaggggaccaaagactcaacggtcagcttcgccagaagaggaaagaaattgggcactgttcatgtccggtggtgcaccggactatccggtgcgccaactgacagaaggcaagaattgcctacctaa

SEQ ID NO: 26579 - DNA, 570 bp, Zea mays
  Peptide Sequence Number=SeqID_68358
atggcgccccgcatgccctgtgacgacgacggctctcagcccccttacggaagcaagaggacgtcagcaaggactcgacagccccgacagctgtccttccgccaggctccagcgctcctccgacggccacgagaccacgcgaagtgggtgccaagacctctccggctgccacgatggcatgttcatcctgaaaaaccttttgatggtgatgatgcagagcatatgcaatggatttattcaaagattggcaatgatgcttctcaatttgttggtccacttgtattgaacctgttgataaagaggttatggacaactatgttattgtacattaccattttatcgaatttgtgtgtcattgcaacagacagtcattgtactatattttatttagtacatgttgactccgtagcaatgcatgggcatacacctagtatacctagaaaaaccaagaccaccttacaatttgaaaagtgggagcaattcctagaagtgcgaaaagggggagtagtttctaaaaggcatcgggatgaaaagctaacaaagttagaattgttctaccgtaatagttaa

SEQ ID NO: 26580 - DNA, 378 bp, Zea mays
  Peptide Sequence Number=SeqID_68359
atgcggacggaacttgggcgcggcacggacacaggagctgcacaccacacagcagctgcgtccacgccacggtccactgtccgcatacatgcgcgcgggcgtgagcgtgaccgtgacccgtggttcgtggaccgcgtggggcggctgcggctcaatcatgtgacgctggacggatggccttctggccaaacgccaaggagacgctacgcaggcctgacggtagaaagaacaaggcaggattctagcccgctgtttatcgagcgacttctcccgtttcgcatctctggggccggcaaatctggtctcgcgagtctggatctgacaagaacggcgctgcgtgcaggagcaggaggactggaggaggaggaggagcagtag

SEQ ID NO: 26581 - DNA, 2235 bp, Zea mays
  Peptide Sequence Number=SeqID_68360
atggcttcattggtgcccggtgtcctcgtgaagctccttcagcatatgaacacggatgtaaaagtcgccggcgagcatcgctcctcgctccttcaggttgtcagcatcgtcccagcgctcgccgggagcgatcttttcaccaacaaaggcttctacctcaaggtgtcggattcatcccatgcgacctacgtttcccttccagaggaacagcatgatctcatcttgagcgacaagattcagctgggccagttcatccatgtagaccgtctagaggctgccactcctgttcccatccttagaggagttcgcccagttccgggtcgccatgcttgcgttggcacccctgaggatcttgtggtgaccagctcctccagttttcatggcagcaagaaagcgcaaccatcaaatggaacgaatgatgccagcatcttgtcgctagaaaaggaaacgagcaaattggagaaaataaatgcttcacgtaagcttaccgggacggaaaataagaagccgatgctcaccaaatcaaactcttcactgtcaagacaagctttgaatgtgattggtgataagaaggaagcggttaaatcaaaggtgaagccagctattaccaggtctacaccttcatcaccaaccagtgtctattctttacctgcgtcattcgacagattctctaatgatctgaaacagaggaacagagtaaaaggagcagagaaagcttcatcttctaggctttccttgttagaaaaggctgcttctgttttgaaggctactagtgccgggagaaagccctctgctgccaattcgatcagtagctctgtgttaagtattggatcagggccaaaggccttgagaagaagctgggaaggaaacacggatattaaaggaaaaggcaattcagaatcaaagacagccaaacctgacaagaagtctgataacaagatgccaatgactcctagacgaaaatcaccagtggaccagaaggtgccacctaaagatgatagccagaaagctgctaggaagagcaccgcaagtgctccctcagatgacgctgacaaagcagccaagaagcatattcctactgtaaagagaacatctggggtcttaggaaactcgaatgttacaaatctagtgaagattcctcccaaccgcaaaaaactaacagatattagcacttcatggacatcactccctccatcacttgccaaactaggaaaggagcttcttaagtacagggaatcggcacaaatagctgctgctgaagccatgcaagaagcttccgctgcagagagcttgctcagatgtttgagctcgtacgcggaggtgagctccacggcggaggagcacaacccgcagccagccgtagagaagttcttcaccctccacgccgcgctttcgcgcgccacggtgatcaccgacaccctcaccaagtctgccacatctgcagcatcgccagattgctcggcagctagcgacgctggaactgtgggctccgctacagacgaggagaccgctgccgtcacagccgagcgccggcgccgagctacgtcctgggtgagcgccgctctcgctacggacctgtccgccttcggcatctacaacctcaaaccggtccccgccaccgtctcctcgccgctggccgtggtcgtcgttgacgagtccgcgaagccggcgacggccgcagccacggctacgaaatcatcgccgtcgccgaagtcgcggatgtcccctgcgaaggggaaagcgaggacgggcgctgcgacggcagcagcagcggcgctgacgaagacgtccgcgccgacggagtgggagagaggagaaggggcagaggagaggggcgaactggcgaaacggctcggagaggagtcaaggggttggttcctcggcttcgtggagcggttcctggactctgacgtggcggcgtccgcgccgtgggaccgcgagcgtgcggccaggatgctcccgcagctaaagcgggtcaacgactggctcggcgagatcgcaaagcgcagcgagactcagtcgctgccgcctgccgacgcggacggtgaggcgaccaccacgagcaccgcccctgtccccccgaacgacggctgcggcgtgcccgaggagacgatagagcggttaaggaagaagatctacgaatatctcctcaccaatgtcgactctgccgccgcaatgcttggcggtggcggaggcagcgcggcggccgccctgacgaacgggaaaaagggctga

SEQ ID NO: 26582 - DNA, 831 bp, Zea mays
  Peptide Sequence Number=SeqID_68361
atggtgaggtgcgcggtagcggcagcacatgagcagcttcctccggcgcgcaaggacggcagtggtgacaacgaagtcggggtcgggctcgtgctcaacttcagcagcacacacgccgtgccttccgcgcgtcacctggccacggtcttcagccgattcgggcctgtcaaggagtccgggcagacaactctaccgctctggtggtcttcgacagtggaaactccgcttcgcccgaccccagggctcggactcgggctcagccccggaagacggcgaactccgactccgcccgaccccagggctcggacatgggctcagccctggaagacggcgaactccgctccgcccgaccctagggctcggactcgggctcagccccggaagacggcgaactccgctccacccgaccccagggctcgggctcgggctcagccccggaagacggtgaactccgctccgcccgaccccagggctcggacttgggctcagccccggaagacggcgaactctgctccgcccgaccctagggctcggactcggactcaaccccggaagacggcgaactccgctccgcccgaccccagggctcggactcgggctcagccccggaagacgacgaactccgcctcgcccgaccccagggctcggactcgggctcggccttggaagacgacgaactccgcctcgcccgaccccagggctcgggctcaggctcagccccaaaggacaacaaactccgcctcgtccgacccgggggctcggactcgacctcgacctcggaagacagactcgacctcgacctcggaggagcctccacctcgcccaacctag

SEQ ID NO: 26583 - DNA, 486 bp, Zea mays
  Peptide Sequence Number=SeqID_68362
atggatggcttagatctcggcttcaatgtgacaacaggagatctaatcttcaccgttcagcaagcgatcaacgcctttgattccgggatcgacggtcggatcgttttcttcttccttcacacaagtcgcaagggaccatcacgacaatgtcactgggtcttcgcgtcggggtcgacggcgaggacgccatttggccccgcccagcgcggccacggggagccgcggcagcgcggccgtgagtgggacgagccggcgcgcgtgagctgcgccagatgggagtgcgcggaacagcatgcggagacggaggcacgggcgcgccatggcgacagcattatcgcagtcgacgcgcggcagaggcagctcgcggaggatccaaggaccaccggcgggcggacttgcagagaccccgcggatttggggttcgtttttactacggtggggaagagggatgacaagagggaccccaccctggcatggactatatag

SEQ ID NO: 26584 - DNA, 1239 bp, Zea mays
  Peptide Sequence Number=SeqID_68363
atggagatcggacagtaccccgcgagcggctgctccaaggagcaccagaagatctaccaggagtggttcgcgctcgcggacgcagatttgagcagtttgaatccacctgtgatggaaggtttggatgccctacttgcgaaatctaagcatttggtgaagcgtgttgatccagaaatggatggatatcctcaggaacaatctcctttaacaaacaaatggtttagctcaaagtcatcaaagaagatacctctgacagccgtcacttctgttatcgatggcttgaaaaaactttacatcgaaaagttgaagcctttggaagttacatacaagttcaatgattttgtttcccctttgctgacaagtagtgattttgatgcaaagccaatggttatgctcttaggtcaatattctactggtgcccatatcggaccagagccaacaacagacagatttgtagttgtcatgtcaggatctgatgaaaggactattcctgggaatactattgctgttcaagctgacatgccttttagcggtcttacaacatttgggactgcatttttatccaagtttgagtgctctcagatgcgacatccactgctagagcatatcacatttgttgacacacctggtgttctttctggtgaaaagcaacgcacacagcgcagctatgatttcactggtgtgacatcatggtttgctgcgaagtgtgatcttatccttctcctgtttgatcctcataagctcgatatcagtgatgagttcaaacgtgtcattggatcattacgtggccatgatgacaaaatacgcgtagttttgaacaaggcagaccaagtagacactcaacagcttatgagagtttatggtgcattgatgtggtctctcgggaaagtattgaatacacctgaggtttcacgtgtttatattggatcattcaatgacaaaccagtaaatgaatcagctgttggtccacttggaaaggaactatttgagagagagcaagatgatcttctttctgatctcaaagatatccccaagaaagcctgtgaccgccgggtgcaacgggaataccatcttccgtcgggagattttccttacgtggagcacttcaaagaggtgttgagcgggtacagctttgacaagtttgagaaggtgaagcccaagatggtacaggccgtggatgatatgcttggatatgacattcctgaacttctcaagaacttcagaaacccatacgagtga

SEQ ID NO: 26585 - DNA, 1576 bp, Zea mays
  Peptide Sequence Number=SeqID_68364
atgaagtcgttgcgactggtgctgagtggtcgtgtccacctcaccgaatcaccgctcaaccgtcattcctacaggctacagtcctacgtacagccatctggaccagagttctcaactactgccgccggccacctcctccgcccgccgccagcgtctccggctccgatcacctcccccgcccgcttacggccatctccccgcccacctacggccaccgccgcccgcgaaggcgtctccggatccggccacctcctccgcccagcgtgtttaccggacacgtctgccacccgtcaggccctgcccgacgctagggttgggcgacggcgtccaccggctgacgcccggggagatctcgcccgctctgctccatccaggtgcgaagtaatggaggtgctctgcatcggaacagcggataccaagtttgaggagctgcttttcctcgcggcgcaactccgctccgccctcgccgcctctggctccgactcgaaggttcaagtgagcatagtggatgtctccacaactgaaaagacaacggcaaatgatttcaaagacatcatatttatccctagaaatacaattctttcatgtcatttgggtgttgaccaacataatcttccagataacagaggtgaagcaattgcactcatgtcaaaggctcttcagagcttccttaaaaaaagatatgacagtggtatgctggtgggtgctgttggtttaggaggcagtggaggaactgcactaattgctcctgctctgaggttgttgccacttggagtgcctaagcttattgtatctactgttgccagtggtcacactacaccttatgttgaaacatctgatttggtcttgtttccttcggttgttgacatctgtggaataaacagtgtcagtcgtgttatattatctaatgctgcagcagcttttgctggaatggtacatggaatcttgtcggcgtccaatgagtctgatgaaacgtcaacaaagccaactgttggtattactatgtttggtgttacaacaccatgtgtaaatgcggtcaaggatagactgaacaaagaaggttatgagacccttatattccatgccacaggtgtaggaggcaaagcaatggaagacctagttaggggtggttttatacagggcgtgttggatgtaacaacaacagaagttgcagaccatattgtagggggcatcatggcttgtgatgagaccaggtttgatgcaattatagagaataagatccctcttgttcttagtgttggagccttggatatgaagggcatatctgcaatagatgctccaggaatgccattctatgatccagaagctacatctacactgttgggtgaacggagtttgttggcttctcgacaggtgaagctgtttccttaccacatcaatgaccctgaattcgcaaatgcattggtagatgcattcttgagtatggatgtacaggcctctagttcagcccaacctaagcaagatcttaatattggaaaatcctgttcaggacagaaaatttcagatagttctattatatggagaactcctgtggattttccagatgcaaaaccag

SEQ ID NO: 26586 - DNA, 213 bp, Zea mays
  Peptide Sequence Number=SeqID_68365
atggcggagctccggtggcacaggaagaactccaggcgagatagagagcgagagtgctcgactgaggccgcaaatgagcagggtgaagtggacgagcggggcacgggctctaaaggggcgagggcgtgcggaggtggccggagaacgcgcggacgtgggcgggaggttagggacgggctgacgggtggggtccgcaaggcacagagaggatga

SEQ ID NO: 26587 - DNA, 279 bp, Zea mays
  Peptide Sequence Number=SeqID_68366
atgacgcaacgcacgaccccatgggccgtgggccgtggcttttaccggctgaaaaggaaggcgcttcagcacaaacggacgaactccatatggaagcatatgctgggcccacaggccatcttcttccagcagggcgactaccacgcccgcctccgccgcctcgtctcccgggctttctcccccaggccatccgcgcctccgtgccgaccgtcggggccgtcgcgctgcgctcgctccgctcctgggacggcctcctcgtcaacaccttccaagagatga

SEQ ID NO: 26588 - DNA, 591 bp, Zea mays
  Peptide Sequence Number=SeqID_68367
atggcgaacgtggctaggcccacatggcagcgtgtgatgtgcatggctaaaggttggagcacggtgcagcggggaagacgagatgcgcttgaatgctcacctaccaaggattccaaaaccgttgaaaaccggcgtctcaaacaagcaatttacactcagttggttgtaataagtgggcaacaaaactacaaactagacacaaagcatgccatagacggagtggtagaggatgctcaaccgccagtggaaatcgatttccattgcggtcctcagttacccgcctgtaaaaatgatgatttctactggcccctagcactggcggttacgaaaaatgccactgtaaataggtttacgaccgccactatagagcttctctgtactagtgcatacggttggacttcgacgagcatggccggaggaagtgacgtgtggcgactaacggtgctccaagggcgatgcagagccaacttggtggtgcaatggagctccaacctgcgggtggttttccgagcgcagagcggtgcgagcaggagcgtcgaaggaaagcgtggcacagtttggagaggagtggagatcgagcgggcgttctag

SEQ ID NO: 26589 - DNA, 216 bp, Zea mays
  Peptide Sequence Number=SeqID_68368
atgaagctgacgcgcgagcttggaatgacagcgagaggaacaagtgaggggaaaacggttgcgcacacagcacgtgaggcactacgcgacgaggcgaggcaatgtggtaggtggggtagatgtggtagacccgagcaacacgacattcgcgaggagaagagcgggttgatgatctcgcaaaaaggacgagacccaaaacggaggtcgacgagatga

SEQ ID NO: 26590 - DNA, 141 bp, Zea mays
  Peptide Sequence Number=SeqID_68369
atggttttgcttttgttcctaagattaggtctcctattcctaagggtcactttaggatcacagaaggaaatgccagtaggagttgctgaggagctgcaggaggttcccgcagaggaggttgagtctgaagccgaagcctag

SEQ ID NO: 26591 - DNA, 189 bp, Zea mays
  Peptide Sequence Number=SeqID_68370
atgggcggggggggcaccaagttggaaaggatgaacagggcgaaggccgggaagacgaacgagacgtccgatgacggcgaaaacgatgtactaatattgttactattattactattactactattactattagtagagatgatatttttatgtgatagagtatcgttgatattgatagaagggtgttaa

SEQ ID NO: 26592 - DNA, 453 bp, Zea mays
  Peptide Sequence Number=SeqID_68371
atggcgggcttcctgggctcctcatcctacgctgtcgacccgaagcagatgaagcatctcatcgccggcgatggagacgcctcccggagagaccggcggcgaggaagcggccgacgaggcgggagcggggagctcctctcccgatctgcggcacgggagcgaagcttcttcccctaccgacgccgcgactggaagcagagcgggctattggcccaattggggaggggaggaggatttggggaaggaggggagggaggcgcggtgctgtggagggagtggggtgaaagctacagctacaactacaacaaggaggaggggaatatgaggtttggcggcggcgcgcggtggaggagtggtggcggcgggcgcgtgggctggcggtggcgctgtggaggagcggggaccggcagcgcgcgcgtaagcaggatagaagagaaacgcgtgggtcgctag

SEQ ID NO: 26593 - DNA, 567 bp, Zea mays
  Peptide Sequence Number=SeqID_68372
atggagaattatcacatgctctttgggacgacggcgacgcatgcgcagccctcttcagctgccggcacccccagctcctacaacttcattgccaccagcagcgctagcggcttgcggcgcgaccacgaccgaggccagcacagcgggcacgtgcacgccgccggcggatcctcgtcgccgtcctccttcttcgtcgcggagcggctgtcccacaacgacgactccagcaaggacggtggtggcggtccaggtccagccgcagctggcagtggagagaaggaggccgaggcggacgacaggccggcggcggccaggaggaaaggggaaaagaaggagcgccgcccgcggttcgccttccagacgcgcagccaggtcgacatcctcgacgacggctaccgctggaggaagtacggccagaaggccgtcaagaacaacaacttcccacgctgcttccttcctcttgcacaatcaaaatgctcgatcttttctcgtcaacgagacaacgactactatgctatgcatgtctggcgatccattttgcatggatggatcggcctgtggttttga

SEQ ID NO: 26594 - DNA, 267 bp, Zea mays
  Peptide Sequence Number=SeqID_68373
atgagcggcggcgggcccggaggtgcgtgcgggccggactcccgcgtggagaccatctcccggctggcgcagtggcgcatcgataccttcggcccctgctcctaccgccggtcggacccctttaagctcggcatctggaactggtctgctctgctccctcctgttcctcccgatcccgattcctgctgctcctgcaactccaccaatccccctgttgctatcgtgccaggggggaatatattctattttccacctttacagggttga

SEQ ID NO: 26595 - DNA, 948 bp, Zea mays
  Peptide Sequence Number=SeqID_68374
atggccaagcacaagcagcgcagggtgtaccaagtctggaaaggcaaaaacataatactatgtggtggaaggttgatctttggaccagatgccaaggccaccctgatttccttcgccctaatcgccatccctgtccttgtcttctgcgtctttgtggccagacatctcatacacatcttccctgcatataacgcaggatacgcaattcttgctgccaccataggccttaccatttatcgaaattaccggtacttcttctgttttgttgcttcagcggcagtgctttgtatctatgtatgtgcaatgtgtggattgtacatcaggcttctcatgaataggggtcattattcggtggggaaagccattaaagaatctccagcttcattggcagtcaaggcatattgtttcatttgcttctggttcgtcggtggtctcactgggttccactcttatcttattgtgacaaacaagacaacatatgagaatatcaagtacaagtacagcaaccaaccaaatgtgtatgaccatggttgtgtgctcaactgccatgaggttttgtgcaaaaaaaggaaaccttctaagatcaacctaagagctattgtccaagaagaacaagaggtagcacggccacagaccagctcttccaatatacgagaagatgaggcaccccaccgtccacgagccaaggttgaggatgatctagaaatgggtcttgacatcctcaagaccacagggcgcaggacggataaattcagcgatgaggaattggagcctgcaactggaagcaatggtattgaatatcgcatgccagattcagagactgagattcctgttaccagaactaagacagagatctttaatgaagttagggatctggacttatcggttagtaatggtgcacaatcttcatctcctgaacaagaacagcacccagacaaactttgctga

SEQ ID NO: 26596 - DNA, 249 bp, Zea mays
  Peptide Sequence Number=SeqID_68375
atggccctgtcctcgcaatggagcttcttgctgggactggcttctctgcttcttttgtcgcgctcttgtgaatgttacgaggactatgccactacacatctcttttcgaagagccttggtaggaatcaacctaaaccaatggctattttcagaggaacatattggttgcggtatagtgtattgctgcagcatgaggacgtgacaaaggagaacacccgtatcctggagatttttgctagatatggatga

SEQ ID NO: 26597 - DNA, 381 bp, Zea mays
  Peptide Sequence Number=SeqID_68376
atgtcgttaaccacccaaggtaacagtgtttgggcctccccggctacagggcggtggtggatctattacatcgtcaacgatactgatcaattgagtaaagctctgaaccgacatgatcacctggtggtgttcatgttctcggcggagtggaacgaaccctgcaaggcgatgaagaaaccgttcagggacatggccagggctagaaagatgcaggccgtattctgcttggtggacatcgacaagcttaaagatgctgtggcgcagcagttccaagtggaggcgctgccgacgttcgtgctgtacaagaacggcatacagaaggagagggtcgttggcgccaaggtggacgacctcagagccgccatcgacaggaacatatga

SEQ ID NO: 26598 - DNA, 378 bp, Zea mays
  Peptide Sequence Number=SeqID_68377
atggctagacgcaaaggtggcaagggcaagcgcgtaaagaaggacgagggcgagaagcggaagcatcctctgacctctccgttgaaggacttcagcgactccgagttctcggaggagcagttctccttcgagggcgaggagtctccgtcgttgcgggaagggcttgaggggtcggatgacttggaggaggactctttgggggaggatgactccgaggaggaggaaggtggcggcagcgaggatgggagtggctacgaaggtggcgacgagggcggcaacagcgacagcggatggggaagcagcagcggcagcagcagctacgatagtggcgatgagggcaatagcagtggtggcaaatggcagtggcaagggcagtag

SEQ ID NO: 26599 - DNA, 1188 bp, Zea mays
  Peptide Sequence Number=SeqID_68378
atgtggctggaagaggtgaggcggagggagcgtggagagcttcgcgctcggcggtttgaggccgccgcccgagcgtgccgcacggcttcgctcgcgctctccaatcgcaaggagtttgtcaccccacatcacggcgccgtcaactcgctccaggttgatttgacagaggggaggtacctgctctccggggcatcggatgggtcggccgctgtgttcgatgtgtggaacgcgactgaatacgaaaccgggttcatagcaaagcacaggaacatactgcttgtggacaagcaacaccagaatggccacaagttcgccatctcggcggccgtttggtatcctgtggatacggggctgtttgtcacagcatcctttgaccagtttgtcaaagtttgggatacaaattcgactcaagtcgtcatggaatttaagatgcctggaaaagtgtacactgcagccatgtctccaatcgcaacaacgcacgtgctcattgctactgggagtgcagatgttcagtggtctgcctcaagtgagtggattttgatgagtggtggctgtgacggggcaatacgtttttgggacattagaagagctggatgctttcgggttctggaccaatcaaggtctcaacttggaaaaaggccccttgttaaaagtgctctatataaggatcacacagattccttaggaccttcaccttccgcaaggagaaggacaggcatttctaagaagagttcatcagctttgcgcaaaattcaaaacccgacacatggacacatgcaacagagattgcatcctggtttgtcatctagtcaaaaccgtgctactgctcattatggtgctgttactggtttacgaacaactgcagatgggatgtaccttcttagctcaggatctgattctcgcttaagactatgggacatcgattcaggctgcaatacgctggtcaattttgaagctatgcgattgcagacaggcaagccattacaattagctgtcactgaggatccttcacttgtatttgttccatgtatggcaagcatcaaggcatacaatttatggtctggtaaaacatttcaaacattccgggggcactatgaacttgtgagttgctgctactatagtgaacaggaccaagaagatgatgacaagatcctttctgcagctgatgaggataactggagcgactga

SEQ ID NO: 26600 - DNA, 351 bp, Zea mays
  Peptide Sequence Number=SeqID_68379
atggggcgcgccgcgggagcacctggcccagctgtagcccctgctggacgttctgcggaggctccacgactaggggcaccccgcagtcagggttgtcgccgccttccaccgcaagagggtgctgccattggcagagcgccgcctgcgcctggacaaaatgacgcccaaggcctccatggagagttctcggatggcctcggctgccctctccaccgacgagctcctcaggggctgcgggggtaccgaaccaccctgcccctggtcctagaggacgtgacaggccgaatggcgcgccggttagccgtggaggagcagaagaataaggacacggagaagaagcgggcccgctga

SEQ ID NO: 26601 - DNA, 273 bp, Zea mays
  Peptide Sequence Number=SeqID_68380
atggctccaccctcccccaccccccactgctgcttatctcgtggccgatccgcgctcgccccgtccccgcatctcgccgccgcgccccgggcccaaccgaacatcgtcgtcgcctccacctctgcgtctgggccaccgcaagagtttagggctcctccggggttcgagatcatgtccgaccagcagagcagcatcctcagcaccatgctcgacaaccccctccacctcggtactggcgtcttcgccctcgggttgtctgcgctcttctcttag

SEQ ID NO: 26602 - DNA, 2574 bp, Zea mays
  Peptide Sequence Number=SeqID_68381
atggacgacggcggaatccaggaggagccgccgtcgacgcggttcctgacgccgacgcgctcggggggcacacgctgggtggacggcagcgaggtcgactcgtccgagtccacgccgtcgtggtcgctcgaggacgaacgctcggcggggggcgtctcctccaacgggggcgccgcggcggcgtctcgggtgtcctccggcgcattccggcggcggttcgggaagcggccccgccgcgtcgactcgctcgacgtcgagtccatgaacgtgcgcggcgcgcatggccacagctccaagattctaatattctattcaagaatcatgaacccaatggctaaaaactctgagacacactttgcgcaggaaatatcgatgttgagcaccctcgcaatggccttccaaacccttggtgtggtgtacggcgacatggggacaagccctctctatgtcttcagtgacgtgtttagtaaagtccccataaagtcagaggtcgagatacttggagcactttcgctggtcatgtacactatcgcattaatcccattcgctaaatacgtcttcatagtcctcaaagctaatgacaatggcgaagggggcacttttgcgctgtattcattgatttgcagatacgcaaaagttagcctgcttccgaatcagcagcgtgtggatgaagatatttctagttttaggcttaagttgcctactcctgaacttgagcgtgctatctctgtcaaagactgcctagaaaagaagccactcttcaagaacattctcctgtttttagttctgatgggtacctccatggtgattggcgatggcattctcactccgtcaatgtcagatgctgttgtaattgtctccattgttgttcttctgctattgttcagtgtgcagaggtttggaacaggcaaagttggattcatgtttgcccctattttggcattatggtttattaatttgggatccatcggaatatataatcttgttaagtatgacatttctgttgtgagagcattcaatccagtgtatatatatttgtttttcgagacaaacggcattaaggcgtggtcagctcttggtggttgtgtcttgtgcatcacaggagctgaagcaatgtttgctgatttgggccatttctctgtcaaatcaatacaggtagcatttaccgccgtcgtattcccctgcctgctaattgcttacatggggcaagctgcttttttgatgaaaaacccacttgttgtagaaagaatattctatgattctgtaccaggggttttattttggccagtatttgtgattgctacacttgcagctatgattgccagccaagctatgatatctgcaacattctcttgcataaagcaggccatggctcttggctgcttccctaggattaagataatccatacttccaagaaagtgatgggccagatttacatacctgtgatgaattggtttctaatggtcatgtgcatcatcatcgtggcaacttttaggagtaccaatgatattgccaatgcatacggcattgctgaagttggcgtcatgatggttagcaccgcactggtgactttggtgatgcttcttatatggcaaaccaacttgttccttgtgctatgcttccctattctttttggtgcagtagagtttgtttacttaactgccgttctgtcaaagatacaagaaggggggtggttgccgctggctttctcatcactgtttctctgcataatgtacacgtggaactacggaagtgtactgaagtaccagagcgagatgcgcggcaagatatccctggacttcattcttgatctgggagccacacttggcaccgtaagagttccaggcattggactcgtgtacaacgagctggtccagggaatcccatcgatctttggccagctattagtcacacttccagcgatgcactctacaattgtctttgtttgcataaagtatgttcctgtcccttatgtccctcttgaagaaaggttcttgttccgaagggttgggcagaaggactaccacatgttccgcagtgttgcacgctatggttacaaggacgttaggaaagaagaccatggcttctttgagcaacttctggttgagagcctggaaaaatttctcaggagggaagcccaggaaattgcgctggaggcgagcacaatggaggcagagcgtgatgacatatctgttgtatccgaggtgcctcagactcctgcaggtgacggggacctgcaaactccactgctttctgaccagagatcaggcgataacaacaggatggccgccacagatggaagcgaccctgtgctcccctccagctccatgtctttagaagaagatcctggcttagagtacgagctgtctgctctgagagaagccatggcctctgggtttacgtatctcctagcacacggagatgtgagggcgaggaaggaatcagtcttcacgaagaagttcgtcatcaactatttctatgcgttcctcaggaggaactgcagggccggcactgcaaccctgaaggtcccccattcgaacatcatgcgtgttggtatgacgtacatggtctga

SEQ ID NO: 26603 - DNA, 450 bp, Zea mays
  Peptide Sequence Number=SeqID_68382
atgggcaagaaacgcaagcgcgaaccgactcctccgtctgaggatttcggtgactcggagtattcagaggaggagttctcctctgaatccgaggggtctccggctcccatccccctgcgtgagtcgtctgatgactcagacgactcccaggggctcgcggtggaggtctggacgtacatccgggccgtcgagcgctccgggctcgagggctcggatgagtcggagtactcctcggatgaggaggactcggacggtggcggcgaggacgaggacggcgacgatgacgacgacgacgacgacgaaggcggtggcggcggtggcggtgacggcagcggcggcagcaaggacggcgacggcggcggcagcaggggcggcagcggcggtggcggcagcagcagaggcagcaccaggggcggcagcggcggcggcagcaatagggccagtggctag

SEQ ID NO: 26604 - DNA, 330 bp, Zea mays
  Peptide Sequence Number=SeqID_68383
atggaagggcaccaccgtgcgacagctgtagagtcgggcgaggatggagggggcgctaatggaaggggatggcagggagcgaggaaaggatggcagggtcggtcattggcttccgtagatggtcagtggggcgaagatggaggggtggtagcgaatcctgcgtggctgaggatagctggagcggatcgaagattgggcacgtacagggtggcagaaaataccataaatatagttggtgtaatctcgcaagacttacaaccccaactcagtacaactagtgtcaaggaatataatggtgtacgcaagcaccaagggtctaagggtgtttaa

SEQ ID NO: 26605 - DNA, 348 bp, Zea mays
  Peptide Sequence Number=SeqID_68384
atggcgtcgtccgcaaggctcggggaaatggcgaccagcttcgccatcgcgtgcagcctcctaagttgcttcgtccgccagaacggcgttgcggccactgagctaggcctcgggatcaaaggcgaggtagagaagaagagggtgcctgcgacaattaacttgctcctcggagcggagggcaaggagcccgagaggaggaaggagaccatggaactgttcccgcagagcgccaaggtcggcatcaaggatgctacatggctatgccacctgtcaccaccagtagcagcaatcacattctgtgatcttgtattgtacacaacaaagaaaaatggcaagtattcattctga

SEQ ID NO: 26606 - DNA, 384 bp, Zea mays
  Peptide Sequence Number=SeqID_68385
atgctgtcagctcagtctcccccaccgatcttcgccgatcctgctgcgcgagtggcgcaaaattcagagttgtccgttgtggaagcctacctgggttatatacccgacctagggcgtgttttccctcgactactcaagcgggagacccaggaaccaccatcattatgtgcgccgcactgtgaaaagcgaaaacagagagagaagagggtcgccgctggtgatctccgcccacattggcaaactatcctcggcaccctggcccagagcttcaccgtgactcgtgggagcactcatgaagttgtcagattcggggagctgattgcacgcaagcaattgctcgtcagacgtttcgcttccgccgtggaccctccacggcgtggttag

SEQ ID NO: 26607 - DNA, 734 bp, Zea mays
  Peptide Sequence Number=SeqID_68386
atgacggtgggcaatttgatcgctgactcgcggcggagacccaccgtgtcctgctccagcgcgctcaagaggccacaggccggcgccgtcgctgcctcctcccatggagacggcgtcggcaggaactggatgtcgttcctgcaccacggcctggcggcggccgcgctgtcgctggccatcggcctgaccccgggcgcccgcgccggcggtggcgtcggagttcgacgtgctgaacgacggggcccccgtggactcctacgtggtggacgacgccggcgtgctgagccgcgtcaccaaagcaaggctgacgcgttcgagtacgcggaccaagtcctggagaagtggtaccccacgattgaggagggcaacaacaagggcatcgtggtgctcgtcacaagccagaaggagggcgccgtcaccggggggcccgccttcatccaggccgtcggcgaccagattctcgacgccaccgtgtctgagaacctcccagtcctcgcgaccgacgagaagtacaacgaggcgatcttgagcacggcgaagcggctggcggcggcgatcgacgggctgccggacactggtggcccgtcgttcaaggagaacaagcgggagtccaacttcaagaccaaggaggagacggaggagaagcgcgggcagttcacgctcgtcgtcggcggcctgctcgtcatcgccgtcgtcgtgcccatggcgcagtactacgcctacgtgtccaagaa

SEQ ID NO: 26608 - DNA, 309 bp, Zea mays
  Peptide Sequence Number=SeqID_68387
atggcgggctggaggctggatcctggagcggcggcggacgagggaggcgagagaaacgagaggttgggagaggagaggtcgggactcgagagagaaacgaaagtgaatgcccgcccacgtcgtggcctcgtactcgttcgggccgcatggaaatgcgtaataccctacgtcctgggctgcagcgcgggaaagtcagatcttctgttgcgatcgcttgctcaacgctgtggggtcatccgggtttgcgcccacccggccttatgccgatctgctttactagtcgtttctcccaggcccatgaaggagtga

SEQ ID NO: 26609 - DNA, 2319 bp, Zea mays
  Peptide Sequence Number=SeqID_68388
atggcagcagggttcatcaaagaggtattccatcccgaatggcttgccaaccctgtgcttgtgaggaagaaaggggggaaatggtggatgtgtgtagactacactggtctcaacaaagcatgtccgaaggttccctaccctctgcctcgcatcgaccaaatcgtggattccaccgctgggtgcgaaaccctgtccttcctcgatgcctactcagggtatcaccagatccggatgaaagagtccgaccagctcgcgacttctttcatcacgccgttcggcatgtactgctatgtcaccatgccgttcggtttgaggaatgcgggcgcgacgtaccagcggtgcatgaaccatgtgttcggcgaacacatcagtcgcacagtcgaggcctacgtcgatgacatcgtagtcaagacaaggaaggcctccaacctcctctccgaccttgaagtgacattccggtgtctcaaggcgaaaggagtcaagcttaatcctgagaagtgtgtcttcggggtgccccgaggcatgctcctagggttcatcgtctccgagcgaggcatcgaagccaacccggagaagatcgcggccatcaccagcatgggacccatcaaggacttaaaaggggtacagagggtcatgggatgcctcgcggccctgagccgcttcatctcacgcctcggcgaaagaggtctgcctctgtaccgcctcttaaggaaggccgagtgtttcgcttggacccccgaggccgaggaagccctcggcaacctgaaggcgctccttacaaaggcgcctgtcttggtgcccccggcggacggagaagccctcttggtctacgtcgccgcgaccactcaggtggttagcgccgcgattgtggtcgaaaggcaagaggaagggcatgcattgcccgttcagaggccggtctacttcatcagcgaagtgctgtccgagactaagatccgctacccgcaagttcaaaagctgctgtatgctgtgatcctaacaaggcggaagctgcgacactacttcgaatctcatccggtaactgtggtgtcatccttccccctgggggagatcatccagtgccgagaggcctcgggcaggatcgcaaagtgggcggtggaaatcatgggcgaaacgatctcgttcgccccttggaaggccatcaagtcccaggtgttggcggatttcgtggccgaatgggtcgacacccagctgccaacgactccgatccaaccggagctctggaccatgtttttcgacgggtcgctgatgaagacgggggccggcgcaggcctgctcttcatctcgcccctcggaaagcacttgcgctacgtgctgcgcctccatttcccggcgtccaacaatgtggccgagtacgaagctctggtcaacggattgcggatcgccatcgagctaggggtcagacgcctcgacgcccgcggtgattcgcagctcgtcatcgaccaagtcatgaagaactcccactgccgcgacccaaagatggaggcctactgcgacgaggttcggcgcctagaagacaagtacttcgggctcgagctcaaccacatcgctcggcgctacaacgaaaccgcagacgagctggctaagatagcctcggggcgaacgacagtccccccggacgtcttctcccgggagctgcatcaaccctccgtcaagctcgacgacgcgcccgagcccgagaaggcgcccgggggctacacgcacctgctggtcgccatcgacaaattctccaagtggatcgaggtccgacctctgaacagcatcaggtccgagcaggcggtggcgttcttcaccaacatcatccatcgcttcggggtcccgaactccatcatcaccgacaacggcacccagttcaccggcaaaaaattcttggatttttgcgaggatcaccatatccgggtggactgggccgccgtggctcatcccatgtcgaatgggcaagtagagcgtgccaacggcatgattctacaagggctcaagcctcggatctacaacgacctcaacaaattcggcaagcgatggatgaaggaactcccctcggtggtctggagcctaaggacgacgccgagtcgtgccacgggcttcacgccgtttttcctggtctacggggctgaagctatcttgcccactgacctggaatacggctccccgagggcgagggcctacaccgaacaaagcaaccaagctagccgagaggaatcgctggaccagctggaggaagctcgggacagggccttactacactcggcgcggtaccaacagtccctgcgacgctaccacgcccgaggggtccggtcctga

SEQ ID NO: 26610 - DNA, 183 bp, Zea mays
  Peptide Sequence Number=SeqID_68389
atggctgtcaattcagcagacactgaagcaagtaacaggccaggtctagcaaatgatgacggaaaagccttccccatgggcaaactaggagacgctgagctagtggccctgcacaaaccaagagagcgtgaagttggtggccctaagccctgtcggcgacaagctcagggcgacgccctacag

SEQ ID NO: 26611 - DNA, 1209 bp, Zea mays
  Peptide Sequence Number=SeqID_68390
atgccgttcggcttgaggaatgcgggcgcgacgtaccagcggtgcatgaaccatgtgttcggcgaacacatcggtcgcacggtcgaggcctacgtcgatgacatcgtagtcaagacgaggaaagcttccgaccttgaagtgacattccgatgtctcaaggcgaaaggcgtcaagctcaatcccgagaagtgtgtcttcggggtgccccgaggcatgctcttggggttcatcgtctccgagcggggcatcgaagccaacccggagaagatcgcagccatcaccagcatggggcccatcaaggacttaaaaggcgtacagagggtcatgggatgtctcgcggctctgagccgcttcatctcacgcctcggcgaaagaggtctgcctctgtaccgcgtcttaaggaaggccgagtgcttcacttggacccctgaggccgaggaagctctcgggaacctgaaggcgctcctcacaaaggcgcctatcttggtgcctccagctaccggagaagccctcttggtctacgtcgccgcgaccactcaggtggttagcgccgcgattgtggtcgagaggcaggaagaggggcatgcattgcccgttcagaggccagtttacttcgtcagcgaggtactgtccgaaaccaagatccgctacccacaagttcagaagctgctatatgcggtgattctgacacggcgaaagttgcgacactacttcgagtctcatccggtaactgtggtgtcatccttccccctgggggagatcatccagtgccgagaggcctcgggtaggattgcaaaatgggcggtggaaatcatgggcgagacaatctcgttcgcccctcggaaggccatcaagtcccaggtcttggcggacttcgtagccgaatgggtcgacacccagctaccgacggcttcgatccaaccggagctctggaccatgtttttcgacgggtcgctgatgaagacgggagccggcgcgggcctactcttcatctcgcccctcggggaacacctacgctatgtgctacgcctccatttcccggcgtccaacaatgtggctgagtatgaggctctggtcaacgggttgcggatcgccatcgagctaggggttcggcgcctcgacgcccgcggtgactcgcagctcgttatcgaccaagtcatgaagaactcccactgccgcgacccgaagatggaggcctactgcgatgaa

SEQ ID NO: 26612 - DNA, 156 bp, Zea mays
  Peptide Sequence Number=SeqID_68391
atggcgcacctcccacccgccatgcacagcgcggtagagttggagacggaggcagagatctggtctccaagtcccacacacaggcgaacacggttaaacattcaaaggcatgagaaattcaagaaggtttcaaaaaatccaaaatctctatcatag

SEQ ID NO: 26613 - DNA, 198 bp, Zea mays
  Peptide Sequence Number=SeqID_68392
atggttaaaaattttggcaggaaaacagtgcaaatagcaatgaatgctgtggtaacttcacacctactcgtctgtttatatagtgctgcagaaagggaaaagctacaaaggttgacacagcgccgaagctgtgaagcacgaaagcttcggcatgttcgcagaaaagggaaccgacttaaagatgaaaaggccatttag

SEQ ID NO: 26614 - DNA, 636 bp, Zea mays
  Peptide Sequence Number=SeqID_68393
atgactattgagcagatgttcctgatgcagacccaagcaggacaagcgattgatcagactttagcagcgatgcagcagtgcaacgatcgcgagaaggtgttgtatggtccccgtcagctaagggaagcagcacagtccttgtgggagtcttacctcggcacccattcaaagggaaatgctggttcagcagcaaacttgctgctctcgagaatcggcaagggcgccgagactaaaatcaccgaactgttcggtgagccaacagcgtccgcactaacggtcggcagtgcgattagcgggcgacacgtggcccgaaccaatggtcaccaggccgcactggactgtttggtgtgcaccggacagtgtccggtgcgccaaggggaccaaaggctcaactgttggcttcgccagaaaaaggaaaggaatcgggcattgttcatgtccggtggtgcaccgaactgtccggtgcgccaaccagcaaaaggcaagaattgcctaccaaatggagatccaacgactcctacctgccttggggctataaaagggacccctaggcgcatggagcaagacaccaagcctccattgaacatcctaagatgcctagactccgcaaacacgcatccagattatcgtgattga

SEQ ID NO: 26615 - DNA, 396 bp, Zea mays
  Peptide Sequence Number=SeqID_68394
atggccccacaacgctacgggcagggcagacaatccgcatcgatccccaccgcaaattgcccctatctatccctccctacaaatcgaaacaaagaaagaaaaaatcgagaggacgccagggccgattctctgcgtgacttggggcgtcgtcgccgagttttctccggccgagggcggcgcgaccggacaaccagccgtgaccgcgaccgtgagcgcgcggcggcgcggaagcccaacgccaagaactcccaggacgggctcaccccggagcagcgccgcgagagggacaagaaagctctggaggagaaggcggccaagaaggcgcagcaggcagcggccggcggcaccggtacctccacggacaacaacaagaacaaggcaggtggcaagaagtag

SEQ ID NO: 26616 - DNA, 318 bp, Zea mays
  Peptide Sequence Number=SeqID_68395
atggggaggcggcatgagcacggcaagacgagaaagaaatggtttgggaagatgaacagggctctagcggcggctgagcaacctgcccacgcatgcggtgacatgcacgacgtgctgctggggcgaggcagcgtgggggcatgggctgggggcactggaccgagcggcctagcgtgcggtgggcacggctgctgcatgcgcgcgtgggagagcaagagcacgcggggatctaaccaccttaacaggaatctcgcccccgagattcaagaagaagctagcaagaaaacaaggttggttcttaggtttgagagcacctag

SEQ ID NO: 26617 - DNA, 288 bp, Zea mays
  Peptide Sequence Number=SeqID_68396
atggccctggctgccgcgacgattcttgtgggtggcatgatcgcgctggtgctcacggcggggacgtggaaggccaagataaagaagtcacaggagaagatctgtaacaagggttgggagtgctcggggagcaagtactgctgcaacgacaccgtcaccgacttcttcaaagcatcaaattgttctcctccccctccattggattttgctgtccccggattagcaagttccaacataacctcaagggttatgcaccaccgatggaggaggaaccaattgattgactag

SEQ ID NO: 26618 - DNA, 117 bp, Zea mays
  Peptide Sequence Number=SeqID_68397
atggcgcagatggtcttcttcgcatcagacctagatttcgcctcccgagagggatcccttcggggaggggagatcctagggccaacacctatggccatgggtggactgtccggctaa

SEQ ID NO: 26619 - DNA, 1455 bp, Zea mays
  Peptide Sequence Number=SeqID_68398
atggcctccggcatcggctccggccagcagcaacccccagcgccggcggcagatgctgacccgggagccgtcggcgacaagctcgtcttcgaagcgccgcctcagcccgtgagggaggactacgtccagaacgccgtcaagtttctctcccaccccaaggtcaggggctcccccgtcgtctacaggcgatccttcctcgagaagaagggccttagcaccgaggagatcgacgaggccttccgaagggttcctccttgtcttgtctctgtctgtttgcttacagtcaacagccagaatcaatccgtcggggtgcaagcttatgcgccagcacaacctgtgcacccagcaaacgctggccctgtcgtccttccaacgcagcccaggtttagctggtaccaagcattcctggctgcagggctcttgcttggttttggtgctagcgctgctgtctttatcaagaaactgttccttcctaggctcaagtcttggatccgcaatgttgtagcagaaggtaatggcactgaaggcaaccagcttaagcctaggattgatgatgaaacggctgatgctgtaaaggcttctgcttcggctgtttctgctattgccaaaacaaaccaacaactgcttgcttcaaaggatgaaggtttcaatctctaccgtccgtttcgctgcttctttcttgccaatggttcaactcactccaataatgtcattctgtttttgttagcagaaaagaagatactagtgacgttgacacaagctctagattcccaagccaaggagttaaaatccttgaccgattcaatcggtcataccagggaacccataaatattaccagggatgataggttttctcagtaccgcccactggaagaccatgcccctactgttataaggaatgcagtgaggtcttcatttgcgccagcacctgctgaacctacagctggatcattttcaagatcctatggcgagcagccgatgtccactgcacaacgaagcgataggtcttctggcagtaagccatgggagatgcattcgtattcacaacagaggcctggttatggatccaactcccagttgagtgatgatggatcatactctgatgcccaggacagctatgctccttcctatcaccagaatggaaaggcccctgattttcaagcggatgaacctaggcctttgacttacaacactggggttgaggaaagaccgccaccgcagcgccgctgggtgccccctcagcctccaggtgttgcgatgccagaagcagcagctgccatacgtcaaccaaaggcccttccaaagcagccctccagcgatgcctctgaggcagctggtgagatgcaggtgaatggttcaagtgcatcggatgctgtgactgaggttcctgttaatggtgctactgcaagcgatgctggacgcagtgagatccaagaacaatcagtggcggcctaa

SEQ ID NO: 26620 - DNA, 951 bp, Zea mays
  Peptide Sequence Number=SeqID_68399
atggacaggctgacgctgctgaggggcaagggcatgccggctctcttctcgtggtcctgcaagaggaactacaagaacgggtacgtgtggaacgacctgtcggagaacgacgtgatctacccgtcggacggcgtggagtacgtgctcaagggctccgagatcttccctggctgctcttcttccgatcggttccagcacctacgcgtgaccgaccggtcgccgacgaagccgccgctggcgctccctcacatgagccacaacaagcagtaccccgtggacggctacggagactacgacgccgtggaggaccgggacgacgacgagctgggccactcgtaccaccaccgccggacggcgtcggggcggcccgagaaggccgccgccgccgccgtctcggcgcgcgcggccacccaaccgggcccgccccgtggagctccctgtcgaggagacctcgccgccgtccctccacgtcctcgggacaaagcccccgccgccagcggcgctgctgatgcagcagcagcagcagccggggaggagggccacgtcggaagcggcggcggcggcccggggaagtgccgcgccgagccgaggcggagctgcggcctcgtgagccggctctcggcccgcggcggcgcggacgcggacgaggacgaggacggtgtgggcgcggggaccgacctgggccgccggttcggccgcctcgccgccgaggacaaggagtacttcagcggcagcatcgtggagggcggcggcggcaggggcacgccgctgccggcgtcgtcgctcaagcgctccaactcgtacaatgaggagaggagctgtaggcccggcggcgttgctggtggtgccgccatcggcgaggaggccatggatgaaggcgacggaggggtcaggggaagatgcatcccggggaggaaaaagccgccgccgcagcagcagcagcagaaatag

SEQ ID NO: 26621 - DNA, 840 bp, Zea mays
  Peptide Sequence Number=SeqID_68400
atggccgcggcgtcgttcgcccgcgccttatgtctccacatgctcctcctcttcctcgtggttggctcggcgcgctgcaagacggtgaagagagacgtgaaagcattgaatgagatcaaatcttcactaggctggagagttgtatactcatgggtcggtgatgatccttgtgggcatggtgatctacccccctggtctggtgtgacatgttctcagcaaggggattacagagttgtgacggaactggaagtctatgctgtatcaatagttggccctttcccaacagcagtaactaacctgttggatctaagaagattggatctccacaataacaagttgacaggaccaattcccccacagattggacggttgaaacatctcaggatattgaacctgaggtggaataagcttcaagatgtgcttccacctgaaattggtgaactgaagaaactgacacacttgtatttgagcttcaacaacttcaaaggcgagattccagtggagcttgcaaacctgccagaactccgttacctttatcttcacgagaaccgcttcaccgggcgaatcccccctgaacttggaacgctaaagaacctacgtcacctataccttaacaacaatgagctgactggtgtgctgccagaccagattgcaaacctgacaaaccttgagattctgtacttggacaataacaacttcattgggaggataccggaagggttgtacaggcatccatttctgaaggagctgtacatcgaaggaaaccacttcagaccaggaaccagatcgaagggaacgcacaaggtgctggaactgcctgacgccgacattctagtctag

SEQ ID NO: 26622 - DNA, 216 bp, Zea mays
  Peptide Sequence Number=SeqID_68401
atgagcaagaacacaagagacacaagatttatcctgaggttcggtcacagcatcaaggtgccctacttccttgttgaggcgcccacaaagagtcagggccagttgaaccgccccaagggccggttcaaccgcctagtggtcagactgatagtcagcctgctagttaggctggcagactgcaggttagactggtcagctggccctgacacaggttga

SEQ ID NO: 26623 - DNA, 1746 bp, Zea mays
  Peptide Sequence Number=SeqID_68402
atggctacggtttggagcggctgcagcacgagctgcggctccttcggccaagaactgcccccgcgcggcaaacggggcggtggtgagggcacaagattccttccgcgaaggagaggccggatcagaggtgacgcccgccagacacaagctctaagcgccgccatggttacggtcggagcttgcgtttgtagagcggctccatgcttgcttgattcggtggtcgacgggacggaggacgtcagcgttgggtttgggggcatcgacggtgaaccgctcgccgatgggtatgatggtggcaagaggcgcggtccgcgtcggcgtccgacgaggccgaccgtttttcagaaggaggtgggcgcaagaactgctccaccggcgatggcgtcggagccggacagcaaatctgagcatggggtgtcgaggctgcacttcctggaggagagggacgaggagacgctgtcaagaaggttgataaagctcagccaaaacaacaaggtcagaagtgccactgagctgtttgattcaatgcgcgcatctgggctgcaaccgagcgcacatgcctgcaactccctgttggcttgctatgtgcgtagaagtccactggcggatgcaatgaggatgtttgagttcatgaaggcgaaaggaatggcgacagggcacacgtataccatgatactcaaggctgttgcgagcaatcagggttatgtttctgcactggaaatgttcgataagattgaggaggaggagggttcaaagaaaatcattgacgtaattgtttataatacgatgatatctgtttgtggaagagcgaaagaatggatgcttgtggagagactatggagaaggctagagcaacattctttgaatggaactttactgacatacgatttgttagtcagcatattcgtgcaatgtgggcagtctgagttagcaattgctgcatatcaggaaatgctccagaagggacttgatccgagcgaggatataatgaaggctatcattgcatcctgcactaaagaagggaaatgggagtttgcaatgtcaacatttagtagaatgctgagggctggcatgaaacccagtttaattttgttcaactcaatcatcaactcactggggaaggctggtcaagatgaactcgcctttaggatgtaccatctgctggaaaaatcaggccttaagcctgatcaatatacatggagcgcactgttgttggcattatacaggtccgggcgatgctgggattgcctaaagcttttccatggaatcaaaggcaagcatccgacactcttaaatgatcatctctacaacactgctttgatgtcctgcgaaaagcttggtcaatgggaacatggtttgcagctgctgtggttgatggaaaaaagaggactgaaattatcagtggtatcttacaatcatgtgataggtgcttgtgaggttgctagcaagccaaaagttgctcttaaagtgtaccagcgcatgattaatcagaggtgttcgccagacacattcacacatttgtctgttatacgagcttgcatctggggatctctttggactgaagtagaggatatattggaggaggtggctccagactcttcgatctacaacgcggtcatccacgggctgtgtttgcgaggcaagaccgggctagccaacaaggtgtacgccaagatgcggagcatggggctggtaccggacggcaagacgagagcgttcatgctgcagcacattgctacggactag

SEQ ID NO: 26624 - DNA, 354 bp, Zea mays
  Peptide Sequence Number=SeqID_68403
atggggcttgacccgacgagcagtaggcgcgatgaggacacacagggaggaaacaccagagagacgcggctgctggcgcgcacaggaaggaacgcgcgcgtgacgcagggacgacgcgagaagacgcacgcgcaggggcgagctacaggaggaggaacggctggggctgggcgagctggatcgcggccatggaaccgagctcagcagggatccaggcgcgcacccaagagctcgcgcgctaggggagacaaagggagcagggcgcagcgcggccagggagctccgaccgacggccgccagaggaagatccagccggagctggagcacgtgcgcagggaaccggctggagaatga

SEQ ID NO: 26625 - DNA, 360 bp, Zea mays
  Peptide Sequence Number=SeqID_68404
atggtgatggggctggggtcgaagcgtagggtggcggagggcggcacggagcccgaggaggagtcctcggaggagtacgaggtggaggaagtgtgcgaccacatcgcctcctcccgtggcagccgcctcgcgctcttcggctccgacctccgcctcggccgcttccgcccgcgccggcgcaggcgccgcccgctcgccggggaaggcgccgcggagggcttcctccacgacctcgtcatccaccccgacaacagatcactatgcgacattcagctgacggtgaacagactgtgcgtcagcatcccagccgcaaatttctcgctacttgatgatgagcccgccagatacgcaagctactag

SEQ ID NO: 26626 - DNA, 2574 bp, Zea mays
  Peptide Sequence Number=SeqID_68405
atggcgtacagccgtaaagttcccagtgaggaacacgggatcttcttgattcctgactacaatatagataacataggggctatcaacatcggtttacatgatgctgtcttggactcttaccgagaagctggtagtttatccattgctgaagcatctggggtagctatcatgatgcataggttgctgctatggtatcagttatggaccaagttcatactgggttgggcggtgtacagttccttcttcacgcccctggaattcggcttcttcagagggctcccagaaaacctcttcttcctggacacagttggacaggctgcgttccttatcgacattgttgtgaaatttttcgtggcataccgtgacccagacacgtaccgaatcgtctacagtcccaccgctattgccctcagatattgcaaatcaagcttcatctttgatcttcttggttgcttcccatgggatgctatctacagggcttgtggaagtaaagaagaagtaagatacctgctgtggattcgcttgacacgggttaccaaggtcacagaattcttctggcgtttagagaaggacatacgtatcaactacctcttcactaggatagtgaagctcatagttgtggagctctactgtacgcacacagcagcctgtatcttctattacctggctacaacgcttcctgaatcaatggaaggatacacgtggattgggagtctgcagttgggggactacaagtttacacatttcagggagatcgatcttgccaagcgctatataacatcgttatacttcgccattgtcaccatggcaacagttggttacggtgacattcatgctgtcaacatcagggagatgatattcatcatgatctacgtttcctttgacatgattctaggagcttacctgattggtaacatgactgcgctcatcgtgaaaggctcgagaaccgagcggtttagggacaagatgaaagaagtgatcaggtatatgaacagaaataaacttggaaaggaaataagggaacagatcaaaggacacttgaggttgcagtatgagagcagctacactgaagcgtccgtccttcaggatatcccgatttctatccgtgcaaagatttctcaaacactgtataagccatatgttgaaagtattccgttgttcaagggatgttccgcagagttcatacaacagattgtgatcaggttgcaagaggagttcttcttaccaggagaggttatattggagcaaggaagtgcagtcgatcaattgtactttgtctgccacggtgcactggaaggtgttggcatcggtgaagacgggcaagaagagactctgctgatgctggagccagagagctcctttggcgagatctcaatcctctgcaacatcccgcagccctacacggtccgcgtctgtgagctctgccggctcctgcgtctcgacaagcagtccttcaccaacatcctggagatctacttcgtcgacggcaggaggatcctgagcaatctctccgagagcgagtatggcggacgggtgaagcagctggaatcggacatcacgttccacatcgggaagcaggaggcggagctcaccctgcgggtcaacagcgccgctttctacggcgacctgcaccagctgaaaagcctgatccgggcaggggctgatcccaagaacaccgactatgacggccgctcccctctgcatctggcggcttccagagggtacgaggacgtcgtgcaattcctcgtcaacgaaggcgtcgacatggaccttaccgaccaatttgggaacacgccgttgctggaggcagtgaagcaggggcaagaacgggtggcagcgctgctcttcgccaagggcgccaagctgagcctcaagaacgccggcagccacctgtgcacggcagtcgccaagggagactcggacttcattcggcgcaccctggcctacggcgccgacccaaactgcagggactacgaccaccgcacaccgctccacatcgccgccgccgagggcctgtacctcatcgccaagatgcttgtcgaggccggcgccagcgtgttcaccaccgacagatggggcaccactccgctggatgaagcgcgaaagtgcggcggccgcgtacttggggcgctgctggaggaggcgcgggccaacgagctggctatgttcccagaacgcggcgaggaagtcagggacaagatgcacccgcgacggtgctcggtgttcccgtaccacccgtggcgggcggccacgggcgaggagcggcgtattgagggagtggtcctgtggatcccgcacaccattgagagcctggttgcgttggcgcaggagaagctcggcttgccgggcccggcttcgcggctgcggttgctgcgcgaggacggggccagggtgctcgacgtcgatatggtcaatgacggccagaagctctacctggtcggaggcgaggacggcgatcagaaatatgtagaagaaaacggaatcaagtccatcgtccctgctggacactgtacagaactacaaattcgcaattatgttagatgtgaaatggaaatgcaatgtgaagcaaactaa

SEQ ID NO: 26627 - DNA, 309 bp, Zea mays
  Peptide Sequence Number=SeqID_68406
atggaactcgccgccatcagcgtctgtgtggatgaattaccgctgcgcatgtccaggttgccaccaccgtcgacccgcgtcatcgtcaccgttgtggcttcggacctgggcgctgtatgctctggtactcagggtctggggctatcgttctccggcgggcggctccgccgtggtggcgagcgcgccgccgcctggctcggccgggcaaggggggagtgcgatgtagtgacggttgatttggcgatggacgaccaggattacagtgtgccttgtctccttcgtcgaacggtcgtgtccgcccgatcgtga

SEQ ID NO: 26628 - DNA, 258 bp, Zea mays
  Peptide Sequence Number=SeqID_68407
atggggttctgggcttggatgcggcacggtgatggggaggttagtagattgggggaggtccgcgcccgccctttatggcccccgcgagtccgcgccgaggtgggggcattgggagctagcgcgacaatggcaggagcgaagccgcgcaatccgcggacattggcggagtttgttggggagaagcagatgaatccgacatgcgggccccatgcggcagtgagcgcgcgcaggtggagcagaagtgggccggcggggtaa

SEQ ID NO: 26629 - DNA, 192 bp, Zea mays
  Peptide Sequence Number=SeqID_68408
atggaggagacacccacttcagctttgactacctttcccacgagggctttcccctctatcttatatcatcccctggagatgatgatgcacccacttggactcttccccgccgagaagagggatgacccaatgtggtgcaacaaagttgggaggatcaccgtccagtgcatgcgtgcattgtaccgcctgtag

SEQ ID NO: 26630 - DNA, 249 bp, Zea mays
  Peptide Sequence Number=SeqID_68409
atgtcgatcttactcggggcggcccagattggatgggggataccgtttcgtcatagccgataccttcggactcgggttaaaagcatatacgatgtgaagagcatggccgtgacgaaggttggtgttgctccgaagctacgaataagagagcttcgactaaatggcggaaaaaggaaccgacttaagggctactttgggaacctcaaatccccttcgggattggaggggattgaggtggaaatgaactaa

SEQ ID NO: 26631 - DNA, 318 bp, Zea mays
  Peptide Sequence Number=SeqID_68410
atggcagaagaaagggtggtgggacttaccggcggtgatctagctccggcgaagtgtccacggtggtcagggaggtcctggcgaacacgtcgatgggctgatggcggtcagaggtggtcggagtcgctgtggccgcgtgcgggggcggaagaactcatcgccagcgaggagtccggcctaagcacgacggtagagtttaattggtcggttcgtgaagctttaccaggtgacgcagaagcggtgcgcatgaggaatttgaaaatggtgcagtggcttacccggtccacactcttcggtgggcggaggaagtccagctag

SEQ ID NO: 26632 - DNA, 1209 bp, Zea mays
  Peptide Sequence Number=SeqID_68411
atgaccaatgaaggtcatgttgctccttttgatgggaagaaccctacaggcaatgaagataatgtggatgtcctagctgataacaacatgacgattggaggtcaagttgatgacactaatcagatgtcgaacggagatttagaattaggtcagaatgatcggtgggaaaggggaatcaatatgggacatggtcttcatagaattaaccgaggtttgcgtggaaagttgcaagttgttattcctgaagggaagataaggcctatggcaccacttgttgctgctaagtttgcaactgaatgcaacattgttgtgaggaaccatgtgccagtgttcaaacattggaaggattacaagaaccattcaggcctattcaatctatttacaggaaaacttagtgcaaagtttgacattaacacaagtgatgcaccagttcaaaaggcttgttcccagatgatgaagagtgcagttcgacaacaacgataccggctcaagaaaaagtactttgatccttttccgctacatctagtggcaaaaaaatctccaatcagatctatgactgatgaagagtggaatgaacttgtggagtattggaagagtccaaaaaagtggtatgagacatctcaaaaaaacaaagagaatcgatccaaagttaaattccatcaaacaactggctctcgtagctacatggttcatgtagaaaatttgggagataaatacattgatcaagaacctgatgcactggatttatttaaggagtgtcactacagcaagataaagaaatgctattcatcttctgttcaacaagttataactgaaatagaaaacaagtggtctacaccaacagaaggtgaacaagaaatgtttgtgactgaagttgttgctgatgtacttgctcaaaatacaaagaaaaatttgttccttcaaaatgtggggatacaaagtgcttatccaaggtctagtgtaagaaatatcgaagcacaacttgaagtagagaagagagcaaatagtgctcttcgatctgttgtcaacacccaacgggaggaactagaagtattgtcaaagcaaatgcatgaagcagaagagtcacggatcaaggagcaagaggaattgaagaagaggcaagttgagatggaagcagagatgaagaagaggcaagctgccatggatgccaagctccaacttttgtttagtaaatttcaaccacgttag

SEQ ID NO: 26633 - DNA, 342 bp, Zea mays
  Peptide Sequence Number=SeqID_68412
atgacgacggtggttctcagccccctacggaagcaaggagacgtcagcaagatcccagcagcaccgacagctgtacttctacagggctcaggcactcctccgatggccacgaaccccccggggtcgaaacgccgacagttggcacgccaggtaggggcctgctgcgtgttaacaaacaactcccccattgcgctgctccgcttcgggagtctcgagttcatgtccctcaacggtagctacgacatgctgaagctgggcgccggtcttggagctatttggccaatgcgcgagctcgccggagctctgcgcagcgccgttcgtcgtcaggggtttatctggtga

SEQ ID NO: 26634 - DNA, 231 bp, Zea mays
  Peptide Sequence Number=SeqID_68413
atgacgtatttgggggatcagatggtgcggagccctgccttcgctattgatttgcgaggatgggacgcggccgccttcgtgtgggaggtgggtgactctgctgatgccggtgatgaccgaggaaaatggtgcaataggagaaccgaggggttatgctgccaaaacaacgcaatagcacatgcctttatcacaaacatggaccctgtcggtcaccccgacgctgtccaataa

SEQ ID NO: 26635 - DNA, 1173 bp, Zea mays
  Peptide Sequence Number=SeqID_68414
atgaatggccctccctctccttcgtcgtcgtctcgtttatccgtagcgcttcttctaatgatcactgtgctcgcatgcggcttcgtcttggcttcctctggtcgaagctacgcccatgctgactacgctgatggaagtgaccaagagctgctgatgtcgacggagtggttccgcttccatgcctggatggcagctcatggccggtcatacccgacggccgaggagaagctccggaggttccatatataccgtgccaacgtggagctcatcgaggccacgaaccgcgacaccagcaagaccttcacctgcggcgagaaccagttcaccgacctctcccaccacgagttcctcgccatgtacaccatggccggccattcggcgccgccacttctaaacctctcgtccgtgatcacgacccgcgcgggcgatatcacagagagtgatcgcggcacgacgcaagtggaagaagatgaagaagtagaagctctgccggaaaacatcgactggagggagcaaaacgcggtgacgcctgtccaggatcagcgcaggggctgcaatgcttgctgggtgttcgcttcggtggcaacgatggagagtgcacacaagatcaagacaaatcacgggcatggggagctcctaaagttgtcggagcaggagatcgtggactgcaccagccaacactgcggcggcggctacccggatgatgcattcagttgggtgaagaggaatgggatcgccacggagtcggagtacggcggttacgaggcgacggtggactcctgccgcgccgacatggtacgacctccggccgtcagggtcaaggactacagtttcgtgcccaaaaactcagagaaaaaactagccatgagggttgcccagcagcccgtcgccgtcctgttcgacgccaccgatccctgcttccaatgctacacgaatggcatctactcggggcggccagcagcagccgccgaccgctataatatcctcaaccacgccatggccatcgtcggctacggggaagacaagactacggggcgaaagtactggatcgccaagaattcctggggtacccgctggggacaaaacggctatgtctacatacgcaaggacatggccgacagacccgagggcgtgggtgggcttgccacacatcccaggtaccctatcgtgtaa

SEQ ID NO: 26636 - DNA, 183 bp, Zea mays
  Peptide Sequence Number=SeqID_68415
atggacggtggcatcggagtggagaagctgactgaaaagctgagtgtttggcagtccggaacaatttttggtgaccagaagctgcgaaaatccgaaacaaacaaggacggccaagatcagatccggaggatagttgatcgggattcgtatcacgccgtgaaggataggaaaactcctaactag

SEQ ID NO: 26637 - DNA, 462 bp, Zea mays
  Peptide Sequence Number=SeqID_68416
atgggagcaacggggaggtacattgacgaggacgtggtcgtcgagggcttagcgctagagcgtgaggagcacctgattgcgctggcgggcgtagtgggtggacgccgggtcaaggacaacaacgacaagcgaacgactgttttggacacaggacgtctgatcgtggaggatggcgatggcaacagcatcgaacttgggggaccatcaactgaggagctgtggaggtggtgctcagcctccaccaactgggaggcaagggatccaccgtggaagggctttgcgcccgtgccggtgtatggaggcgctggggagggctgcggaagctacgtcgacaatggggaggtcgaagaagatagcgggtgttgcaccaacatctgggaagacaagcatgttgcgccaggtggcgacgttggaggagacacgctgggcggcgtcgacacggaggtgggatgggtggcgtag

SEQ ID NO: 26638 - DNA, 1104 bp, Zea mays
  Peptide Sequence Number=SeqID_68417
atgctccgctcgccttcctccctccgcttgcttctccacctctcccgccgcctcctctccaggaaccctctcctccccagctccgcgctctccgcccgccctcgcttcctctcttcgtcctcctcgtccacccccggcggcgcaggatgggccacctacgacccgctcagcgacagcctcagcgcctccgctgcgctctcttccgcctccatctccgattccgagcctcccgctgtgtcggatgcctggggcgtttacgaccccgtcttgggccgcatcgtcaagcaggggtccccacctccttcgtcgtccatcaccgtggaggaggacgacgaggagggggaagaggcgggaaagctcgaggaggagaaggcgggcgtaaaggagaaggggaagaggcgggtgacagcggtcggcgtgaatgaccatgtcaggtggtcgtcggtggcggcggcgcggaggcccgctggtaagggcggcaaggagaggagctcgtacgtgtgcagcaactgcggggagggcgattcacagtggtggggcaaatgccgccactgcaatgcgatggggaccgttgacaagtacgtaggcgtagcagggcctgagagcggtggtgtcgatgtggagtggtcgcaccacatcggacgatcatggatgccccagaaggccaaggaggtggtgccacagagccttcaggaggtgggggagtttcgggatggagatatctcgagtgcttggtggtggtattgttcctggctccttgattttagtcggtggggatccaggtgttggcaaaagttcattgatgttacagctgcttcgaatatatgggaaggtttccaaggccaaggagtcttctccctgtttgtatatgtgtctggtgaggagaattttagaacactctttgctaactttgtagctctgctccagagtattgagcaaattggaaacagggctgaccggatgagtatcacgtccagcaacttgtacctctactctggtacggatattgagtgccaaaagtatatgaaactctttgttcatctcaaatctcgttttccacatgtgagttttcctcgtgaaagggcctctagccgagttggttag

SEQ ID NO: 26639 - DNA, 348 bp, Zea mays
  Peptide Sequence Number=SeqID_68418
atggttacgattgcaaaatcaaatgcacaacaggagaagattcatagtatgatggtgtggcctgtccgtcctgcggggttgggccaatacctaagcaaactctacattacagggggagcgagcggatggaaaaaatgcgaggaaggcgattgctactcgatgtgtagtaatggtatgggagcgcacattgcggcaggctggaagacaacccctaacactgaggggacgcagatctgtgaagttacggtgaaaaagattgttcgtacctatggcaatcggagagacgacgacaaagcaaacgggggaggtgcggacacagaggaatggctgccaccatggtcgctgtag

SEQ ID NO: 26640 - DNA, 177 bp, Zea mays
  Peptide Sequence Number=SeqID_68419
attggacatgttacgaaaactggcgatattgctggtcctcgcctcttggagcacatagtggatgttgttctgtatatggagggagagaggtgctcatcccatcgattgttgcggtcagtgaagaaccgttttggttcagctgatgagacgctatttcctgattcttatgtgaattga

SEQ ID NO: 26641 - DNA, 192 bp, Zea mays
  Peptide Sequence Number=SeqID_68420
atgcctctgcacactcatgtgctgattgtttttttgaatgttgtgagtggcttcaagttgactgagactgcaggagatctggctatagcagcttcaatttgcagcagtttcttggaatttcctatcccaaatgacgttgcatttattggagaggtcggccttggtggtgaacttagaactagtatatggtag

SEQ ID NO: 26642 - DNA, 501 bp, Zea mays
  Peptide Sequence Number=SeqID_68421
atggctgaatttggtctgcaagctgttctgaatccaagccagatgttcttaactgagcatgactctgattctgaaattatggctggtcttgctgtagctgttattttagatggatctaggacctttgctcttgaagttcaggcattgtgtgtttctggttatcatcgttctggacaagtagttggtataccacaaagcagggctgatgtcataatctctgggcgctacataaggtcagggagtagggcactgcacaaggtcaaggagtacggtggctcctccttgggtggtggctctaccttgggttgggcggcgactctgtcttggggcgacggcgggagcttcactcgtgttcgtcggcaaggggctgcaaccgtgtgtgccggatgctcctggtccccgttcgtcggcagctgtgcaacactggagggtagatgtgcgcctatgcggactggagggcggctgtgcgctgtgcagactgagactggagttgttgcctga

SEQ ID NO: 26643 - DNA, 207 bp, Zea mays
  Peptide Sequence Number=SeqID_68422
atggagtttgttgcatactcaggacatcgtttgcaagtgccaagaatggacaagcgagtgattgctatttcaaagctgggatacaagaagtgcgtcgttcccaaaacctccgagaagttgctcagaccacttgatattgacattgagatcttgccctgcagcaacctgaagcagcttataaataccgtgtttaggccccaaggttga

SEQ ID NO: 26644 - DNA, 390 bp, Zea mays
  Peptide Sequence Number=SeqID_68423
atggtggggaacgattcctcggccgcactcgccatctcacctttacctaccttcccataccgagcccagaccaacgtcaatcgcactcgccgtgtgcagctttgtgcgccagcgcccgctaccgtcgtcgtgcgttgcgccgccgtccgaggtctgcaaagcgggtctggggtgatcgccaaactgcgtaagtgccgcacgtacctcgacatggaccggacagccgaggaatcctacgttcacgcacttcaccgccacagaaccttccctcgtcgcggaccgacccttttcgccgcgacgattaccgacgagcaagccattgtggaatctgaggttcaacaagtagagatagctgagcaggagctcgttgaaggcaagttgtgcccttga

SEQ ID NO: 26645 - DNA, 342 bp, Zea mays
  Peptide Sequence Number=SeqID_68424
atgtactgcgaccgcaagttctacacctcgcaggcgcttggcggcaaccagaaccagaacgcgcacaactatgagcgcaccctcgctaagcggcgccgggagatcgccaccgccgtaacgcgcacgcacgaggaccggctgggccgacgttaccggcacgaggaccggcttcgttgggcttgccaacgtcgctgctggaggtggccttgccaaagagaggctgctggaagtgcagcaagccgttctggcgccgccagaacaatcgtctcgcctgctgctgcgcgacacgaagagcacgtcgtcggagtacggcgtcgagcgcccccgacgagctggacttga

SEQ ID NO: 26646 - DNA, 204 bp, Zea mays
  Peptide Sequence Number=SeqID_68425
atggaggtgaattttcagatgctccgcgtctgggatgccgtcgacatcggcatcgacgaagaccccgacgaaggcgagagtgtcaccgagtttgggatccgcatcacgacgctctccaccaacctccgcaccctcggggacaacatctcagacaccgaggtagtaaagaagatgttgcaggttgttccaaagcgcctatcctag

SEQ ID NO: 26647 - DNA, 649 bp, Zea mays
  Peptide Sequence Number=SeqID_68426
atggccctcagtgtgagatcaatgcttctgatgccctcgccttgtaccatcttgagtacagggccctatagcttgaaaaggagcgccaagtcaaaattgtccattagtccacttaatgatatccaacagcaagtggacaagctgactgcagatagtcctatggagaacaaacggactgctaggagcaagccaaaggctaaccagaaggataccagtgcaaatattcatcagcatgttaacgcccacaatcaaggacatctcaaggtcatagctggtgtggataaaagcatcaatgtgacatcaaagggtggagatgatgagttctcagagctatatacattcaaatggactaccttattgatacctcctaccacctcacttctattgaacttcattggtgttgttgttggcattttgggtgattgcattacctcccgaggcactgaggtcgttctcagtttatttggtagtgttgacttgatccttggtggcaacccctggaacgccatgatacacgagtacgcgtgcgacaacgcggaggcgcaggagtgggcgttggagttgtttagtgcgatgcaggcggaagggcggaagtttgctcggaaggtgatagcatgtgcatatgaactatacgcgatggattggatag

SEQ ID NO: 26648 - DNA, 1821 bp, Zea mays
  Peptide Sequence Number=SeqID_68427
atggcggaccttgtgcttggattggccatgtcagcggtggaggggacgctaaccgctgcgaagtcagcgatcgaggagaagaaactggagaagaatatacagcgcgacctgatgcttatctctgatgagttcgagatgatgcattctttcctcaacgtctccaaggagcgtggcagcgacgaaatggtgaggaccttggtgaggcaggtccgaaacatggccttagatgtggaggactgcatcgtcctcgtggacatgaagttccaccgctggtggagcccattgctcggctggttcccatcctgctgcagcaagctagcagcgccgccgcctatggaccttattgacgacgaagcggtcactgctatagagctgctcaagtccagggtcgaagccatgggccagaggaacgagcgctacatgcaaattggtgactgcggcgcccccaagcttagtgagaagacgcatcagcaaacgggagccgatgcaacagcggggaagacgtgtccagcgcggttgactgggcggctgtcagagtatacgtacccaacgacaagaccgcagagtacacaaggcgcactcatcgaatttgtgaaggaagtgatgagcaatcagagatacctggtgttcctggaaaacctgaccagcatggatgactgggaggccgtcagagaactcttacctgacgggcacaatagtagctgcattgtcgtgcacaccacgacgctcaacctcgcgaaatcgtgcgtcgtcgcacatcatcaagaattggagccgcaacagttttcaactgatcgttctgttcgtatcttctatgagtactgtgagagtatggatgggaataatgcggagatggccctgaagacgaaagctgcaaagcaatggatacacaggtttaaatttgttggacggcaggaggatatatggtcccttgctggcatcagcagaatgggacctgtcatggagcttgctcttggatttgcactcgggctccctccagcacacgtcagcagcagcatgctgaggatcaaagatccgattcagcattgccgtgagcttctacggcggcaccgttatttcattgtcatcgatgctcacttcgtggcccagggattggggcgattggaagattttgatgacaatttcatggggcttttggagacccacccagcatttggcagcttgaggggtctgtttgactgggtgcattcctacttcaattcctgcccggattggctcaagccctgtatcttctacctctcaatcttccctctggaccacaaaatccggcggaggcgtctagtggggcggtggatggcggaaggctactccagggacaccaaggaaaggaccgctgaggacaacggggaggagttcattgttcatctccgcaagctaaacacgaatgaactcgcagcacacgggacgacaccacaccttaccattggggagacctgggacagagacaggattgtgtacgagagcaccggcctcgggcgtctgcggtcgctgactgtgttcggtaggtggaagccgttcttcgtctctgacaagatgagcgtcctccgggtgctggacctggaggacgcgtcgtcagattcagtaagaaatgctgacctcgaacagatggtgaagctgctgcctcgtctcaagttcctctcactacgaggatgcaaagagatcactcgcctgccggactcccttggtggcctcaggcagctgcagactctggacatcagacacacctccgttctggcgcttccacgaagcgtcaccagcctactgagtactgaagctacagcttattcgtgcaggcactag

SEQ ID NO: 26649 - DNA, 216 bp, Zea mays
  Peptide Sequence Number=SeqID_68428
atggggagcgcccacgctgtgttcgtctcattgtggaaggagcgcaacctcgtggatgttggtacctttcagccatcgctcggcttcagggattttcatcaggcagcccggctgcatccccccgccgatgcttcaaggatcttcatcatccttgttggggcggagggcgagctgagccagagctctacctcccgtacgggccagcaggccacctag

SEQ ID NO: 26650 - DNA, 186 bp, Zea mays
  Peptide Sequence Number=SeqID_68429
atggccgacctctgccagcacgggaggcggctggtgcgcagatgttcacgacccactgatgcaactcttgagaatctcttggacctgtgggttaggagccacacacgctttcgctacgccactctgatcttattggttgatgttgatcgcattgtcttcattgggaccaagggccacaacacataa

SEQ ID NO: 26651 - DNA, 315 bp, Zea mays
  Peptide Sequence Number=SeqID_68430
atggggggcgcgactaggtgtggtggcgcagccgccggctggttggccgaaccccccccccccccaacgcgagctcgtcccctgccccatggtgacgacccaaggaggaaggaagcctatttcgcgaaaaagtccctatctttttctgaatttgatcgcaattcgttttcgagcttcgaggaatcgacgatcaaacttcgacgatcaagtggtcagggggctcgagcggtttctcgagtgcctctccgttgcctttggtgcaatctatgctctggtaaagaagaaggtgtcaaggcggatctccagaagttctag

SEQ ID NO: 26652 - DNA, 312 bp, Zea mays
  Peptide Sequence Number=SeqID_68431
atgtcttaccaatgcaaggtgaagactggggagaagcaaaagaaaaaggcaacaagcaaaatcttcaacacctacatcaacaaggtggaagggggccaaactcatctgggtgctaaaggagattatctcaaccatgaaaagcaccaagaatgtttggatcccgagaggaaagtgagaagtctgaaggacattggggaatttggagacttgggaaattttggatgtatatcatgggatgcgtcacatcggatcaagaatattgccaagtgggttagtgaaaattttggacccaaattcccctcccatgactaa

SEQ ID NO: 26653 - DNA, 1848 bp, Zea mays
  Peptide Sequence Number=SeqID_68432
atggcggccaaggtgaggacggagctggacgtgggcgccgacggcgtggccgtaatcaccatctacaatccgcccgtcaactccctctccatcgacgtcttacatagcttaaaagaaagctatgaagaagcacttcggagaaacgatgttaaagctattgtcgttacagggaaaggagggaaattttctggaggatttgatattagttcctttggtggtgttcaaggaggccaaacaatgcaaccaaaggttggctacatagcaatagatattctcacagatactgtagaagcaattgatggtcttgctcttggtgggggtttagaagttgccatggcatgccatgcacggattgcaactccaacagctcaattaggtcttccagaacttcagttaggaattattccaggatttggaggaacacagcgactcccacgactggttggtctgacaaaatctttggaaatgatgctgttatctaagccaatcaagggcggtgaggcacaccaactgggtctggttgatgccttagtttctcctaatgatttggtgaatactgctcgtcaatgggctttggatatatatgaatgtaggaggccctggatcaaaagcctttataagactgacaagctagaacctcttggggaggctagggaaattctgaagtttgcaagagctcaagctcaaaagcaggcagctaatcttcatcacccacttgtttgtattgatgtcattgaagaaggtatagttgcaggaccacgggctggactctggaaggaagcaacttctttccaggaactgcttttctcagatacttgtaaaagcttagttcatgtgttcttttctcagcgggcaacgtctaagattccaggtgctacagacttggggttgatgcctaggaaaataactaaagttgccattctaggtggtgggcttatgggttcaggaattgcaactgcgatgagtcgagtaaagaaaggaaaaatgaccgaggagcgatatgagaaggctatgtctctcgttactggtgtccttgattatgaacgtttcaaagatgcagttattgagaatgtgaagttgaagcagcaaatattttctgacttagagaagtactgtccttcacattgcatccttgctactaacacatctacaattgatcttaatctgattggggagaaaacaaaggctcaagatcgtattgctgttaataggatgttctttccatacactcaatcagcactcttttatgttgatcttggtatggatgtttataagattgatcgtgcttgtaccaaatttggaatgcctatgggtcctttcagactggcagatctggttggttttggtgtggctgtggccactggtatgcaataccttgaaaatttcccagagaggggtgaagccacccaaaaaggattttacaagtatgagggcaagaggaaagcgactcctgatcctgaaattatgaaatatattgaaaaatctaggagcatggcaggagttacaccagatcctgagctgatgaagctaagtgagaaagacatagtcgagatggtgtttttcccggtgataaatgaagcctgccgagtccttgatgagggtatcgccgtcaaggcttctgacctagacatcgcttcaatctttggcatggggttcccaccttataggggaggtgtcatgcactgggcagattccatcggcgcaaagtacatccatggaaagttggaggagtggacaaagcggtatgggggcttcttcaagccctgctcttacctcgctgaaagagctgcaaaagggattcctctgggattgaagggattaaatctttttgtagttaaaattgaatag

SEQ ID NO: 26654 - DNA, 102 bp, Zea mays
  Peptide Sequence Number=SeqID_68433
atgggctacacagagatcgacatccgcccctctgggagcggcaagatattgaattgggtgtatcatggtttattcgcagatctgaaaatggagaaaaggtga

SEQ ID NO: 26655 - DNA, 1464 bp, Zea mays
  Peptide Sequence Number=SeqID_68434
atgagcacctcgtacaccgaggcgcagttcggctccttgttagacctgcccgccggagacgacctcacgtcctggttcacacacctgtgcggcgaggagcaggcggcggcgctgccggcgttccaggcgccggtggcgatggcggaccccaggaagaggagcgccgagtaccagctcctggaaggggaggcgtccggggtcaagaggcagcgctccccgaccagcagctcccgggagaacagcgccggcagcaatgacggcgactacgagcacacccgcagccgcagccggcgggcggtggcggaggcagggggcggcggccgccgcctctgggtcaaggagcgcgaccacgagtggtgggaccggatgagcagccccgcgtgccccgacgacgagttccgccgcgccttccgcatgtcccgggccaccttcgaggccgtgtgcgaggagctgggcgccgccgtcgccaaggaggacaccatgctgcgcgccgccatccccgtccgccagcgcgtggccgtctgcatctggcgcctcgccaccggggagccgctccgcctcgtgtccaagcgcttcggcctcggcatctccacctgccacaagctcgtcctcgaggtctgcgccgccatcaaggccgtgctcatgcccaaggccgtgcagtggcccgaggcgcccgacgccgccgcggccgagtccgccaggttcgaggccgcgtcggggatcccgggcgtcgtgggcgccatgtacaccacgcacatccccatcatcgcgcccaaggccaacgtcgccgcctactacaaccgccgccacacggagcgcaaccagaagacgtcctactccatcacggtgcagggcgtcgtggacgcgggcggtgccttcacggacgtctgcatcggctggccgggctccatgtccgacgccgacgtgctcgaccgctccgcgctctacctgcagcgaggcgccgcgggcctgctgcaggggcagcgcctggtgggcggcgccgggtacccgctcatggactggctgctggtgccctacacgcaccacaacatgacgtgggcgcagcacgtgttcaacgagcgggtggacggcgtgcgcgccgtggccagggacgccttccagcgcctcaagtcccgctggggctgcctccagaagcgcaccgaggtgaagctgcaggacctccccgtcgtgctcggcgcctgctgcgtcctccacaacatctgcgagcgcgccggagacgccgtcgaccccgacatcgcgttccagctcttcgacgacgacatggtggccgagaaccccgtgcgctccacggcggccgtcgccgcgcgcgacaacatcgcccacaacctcctccaccgcagcagcagtagcagcgccgccgccggccccaggctgtctattagtggcaccggtactgaacacgcactatttgtgaaccttgagatgatcagctgggcacgatag

SEQ ID NO: 26656 - DNA, 309 bp, Zea mays
  Peptide Sequence Number=SeqID_68435
atggcgcggcacgccacggtggtctccttggtggcggcatgctctttctccggtggaattttactcctcttccgtccagttctctgcatggccgtaccatccaaagcaacgacgccgttgcttgattttgcctgtgatctgctgctggacgccagtcaaccactggaagatctgctgcgtccataccacacggagactaccggcagaatctcagccgcttttggatctgcgagtcccaagagacgtgctagtctatggccaccagagatttcgatagatacagcacagcagagtgttgagaagcgttag

SEQ ID NO: 26657 - DNA, 1587 bp, Zea mays
  Peptide Sequence Number=SeqID_68436
atggaaatggagaagaattgtgatgttcgatgtcgaaattgcgaggaaagaaaaggaccccgatgcgtcgtcgccggccgcgccgtggcggcggtccgtgaagcggaagctgggccgcggaggcgggggacgaggcgggcccccgcggcccgggtcgaggcggaggacgagcgcgcgacgctgcgggaggcggcggcggcgccccagtccacggcgtcggcgctgcgggtcgaggtcgaggaggagcgcctcgccgcggccagcgccgccagcgaggccatggccatgatgctccgcctgcagcgcgacaaggccgaggtccagatggagctccgccagttccgccgtttcgccgacgagaagatggcgctcgacgccgccgaaatcgaccagctccgcgcgctcctcgcccagcgcgcgcgccgcctgctgcgcctgcgctccaggctccgcgagtacaggctgcagtgcctccacctcggcatcccgcttcccgagggcgaggacctcgtcgcccagaacgccgccgaggaggaggaggaggacctcctcctgctcgagggcgaggagggctacatcgttggcgatggagggtactactaccctgagctccgctgcaacgacggggagtactactacgaggacgggcgggaggaagaggacgtggttgccctcgatctggagcgccggatctgccttctcgaacacgatcaggaacctcgcctgcttgagccaccgcatgagaaagaggaaggtacccacctttacacagatgaagtgttgccggacatgtctgaacatgaactgggtggcctctatgccgacgagatgttatctaaggaggatgtggaaacaatgaacaacctccacaatgatgatgaagaactgccagagtcgcctactgctggaaatgatgacggggaggaagcaagcgaggctgacggtgctgacagtgtaagtggcagtggcagtgatagggtatacaccattgacaaggtgcatcaaggtgcagcaatgcctattgcaagggtcgtggataagtaccaaggggaggcagtggagccggacattaagaagctttacatgaggctggaggcactggaggccgatagggagtcgatgaggcaggcccttgtggcaatgcgcacagagaaggcacaacttgtgcttcttcgtgagattgcgcagcagcttgccaaagatggagttccagttgggccgggagctggggcggggccaggtgtacaccatttgcctagaaaacacgcagttgggattgtagaaaggagattcacagaggacaagaaggcgatacttgtgaagacattttccatggctgccttgttcaagcataatttagtccagcaatgccagaggatagcactttcagagttctgtttgggaaaattccttgccaatctctatgtttatggtatagttgtagtgcttgtgtggatcctcgctttattgggcaagaaaaagaagctatctcaaagcaggcgaaaccagtacaggcaacctgctcgcatgacactcattatgctcacttgtgactggaaatctggtccagacattcagtacaggtaa

SEQ ID NO: 26658 - DNA, 3060 bp, Zea mays
  Peptide Sequence Number=SeqID_68437
atggtggcggagggcgcgcggcggcgggtggtggtggaggtgtgcaacgcgcggaacctgatgcccaaggacggccagggcacggcgtgcgcctacgccgtcgtggacttcgacggccagcgccggcgcaccgccacgcgaccgcgggacctcaacccgcagtggggggagcgcctcgagttcctcgtccacgacccgggcgccatggcctccgaaacgctcgagctcaacctctacaacgacaagaaggccatcaccgccgccggcagcggccgccggggcggcaccttcctcggcaaggtcaaggtggccggcgcctccttcgctaaggccggggacgagacgctcgtctattacccgctcgagaagcggagcgtcttctcgcagatcaagggggagatcgggctcaagatctggttcgtcgatgacccgccgccgccccctgcaccggctgcggcggaagagaaggaagctgcggcagcggcggcgggcgaagggaaggatgtcaaggacaaggctccagacgctgccgccgcaccggctgctgaggagaagaagccggagacggcgccctccgaggagaagaaaccagcggaggccaaagcagaggagaagaaacccgagtccgcggagaagaaggacgacaagaagaagtcgccggagaaggggaagaaagacggcgacaagcccaaggaggaaggcaaggctgagaaagacaagaaggacgcggccgcgccgccgccctctccatccaagctggcgccgccgcgctcgccgtccaagaaggacctggcgatcgccggggtggctggcgacctggagatccgcccccagagcgccgccgagaaagagcatggccgcgtcggggcgccagcgcctcgtacgatctgctgtccatcggcacccacgccgtgcgcacgcgcgcccgccacggccgccggcgagtgggacctggtgttcgccttccacaaggacagcctcaccgacacctcgctcgaggtcaccgtcctcgaggaggccaagaagccggccaaggagggggacccggttccgccggaggccaacctgggtttcgtctccttcgacctccaggaggtcccgaagcggtcgcctccggacagcgcgctcgcgccgcagtggtataccctcgagggacacggatccgaggacggcgccgcggtctgcgacgtcatgctctccgtgtgggtcggcacgcaggtcgacgaggcgttccaggaggcgtggcagtcagactccggagggtacctggtgcacacccgctccaaggcctacctctccccaaagctctggtacctccgtctcagcgtcatccaggcgcaggacctacgcttgccgtccccgccggacgccaaggcgaagcagtgcggtcccatcttcccggagctgtacgtcaaggcgcagcttggcgcccaggtgttcaagaccggccgcgtccagctcggcagcgcggcggccgggacggccaacccaagctggaacgaggacctgctgttcgtcgccgcggagccgttcgacccgttcctgaccgttgtcgtggaagacgtgttctccgggcaggcggtgggccaatcccgcgttcccctgtccacggtgcacaggcgatccgacgaccgggtggagccaccgtcccggtggctgaacctgtgcggcggcgaggcccggccgtacgccgggcgggtgcacgtgcgcgtgtgcctggagggcgggtaccacgtgctggacgaggcggcgaacgtggccagcgacgtgcgcgcggcgtcgaagcagctgtcgaagccgccggtggggatgctggaggtgggcgtccgcggcgcggccaacctggtgccgatgaagatcgccaaggacggcgcgagcgggtcgacggacgcgtacgtggtgctcaagtacgggcccaagtgggcgcgcacgcgcaccatcctggaccagttcaaccctcggtggaacgagcagtacgcgtgggacgtgttcgacccctgcaccgtgctcaccatcgccgtcttcgacaacgtccggtacaaggccgccgcagccgacgatccggggaagctgcccagggactcccgcatcgggaagctccggatccggctgtcgacgctggacaccaaccgggtgtacgccaacaccttcgcgctgacggcggtgcacccggtgggcgtgcgcaagatgggcgagctggagctggcgatccggttcacctgcccgtcgtggctgacgctgatgcaggcgtacggcagcccgctgctgccgcggatgcactacgtgaagccgctgggcgcggcgcagcaggacgtgctgcggcacacggcgatgcgcacagtgtcggggcggctggcgcggtcggagccgccgctggggccggaggtggtgcagtacctgctggacacggacacgcagtcgtggagcatgcggcggagcaaggccaactggttccgcgtggtggggtgcctgtcccacgtggcgacggcggtgcggtgggcgcaccgggtccgcacctgggcgcacccgccgacgaccgtgctggtgcacctgctgctggtggccgtggtgctgtgcccggagatgatcctgcccaccgtgtgcctgtacctgttcctggtgctgctgtggcggtaccgcgcgcgggcgcggcagccggcgggcatggacccgcggctgtcccacgtggacagcgtgagccccgacgagctggacgaggagttcgacgggctcccatcggggcgccccgccgacgtggtccggatgcggtacgaccggctgcgcgccgtggccgcgcgcgcgcagacgctgctgggggacgtggcggcgcagggggagcgcgtggaggcgctgctgtcgtggcgggacccgcgcgcgacggcggtgttcgcggtggtgtgcctgctggcggcgctggtgctgtacgcggtgccgttcaaggtgctgctgctggggatggggttctactacctccgccaccccaggttccgcggcgacatgccctccgccggcttcaacttcttccgccgcctgccgtcgctctccgaccgggtcttctag

SEQ ID NO: 26659 - DNA, 456 bp, Zea mays
  Peptide Sequence Number=SeqID_68438
atggtgttcaaggtaacagaagggacgatgcccacccttagagttagatgcacaatggagctcaagcggtctaggtcagcctcacatcttccatttgtaagtctctggcgccctctgtggcccagcctagtaggagttgatcttgcaaacccgaacctcctcgagatctctatccaaggtttcatgcatcctaaaaaagaggaaaggtttttctcccaatccagctccaagtacacaggatccattatcatatcctcggccaaggtgcataaagttcacatacacatacaaagaaaaagaccttgggacaattctacaagtttggagcaaacagacttactgcagccaatggcacaccagacagtgtccggtgaacgggctggagccctccgcgaactggccgttctcaggttttctcaacgcccgtccactaaaaatcaccggactatctggtga

SEQ ID NO: 26660 - DNA, 711 bp, Zea mays
  Peptide Sequence Number=SeqID_68439
atgtcgtcgcggaagcatcatgagctgccggagggaggagcagggggaagcggcgccggccgcgtggcggtgtgggacaccgggagctccctgtacgactcgtacgagctggccgccgtgcgccggctcctcgacaagcgcctccttgccctccgcgacgctgaagagacgaggggcaagggcaggcaactggtggtcgtgccggtcgtcagcagcaggggggtccaccacagaaggaaggccacgctgagggcgctcttcagggcggtggccacctgtgcggcccggccgaggcaggcgccgccgctcgcctgtgcctgcgctgctggcatggtccatgaccaccagggtggttccgcggtcgagccggaggatctgccgtcccacgcgacgacaccactgttggcgcagcccctcaggacgtcttgggtcttggctggcggtgtcggcggagctcagctaccagaagatgacccaaaggctgtttcgggctggggcaccggactgtccggtgtgcaccggacagtgtccggtgcgccagaccagcgtggagcaaaccagccgctctcgggtttttctccggcgacttcggctaaaattcaccggactgtctggtgtgcaccggactgtccggtgagccaacggtcggccgggccaacggtcggccgcgcgatcggcgcgcgacacgtggccgagccaacggtcagaaag

SEQ ID NO: 26661 - DNA, 5139 bp, Zea mays
  Peptide Sequence Number=SeqID_68440
atggcctcggatttcgacgagaccgacgaagccttcttcgacaagctagtcaactccgacgacgacgacgatcccccggccgccgccgccgtgggggggctcgctgcgctatcgctgaccgatcaacccgacgcgccgccgcctcgcgagtccgagcctcgtgaccagcctgctgctgctgctgcggcggcagcggcaccgacggaggatgcggagcgtgagccctcgccggaggtgtatcctgcggccgtgctgctgcatccgccccccgacctcgctgccaccgtcggggcagatccggccggggacctcctgccggaagacggagaacccttctccggggccgcggctgtgccagaggatcatcagggcctggagccgtcgctgtcgtcgtctctctcagcaggcaccggcgatggcagcgcgccggatcgcaccgtctctggccacacggagagcaatgccagttcccagttggattccagcacagctgcggaggggtctgggcatcagagcgccaaatcgcagctggagtacacggatcccaggtatctagagagcctctaccctggctggaagtacgatgacgctacgcagcagtggtatcaggtagatactctcagcgcgcagagctatgctgctcagaatactggtgctgctgtggcagaccataggagtgatggtgaccttcagcagaagtttggtggttcttacctgcaaaacacttcacacgcagggactgggcttgaacacaggcagacggcttctcagcctgagactgaggctggcaatcagcctgcagtggcaccacagaaagagggggaggcacagtgtgaacccaagccgatgcatacagaggtgggatatggggagagcaatgccacttcccagttcgattccagagctactgctgagggatacggggatcggagcgctgatgcgcaggtggagtacactgatcccagatatctagagagcctctaccctggctggaagtacgacgaggccacacatcagtggtatcaggtagataccctcaacacacagacttatgctgctcgtgatactggtggtgctgtggcagaccttgcgagtggcggtagtgttcagcagcaccaacagtttagtggttcgtacatacaaaacacttcacatccagagcctgctcttgagcttacagagccgacttctgagtcaaagcctcagcttgagcctgcggcggcccctcctcagaccgatgcttatcctgcggtggcatcacataaagaggagcagaaagagcatggatctgtaccggtgcatactaagcctgaagctcaggagattcctgccaatgctggtgatactgccacagtgacagagggtgggtccccagggtcagagaaaggcatccataccgccgtcaagcaagtgcagtggaacgactttggtgccagcactggtggggcggatctatttggtgacctcctgcccgatggagctgaagatgacttctttgagggcaccgtccctgtcagccaagacgtctcatccttggtaggtgctacaaatgttagcgcaccagatcacagcttctctgcaggagtgtataacactgccatgattagtgctggacacagcttctctgacggagttgataaaaatgctaactctcatttcggtcccagtggaagtagtgcagggtacggggatcaaagcactaatgcacagttgggctccactgatcccaaatacctggagagcctctacccggggtggaagtatgatgaggcgacacagcagtggtatcaggtagatacccacagtgcacagagttacgttgctgataatactggtgctgttgtagccgttgggagtgacaatacacagcaacatcagcagcagtttagtgcatcgtacttgcaaaacaatttacatgcagcacttgaaaccattgcggaagagagcagcaccaatgccatgagctgggtccagggtgggaccaacacaggacccccagaatacccaccgaacatgctgttctacgcagaatacccaggatggtactttgacaccaacactcaacaatggcaaacacttgagtcataccagcaaagtgttgcacatgttgcaactactgcagcagcctcagatgggttcgcagggacatgccataatgtagctcattacactgaggattcttatgcaagtagctataaccagcagagccagtggcaaccggattcgttcggtaataccatgcaggctgatgttttggggggcaagagcttgctaggtagttcctatggttctaatcagcaggctgggaatcagattgggcaacaggccaatgtggactctttaaatcacgagcctcatagttggtacagtggtttggagcattctacaagtaaggaattaaggtacaaaggatttgaaccttcaacaggtttccagactagtcgcaaggaattccagcctcctaaagatcaccaggctggtcacatggcagatgaacctttgacaagatatgggtatggtagttcaaatggggtcgtcaatacacaaaatttcgtaccaaaagagggtatgcacaagacacaaatgcatgatgactccactgcgcatacttatgctgcaagcaactattggggtactcagacctccatgggcagtgctcagcagcaactgactggtacaaatggtccatcccaacagtttggtttctcaccacatgagcagagatcatcagctggacgcccaccacacactgtggtatcctttggatttggggggaagcttgtagttcttaaagaaaccagctctatggctgcaaactttgacagcggaaatcagggcaattctggtcgaacggtatcagttcttaatattccagagattgttgctgataaaattgatcattcaagcatcgctaacggtggtgcatttagctacttccatgctttgtgtcgccatcctattcctggccctcttgttggtggaagtgctgcatcaaaggatctgaataaatggcttgatgatatgagtggcgtatatgaatcttctcagacagaattccagggaggggatgttcagaagactactgcccaggaggttcaaagtctcttggtttctggtagaaggaaagaggcccttcaccaggcacaagaaggtcacctttggggccctgcactgatccttgctttacaacttggtgataagttttatgcggatactgtgaagaaaatggcccactgccattttgtttctggatcacccttgaggacactgtgccttcttattgctggacaacctgcagatgttttcagttttgagaatcctgttaacagtggtttgtcttctccccaacagcctgtagaggctgctcctaaaggtatgctggatgactggcaagagaatttggctattataacagcaaacaggacaaaaggtgatgaccttgtaattacccgccttggggattgcctttgggaagagaaaaatgagggcggttatgcaacaaatcttgcccctggaaagattgttggaaagcttttcacatcacttgataaatctttgtcccgaatgatgggtacacaatctgcaccgttgcctcaactgccgcagggtgctgcaaatgagagagagcagtctatgagtgaaattggaggaaatagtgtctatggcagggaagttgcacataacagaagtatttctgaaccagacttcggcaaaaccccccaacagcagggtgctgctgtatcaagtaaggcacagagcacatcaggttcaggcagttcacgctttggatggttggtgcagaagacaatagggcttgtttcaaaatctcaccgccaggcaaagctaggggaacagaacaagttctactatgacgagaagctgaagcggtgggttgaagaaggtgctgagatccctgccgaggagcccccacttcccccacctccaacaaaagtgccattccagaacagcgttccagatcccaactccaatgctcctcccactggtggaggttattcctcaaatcctcccgagcctagttccgggatgccaccgatgccacccacccagaaccagttctcagcacgtggaaggatgggtgttagatcaagatatgtggatacttttaacaagggtggcggtggtggtggcgcaaatgccttcggagtagcaacatcttatagcaaaccagcagctccttcaatgtccggtgcgaagttccttgtgccaactccagtcaatgttgcttcagaacagatggctgagctaggtgcccacagtgaaaccgcccgacaggatgaatcgtcgtcctcaccagcgatggaaacatcatttagttcgccgccatcactgatacagatgcagtcaagcattccgcggtacccaagcggtgacaacattccacggtacccgagcggtgacaacattccgcggtacccgagcggtgacaacattccgcggtacccaagtatggataacgtcagctcccccacaggcagcattaacagctcgatgtcaaggtcaagagcgtcatcatggagcggaacgtacccagagcagttgagcagcactgccgcttccaggtcacctgatggacagatgacgcagtcaccatcgatgcctggaagaagacctccgcacagccgttccaacagcgcgtcttcttccgcccagctcaatggtttgggtgaggatcttcacgagctgtcgccgccattaccggggcatgggcgaccttcccctccgcctggacctggattccaggagataaaagggagcctctccgtgacccgtgctgacccctgccaactcctcgcccactcgcgccacaatctgttgcaaaccagtgctgctaccgccgccacgagttcggatctcgtcgccgtcgtcgtctggcaagtgtacgagtgctcacgcctcggagtgagggtcggcgtgcttgcggcgtggccccagtggtgttcgcagactcccctgccccagaacttaagctacctcgccggagttcaccggcgcgtgggtgtccgccagggcggcgtcgccgtcgccgcgatccactggggaaagaagagggctcgtgggccgtctgatccttctcggtcgactgcgattagaagtcaagataacctttcgcttcgttaa

SEQ ID NO: 26662 - DNA, 408 bp, Zea mays
  Peptide Sequence Number=SeqID_68441
atggacgtcgaagctatagttgaagagcttcggcttgatgggatgatgaagaccaagtatgatgatgatcgaaaaggaataaagactattcagtccttaatgtttcgtgttatcataatagatgaatgtcagggatataaatccagtagagggttcgtcggtggcctctacataagcggggcttcaacaactcctcatcggcaccgccttcgtggtcgtgcaatgggtgttcatgtcgtactgtcgttgttgaagctctcccccactacgtccgagtctagcggcagcaagaacagctactggggctacctcatcgaggagaaggggtcgtggcaggaacttttctcccacctctcacatctattccacacatcctgtggagactataaatcacaagctattttataa

SEQ ID NO: 26663 - DNA, 186 bp, Zea mays
  Peptide Sequence Number=SeqID_68442
atggcccccggcaaggccgtggagcttggagggttacgtagcaactccctggctgtagacaatgccccaccaggagcagcccccgacggagctctggatgactgcgcgggcgtgtgctgctgcgcagcatgcatagcagcagcaccaggcgcagggcggaacacaagaacactcaatggtttatag

SEQ ID NO: 26664 - DNA, 1242 bp, Zea mays
  Peptide Sequence Number=SeqID_68443
atgtcagcttccgagttcaggattccataccagcaagtttcaccttcgcagcctgctgagaatgtaaatcagtttaagacctgtcgatgtggggagggagacccgaactccacttctgaaactggtgacagtccaccggcctcttgtcctaattgccaggtccttaagagtggacatttactactttcatctaaaggaattggatggacatcatggaaaaagcgctggtttgttcttacgagggcatccctagtgttcttcagaagcgaccctgctcggcgctgccgttacctccctgtgctgctcggcgctcgccgcctccgctccgtatctggctatctaccctgctcagcactcgtgctcgccactccagtgctccagcttgttgtcccttctcgctgtcccattgctgctcatgctcgccactgcctccctttgctgctcctgcccctgcccctgctctcatccttctccccttccctactgatttgctcacattctcctctgattttggttatgatgatgaagcaacaaacaatagtgctggctatggtgatgaacaagacaaagacaagaatgatggtgtcactgacaacagcctacaagtttggcattctaataattcctagagttgaaatcagtgtgctgctgtacaatccaagtcattaccagaatgtgccgccacccagaggagctgaaccaattgttacacttggtggaattgacttgaataattctggaagtgtcgtcatcaaagaagaaaggaaacttttgacagtgttctttcctgatggccatggtgaacgaactttcactctgaaggcagaaaccacaggagatctaaatgagtggagaaatgcactggagagtgctatagctcaggcacccagcatagcaaatacaatggggcaaaatccaatattcagcactgatgtagaagcagaatctgctgaatctccagctgaacattcggaggaccgttctgttattggcagacctgcaaaatttgcacttgtagatgctgatggtagtccatcattcttggagaaggccctgaagttcattgaagatcatgggaaaaacgagttctctccagaagaggatgctcatgttattggtgactgtattaaggactcggaagaaggttcctgttcttcagatgcttatacggagtctgaggatgatgttgacaaggaatattccacagataatgacacccatgatgacgatggttctttatga

SEQ ID NO: 26665 - DNA, 150 bp, Zea mays
  Peptide Sequence Number=SeqID_68444
atggcggagagcaagcggctccccatccctccgtccgggccgtccactaagtggaactacgaggcgaatcacgagaagccgtcgtcgtcggagtcgggctcgggccgccgccgcctcgggtggtggtgcagaaagaaacctaattactag

SEQ ID NO: 26666 - DNA, 174 bp, Zea mays
  Peptide Sequence Number=SeqID_68445
atggccaagcgaagtcatggcgtcggtggcggtgcgggtgtagagcaggagagcgcgaagagccttccatgtggtccagagaaggtgatatcctccaaggcatcaacagtgggccaggacccccacaggagagcaccggacccctggatatgcagtctggacctccagggttga

SEQ ID NO: 26667 - DNA, 480 bp, Zea mays
  Peptide Sequence Number=SeqID_68446
atgtccaaattagggaggtctcgaatgatgttgtactttcccattccccttccttccttggtgtggggatatgagggcgagtggttctacgtacgaaacctggggggcagtgcacccacgtttactagtaatgtcgcggtggtccaactgcactggtcttatggcgcggagaagaagttcaggccgaagatcgactatatgctggccgccattgccaagcggcgtggacagggcctctccggcaaaaggaaagtactcctgaaagggaaatatgcccttgggccatttctaagtattttggtgattaagtgtccaacacaagtgcctaagtgtaaaattgtgccaaggactcaagaagtgcaaatcaagattaaaggagaaatcaagattggaaaagagatggctttgttcagccaaagactgctcggtctgggtgcaccggacagtgtccggtgcgccaggccggtgtctgtcaactag

SEQ ID NO: 26668 - DNA, 585 bp, Zea mays
  Peptide Sequence Number=SeqID_68447
atggccgcgctcataagaggaggcaaggacgaacacctcgtcgtcccacgaggccgaggcaccaccctcttcctgaaggcgccaccccaagacttcatggggagagaaaccatttcttctctaggaaacagacatatcaggcagagcaccaaagagagcatgagatgggaagcgataatgggcaggatgtttcctgcctatgcatgccacgcgcgcacgatgcaacaacaaggctatttcgcgtcccgtcagatcacccacgtagagcgacgtaatgatgaccccatgtattaccgtgctagcgagggcgccacaccaatcaggcgaaagcctctatacaacattgagcagttgcgtaaaggctcgggggttgctgtcgggcactcaagaatggggcacccaaagaaaagcttgagaaactccataagaacggcccattcgaccaagtcccccgccaagcaagtctacgaggcgcgacaggcgaccaagcccccgccgagcgaggcggagcgaacgaccaagtcccccgccgagcaagtcggtgaggcagggcgggcgaccaagtccctcgctgagaaagtttaa

SEQ ID NO: 26669 - DNA, 168 bp, Zea mays
  Peptide Sequence Number=SeqID_68448
atggcggtcagacgagggattcctacattgctcttcctagaaactgtagcggggtacaacctctgcagagtacaaaactggagcttcggcatcaagtaccttcagaacaggatgaggacagaaacaaagatatttaggcttcatcacaataccatatgggaaatgaag

SEQ ID NO: 26670 - DNA, 222 bp, Zea mays
  Peptide Sequence Number=SeqID_68449
atgagaagactaggagccatcaaaatgaaaaacaagagtggtgagttcgaccacgaagaggaactgaggaagctcgacgggatggcgcccaggggccgctcaactgccggtagccgagggagggcaaggcttcgcccactgtcgcctcgtcgacatgggagggaggaggaggacgtcgagagcgaggctgaagtctccaagcaggcgcgggaactaatttag

SEQ ID NO: 26671 - DNA, 1917 bp, Zea mays
  Peptide Sequence Number=SeqID_68450
atgacggccagatcggacgatcccggcgtctcgccagggacgtcggcggcggctggcggcgagatctggggcacgtgggaggagctcctcctggcgtgtgccgtacggaagcacggtaccgccagctgggactccgtggccatggagatgctgtcccgctgccctcccgccgcggccgacagcctcacgcccgctgggtgccgcctgcggtatcgcctgctccaccgccggttcaccgccgccgccgccgtaaacggtgacgaggagcccgacgcggcctccgccgactgctgcgtggaggagctccgcaagctgcgcgtcgccgagctccgccgcgaggtcgagagatacgacctctcgatcgggtcattgcaatctagagtggaaaggcttaaagaggagagagcgaggagcatctccggcgaggccaatccagtaccggcggtgaaggaggacggcgaggaggagccggcggaggggaggaaagaatctctggaggaggagggcgacgatgccggcggcggggaggaggatcgtgtctccggcggcgagtccgggcggtcgtgcaaggagtccaactcgtcagatctgaagcggccgcggccagcgcgagacgccggggacggcgacgcggcggcgaggagggaggacgagggggcaggagacgccgcccgcgagtcgtcggctgtgaagcgcgagcaggtctccggtgagtcggtggttgggtccaaggacacggtggcggcggctgacacggagaaggagagcagcgacgtgcagagctcggccagcccgtcccgtcgccgcgagcgggagatcggcgccggcgaggacgcggatgtggcctcagcgccgccgccgccagcgcccgcagcggcggtcctccccgctgcggaggccgaggcgttgcgcgcgttcctcgaggtggtgcgaaccagcaagccgggctccgtgttcgagcgccggctcgagagccaggatattttttcttttccactttgtcggttctttcgctgctccactgaccgctgggcccaaaaatgccgctcgcaggacgacgcgaaatacaggtgcaccatcaggcgccacgtggacctggagacggtgaggtccaggctggacggtgggtccggcagctacgcctcggcgaccgagttctaccgcgacctgctcctgctgtgcgccaacgcgctggtcttctacccgcgcggctcgcccgagcgttccgccgcggcgcggacgcgcgcgctcgtcgccaagcacatgtccaaggaccagccggggccctcggggaaggctgtcgcggggccggcggcgtccaagaaggccaaggcggaggccgacgttgggtcgctgctggagaagacggcgcccatcatcgtgtgccggaagcggagctctatcgccaaggccgccgcggcggccaccgccaaagaggagagatcggagaaggcggagtccgacaaggagggcgagaagcagcaggaggcggcgtcggctcagagccacaagggggcgtcggcggcggcggacaacggctcggacagcgacgcaccgcccgaggaggccaagaagcagcctgccgctgacaagaaaggtggtggtggcggcggtgtcgccaagaagcgcaacgccgtcaacttcctcaaccggatgaagcaaggtggctcggcgccgtcgacggagcgggtgtcgctactggagacgctgaagctctcggccgcggcggagcagaagaaggccgggaaaggcgagggcaaggagcccgcgggcgggtccggttccaagaaggccacgccggggaggaggaacgttggcaggccaccgaaacgcgcggctgccccctccatccccgccaccgtcccaagagggcaaagggcggcggcggcggcgggaaacgcggggggcaggaagtga

SEQ ID NO: 26672 - DNA, 342 bp, Zea mays
  Peptide Sequence Number=SeqID_68451
atggcgaatgatctggcgccgggacccagggtccaggtgcgaggcggtggtgatgctgtgtcgtcgttggtgtctgtctgggatccagctagcgccaagcggggcctactaggccggccgctaccccggcctaccgccgtcggtaaccggccggaagccgcgcgccgcctcctgctccgcccgcgctctcgtcggtcaccaactgtgtttcctttttcgatcgacgtcacagggtgggtcactgtggcagtagcgttctcttatcccgaggcagcagggacgtcacagggtggatcgcgacgacggacgtcggacggacggctgaagaatctacgcacgtag

SEQ ID NO: 26673 - DNA, 381 bp, Zea mays
  Peptide Sequence Number=SeqID_68452
atggaagcggccacttggcctgctgtgggtgtcatgcccggtagtgagctggagaagcctgccatgcagtgggagctgtccgcttcatgggaagaaaggaaaaaaagtcgcagcgtgtgggcgtcaagtgcccggctgagcagcggagcgtggctgggacctgggagtcaggtccagcagcaaggggaaccgaataacatggcaatcatcgtgggaccaattgttcgttggtgcctgaaagtagagagtagtgttggtctactctcaaatgacgcgttgatcgtcgtgtctgatctcactgatggagtagcccgagatcttccacatgcccgcgtaaaagcaggtttccacggctttggccagacggagtgcaccccatga

SEQ ID NO: 26674 - DNA, 1335 bp, Zea mays
  Peptide Sequence Number=SeqID_68453
atggccccccgcgcgcgctcggccttgtacttcttcttgagcgtgtcgacgcggttcttgcactggatgtcgagacgaaggaacgaacgggtgaatagatgtgggggcggcgatggaggagacgaggcgggggtggtgaatagaagaagggagagggggtggtcggcgaggggggaggagcgtcgggccgtgggccatgatgaccgcgacgcggcacgtggaggagcggtgcagatgcatggttgttgtttggatcctcgtgtcggtcggggcaggtttgaccgggacaccaagccagcgagggattaccggattagcgactccctcgcgcaggcacgtgcctccatcgtccgcgcatgcacagttgcagtcacgccctcagagctaggtgccccaaactgcacacccaacccctaccctttcatcctcaccgtgaatcgacggcggcatgggcgccatgatcgtgcgcacggaggggtggtggaggatttctgtggaaaaggcaaacttcctgttgatggagatggcagtgactggttgtcattccaacttagtgatgttaaggttcttgtgaatgaaattacttctgttctgttgaaaaggatattgcatgaggttcctatggatatagttacaaggttattggatgttctcaaggttttctctgctttggagtccagtcatactaccatggcaattatgacccaccatgataacaaacaactagccaacaggcgcatgcgtggtccctggccccctccaagcggccacaggctccctcaacgtcgcgcctggcagttggtggaatgggttcttcgccgatgtcgtaggtgcctgccacatgaagccgaggaaacttgccatacatttcccttccagaatcaaacttcacaggcatcaagttcagtcccgggcaacaacattactgctatgacctcattagtctcgtgtgcaattctagaaactggcacagatgatcaggttattgacaactatggtaagggtaggccttcagtcatgaaaactaccaggctgttgcttgatgactatggctggaggggcttttatagaggtatgtacactaccggaatcgggtgctttgccgagtgcctgaagcactcgacaaaccctgaaaaacactcggcaaagtatttgccgagtgtcgcactcggcaaagtatttgtcgagtgtcgtactcggcaaagagagctcggcgaacagtgcatcggtaaaggattctttgccgagtactttttatcaggcactcggcaaagactttgccaagtgccagacggtactcagcaaagaaaagcgaccgtcatagcgctggggtga

SEQ ID NO: 26675 - DNA, 648 bp, Zea mays
  Peptide Sequence Number=SeqID_68454
atgggccccactgacagccgcctgcgcgctggctccgacactgcattcgcgggcccacggatcagcttctcaaccgcgcgcctccgctttccctctcactgcgccaattccacgggggtcccacctgtcatcccgctcggctcgacggaattccacgtcggagctcgttcggtgcagtggatccgccatgcccccggcaccgtgcgtcctctggtgcacagccgcctctgttgccgccaccgcggggctctactggcggccatcatcgtcctccgcgcccgccatcgtttggctgctactggggggtcgtggatgcgtccgtgtgcgattacgaggagggcatgcgcgcctgcttcgatgtcgtggtggccgccgcggtgcgaagcttttggtgggcggtcttggggaaccgcaggtgatacccgcgcgttgttggggtggttctcggcgaggtgttttccccagtggcgcgtcaattgctcatcggagatccaaattgtcgtcaagtcgctatttgccgtggaaagctcttcctccaccgattttctcgctgaccaccgtgggggttgtgcgccgtcgcgccctggtgtgcggcagggtggaagatggctgttggccgttgatgataggttggacggtagtgattag

SEQ ID NO: 26676 - DNA, 279 bp, Zea mays
  Peptide Sequence Number=SeqID_68455
atgtcgtggtggccgccgcggtgcgaagcttttggtgggcggtcttggggaaccgcaggtgatacccgcgcgttgttggggtggttctcggcgaggtgttttccccagtggcgcgtcaattgctcatcggagatccaaattgtcgtcaagtcgctatttgccgtggaaagctcttcctccaccgatttgctcgctgaagagcccgtgaccgaggatcctggtgagcagcaagttgaagtagctgagcaggagctcattgaaggcaagttgtgcccttga

SEQ ID NO: 26677 - DNA, 441 bp, Zea mays
  Peptide Sequence Number=SeqID_68456
atggggaagaggagcggcagcagtaggaaggacaagaacaaggtcattctcccaccggagctgccgccggaaatacacgacgatgaggtggatgtcagcgaggaagacatcgagttctatgccaccgacagcagtaacgttacacccttccgccacttcgacaagaagtccatcgacaggtatgtcgggagggttgccgggcgcgacgagggcgaggtcgagcgcctctacgaagagcgccagaagcggaaggccacagaatcgtcggggagaccccgcgaggatgatgattatttggaggtcgaccccgtcgacgcactccccaccaagacgctgcaaggggagctcgtctacaatagaggtaaaccgttcgtggttccagtagatacacaatgccagtggctaatcataactatcaagtccgagtttctagtaacgtga

SEQ ID NO: 26678 - DNA, 477 bp, Zea mays
  Peptide Sequence Number=SeqID_68457
atggtcgccgtagcccagctcggccgctcctcctgctccctggcgcgctcgcccatgccgcgtgctcctccatggccactcggcctggccgcggtggcgcagtcggcggccgacttggaccggccgcgcactggtggcgtttgggaagctgcgggcgcaggagctctggccgtgctccctactgccgttgccatggccgcggtgccactttccctcgccatggagctcccgtgcacgcgtgccccctggtggtttagcttgctgagtctcttccccagtctgagctctctctctacctgtcgtcgcgtcgttcaccgtcgagcctcgctgcccatcacggagttccctgctgtcagcctccgcacccgtcctagaccgtcgttcaccgtgtcgacgacttgctatcctcgcgctcacgcttcgtcgaatgccactccagtactcaccaggagaagatctttaacagttgattactga

SEQ ID NO: 26679 - DNA, 666 bp, Zea mays
  Peptide Sequence Number=SeqID_68458
atggccagcttcgaccaatctagccagatgtacgaacatgactcggacagtaatatagatatggagaatgtggatgccccatcaaagaaatctcagaagggcacaaagaaatctcagaagggcggaaaacaaaaggttgtgtcgaggagaggaggttcttttaccaaagaggaggatattgtgatttgctcggcattcctcaatgttagcaaagaccctattacaggtgtcaatcaaaattcgggtgggtattacaaacgcatgcatgaatacttcaacaagcgcaaaccagaaggttccaaccgtagccagatctcaattcaacataggtggggagccatacagaaggcagtgaataagttttgtgccctcaaatcatcagtagataggcgcaatgagagcggtaaaagcgagcaggatcgaattgatgatgctgttttcatgtatgagaagggtgaaccctttgtcttcatgcattgctggaagctacttcgcaacgaggcgaaatggaacaataggttcctagagaccatcagtaagccaccatcttctcaagtgccacccgaggcagaatgcatgccaacacatacaatttgtagcagccaacagagaaggagcagggctaataagcaagctgattacagttctaggaaagaggttacataa

SEQ ID NO: 26680 - DNA, 1962 bp, Zea mays
  Peptide Sequence Number=SeqID_68459
gcgaacaggagcgataggactgtggccccgttggctttcaccaactacgatgactcacactcatgtacaacggctactgttcccccacgacgtccgccaacttcgtatgggacacacatacgacaaagcgtgggctggccctcggggagaaactccgcatcgcccgaagccgacctcagcctcggaaaaactccgtctcgctcgagctctacctcggctacctgcccccccgcgaatcccgcaggaggccactcctttgactgtgtcctgcacgggtccaagccccatatcgggctcggccacgacctcggggagacttccgcctcgcccgagcatggcttcggcctcgatattaccaacgaaagagcgcccaacgtcaccaaaagcaacagagttgacgtattaccaggagcttttcgccatactcaccactgctccaaccactatgacttggacaacttccccatcagacgggctcgggtacgtgacggagccctcggctctctgcgtagtcaaagatgcaaatacaggaaccggacatcctcttcccggcacaagtcaaacaacgagtacaagggccataccggctacaggggctcgaccatgcctcctcaccgtgcgcgacaaaccccggcacacctgaaggctctccttgaggctataaatagagacatccaggacttcaagcaggggggcaaacacttcactgttttctcctccacgacgatattggcacttgcctcaatcaaccccagggacttgggatccttccctctcccaaccagctttctttccccggcacttcaagagtttgtcggcgcctctgagttagccaggacagaggttgtcaagaagctttgggcatatattcgagaaaataatctgcaagaccaaaacaataggaggaagattttgcctgatgagagattgaagaagatcttcaatgtcaattccattgatatgttccaaatgaataaagctttgaccaagcatatctggccattgaattctgagggaaagaagcaaaagggtggctcttcaggagctggatctggtcttcttgtgccccttcaactttcggatgatttaatgaaatttatcggcactggtgagagcatgttatcacgatcggatgttgtgaagagaatgtgggactacataaaagagaacaacctgcaggtagcagccgctgttgtttgcatggcttggaggtatctgaaaacttcgatgctcggggcagctgcggcttcatccaatgacgacgatgaccttgttgctgctgctgctgcagtggtcatccaggaacttggacgcaaacgacgatggggagggtcagtcccaggccacaggacgtacaggcgtgaccgccttgcagcacatcgacagctgcacatggactactttgttgatcgtccattgtacaacaatgaaatgttcagaagaagatttcgcatgaggccggaactgttccatgacattgtgaggaagattgctgccaagaaaaaatacttccaactgtcacgtgatgctgcaggagtattaagtttcagtcctgaccacaagtgtgctgtaggtatcaagatgctagcatacggaggacctgctgattcaatggatgaataccttaaaatgggagagagcactgtccttgagactttgaaggaatttgctttggctgtggttgatgtctttggcgatgaatttcttcgcccacccacaagtgctgagatagaacgtatattgaaacggaatgaagaaagaggatttccgggaatgatcggtagcatagattgcatgcattgggagtgggctaactgccctaccgcattggccggctcccacaatgacattaatgttttacaccgctccaatgtatttgatgatttggctaatggaatagcaccacctgttgagttcaatgttaatggcaacacctactcccttgggtattaccctagctga

SEQ ID NO: 26681 - DNA, 954 bp, Zea mays
  Peptide Sequence Number=SeqID_68460
atggcagggccggcgccggatcgggccgccctgactgtgggtccgggcatggacatgccgatcatgcacgacagcgaccggtacgagctcgtgcgcgacatcggctccggcaacttcggcgttgcccgcctcatgcgcgaccgccgcaccaccgaactcgtcgccgtcaagtacatcgagcgtggcgagaaggttattttaacaccgacccatcttgctattgtcatggaatatgcctctggcggtgagctttttgagagaatatgtaagaacgtgcgattcagtgaagatgaggctcgctacttcttccaacaactcatttcaggagtaagctactgccattcaatgcaagtatgccaccgtgatttgaagctggagaacacacttctagatgggagtgatgctcctcgcttgaagatatgtgacttcggttattccaagtcatctgttcttcattcccaaccgaagtcaactgttggaacacctgcttatattgcacctgaagttctgttgaaaaaagaatatgatggcaagattgctgatgtttggtcatgtggtgtaaccctctatgtaatggctgttggtgcatatccttttgaagacccagaagagcctaagaacttccgcaagacaattcagcgaataacaatcactgaaatccggaatcatagttggttcctgaagaaccttcctgctgatcttatggatgatgatagcatgagcaaccaatatgaggagcctgatcagccaatgcagaccatggatcagatcatgcagattttaacagaggccaccataccacctgcctgttctcgcagtataaatgttctagctgatggactggacatggacgacgacatggatgatcttgactccgattcggatcttgatgttgacagcagcggtgagattaagcgcaagcccaacctgttctggggaacacggatgctgtag

SEQ ID NO: 26682 - DNA, 1032 bp, Zea mays
  Peptide Sequence Number=SeqID_68461
atgatgcaagaaatgctcgtcgaggccgacatggaccagctcaagagagagaacgacgggcaaagagcggagcagacgcctctgcggtgcccccggtgcgactcctccaacaccaagttctgctactacaacaatgacaacctcacccagccgcgccacttctgcaagacgtgccgccggtactggaccaagggcggcgcgctccgcaacgtccccatcggcggcggctgccgcagaccgcgccccatgcctacgcccgtcgcgacgaagcccgcggtctcctgcaaggccgtgggcggcgcgccgtccctgggcctcggcgtcggcttgggcatgggcatgggcacgggcgccggcctcgacgggccctgggcgtcctcgcagcaggcggccgccgcgcaggcgcagctcatggcgctgcttaacagcgccaggggcgtgcagggcggcggaagcatgcacagggtcctcggcctcgacgccattgcacacctgcccctccacgtcctgccggacgccggcggcagtaatgccagtggcacggtgccgtcgctgtggccgccgcgcatggactcgcagctcggcatggggccgctgggccagcacgacgtgctgtcaagcctcgggcggctaaagctgcccccaccatcgtcggcggcggcggcaagctgctacagcgaccagctgcacgcggtggtgagcagcgccgcgggacgcggacacgagtacgaagctgcagcccccggcgtcacgcccctgccctgcaccacagcgctggcctccctccctccagccgcgtcgagcgtgtcggctgcgttggccagcgccacggtcgggctagacctcccgccggtctccctccccgcgtccgagatgcagtactgggccggaccggcggcgatgtccgtggcgtggccggacttgcccactcccaacggcgtgctccctcgagagacaaacccgaacctgatgtggtcatatcgccgtcgggaacttccagagaagaaggagacgaggaaggagaagatttag

SEQ ID NO: 26683 - DNA, 1636 bp, Zea mays
  Peptide Sequence Number=SeqID_68462
atggcgattggagatgtacggcctcaggaacaactggatcaagatcaactgtcttcctcaactatggtgcatcccccaacccaagatgatgaacaggtacctcaagtggaggcgcatgatcaagggggagcacaggatgttcaaattgaagaggaagaagcacctcaggcacctccaacccaagttcgagcgacgattcaaagggatcatcccgtcgaccagatattgggtgatattagcaagggagtaactactcgttcaagattggttaatttttgtgagcattactcttttgtctcttctattgagcctttcagggtagaagaggccttgctagatccggactgggtgttggccatgcaagaggaactcaacaatttcaagcgcaatgaagtttggacactggtgcctcgtcccaagcaaaatgttgtgggaaccaagtgggtgttccgcaacaaacaggatgagcacggggtggtgacaaggaacaaggctcggcttgtggcaaaaggttatgcccaagtcgcaggtttggactttgaggagactttcgctcctgtggctaggctagaatcaattcgtatcttgctagcatatgccgctcaccattctttcaggttgtaccaaatggatgtgaagagcgcttccctcaacgggccgatcaaagaggaggtgtacgtggagcaaccccctggcttcgaggatgaacggtaccccgaccacgtgtgtaagctctctaaggcgctctatggacttaagcaagccccaagagcatggtatgaatgccttagagactttttaattgctaatgctttcaaggttgggaaagccgatccaactctttttactaagacttgcgatggtgatctttttgtgtgccaaatttatgtcgatgatataatatttggttctactaatcaaaagtcttgtgaagagtttagcagggtgatgacgcagaaattcgagatgtcgatgatgggcgagttgaactacttccttgggttccaagtgaagcaactcaaggacggcactttcatctcccaaacgaagtacacgcaagacttgctaaagcggtttgggatgaaggacgccaagcccgcaaagacgccgatgggaactgacggacacaccgacctcaacaaaggtgtcgctacgccttgcttcgggatctggtatccaaaggggtctaactttgacttgattgggtactcagattctgactatgctggatgtaaggtcgataggaagagtacatcggggacgtgccaattcttaggaaggtccctggtgtcatggaactctaagaaacaaacctccgttgccctatccaccgctgaggccgagtacgttgctgcaggacagtgttgtgcgcaactactttggatgaggcaaaccctcagggactttggctacaatctgagcaaagtcccactcctatgtgataatgagagtgctatccgaatagcggaaaatcctgttgagcacaaccgcacaaagcacattgacatccggcatcactttttgagagaccaccagcaaaagggagatatcgaagtgtttcatgttagcaccgagaaccagctagccgatatctttaccaagcctctagatgagaagaccttttgcaggctgcgta

SEQ ID NO: 26684 - DNA, 2172 bp, Zea mays
  Peptide Sequence Number=SeqID_68463
atggtgacctttcctcttcgtgatctgtcccccacttcactgctgctgctgctgtttctgtttcacccttgggcattgaaggctgggagcgccgcatttgagtacgggaccaaattctcacggtcacttggatggggcagtgatgatggtgaggatggctctgaagagtccatttttggaaccggggatgcagatgatgtcaagcccaagagctttcctgtgtgtgatgaccggcactctgaactgatcccctgcttggataggaacttgatatatcaaatgaggctgaagctggatttaaacctgatggagcactatgagaggcattgccctccacctgaaaggcgttttaattgcttgattcctccaccacatggctataaggttcctataaaatggccaaaaagtcgtgatgtagtgtggaaagcaaacattccacacactcaccttgcaaaagagaagtcagaccagaactggatggttgaagctggtgaaaagatcaagtttccaggtggtggaacccattttcaccatggagctgacaaatatatatcaaatattgcaaatatgctaaatttcaaggataacaatataaacaatgatgggatgcttcgtacagttcttgatgttggttgtggagttgctagttttggaggatatcttctttcttctaatgtgatagcaatgtctttggcaccaaatgatgtgcatcagaatcagattcagtttgcactcgaaagagggatccctgcatatcttggtgttttgggaacaaaaaggcttccgtacccaagtagatcatttgaactagcccattgttcacgttgtaggatcgattggcttcaaagagatgggattcttctgcttgaactagatagattgctcaggcctggaggttattttgcttactcctctcctgaagcatatgcacaggatgaggaggatctccgaatctggaaagaaatgagtgcccttgtagaaaggatgtgctggaaaatcgcagagaaaagaaaccaaactgttatttgggtgaaacctctggacaatgattgttacaagaggcgagcacatggtacaaagccacctctatgcaaaagtggcaatgatccagattcagtatggggagttccaatggaagcttgcattactccgtatcctgaacttcatttgttaattcgtggtcttatggttttttctgcttatgtcaagaaatgcacagagatggggggaactgggctagctccctggcctgcccgattgacagccccgcctccccgtcttgctgatttgtacattactgctgacacatttgaaaaggacacggaaatgtggcagcaaagagtagaaaactattggagtttgctgggcccaaaggtaaaaccagacactattagaaacatcatggacatgaaggcaaactttgggtcatttgctgctgcactcaaggagaaagacgtatgggtgatgaatgttgtgccacatgatggaccaagcaccctcaagataatctatgatagagggctgataggcagcaatcacgactggaaatctgttttggttgctgcaatgcttctcaaaaagttttgtgctgtgccttgtattgtgaaaattaatatgaagtttagcagtacgatcatgagcctcaaggtttccagcctcaagggcttatttggttgtgaccctgggaaaggtgtctgggccaggcagctccccaagccatcgatttcagacgcctggtggccgggtacacctgtctggccggtattcccaggccaggtttccgtagaagcgggaacatcgtgcttccacatttataattcactcaaatccaataatgcgttttgcaggtgtgaagccttctcaacctatcctcgaacatacgatcttctccacgcatgggcagtcttttctgaccttgataaaagaggctgcagtgccgaagacctgctccttgaaatggatcgtatcctcaggccgactgggtttgccatcgtgagggacaagggcaccgtcattgagttcatcaagaagtacctccacgcacttcactgggaggcattgactgtcgtggacgctgagcccagcccagaatcagaggagagcgaaatgatcttgataatccggaagaagctgtggctaccaaaagcaggcccgcaggattccggcacgtag

SEQ ID NO: 26685 - DNA, 267 bp, Zea mays
  Peptide Sequence Number=SeqID_68464
atgatgaagatgatggtgtttgggggcagggtcagtctgctgcccatccttcttcgcgcccagatcaatccttgtcctctcatgctcctccgtctcctcctcctactactgatcatgctccttcagatgatcaagacttcgttgcagccttcaccaagcaattcttcgcaccatctccaggtggcaatccttatagtgggctatgaggtttctcttgcctttttgctgcttggcgccaaaagagggagatgttttggggagaaatga

SEQ ID NO: 26686 - DNA, 270 bp, Zea mays
  Peptide Sequence Number=SeqID_68465
atgtccaaggaactcttcggctacttcgttgcgccgtcatcttccccatattatggtcgccacaccactgtccctactgctcctggcggtcgccctgccaaccgcaacgtcgtcgtctgcaacatcgacgtcgtcgtccctttctactcaacaggcgtcattttcttcggtcctcttggacacggcttcttcagctctcctccaggctccagctgcgcctcggtcacgtgcccactggtctccagtcgtcgtgtggtaatcttcctgtga

SEQ ID NO: 26687 - DNA, 636 bp, Zea mays
  Peptide Sequence Number=SeqID_68466
atgggcatcggagccgcgatcatgctcaccaccctcggctccatgtgctactgcatagtcgcgcacaggttggaggagaagaacaccaggaagatcaggagggcctccgcgagccagtcccgcggctcgtggtcccgatcagtcgactcggacaaggagatacttaacagcgagtacaagacgaagataggctgcggcaccacatcagtcttcttcaaccaaaggactgaaggcccttcctgcggaaccaagttcaggtcacttgaccgtagatatgatgatcttgtacacgaggatctcatcggagagaggccaccacctccctgtgatgcgcgtcctcgcgccgccgcgcgcccaaagctcgaccgcgtcgtcttcgtcaagctggacgtcggccacacgccacccgtcgtagctccacctcgcatctccggcatgctgcacgtcccacgcaggcagtccgatgaggcgcggcgcctacaagcagtgtgtcgacttcagcccctcgcgcccgccaccgcgaggatggcctcctcgccctctgctgccttgaccgcgacgttgggctcttcaagcgccgtcatgacgagcctgctcctgccgtcgctgtctccgattcgactcctacacccttga

SEQ ID NO: 26688 - DNA, 198 bp, Zea mays
  Peptide Sequence Number=SeqID_68467
ttctgctggagcatagagcaatatgaaactcggccaaatatttctgagattgatcacataactgaggagttcaacaagaagtccaattcgctgtacactatcttgaggagtagtcgcctcgcggaccaccgcaaggggagtgatgaattcaggaaggctgcgaccaatcactgcaggtgctcagctgtaacggtgatg

SEQ ID NO: 26689 - DNA, 498 bp, Zea mays
  Peptide Sequence Number=SeqID_68468
atggaccggatgctgctcgaccagctggccggcgaggccctgcgggaggtgctgcacgcggtgcagggcaccctgttctgccgctccaccgccgagcgcctgcgccggagcgtcgagccgctgctgccgctcgtccagggcctcggcccgcacagcacccagcgctccgcgggggagctcggcgagctcgcggcgcgggtcagggaggcgctcgacctggcgcgccgcgccgccgcgtccccgcgctggaacgtctaccgcgccgcgcagctgtcgcgccggatggaggcggccgaccgcggcatcgcgcgctggctggagcgccacgcccccgcgcacgtcatcggcggcgtgcgcaggctccgcgacgaggccgacgcgcgcatcggtcgcctcgagcgccgcgtcgaggagatcgccgccgccaccgcgcagccgccgccccccgccctctcgtcccgtcgcgccgccgccgcacaagggcgtgccatgcgatga

SEQ ID NO: 26690 - DNA, 402 bp, Zea mays
  Peptide Sequence Number=SeqID_68469
atggaggcagcatgcaactgcaccaaggggatgcaccctttcgacttcgacgcgtccagcatggaggcccaggcccacacgtcatgtaaccggcgcgccggttactacgtgggagaaactgcaccgccacttgcgccagtactgcgccttctcgactgcgaaaccggtgccgtgactcgaggcgaccctgcgcatggcccaacagtgccaaccgagcacatcggtcacgggtcagtcagccgcgggagaagggaccgggaaaggggatactccgaaagggatccttctccgcgaaggaagcgggccccaagccctcctactgatcagaggttcgaaggctggcccttagaagggttcgacagccgcctcagagcactcgggctccgcgcccactactggtga

SEQ ID NO: 26691 - DNA, 264 bp, Zea mays
  Peptide Sequence Number=SeqID_68470
atggccaccggacacgatcaccgcggtagcgccgtggctggaatacgcgccaccggcgatttatacagctatttccccatccgtcctatggtacaaacagaggaggactgtgctgaattcgataagggcgtactcaccgcggtatatgctagagatttagcgaccacggcggtgggcggatcagcggcgacgatttcgaattttgaatttaaatttgtttgtgaacttgcacatatatcaaatgtacaaattcaaatcttatga

SEQ ID NO: 26692 - DNA, 315 bp, Zea mays
  Peptide Sequence Number=SeqID_68471
atggggatcgccgatgaccgaataatatactgggtgttcggtacgcggttcctgactacgcccgcgtatctccagaatgcgaagagaatcacgacgatgcctgagataaagagtcatccttggttcgtcaggaacctcccagctgacctcatgggcgacggcacagtgaactacgaggagtcggagagcatggcggagacaacagtgccggccgatggcgcccgctggacgacccagtttctgtgcatcgacgacgtccttgacgacgacatggacctggacctcgagtcctcgacatcgggagcagtggagtga

SEQ ID NO: 26693 - DNA, 341 bp, Zea mays
  Peptide Sequence Number=SeqID_68472
ggagcactgtgcaagggggcgctacagtgctccccttgatctgggagatacgtgcgctcacccctacggttgcagcgcgtagggggctctctagcgtcagccgctgcgggcttagaggccccctacgcaaggggagagggcgccgtagcgcaagcgctgcggtcagtctcaacaactgcactaatgggttgcacaaggagaggttggaagctgatgcagagctgatcgcagggaacaagattgatgaagttgaagctggagcacatgacaacaagaagctgaggagaggtgatcggagaaggaagctgaattccaagtactatggcgccaactggctgtaa

SEQ ID NO: 26694 - DNA, 1148 bp, Zea mays
  Peptide Sequence Number=SeqID_68473
ttcttgagctctcagagaagtatcagaagcattttggtcctttacgatactttgtagctggttttctcaaattcctgtgtttgccaaagtacagttttgaattggaatatcttccagtatcagatgttaatggcgccgagcataaaattttggtaggacaagaaaaggttgacgcgtctgatctatatgatgatgtaattcggagatcaagagcagaatgtttaccacgcgcctcaagtttatctagcattgattcaataatgtctacaggcatcatgtctggggcagagctggaggtttgtagtcctcgtgcaaataatgaaccttctgaggttgttcgtggacttgatccgaaatcaaagcgcttatcgttaggaagagctagtacatttaaagaaccagaagaagtgctccatccccactcccatggtacatctactcccagctggcgtagatctaagtcaaaatcaaggactgaaaaggcaaagccaggcttgtctgctacacacgatgcaaaatcttctaaggttaatgcagacaaagaggacacatcatccacaatttctgatcctggacctgtggctgtatgggattcaggaccaaagtgggacgatgaacctaaatgggataatcaacctaactgggaacccgagacttcaattgagctccatagccctcgcgaggatattgagcttggtctgactaaggagctggtacctagtttagatgaaaggtggacagttaggaaaggacgctatcttggtgtactggtgtgcaaccattcatgcaagactgtgcagagtctgagctctcaggttgttgctcccaaggctgaatatgatgacaattgtttggacctgctgttagttggtggaagtggaagactgagattactgaggtttttggtgcttttgcagtttggaaagcacatatctcttccaaatgtagaatatgtaaagggaaggaaacacacggctgttcaaggcccaagagaacaggcttatacagtaagcactctccagacagatactacggacctctggaaggttagtcgcattccaacgaaggccgtcgccgcactagcaaataaccagtgcatgtcgatactgctcgcccactggcagcagccggaacatgcaatttgctaa

SEQ ID NO: 26695 - DNA, 396 bp, Zea mays
  Peptide Sequence Number=SeqID_68474
atggcgcgctccctcgtcctcgtggccacgctcaccgcggtcctactggcggcggcgcctcctccgacgcgggcggcgtgggtggagtcggactacccgtcgagcgtgccgtgcggggtgaccatccccgtggagcagtgcgacccggcggtcacggcggcgaacgccgcgtgccgggacatgtgccactacgggggccggcgaggcgggcgacgaaaatccatggttcgccgcttgtacacaccacaggtgcaagattctgggctgacctcagagctgcagacagtccgcatagtgtatttacagctactgtacagggtttttcactggcctgcccatcaattgacattgttgaggcaacaaactacagcgaacttgccccttgacatggagtag

SEQ ID NO: 26696 - DNA, 270 bp, Zea mays
  Peptide Sequence Number=SeqID_68475
atggcgctcaccgctcgtgtcctgctagttctcgcggccacccttaccgttgccgtggctattctgccggcgacggcgcgggcggcgtgggtggactacccgtccggggtgccgtgcggggtgaccatccccgtggagcagtgcgaccccggggacgcagcggcgaacagcgcgtgcatggacgtgtgccactacggcgggtgccggcgcggcggccagtgcgtgtcgctggggctcgccaggggccggggctgccactgcaagtgctag

SEQ ID NO: 26697 - DNA, 255 bp, Zea mays
  Peptide Sequence Number=SeqID_68476
atggaggacgaacaggtgatgaggcagtcatttccctgtgtgacagcttggggacaagctgagtttttagggggggaatatgtcaacaactgcactaatgggttgcacaaggagaggttggaagctgatgcagagctgatcacagggaacaagattgatgaagctgaagctggagcacatgacaacaagaagctgaggagggatgatcggacaaggaagctgaatcccaagtactatggcgccaactggttataa

SEQ ID NO: 26698 - DNA, 363 bp, Zea mays
  Peptide Sequence Number=SeqID_68477
atggcagatcgactgctgcaaggagccacctttagtggcggcggagggtcgtcgtcgtcttccgtggtcggtgcggcagccgacccgtcactgcaggcgtacgcgcagtactactactcggcgcgcgccgacaacgacgcctccgtcgtggccttcgcgctcgcccacgtcatccgggcctcgcccgaccatcttccgccgcagccgcaacaggcggcggccttgtacggcgccggtgccctgcggcagggacagggacagggacagggagaccatccgcaagcggatgcgcaccactatcccggcggccaccacgccgctgccgccgtcgaggaggagcaagaagacactctacatacatag

SEQ ID NO: 26699 - DNA, 288 bp, Zea mays
  Peptide Sequence Number=SeqID_68478
atggccgcgcttaatccacatcgcgtgctggctggctttattgccgagacgacgacgcgcgcgcgctgctgcagcctgcaggccgcagcggtctccaaggctggatctcgcatgcagccatgccatgggggcccgcatgaattggagcaggggcatacacgcggtgacgtgggtgtgggtggtgggtctcctcttcctgatatggggtctggaaggcgttatccgactgcgcaacagaagcaccggggcctcaagggcatggagagcatcgacagcgactccgactga

SEQ ID NO: 26700 - DNA, 1248 bp, Zea mays
  Peptide Sequence Number=SeqID_68479
atgataaagcctcggcccttcaggctggctctgctcctcctcctcctcgccattgctgtgcgttctccgcctcaccagatttcgcaacagaaccttcgttccctgccgtctcttgtcgagcgaaacgccgagccgggagaggagggaggccgcaccggcgattgtagaagcagaaccggtggaggagtagaggagggcgccgaatcgatgcgcggctccgcggacgccgtcgtggttgctcgggacgtggtggcctcgtcgagcccgtccaaggccgcgtcggcgttggacatgacgagatacccgaggctcagcccagatggcctcccgctgcccaatggcagcggcagcggcgcgagcaagaagcctgcagcgccggtgtcgccggcccccagatcgagcaaggatgacgtggcaccggccgtcgccaccgacagctcccgcatcgcggcgttcctagcctcgacgtcgctcgagcccaagccgcgcgctcgcgcaccgcagccacagccgacggctcctaactcggcgcccaccgcagccgtcgccgcgaacaggagccccgcgcgcgaccacggccacggccactgctccgaccactccgatcccgcctccccgagctccaccggggcccgcgaattgctgctccggtggggacagaacaagcgcatgcgctgccgccgcgactgcgcgtccgcgtcgccgcagcggcggcaggcgggcggcaagataccgcgccgctcatcgtcgccggcggcggacaatctgatgccgccgccgagcgcagcgccctacgcccgcgggtccaacctccgctacgccacgcctcgcccgccgcgctccggcgccagcgacgcgcaccacggccgcggggccctccccaacccgctcagatcggcggaggactgtgccggtgcctgtgccggtgccggggagaagttcttggcggttgctgaggcagcggcgagggcccagaagcagcgggcggtgtcgccgcataaggtgggcctgggcgtcccggacccgaagcagcagcagaaccagtggggcagcagcggcagtggccatcagcagcaggccggcgcggcggcgggggcgtcgtcgaagccggcggcgaagctggaggtgccgcggatctacaccacgctgtcccgaaaggagaaggaggaggacttcatggccatgaaaggcaccaagctgccgcagcgccccaagcggcggccaaagatcatcgagaagaccgtcagt

SEQ ID NO: 26701 - DNA, 768 bp, Zea mays
  Peptide Sequence Number=SeqID_68480
atggcccgtgggcatccacggcaagccaccgctgtccgctgcatctgggtcagttcatcggtgtgcgacggggcggcatcagctaacggtgaggcggcgtcggcaagcggtggctccaacaacacggcgcggcaagaagagcgccagcaactccacgtctactcccacttctccgtgagctccaaccgtcagttgcgccaccgtcgtctgcggcaccccagcggagattcccctcgcacctgcaggctgcagcaaccaccaccatcaattgatggtttctggcccagacacagcggcagcagtggagcaggaggcagtggacgggacaagggaaaagagccatgtattggtgaatcatcatctgctgcagcccgtgaatgggtggttactgccgatggaactcgcaaacaactacaaggttctattgatgacccatggagtcaaggtgacaagtggaagaaacagggattcaagtgtgcttattgcgggtgtgctaaggagagtggagataagacccgtctaaggtgccatctagctagtttgtcaggagatggcaagtcatgcctgaatgtaccaaagcgtgtgagggagacaattatggatctagcatatagtgatgctagaagagaacaaatacctagggatgaagctggacagatggcgtgggcactaagggaatcattgttggatcaaaggacatctggcaatagcctacctgtaggcagaagtagcattgggacaagtgatagtcgcctagagggggggtga

SEQ ID NO: 26702 - DNA, 669 bp, Zea mays
  Peptide Sequence Number=SeqID_68481
atgtcgcagccgcaggccggggctgcggtaggaggcgcggcggcgccgcccaggcagcgcgtacgggcgcggcgcggccaggccaccgacccccacagtatcgcggagcggctccgtagagagaggatcgcggagaggatgaaggcgctgcaggagctggtgtccaatgccaacaagacggacaaggcgtcgatgctggacgagatcatcgactacgtcaagttcctacagctccaagtgctgagcatgagccggttaggtggcgccgctcgtagccgacagggtcgagacggcgcggcggccgcggccgggagcgacggcctggcggtgacagagcagcaggtggcgaagctgatggaggaggacatgggtactgccatgcagtacctgcaggggaaagggctgtgcctcatgcccgtctccctcgccgccgccatatcctccgcaacgtgccacatgcgaccgccggtggggggacccggggtcgccgccgggcaccacatggccgccatgcggttgccccacgtcacgaacggcggcgccggagccgacgacgtgtcggcctccccgagcatgtccatgctcacgacgccgtcggccatgcccaacggcgccggggcaggcgttgatggcaaggacgcccgcgtccgtgtcgaagccgtgatctaa

SEQ ID NO: 26703 - DNA, 1215 bp, Zea mays
  Peptide Sequence Number=SeqID_68482
atggggaaaactattggcatccaggtacaatttgactttgagcaaaacttgtttgtacagaacatacaattcaaggtgcagtctattgatcaaattatggatacgccgcccaagctcgtggccctcatctctggctccagcgcgagactggttctctaccgcctcttcacactccgcaacgcgctaccaccgctcgactacgacgacaataagagcatctccaaattcaagatgctcctgccacactgtattggcggaagggaagcctgttggttgggggaggcggcgataagtggggacggtggtggtgtattggaggggacgacgaagaaaacgaaacgccctgatcgccgcctgacccctgagccccagccactcctccactcatcttccggcgggaagcctcggggcggacacatggggtccagtggcacaaatggagccgtggacagatggagaaaatggggagggaggggctctcccggcactgctccgttgctttcagctcccacctggtgtcttgctggtcagtggtcacacagcgaggcgcccaggcgggcaggctgtgctgggaggctgggacccgtgagccccccaacgcacgtcgctgccctgccctgccctcaccctgtcatgtgtcgttgcgcttgcaccacggccgcgctgcgaggggttgcatgcgtgttgctgtccggagtgtccgctctgcgcctctccacactactccgactccgagctgcctcgcctcgccggccggcttgcctcaaagctggactccggtcgcagtttggcacggcgtctgacgtcgccacatgcagtgcaggaccagggtcgggaacgagctgccaccagggcaggctgatccgcacccgcaggcctcagacgattgcgcggcgagccagtccaacggtttcgacaacgccacctcgttttactactgatatgcgcgcatggaatggaacggaacggaaggcggacgaaaatacaggagtatctattatcatcgtgccccgtgtgcccttcctgttcctgcggcggcgcgcaggcgcagaccctgtgggaaacgggttgccgcccggcatgctgggtccccgcagaggtgtcgtggcgaacgacgccggtgcggggaaacagccgcgtcgaccagggtgcgtggacgctggatggacggcgggcggcggcatgggcatgtgccggttgactgaccatccctag

SEQ ID NO: 26704 - DNA, 336 bp, Zea mays
  Peptide Sequence Number=SeqID_68483
atggaacctaaggagcctatatctaacccaccaccatcaccaaccaagaatccacccttctcgagcaagaacaaagatgctcaacaacctaaatgccctaaagccaaatggaaagagcaaattatgccaaaatggttgtatgactcgtatatgagagcatcttcggttggtatcgatgcagtcaacgcaattgtactaggagatgattttcttagtgcccaaaaatgcaacatgaagcccaaaagatgtggtttgttcaatatccacatgcttaaaatgataatatgggaggaggagcacacattcactatcggaccaagtgccaatgaattttag

SEQ ID NO: 26705 - DNA, 453 bp, Zea mays
  Peptide Sequence Number=SeqID_68484
ttccacaacaaccgcctgaaccggtggcgtggagggtgcaaggatgaatgcttcaactgcagtgactctgaccacttcaacaccaactgccccaatatgaatggtaagctagaggcctccaagtgtgaccaccactctggttggtgcaagggaaagcacgagtacacctcctacaagcacacgtccaaggggagcgacgaagagctcaagaggtgggttgaggacaagctaaatggactctgcttcttcgctaacgccgttgaaggcctctacgccatggcgcttagtgaggacgtggtgagcggcgacaacaaggacatcagtgatgactccactttcgaggtatctctttctgctgatgatctcaccattgagactaagctagcagagaagaatgctaggatagccttgcttgagaaggctagctcagtgagtgcacctgtacctagttag

SEQ ID NO: 26706 - DNA, 1917 bp, Zea mays
  Peptide Sequence Number=SeqID_68485
atgcccggcatactgagggatgtcgccgagcactcgctggatatccgagctggggcccgacccgtgaagcagcctctgcgccgattcgacgaagaaaagcgcagagccataggcgaggagatccacaagctaatggtggcagggttcatcaaagagtgtgtcttcggggtcccccgaggcatgctcttggggttcatcgtctccgagcggggcatcgaggccaacccggagaagatcgcggccatcaccagcatggggcccatcaaggacttgaaaggcgtacagagagtcatgggatgccttgcggctttgagctgcttcatctcgcgcctcggcgaaagaggcctgcctctgtaccgcctcttaaggaaggccgagtgcttcacttggacccctaagggcgaggaagccctcgggaacctgaaggcgctccttacaaatgcgcccatcttggtgccccccgctgccggagaagccctcttgatctacgtcgctgcgaccactcaggtggttagcaccgcgattttggtcgagagacgagaagaggggcatgcattgcccgtccagaggccagtctacttcatcagcgaggtactgtccgagaccaagatccgctacccacaaattcagaagctgctatacgcggtgatcctgacgcggcggaagttgcgacactacttcgagtctcatccggtaactgtggtgtcatccttccccctgggggagatcatccagtgccgagaggcctcgggtagaattgcaaagtgggcagtggaaatcatgggcgatacaatctcgttcgcccctcggaaggccatcaagtcccaggtcttggcggacttcgtggctgaatgggtcgacacccagctcccaacagctccgatccaaccggaactctggactatgttcttcgatgggtcgctgatgaagacaggagcaggcgcgagcctgctcttcatctcgcccctcgggaagcacctatgctacgtgctccgcctccacttcccggcgtccaacaatgtggctgagtacgaggctctggtcaatgggttgcacatcgccatcgagctaggggtccgacgcctcgacgctcgcggtgactcgcagctcgtcatcgaccaagtcatgaagaactcccactgccgcgacccgaagatggaagcctactgcgatgaggttcggcgcctggaagacaagttctacgggctcgagctcaaccacatcactcgacgccacaacgagactgcggacgagctggctaaaatagcctcggggcgaacaacggttcccccggacgtcttctcccgagacctgcatcaaccctccatcaagaccgatgacacgcccgagcccgagaaggcctcggcccagcctgaggcaccctcagctcagtctgaggtaccctcggctccatccgaggtaccctcgactcggtccgaggcaccctcggcccagcccgaggcaccctcggttcgacccgaggcaccctcggttcgacccgaggtaccctcggcccccgagggtttctactggccgacggcggtggccgacgccacaagaattgtccgcacctgcgaagggtgtcagttctacgcaaggcagacccacctgcccgctcaggccctacagacgatacccatcacctggccttttgctgtgtggggtctggaccttgtcgaccccttgcagaaggcacccgggggctacacgcacctgttggttgccatcgacaaattctccaagtggatcgaggtccgacccctaaacagcatcaggtccaaacaggcggtggcgttcttcaccaacatcatccatcgctttggggtcccgaactccatcatcaccgacaacggcacccagttcaccggcagaaagttcctggacttctgcgaggatcaccacatccgggtggactag

SEQ ID NO: 26707 - DNA, 600 bp, Zea mays
  Peptide Sequence Number=SeqID_68486
atggtcatcagtagaagaatgggagaggtgggagaacgtggcgccttccttcgtcgacggggaattaaatctatgctcgcccaccgcttcctcctcctcgtcgtcgtcgccgcggctgcggcgagcggcatcgcctccgctaagccgacggcgtacgaagccctcgccgactacgacttccccccggggatccttcccaagggcgtggtcgcctacacggtcgacaacgccacgggcgccttcacggccacgctcgatgcctccgcgtccggcgcgggatcctccatctgcgagttctccatcgagggctcctactcgctacgctaccagaccaagatcaccggcaagatctcccccgaccacctcaccgacctccagggtgtctccgtcaaggtcctcttcttttggctcaacatcgtcgaggtcacccgccatggcgataatctcgagttctccgtcggcatcgcctccgcggacttcgggattgacaacttcctcgagtgcccaacctgtggctgcgggttcgactgcaacgacctgctcatgctccagaaggcgggggcagccaccgccaggctgcgcctgcgaggtgccttctag

SEQ ID NO: 26708 - DNA, 162 bp, Zea mays
  Peptide Sequence Number=SeqID_68487
atggacgccaaatgtgggtgccctaccggcggagacatcggtggaggcgcatcatcacgaagctggacagacgcatcgattccatgttccagcatagggagtcacgcctacacgcccagcgtgttcagccctaggactgtctctacgccattcctctggtag

SEQ ID NO: 26709 - DNA, 312 bp, Zea mays
  Peptide Sequence Number=SeqID_68488
atggccatatcactaccatgggtaactgaaagaaagaaaatgtcactcatgaggagaaggttgcttaggattaagaataaggagattgatgtgtcccacactatgacggacaatgttggttattcgaagcttgaacaaggattatctatgatgtctaaaggcgaacttgtggactgccttgcatacacaagcctaaaggtgggatacccgaagcattttctcttttcttgcctcaacttgttgaatgacttcaagattttggatctcttgatcgaggtcatcatgtggtggaggatccatgtaacaccctga

SEQ ID NO: 26710 - DNA, 360 bp, Zea mays
  Peptide Sequence Number=SeqID_68489
atggagaaaaaggacattaaatgtgaagtaatggaggtgcccatcgaagatgtgatccccctggccaaaattggtcttgagccaaagctagattcaagaaaagactctgaagaggtggtgctagaaatgccaaagaaagctagctggatgactttggtgatggatgcccttttcagcattccacctattgatgaatccaatgatagagaaccaagtcctcttgaggaaataattgtccattgttggtcacttgttctcaagtgctatgaattaagaacaaggcaacataaaatgttaaatgttaatgcccttcgtccttcacagcattatttccctttggatataatgatcttcagatga

SEQ ID NO: 26711 - DNA, 225 bp, Zea mays
  Peptide Sequence Number=SeqID_68490
atggcttcccttgtttgctttgcagctgaacatttgcttcggacggatcctgaagatggcctggagggcttcttcattgcattgtttgtcaggaaagcaggccctacttcagaagagcctagcgaagatgccacggtagaagtaagaaccaaacaagtgcgcgggaggcgaaatggggtcagggcgttcagctccttgaggctgtccaggatgatcctctggtga

SEQ ID NO: 26712 - DNA, 738 bp, Zea mays
  Peptide Sequence Number=SeqID_68491
atgccgccggcgccgccaccgcaacaacctaagaatcgcagccgtgttcccacgccgaccggagagaaccgtcggcctcagcgtcggatggagagccggaacgcgtcggagcgggccgcgttcttcgcgcggcgagaggcagcggcggtgctccggcgcgtgcttcgcggggacgccaccaggcgcgccgccggctccataaaatcccttgtatactccccaaccgtccgcaacaagcgcgccaccttcgctctcgtctgccagaccctcaagtacctaccaattcttaaagaggttttagcatcgagtgaaatactgagcagcaaatggaagaaacaagaggaattggtttatgtgactacctatgacattctctttggtcagggaattgcggtttctgggtcagtcgagcaattaattatgctacaaaaggattctcttaggactactcttgataaagtttgtgcgagaaagagagtccgctgcgttgaagacctattgagcaataaatcagccgtgttgaaggttcaagctctggagtggttcaaacacaatgctactaaattaaatttctctacactgcataatcatggtgtcaaaccaaagccccgatttcttcgtgttaacacactcaaggtcactacagagtctgtcattgaagaattgaacaaaatgcacatggggagagctagttgtatggtagcagttgcattgtgccctaagccaggctggaagtga

SEQ ID NO: 26713 - DNA, 105 bp, Zea mays
  Peptide Sequence Number=SeqID_68492
tgattgatcccatatttgagaatcaagattcaattttgaagaagaacctcaagattcctttaagaaaggcaatcactcctgtttatgatattaatgttccaaatg

SEQ ID NO: 26714 - DNA, 456 bp, Zea mays
  Peptide Sequence Number=SeqID_68493
atggcgccacctccctcaacgcgcgatcctcgtttctacagatctggcgagcttgacgccgcccactccttcgaccgcgagccttcctcagacagcaacgtggatcgcccgtggcatgtggggttcgtggatccgaccgcaccgctactggcggcccatgggatggtgacggcgacgcgacgctccgtggcttgcgcccccaccgccgcctccaacaccttctccgccatcggcatctccgtccttggcacgacatggggtttcaccatgttcactcatgctgagtatctgaaatacaagagcgggggtaggattgcatctgatggtgtcaatgcaaagttagatgaggcgtccagggctctcctgatgaaggtactagaagatgccacccaggacgctgtgcggaggcaggcaaagtgggtggggggcttcataacgaatcaagctgattcttaa

SEQ ID NO: 26715 - DNA, 231 bp, Zea mays
  Peptide Sequence Number=SeqID_68494
atgacgacggcggcgctcagccccttacggaagcaaggagacgtcagcaaggatttgacagccccgacagctgtccttccgcagggctccagctctcctccgacggccacgacatcacatgaacagggtgccaaaacctctccgactgccatgacgatacttgtaatcaaagcaagagacaccaagttgtggtggtcccttgtgaggggtctaagtgacccatttgattaa

SEQ ID NO: 26716 - DNA, 390 bp, Zea mays
  Peptide Sequence Number=SeqID_68495
atgcctgccttgtttctgttatcgaagattaatatccggggtccttggttgcacctcctaaaaggtctttgcatgatcccaaaaattatcaagactggttttgcagcaattcatctgatatactttttcactgctggtcctgatgaggtaaaatgttggcagatcagacgccagactaaagctcctcaagctgctggtgcaattcacactgattttgaaaggggtttcatatgcgctgaggtaatgaagtttgaagatctgaaagaactgggcagtgaatctgctgtaaaggctgctggaaaatacaagcaggaggggaaaacctatgtggtccaggacggggacatcatctttttcaaattcaacgtgtctggtggcgggaagaagtga

SEQ ID NO: 26717 - DNA, 330 bp, Zea mays
  Peptide Sequence Number=SeqID_68496
atgggtgttggtgagcgtgtgcgggcctggggagggtggagtcatggtctgcttgtgtacggtagggctcaagttgtccacctcatctctggtttgccaaggggtaatccaaaattcctcgagcttggctactacgagatgaccagtgccaaaagcagattcagttcaaaaacgattcttaatatctccagagaggattatgcccccattgaagacatgaacctatcaaaggaatatgaatggtgtcaggccatatgtgacgatttgaagtccaaggcagaaaagttcaggactacccgattaggaaaatcgtcgacatccactatctaa

SEQ ID NO: 26718 - DNA, 966 bp, Zea mays
  Peptide Sequence Number=SeqID_68497
atggaggagattcctcctgctagtgcgggcaatgtgcttgaggataatcctaagaaggagcaaaatgttgtcgttgtcgatgaagttgaagacattggcacaaaagttggaaatattgatgctactagtgctggcagtatcctctctccagaattagctccagaatcaatcaacgaaattaatggtgcagatgatgagaatgaggttggtgatgattctaaggatgatgatgatgaaggggaggagaaaggatctaattatgttgccctgacagttcttctgaaagtggcagttgatggatcctcagatggggataacacagttgtttcacaagatggttctagaatattcaccatggagcgacatcttggttcaccagtcccttatgtgaggccgactgcgccttgccaacctgctcggtcaaatctgttcagcccttcaaagctcgcagctacaacttatcctacagaagagatgacaaatggcagtttcatccagggcaagcttcttgcagcatttgcatatgatggtcgttttttcgagatttccaatgacttctccagtaccatattccagtatgagtgtgattctgcattgccaccagagcaaatcgtttggtgtggactagccagtgtaaccatctactggcatgaggtgttgttgatgattggtccaaatggagattctgtcgaatacaattataatgaacccctaaaactgattcctaagtgcgatggtgtaagaatcctctccaacttaagtatggaatttctacaccatgtctcagattttactacatcatttgttggcattggaagcatcttcccagcaacattattatacgatgttcgtgatcactatgacattcagagcaaaggtagtgttcgatatgggatgactgaactgacacaatggttgctcaatgcttttagcttaggaaacagtggtatggcagttcagtcatag

SEQ ID NO: 26719 - DNA, 1959 bp, Zea mays
  Peptide Sequence Number=SeqID_68498
atggccgccgagccggcggatgtcggcgactccgagcccgagcccttctccccgtcggacttcctcaaccttggtcccccaacgcctcgcctcgacagccccgccctgcagctgcacgacgacgatgacgacctcgtgctcctcttcatctcgcgcatgctcatggaagaggagacggacggcttcttcgagcagtaccacccggaccaccccgcgctgctccaggcccagcagcccttcgccgacatcctcgctggcgccgccgccgccgacggcagccgagggacctctgtagctggctcccctgcattcgccgccaacgctatctggccctacgatccagtccagctctcccagctgcttctttctaggacctacccggccgacacggcggcataccccagcgccgccgccgactcgatggcgtcctctgccgggtccggtgctggcacggtaaacatggacatgctcaacctggcgttcctcaagggcatggaggaggccagcaagttcttgccggccaccagcaacaaccatgaccaccggcgccaagcgacggaaacatgcgacaagcgggtggacgaatcgtcgccgttgctccaacagagtgcaagcaaaggccgcaagaaccacaggcacgctccttattggggtgaggatgaggaggccgagacaggcaggaggagctgcaaggtgatggcggtcgaaacagaggaaagcgagatggtggaggagttcgtccagagcggatacgactcgctgcacgagcagatgatggccatgaccctcagcacggccggcagcaggaaagggaaggggaaagggaaagggagcgccaacgaggccgtggacctgcgcaccttgctgatccactgcgcgcaggccgtggccgccggcaaccgccccagcgccgcggacctgctgggcaagatcagggcgcgctcctcgccgaggggagacgccacgcagaggctagcgcactgcttcgccggggggctggaggcgcggctcgcgggcactgggacccagcagctcacggcggcgacgaagcgcgcctccgccgtggagatcctcagggcctaccagctctacctggcggcctgcagcttcacagcgatggcgtacaagttctccaacctggccatctgcaaggccgtcggcggcggcgggagggaagaagtggcgtcgttgctgggctactggggtagcctggaggctgggccgcccgaggtgaggatcaccgccatcgacttccccgagcccgggttccgcccggatgctcggctccaggcgaccgggcggcggctcacatgcttcgctcgccggcatggcgtccccttgaggttccacggcatcgaggccaggtgggacgcggtttcggtggacgagctgagcatcgagcgcgacgaggtgctcgtcgtgaacggcctgttcagtctcggtaggatgcaggagcaggagcaggacgacgtggatagggatagccggccgagccctagggacactgtcctcggtaacgtccggaagatgcggcccgacgtgttcgtcctgtgcgtggagaacagctcgtacggcgcgcccttgttcgtgacgcggttccgggaggcgctcttctactactcggcgctgttcgacatgatggacgcggtggcggcgcgggacgacgacgaccgcgtgctggtggagcagcacctgtttgggcagcgcgccttgaacgccatcgcgtgcgagggctcggacagggtggagcggccggagacgtaccggcagtggcaggtgcggaacgaacgggcagggctgaggcagctcccgttggatcctgatgcggttcgggccatcagaaggaaggtgaaggacaagtaccacagggacttgttcatcgatgaggatcagcagtggctcctgcaagggtggaagggacgagtactctacgccatgtctgcgtgggctgcaaaatga

SEQ ID NO: 26720 - DNA, 2286 bp, Zea mays
  Peptide Sequence Number=SeqID_68499
atgtccgccacgccggaggacttcctgggggcgccgtacctggccgcgccggagcccttctcgccctccgtcttcctcgacctgcccccgacgccggagcgcccggataactccgacgacctcgtcctcccctacatcgcccagatgctcatggaggaggacatcgacgacaattcccccgaccacccggcgctcctcaccgcccagcagccctacgcgcagatcctatccgactccgccaccgccaccgccacctcctcttcgtccgactccgccaacgccaccagcagcagtagcgcctcggggaccggcggcaactccaccctctcgccctcttccgacgcccccgccggctggccctacgacgacgcactcgatatctcccacctgctccgctccccgacataccctgctactcacatgatgggggtcggcctcgacgacttcgccgaactcttgacgccgccacagggccaaggcgaagcccagcggcagcaatcttccctcgccgcgctctcggatggcgcggaagaagaggacgggagcaccaaggcagaggccaccacaacgtttccggttggcgacgccgaccacgccgccctggcctcggccttcttcggcgcccagaacgggggggacacggacatgcttaacatggccttcctcaaaggcatggaggaggccaagaagttcttgcccaccaacaacagcctactcatcggccttgatgaaacctcctgcaaatccttgcctaaagacagatacatcaagccctacactgcctttgccgctacccaagtgaaggaggaggaggagcatgtggtggtgcatggaaatggaatgccaatgtttgggggaagcagaagcaccaatggcagggtccgcaagaaccaccgtgctgagggggatgatctggaggctgagacaggcaggagcagcaagctgatgatgccggaacaggaggaaaccggtgccaacgagctttacgatgaaatcatgaattgtacctatgagggattcatgaagcgcatggaggacctgcgcatcgccatggacagcgagtctgagaagagcgccaggaaggtcagcaggaagggggcgcgggggaggcagcagctcgtgaacgaggtcgttgacctgcgcaccatgctcatccattgcgcacagtcggtggccaccggcgaccgccgaagcgcggccgaggtcctgaagcagatcaagcaccactcctcacccaaaggggatgccacacagaggctggctcattgtttcgccatgggactggaggcacggcttgcaggcacggggagccaggcgtaccagtcgctcatggcacaacacacttcggtcgtggaatttctcaaggcatatagcctttacatggcagccagctgcttcatgaaggtgaggttcatcttctccaacatgaccatttgcaatgccgtggcagggaggagcaagttgcacattgtggagtatggtgtgcagcatggattccagtatccaggtctgttccatctactagcaaggagggaaggtggaccgccagaggtgagggtcaccgcgattgctgtcccacaacccgggtttcgcccagcacaccagattgaagaaacaggccgccgtctcagcaacattgcccgtgagatgggtgtgccattcaagttccgcggtattgcagcaaagtgggaggccgtccgtgctaaggatctcaatattgatccagatgaggtgcttgctgtcaacagtgagtgctatatcggcaacttgatggacgagagtgttttggtggacagcccgagccctagggatacggtcctcaacaacatccgcgagatgcggcccaatgtgttcgtccacactgtcgtaaatggaacatatggtgcaccgttctttttgacacggttccgagaggcactcttcttcttctcggcacagtttgacatgatcgatgcaaccatccctagggacaataatgaacggctgctgatcgagcgggatatctttgggacatttgccctgaatgtgattgcttgtgagggtgcagacagggtggaacggcctgaaacttataagcaatggcaagtgcgaaaccacagggctgggctgaggcagctgccactgaatccagaggttgtcaaggcttccagggacaaggtcaagaactattatcacagagactttctcatcgatgaggataaccgttggttgctgcttgggtggaagggacgggtgctctatgccatgtcgacatgggttgctgaggataataagcccatcttttag

SEQ ID NO: 26721 - DNA, 498 bp, Zea mays
  Peptide Sequence Number=SeqID_68500
atggacatgctcaacgtggccttcctcaaaggcatggaagaggccaagaagttcttgcccaccaataatagccttcttgtcgaccttgacgacacctatggccaatccttgcctacagacagagacaccaagccgtgcactgcctttgctgctacccaagtgaaggaggaggaggtggtggtggatgatctgcgcatcgccatggatagcgagtctgagaagagtgtgaggagggcaatggccaccggtgatcgccgaagtgcaaccgagatgctgaaacagatcaagcagcactcctctctcagaggggatgccacacagaggttggcctattgttttgcagaaggactggaggtgcgacttgctggcacagggagccaggtgtaccagtccctcatggcaaaacgcacatccgttgtggagttcctcaaggcatacaagctatttttggcggccatcagcctcaataaggtagagaaggtgggcctccagaggtga

SEQ ID NO: 26722 - DNA, 665 bp, Zea mays
  Peptide Sequence Number=SeqID_68501
atggcgtctgatcacctgcatgtggctccacgccggagttgttcacctgctcatcaacatgctgtgcctcctagtcgtggggcatacgcctggagcaagaaatttggggtgaggatcggtctggtgtacctcatctctggttttggcgggagcctcatgtctgctctcttcatacagtccagcagcgtctccgtgggggcctccggcgctctcttcggcctcatcggatccatgctctctgagctcatcaccaactggtcactctacgcaaacaaggtggcggcgctgctaactctgcttctggtgatcctctccaacctggcgctgggcctcctcccccgggtggacaacttcgcccacatcggcggcctcgtctccggcttcctcctcggcttcgtcgtcttcgtccgcccgcacttggactggctcacccagcagcagagaagcggcggcggcgggcaagggcaacagcaagctcctccgccggtggcagcggcgaggaaacgcaagcacaggacgtaccagtatgtgctgtggctggccgccgccgcgctgctcgtggccgggctcacggcggccaccgtgctgcttttccgcgggtacgacgccaaccagcactgcccgtggtgccactacctcagctgcgtgcccaccaggaggtggag

SEQ ID NO: 26723 - DNA, 357 bp, Zea mays
  Peptide Sequence Number=SeqID_68502
atggtaatggtcgagaagactggttgtactaagcctgttatggtggaagataagggcaaggggcctgcaaagattgaagagcgtaagaaggccattgaggatgacacaccacttggcgaagggcccttcgatcaagagctcggggccagaaatatagagatcgccatgcagctgggaagcaaagctctgaaaaacaagagaaatgtcaagggtgaagctgtccaaaaagagatagttaatctcagattcaaagtatttgggcttcggtttgactgcaaagagagggaaaaatcctttaaaattctagaaaatattttattgaaagttgaactgaagttatggttatatccaaagtga

SEQ ID NO: 26724 - DNA, 615 bp, Zea mays
  Peptide Sequence Number=SeqID_68503
atgggtgctaccctcgctgttcttcccctggtctccggcgacaatggcacgcgatgcacagaactggcgggcgaagacgagctgcccgtgctagagcaccacggttccagctccggacctggagcgccctcgcggacgaatgtcgtcggtggcggcacaccttcacgcccgggcgatgttaaatttgggcggctagcgattaccctaacgatatcggctgctccgagctgcggccctggtgactttatatccggagcgtgcccacggccgcagtggaagcggaataaccaatccagccgagatctacggagcacgacaccatgctcggtcagccgcatccgagaacggcgggtggaagagaaccagagcaggtgggcgatgacatgtggcccccacgtggaagtggcgcaggggagaaccagtgagcgcgcggtgaagcaaaggtgtggctggcagtgggtcccgcgagacagagggagtggcgcgcgtggaagggttttgggccgcgcgggaggtttctctgggtgggccgaattggtgacagaggcccagaattcaaatttacattcaaatcttgtgccaaaatttatcttcaagttatattgtgaccttaag

SEQ ID NO: 26725 - DNA, 543 bp, Zea mays
  Peptide Sequence Number=SeqID_68504
atggctgctaccctcgctgttcttcccctggtctccggcgacaatggcacgcgatgcacagaactggcgggcgaagacgagctgcccgcgctagagcaccacggttccagctccggacctggagcgccctcgcggacgaatgtcgtcggtggcggcacaccttcacgcccggcgatgttaatttggcggctagcgattaccctaacgatatcggctgctccgagctgcggccctggtgactttatatccggagcgtgcccacggccgcagtggaagcggaataaccaacctagccgagatctacggaggacggcaccatgctcagtcagccgcatccgagaacggcgggtggaagagaaccagagcagtgggtcccgcgagacagagggagtggcgcgcgtggaagggttttgggccgcgcgggaggtttctctgggtgggccgaatttggtgacagaggcccagaattcaaatttacattcaaatcttgtgccaaaatttatcttcaagttatattgtgaccttaaggtgatgttctcatga

SEQ ID NO: 26726 - DNA, 456 bp, Zea mays
  Peptide Sequence Number=SeqID_68505
atgcaggtggcgtgcaaccgcaccatgagggcgcaccccttcgacttcgacgcatccagcatggaggcccagacccacacgtcatgtaactggcgtgccggttactacgtgcgagaaactgcaccaccaattgcgccaatgtcgtgccttctcgactgcggaaccagtgccgcgactcgaggcaaccctgcgcgtggcccaacagtgccagtcgagcacatcgatcacggggaccgggaaaggggatactccgaaagggatccttctccgcgaaggaagcgggccccgagccctcctactgatcaagggttcgaaggctggcccctcggaagggttcgacagccgccgcagagcactcgggcttcaggctcattactgatcaggggttcgaaggctggcccctcgaaagggttcgatagccgccccagagcactcgggctccgcgcccactactga

SEQ ID NO: 26727 - DNA, 309 bp, Zea mays
  Peptide Sequence Number=SeqID_68506
atggccccggcctttaaccacgtcgctactagccgcaccagctcgccgataaccgttgtagcccctcagccggtgagtgccacggtttcacccgcgccagtaaccttcttcctctccggctgccgcgcgtctccgttaaattcactggccaccgctcaagcatgctataaattgagtgcacccgcggctctgttagaaaacgaggaggaaatagaagttgaagaagcgaggacttcaccaccaccacttgaagaacatcaggcaaaaaactgtttttactttgatatctgtggagcagagcctaattaa

SEQ ID NO: 26728 - DNA, 291 bp, Zea mays
  Peptide Sequence Number=SeqID_68507
atgtcgaggggcggatcaccggcggtgatggctggaatagggctggccacgtgcgcaggctgtcgggctcattggcggtatgtgctccggcctgctcacggcggtatagttcaattaaatggcacggggagcgtcactggaggtcaaggatgtcgtaggcacaaggaaacgacgaatggcttaccgtctggctcggtctacttgcgacggcagaccgctgaagtctggcgacgtcgatctggcatctccggtgaggtggtgtccaatccgcggctcgggaagcttcactga

SEQ ID NO: 26729 - DNA, 201 bp, Zea mays
  Peptide Sequence Number=SeqID_68508
atgagctccaccgccgtaggcagctcggcgccacagtctggtgccgctaggaaggagaagatcgtgctagacattgatatgacggtcaagatctcatcgtaccccccttcggccgagactgattgcaaatgggccctcgggttctgttggaatcaacccgcgatccagtcatggtcagaaaccatttcaaccaagccctga

SEQ ID NO: 26730 - DNA, 330 bp, Zea mays
  Peptide Sequence Number=SeqID_68509
atggcgtatcaaatgttgtcggtgtgggttcatatttatacgctcagtgccttgcaatttggtggaccccatctatcagtgactattgttattctagcaaaagggaaggtgttttttcggaccttcggcttaaggccttcgttcatgttgcagtctgaattcgttgattataacaaattaatgctgaaccttcggactcggaatgaagctgtccacaatatggagagcatgattgagacaaaggttgatgcagttccaaagctacgcgcaagggagcttcggctcaacagcagaaagaggaaccgacttaaaggggaaaaggttttctag

SEQ ID NO: 26731 - DNA, 177 bp, Zea mays
  Peptide Sequence Number=SeqID_68510
atggacagacttactgctatggttcactgcgatgtgttaaagctactaggcatgtggcacacggtcgtaaccataatcaaatacttcctggttcctactcaaaatcacttccaaagttcatcccaggcaactgtcagtaaaaattcagactcaaagttgactgacagcccgacttaa

SEQ ID NO: 26732 - DNA, 537 bp, Zea mays
  Peptide Sequence Number=SeqID_68511
atggcgcttcctgtcgacgtggtcggtccgcgccctaggttgggtgatgtggaggctcctccgaggtcgaggtcgagtctatcttccgtggccgtggtcgagtccgagcccctgggtcggcgaggcggagaccgtcggctgaggccagggctgagtccgagccctggggtcgggcgaagcggtcccaagtccgagccctgggtcgggcggagcagagttcaccgtcttcaggggcttagcccaagtccgagccctgggtcgagcggagcggagttcgccgtcttcaggggcttagctcgagtccgagccctaggtcgggcgggaacggagttcgccgtcttcaggggggttagcccaagtccgagccctgggtcgggcggagcggagtttcccaatgtgcctgagggccggggcctgactgcctgtcagcctcactctgtcaagtggcactgcagtcggcaggcggcgctgtccttctgtcaggtcgggtcagtggagcggcgaagtgactgcggtcacttcgcctctgtcgactga

SEQ ID NO: 26733 - DNA, 2164 bp, Zea mays
  Peptide Sequence Number=SeqID_68512
ccgcgcccctcagctctcctctctggtctccaacgcccagcgccgcgcctgctccagccatggttgccgcgctcccagctcagaattcccctgtcgtgcagctcgcggaagggtattcagttaaccatatggtatcacctcagagggctgaagaaagcacactgagaggttactccaatctttctacattagaaacaagacagcaaaaggttattcaacctgctgatgttcagagcattgcaggcaatgaaaatcctaagcgtgaggatggactagatggtgcatgtgctcagaaaaggttctttctcaaagcttctttcacaaaatctgaatgctcaaagcttctttctccaattaggtggatactgaagagagagtacttgacctcgtgcattgaggccggcaagttcgtggacgaagaaccgtttgaatggttcggcacaggcttcaacgatggacgaacaatcagtttcgacgctcccaggaaatggcgaaacataaggcagcagatgggccatggcgccttctacggaatgcagatcgttgcctacggacagttcatattaccaactctggacacagtaaagcgtgcagtaaaggccggcaatggcgccgttttagcaacatcgccgccatacacccggaattcatcagccacggcccacggcattccctgtgtcagcgccgattacctggtcgagtacgtgtgcaagccgggccagcccctggaccggcacgttctcttcgagacgaactgcgtggccagcatgtccctggagaaactcacgaagaagcagctagagatggcaacggcggagaagtcggaaccgtcggaagacgacgatccagaggacctgagctgctcggcgtgcggccgcagggaccggggagacgtgatgctgatctgcggcgacgaggccggcggcgggatcggcatgcacatcgactgctgcgaccctcccctggacgccgtccccgacgacgactggatgtgccccaggggctcaagggagctcaagggcgcagagccgaaccaggggcgagctcaagacgagtgcgccagacggcgtctgcgtaggcgaacgcggcatagcgtccccacagtcccaaggaatcggtggaatccaacaagtccaaccgccgtctcatctctctgcttcccggaacctgagtccgagaagagcccgttcgacatggacacggagccgctgctgccggcgcacctcctccactcgctgccggagcactcggaggtgttccacttctccccgccgccatccccttcctgcccatcaccggcctcctcctacaaggaccgcatcatcttcggcgcccacccgccaccgcctcagccgccgccgccccctccgcttcccccgtcgcactcgcaccgcgcgcaccgccgccgcagctccgtggacggcctctacgattttgacctgccttcctgctcctcgtccccgccctcgccaccgtcggaccccgaggacccttcctccgccgccgctgccggcgcgtcctctctcttcgaattcatcgccaacgccgcaagcgcccgcaccaacctccaccgctcccgcaccgccccagccatggcgccgctcagcgccgtgacgctcgcggccgcagccgctgccggggaccaggctcccgcgccgcccgagcgcccctccatcgtgctgcacaccttcctcttcctgctcgcctacctcgccctcggcgagcatctcctcatcaccgcgctcaagaacccaacctctgcgcgcaagcaccgccacaactacatctttgacgtcaagaagggcaggatgcgcatccgtatgaaggtggcgctcgcgctgggcgtcgtggctgtttgcgtgggtgtcggggctgcagttctcaggagggtggagagcctggggtggctcgacgccgtctatcttgccgtgatgtcggtgaccacagttggttatggggaccaggcgttccggacactggctgggcgcctttttgcatccgcttggctgctcgtgtccaccctggctgtggcaagggcattcctctacttggcagagatgaggattgacaagaggcaccgagccatggccaactgggtgctgtccagagacatgaccgtgtctgaatttcttgctgcagacattgacaacaatggatatgtcac

SEQ ID NO: 26734 - DNA, 213 bp, Zea mays
  Peptide Sequence Number=SeqID_68513
atggagactctttcggctgaagatcaaaaggaattcgaggagcacaaggagcagctgatcaagtgcataaggttcatatacacatataaagaaaatgatcgtgagacaattctacaagtttggagcaaaacagacttgctgcagccagtggcgtactggattgtctgggtgcaccggacagtgtccagtgccctggctagagcacttcgctaa

SEQ ID NO: 26735 - DNA, 300 bp, Zea mays
  Peptide Sequence Number=SeqID_68514
atggactgtctagtgcaccacgaggacatacgacttcaacggtcaacagctccaaaccccaacgggcagttgacgtggcacacactggatagtgaacaatattgtgtctggtgcaccaccgaactgtccgtgatgttgggagaacacgccaaaagagagatggtcactggggaaaatcccggatcttcgagaaagaagaatgaagaaaggactccgtcgaaggaggccggtgacaagcacaaggaggaatccgtcagctccatcaagtcacataagaagggtgacaagaagaaaaagtag

SEQ ID NO: 26736 - DNA, 318 bp, Zea mays
  Peptide Sequence Number=SeqID_68515
atgatgaccgcgtcaaaaaaggctggcccctcagaagggttcgacagccgccccagagcacgcagagtcagggatgaccctgggtacgtccattacatggccaaggctcgggctacgctcccgagggatcgcctgacaccttatcctgacacgcgtgtctcagtcggcaaggtcgaagcctcggcctcagcctcggcctcgggaggagtcacatcctcgcccgacctcggcctcggcctcaagagaagtctccgcctcgcccgacctcagcctcataccgactacgctacaggggatacatcattaccctactcctag

SEQ ID NO: 26737 - DNA, 309 bp, Zea mays
  Peptide Sequence Number=SeqID_68516
atgtgtggatttttggtgggcgcagtatttcatcagatgctcaggacgctcccaatatgtacagcaatatgctgctgctttccatgcttgatttctgttttgcgtcttcaagaagatttgggtcaaaatagaggagctactcaagagctaatagatgcattgccaacctacaaattcaaaccaaaacgtgtcaaaaactgggggattgaccatgcttcaagctcagagcatcttgatgagggtggcattcttggcccaggaactaagaaggaaagagttgtttcagctgaagatgctggtttgctttag

SEQ ID NO: 26738 - DNA, 1554 bp, Zea mays
  Peptide Sequence Number=SeqID_68517
atgaggacactttgggaaggaaaaaaagacagacggaagaatcattttgctcatgattttatccttaaacagagagaacttgagcgcacacttctaatatatcctgatcatgcatttttatatggaagtatgttactatgttgtattcaattaattaaggagtggggagttgatcctaccaaagagatacctccaagtgcagctacaaccaaatatactgatttcctacttgcaactgcggctggaaaagttgatggcacaaaaggttctgacaaaatggttactccatttgagaagactaaaattgctgcatacactgttggggccatgactccatgcatgaggctttatgcatatctaggcaaagaactcatggttttccttaaacaagatgaaaatcatccatacaagaaatggattaacacatatgcatccagtgattttgaggacaccacactccaaatagaagaattgctagacaaactaagtgtctcattaactggtgaggaacttgagattattggcaagctctaccagcaagctatgaaactggaagtggagttcttttcttctcagcttatagaccaacctgttgtagctccactttcaagatactgtgatccaaaatataaactcttgatcttttctgattttgatttgacgtgcactattgttgattcatctgccattttggcggagattgcaattttgtcattccaaaaggcaaatcaaagtgggattgataataacctcgaccgtgcaaaatcgggagacctgagaagttcgtggaacatgctctctaagcaatacatggaagagtatgagaaatgcatggaaagactacttcctccagaagaatcgaagtcactagattatgataaactgtataaaggcctggaggtgctagctgagtttgagaagcttgcaaattctagggttgtcgactctggtgtgctgaggggaatgaatttggaagacatcaggaaagctggtgagcgtcttattcttcaaggtggctgtaaaaatttctttcagaagattgtaaaaacaagggagaacctcaatttggatgtccatattctttcctattgctggtgtgcagaacttataagatcagccttctcatcagccggttgtctagatggtttgaacatacattcaaatgagtttgcctttgaggattctgtttcaactggtgagatcgacagaaagatgcagtctccgctagacaaagttgaaaagttcaagagcatcagaagtgacgtggacagtacagtgccattcctatctgtttatattggagactcggttggagatttgctctgcttattggaggctgatattggtatagtcattgggtcaaccacaagtttgcgtagggtgggcaaacagtttggtgtttcttttgtcccattgttccctggtctagtagagaagcagaggcaactggcggaggaagatgcatccgtattcaaggcacggtctggagtcctctatacggtttctagctggtcagaaatacacgccttcgtactgggaagtgatttcagctga

SEQ ID NO: 26739 - DNA, 237 bp, Zea mays
  Peptide Sequence Number=SeqID_68518
atgggtcctggggcttcgtcgggtgctcggggtcatgctcgttgcggcgctgggattagaaaccggctggttatcggggaattcctcaccgtcgttcgtgggccgccatggatccgcccccgcccgtggtcggggtacctcgacgtcctaactatggatcattatgttaattggaacatggagcgaccacccgggaaaacagtgctaccacaagggtttatggacgcccttggctga

SEQ ID NO: 26740 - DNA, 288 bp, Zea mays
  Peptide Sequence Number=SeqID_68519
atgtccgccaaggccttcgcagtggtgttggcggttggtggtggtgggattagcggctgcttcatgaagttatcgtcacttgacatctatgataccagattgataggttctagaatgcgtggaaagcatgttggtggctgtacagaagtaccacatggtaaaattgattcagctactagctctttccttcactctagtgtatctgcactaaggcaacgtagctttgcccttgcatttgagaggccagttgttgcaattcggctcagccaaagatacatattcttctaa

SEQ ID NO: 26741 - DNA, 438 bp, Zea mays
  Peptide Sequence Number=SeqID_68520
atggctagcgtcatgctctgcttaagcaaggtgttccaccctcagacagatggccaatcagaagaattcaataagtggcaccacccgcaaaaatccctaattgatatgaaaaatcattgggtgactttgctacttagtcatgaagaaaaggaaaatgataggttatacagtaaaaatgacgtaggaaataactaccaaaaaatcacaacccttcagatcatgcgacttagtaaaaacacaagcatagcaaagctgatggtgacaaagaagaaaatcaaatgcaactatgaacatgtgggttattataactggttggcaaagtggagaatgagaggaaaggagcctgaaacaaaaactgtgtatgagattcatacacgttccatgaagcacagtgcacaactaccgcatattcatttcaaacagggcaaaaactggtga

SEQ ID NO: 26742 - DNA, 264 bp, Zea mays
  Peptide Sequence Number=SeqID_68521
atggctagaatacaatggttcagcatcagcttaatccatggaaggtccaccacatatatatcaatggaaatgcaatgtagatatttaagtagtgagtacataaagcgcttaaaggtgccgttgctcaagttgcagccggaggttgcagctacacaggacacaaattcagatataaacggtttcatctcagatgacacaacaactgaaatattttgctttgacaacattgctaaacatattcttggaaaaccttatgaaccctga

SEQ ID NO: 26743 - DNA, 402 bp, Zea mays
  Peptide Sequence Number=SeqID_68522
atgtccggtgcacaccggacagtgttcggtgctccagaggagagcgactctgaactcgccagcttcggattcccgctccgctataattcaccggacatgtccggtgcacaccggactgtccgagtgggggaggaaggagattattataacagtgggatgaggcatggttccccaacgctaggcgtggttgaagctctggacgccacgagggccactgcagtcactgccgaggaagcacgcactgccaccagggagatggagaaggccgccactactgcaaagctagccgccatagctatgaacaaggtgggatttgtcgtcgttgttgtggccagtgccgtcgtcgaggaagccaatgccttggattcagtggcacatctctatttggctgtgaacttatga

SEQ ID NO: 26744 - DNA, 624 bp, Zea mays
  Peptide Sequence Number=SeqID_68523
atggagaaaacaaagaagaggaacatgggggtgggcacaccacgagacatgggaggacacatcaaggagaaggacaggggaggcaagacaacaatactatatgggatagaattttggttcaacttgatccgaaacccgatctcaaagaggcgcgctacgaggttctcggcgtcgatcaggacggcgacctcggcgcccgtcaccttcggcttcttcaccttgggcttcttaggcttcttgacctccctcctggcgcggggtagcggcctcgttagagtcatcatcgtcggagtaggcggcacccgtggcagtggcgatccgcgcgtagtcgaggtcggccgccctagacgtgagctactgctgcagcgcgcggtggcgctcctaggagcgcttctcggcggcatcgaagacgccgctaggcttgtcattggactacggcaccagattgggcaccgtggcgtggggcgattgcgcttggggtacaacatggccatggaggcagccgccgccatggaggaggaggaggaggcacccgcgaggtcgtccatcgccatagctaccacgcacgcgcagagggtgaggcgagggtcctcctggctttcgagaggcgacgagcaggaatag

SEQ ID NO: 26745 - DNA, 300 bp, Zea mays
  Peptide Sequence Number=SeqID_68524
atgctccctggagttcatatagacgagaaaaagattgtatcatctactgctgctcttgctcttaaagaaataccaaagaagttggtggttgttggagctggatacataggcttagagatgggctctgtttggaacaggctagggtctgaggttactgttgtggaatttgctcctggcgttgtcccatcaatggatggagagattcggaagcagttccagcgtatgttggagaagcaaaaaatgaagttcatgctcaagcaaaaaagattctttgttgttctttttgtcaggaaactgtga

SEQ ID NO: 26746 - DNA, 366 bp, Zea mays
  Peptide Sequence Number=SeqID_68525
atgaggagtccaggtctaagatattggacaaccaatgctcgtagtgtggcagtagtcgacatatgctacggagttggtggtgcagcccacttgatgaattttgaccttcaacaatggaatctcattttcaaatttgctagatacgattttgcctactccaactctacaaatgagatcaatgaggaacggttcatgaattctccgattcacagtttggtcagcaactcttttgcaggatgtctaagtgctagggctgtttcagcatgtatgacgaatgggctagcaagagcaatgttgaatactgctggagtggatgctttaaattcctggtgcatcaagttacataggttgcatcgggaaggatag

SEQ ID NO: 26747 - DNA, 1308 bp, Zea mays
  Peptide Sequence Number=SeqID_68526
atggatatggccattgacacgccatcgccggcgccgcccacgccgccggcgccatcggcagcggccgggcggcagacgcgtgcggcagaggcggtgcgtctggagcaccaactggtgcgcgtgcctctcgagtccctccgcgccaccgtccgctcgaaccaccgcctcgccgagaaggagatcgccgccgtcctctcctccgcctccgcggcccccgcagagagcagtgccgccgccgtcgaccacctcacctccctcgtctctcgcctccacggcctcaagcgcaagatggaggagggcgcacgagcggaggaactgcaggtgcagcggtgccgggcgcgtctggaccggctggcgactgccagcaccggcgacgatgccgaatgggaggacatgcggttgaagaggatcctggtcgattacatgcttcggatgtcctactacaattcccccaccaagctcgctgagacttctggtattcagactgacacctatcatagcatccatatctatgttagtatggctagcctattgcttagaactgacctccgacaagttgatttggacctcgttgatattgatgtctttctcgatgcgaaaagagtaattgattctcttcagaataatgaagtttctcctgctttagcttggtgtgcagaaaacaagtctcggctaaagaaatcgaagagtaagcttgagtttttactgaggcttcaagagtttgtggagtttgtcaaggttaagaatttcattcaggctatagcatatgctcgaaaacaccttgctccctggggctctgtacacatgaaagaattgcagcgtgtcacagcaacattggtttttagaagcaatactaattgtactccatacaagatattgtttgagcaagaccggtgggactatcttgttgacattttcaagcaagatttttgcaagttatatggcatgacactagagccgctgctgaacatatatctgcaagcaggcctgacagctctcaagaccccgtatcctcgcatgttctgctctgagggtagctgtcccaaagaagaccccttgtctctggagggcttcaggaaactagccgagcctctgcccttctctaaacagcaccactcgaagcttgtttgttacatcaccaaggagctcatggacactgagaacccgcctcaggttctgccgaacggctatgtctacagtgagaaggcgcttcaagagatgtccaagaaaaatgacggcaagattacatgccccaggacaggagatgtttatgacgtttcagagtgtgtcagggctttcatctcctaa

SEQ ID NO: 26748 - DNA, 1434 bp, Zea mays
  Peptide Sequence Number=SeqID_68527
atggagaatcgcccactcaaaccgaggaggctcacgctagcccctggctgggaggcggcgctctccggcctggatattcaggtaagtgcgagcaacacatcgagtaacaactgcaaaggaccctggggcaagttctgggtgttggactcggacgactcggatgttgaatcgtgtggagaagatgaaacatcaagagatgatttcacctctccatgttcgacttcgattatgtcgtcgcaggcatcaaactcgattgccccgggggaacttttaagcagctctccgccgtcggtgaatgggagctccggggtaggagtcccaggcaagtgcggcggtgcaatgacccgaccatggataggctcattaccgaagccaagaaggtctcctaagttaactcttggggatgccttgttgatggctaaggcgggcaaaatccagggtggccggggcgccgtgagtgcgtcgaaatcgtgcccggccatgattgcagagtcgaggttgtgcccgtccatggccatggacagaacgcgtcaaaggtccggcacaacagcgggggagacgaagcgtggaagccgaacggaaaggaaccgatcgggaagaacaatcgcttcggttccctcgtctcaattggttgccacagcggcatgcaatggggaagtggactcgagcgctaagtgcatgacagtgggcccgacggggaatggtttatggcgatgttcagtccgaaaggagccatacaggccacctatcggcctgttagccctgttcgacagagcacacgcgccgcaacaccatttccaccgagctccaaagacaaaacaccgcgccctagggtttcattcctacgcggcttcggttagagcacgaccggcgacaaccatggagaaccggggcgatgctcagcagggtgcgcaggggggcaggcccggcgcggcgggcgccgggagagcggcaccaaggcaagatttccaatataccgggtctggtcagttcaggccgggctatggaggagggcgcggctatgcccaccgcgggaggacgtgggcgcgccctggacatggccgaggcgcctatggtcaggctggcgggcgaggggaggtcagacctatccctgccggccccgacatgtcgactccaatacctggcgtggaaggcacattggggacaagaacgatctctggtggcagtgtcggtacagcgggtgatcaagcagggatggcggcagctatccttcaacaagcgctctctgctctccaaggcatgaatgcggcaaagggaggaagcgatgcaccaccacctgctgctcatcaggccacagccaatcagtcgcagcctccgaacattgaggggaagaagacaccccctgccccggctactgaaggggaaaagaaggtgccaggaaaggagaaggaaggttcatggacgaatctctag

SEQ ID NO: 26749 - DNA, 465 bp, Zea mays
  Peptide Sequence Number=SeqID_68528
atgggtagaggcaggaggggtagtggctggcctcgccgcgccgatggcaagcgcaagcacgctccgagccctcccttgaaggacttcggtgactctgagtactcggaggagacctcctctgaggctgatcgttcgcctgctccagcttctcccccgtcgtcatccgaggactcagatgactccatgggactgtccaccacggcccgagcgtactggcgctccatcgagcgcacgcgggctcgatgggtcgggatgagtcgggggtctcctcggacgaggcggactccttctgaggagtggagcggcggcgatggtgacgacgagggcgacaatagcagcagcgacgatgatgacgggagtgacgacagcaagggcgacggcggcgagggtgacagtgacggcagcaacgacgacggtgacgggggcgacaacagcaagggcgacggcgacaacggtcactcataa

SEQ ID NO: 26750 - DNA, 1290 bp, Zea mays
  Peptide Sequence Number=SeqID_68529
atgaatggtgaaagttcacaaggggacgacccgcccccatcaagtcgcctcgacaaccaccgccgtgatgatgaggatggcaatgactacgacagtgaacgtcgcggccacaggagttgcaaggaggacacctggagcgccaggattttcaggagcctctcacgcgctcctagtgagcgatactgctcgtcatcgtgccatggtctccactgtgacgtcgagtactcaggtcgtcgccgagttcgagaaggtcgctgcggggccgcgacgtcgacgcaagctgtcaaatgcagcacctgcagggtacggggccgcagcctcgtacgtcgcttttggagacgtgtggagccccgtactcaactctcaccgcgcgccagtcgtgcggctcgaagtggtccggggagtaacgaagacatgggtggcagctaccacccctctccacaacctccaagaatgcgtgctgacccaaaattgtgcacaaaactggtgagcgccacacaactgcaagagacttccgcacaacacgtcgacaataacctgggtatgcatttatcagcaaatgctttcagtgatgtgcactccaacccatctatgaaagagaattgctacaacgatcccgctgctaggtgtttgattccaatacaagatgtgttcagatcaatttggtcctctctttccacatattctaggagcatggagaggggtgcagaagtgctacaacaacagcaccttgatgcccatcctccatcactgatactggatgctacaacttatcgtggtgtgcaccggtctgttgacctggcagcggataggctggtggagtgcctctttaggccgcccgcgcggacgattctgctcagcatgactactgcagaaattcaagagacaaggaagacagtaaccactaaaatagaagcaagcaaggcaaccccaacactgtgtcaccgacttcatactgtcaacacgaccacagtacgacgcagcgtccgactcgcaaaatcttgtcctatgcatgtaatccagcgtgcccaacgaaacctttgtagaaagctcggactgctaaacaacgaatccaataactttgaggctgccttacaaaaattcctaaccatgttccaaaggactcagtcactggagacacttgcagccctaacgtccgccttcaacctcaaagggtcgatagagaagagcttcaaggctgctatgattgcgatgatgggggcaggagttgcagaccggcaagaaggcattgggagtctgcgtgttgaagagctgcagtcaatagcatga

SEQ ID NO: 26751 - DNA, 390 bp, Zea mays
  Peptide Sequence Number=SeqID_68530
atggtacttgaagtcatcgtggtcaccatgtattggcagttgccactgcctgactcggatgtcgagattgtcgtgctggaaatctctacacgccactgttgcatctctgtggcgacgatggacgaaggtgatgaagaagtcttctgggtagtgtctggccactacgatgtcaaccgacagtacaacaaacctagagcagaatgctttcttgatgacatcgacgccgaccgccggtctgtctcgccccagtcatgcccagacagcatgggaggccaggccatcgtccaactgccaagaggtgggaagttggaatggtcgaagggaggaggtgtttatggctttactgaaggtggttgtggagttgtggtcttggaggccttggagttctaa

SEQ ID NO: 26752 - DNA, 177 bp, Zea mays
  Peptide Sequence Number=SeqID_68531
atggcagcgcttgatatcggtggcggcaccgacgaccgccccgtcatcagcaaacgggactccctccccggcgagcagatctcgtcagaggaaggggattctctcctgcaagcattcactccccaccaccggccaaatcctgcctcagatctggacgacaagatgttcctgaagtga

SEQ ID NO: 26753 - DNA, 429 bp, Zea mays
  Peptide Sequence Number=SeqID_68532
atggcgcccatgtctctgaccgatgaagcggtgggttcagcgtgccacggacatcgatctgctcaagcgggcgtggcgcaacgagaaggccgcttcacttcgactcgcccctcgcgtcccgcgtctgcaagcaaatccagcacctcattcgcttttgtccctccccgtcttctcggccatgttcctccacttcccccacatacgactctgtatctgactatggtgccctctcctggtgtcgtattgcccaagaggagacgcttgacgacttcaccgacaacagcgttgacgacctggtggtctctctaccagatggaccttgaccacacgctcttcctcctccgctcctacctctgcctccacctgcagatggttagtaggagttcagaacccacccgtgtttgttcttgcgccgccctccctagctag

SEQ ID NO: 26754 - DNA, 291 bp, Zea mays
  Peptide Sequence Number=SeqID_68533
atggcacctatgagcggtaccaccaaggttaggtccttcatggctgtcctaggcttagttcttctcatcgtttgtgcgagctcccagtcctgccaagatgatttgctttcacgcttgcacacatcgctgagcaccgactgcctctacacaacaaccgcactagcagccattaccacgcgggacagcaactaccaccaggatccaagccaagcaatgcaacaagttgagataaaattaaaagaattgagagaacatcaatccaagaagaaaaagaatccctatgtttcctaa

SEQ ID NO: 26755 - DNA, 383 bp, Zea mays
  Peptide Sequence Number=SeqID_68534
atggataaaaaggtcgctacaccatatttgatcaagaagaaaaagaatggaaaggtgatagcaatcaaggctaacaatcaagccaacaaaggaaagggggccaaacgcatttgggtgccaaaggagattatctcgaccatgaaaagcaccaagaagcgactgtggctcgcagatccggtggcgcgatgtcggttcctcgacccggaggcacaacgacagcggctccctaatccgaaggcacgacaccggtggcttcccggaggtggctccccagaggcgtgtgcggggttcaccatccgcaccacgggccccgtgacatcctccaatcctgcgcatttcgagtatcctccggcgacagtctcctccaacccgacgactttggg

SEQ ID NO: 26756 - DNA, 273 bp, Zea mays
  Peptide Sequence Number=SeqID_68535
atggctccagctcatgataggctccgccgcctggtgctgctcctcgtcgttgccaccgcggcggcggctttgcttctggcgccgacgacggcggatgctgcgctgccgcgggtgcagcacacgcccaccaaggccgacgggtcgctcgccatcctcgtcgtcggcgactggggccgccgtggacagttcaaccagaccttggttgcccagcagtacccatacaaccaaacaagacttaagggctactttagaaactcaagtctccttaggtga

SEQ ID NO: 26757 - DNA, 198 bp, Zea mays
  Peptide Sequence Number=SeqID_68536
atgggtgcgatggtccaggtagaattgaactttgaggagtcgacttttacagattgtcttgtcctactgcctactatctgccttgaggaagtactaaggggtttccgttctgtcttcagtggtgcaaacaaaattggtgatggtggtttcggttctgtcttcagtgacacaaataacgactttgtgctactatgctga

SEQ ID NO: 26758 - DNA, 639 bp, Zea mays
  Peptide Sequence Number=SeqID_68537
atggatggaaaccggcgcgactgggggagcggggcgcggctgccatggatcggcgagattcttgtgtcacgcaaggaaaggaggagcggggcgcgcgggcagccatggatggaagtcggcactgctgggggagcggggggcggctgccatggatcggcaagattctcgcgtcgtgcaaggaaagggggagcggggcgcgcgggcagccatggatggaagcccgacgctgctgggggagcagggcacgactgccatggatcggcgagattctcgcgtcgcgcaaggaaagggggagcggggcgcgcgggcagccatggatggaagcccgacgctgctgggggagcggggcgcagctgccatggatcggcgatattctcgcgtcgcgcaaggaaagggggagcggggcgcgcgggcagccatggatggaagtcgacgctgctgggggagcgaggcgcggctgccatggatcggcgagattctcgcgtcgcgcaaggaaaggggagcgggatgcggtttcggcagaaccgtgcaccatccgcctctgtggacgcctacattaggcacttaagtagtagtagagattataataagaaaaatttaatatctcaaactttttatatcggtaaatggatcgcttaa

SEQ ID NO: 26759 - DNA, 435 bp, Zea mays
  Peptide Sequence Number=SeqID_68538
atgacggacaacgacggcgccgccgccaggattaggaaggagagcctcaaggtgggggatcacatctactcctggaaggtgacttcttggaaaaggctacttgcattgattcggcagtgggaagtgccctgggatgacaccttagatacagtagtttcttacaaaattagtcaggttgtggatgctaaagttattcatctggactataataatagtcgcatatttttgtcacttaaagatgtaaaggtgatgctggagacaacacttggcaaagaagagttgaaagagacaattttgatgtgcactaatagggattggaacagcatacagactgagggcaaggatcgtcgatggagctgccaagttaaatggtttgttcaattgacagaaacaaagtcaattaactcacattctactacgtggaacaagaaatag

SEQ ID NO: 26760 - DNA, 1545 bp, Zea mays
  Peptide Sequence Number=SeqID_68539
atggaccgccacagtcttctctaccaatccctgatcttctccgtagtcaccatagcgctgatccgcgtcctgaagctcttcctgacgacaagagcgcctaaggtgaggctcccgccggggccggggaagctgccggtcatcgggagcatgcaccacctcatgaacgcgctcccgcatcgcgcgctacgggacctcgcccgcgttcacggcccgctcatgatgctgcagctaggcgggacgccactggtggtcgtgtcgtccaaggagatggcgcgcaaggtgctcaagacgcacgacgccaacttcgccaaccgcgccaggctcctgggcggcgacatcgtgctctacggctggtcggacatagtcttctcgccgaccggggaatactggcgcaagctccggcagctttgtatcgccgagatcctcggcccaaagcgtgtgctcaccttccgccacataagggaacaagagatggcggctgaggtggcaaggatacgagcggccgggccatccacgccggtggaactcaacgcaatgttcatcaacttggccaacaccatcgtcgcccgtgcatcgtttggcaatgtgcaggggaacgccgaaaacttcctgtcggcaatcagtgctggcgttgtcttgacgagcgggttcacggtccccgacctcttcccgacctggagacccgtgctcgccgcagtgaccggcatgcgccatgccctcgagcaagtccacaggacggtggacaccaccctccagggcatgataaaggagaggagacgcatccggggcaccaagcggcagggcgagcaggacgagaacctggttgacgttctcctcggcttgcaagagagaggaggcctggggttcaatctaactgagaacagcattaaggccgtattgttcgacatgttctcggctggatcggggacattagcagcatcgcttagctggggcatgtcagagctgatgctgaacaagagagccatgagcaagctgcagggcgagatccggcaggcattccatggcaaggcgacggtgaccgaagccgacatccaggcaagcagcctcccctacctgaagctcgtcataaaagagacactccggctgcatccgccggccccgctcctggtgcccagagagagcatcgaagcctgcgagatcgagggctacacggttccagccaggtcccgtgtcgttgtgaatgtgtgggcgattgggagggacccaaagtgctgggatgacgccgatgagttcaagcccgagcgcttcgaggatggcatggtggatttcaatgggacctgctacgagtacctgccgttcggtgcaggaaggaggatgtgccccggcatcgcctacgcgctccccgtcatggagacgatgctcgtccagcttctctatcacttcgactggttgctgccggatggtgtgagcgagctggacatggcggagatgcgtggccttggagcccgtcgtaagtcgccgctcctgctctgcgccacaccattcgccattcccgaatctacgacttctgaagtaccccgctga

SEQ ID NO: 26761 - DNA, 543 bp, Zea mays
  Peptide Sequence Number=SeqID_68540
atggggcataggaatgatgagatcaatgcggcagatggaattgatcgtggagaaggtgtagaccatgatgacgatgagaccgatgcggaagttggtggggattgtggagaaagagtgcaagaaactcacgccccatccgagcctgatctggctctatacgagctcagacccatcctggcacagtcccggcctcgttcaacgtttccgtccgacactagccccgacaccgacccgcgaagtggctattgcgcgtccacgaggacgtttcacaacatgcatgcaccatcgtttttgtcgtcgtcggacatcccattcgtgatcccggccttcgccctgttctttctccccaacctactgcccccgcccacggtcgtaaccgcgagccgaccgatgctcgtcgacacgggtctgagatattggacaaccaaggcccgtagcgcggcagcattcggcatatgctacgaagttggtggtggtgttgtgtcgccttggcggatccagggctgggaaggcactcacattctctcgcacttctcggactaa

SEQ ID NO: 26762 - DNA, 642 bp, Zea mays
  Peptide Sequence Number=SeqID_68541
atggaagtagtggcgccatcaatgaacaaaggttggcgaggcgatagcaacatcgtgatcgtcgggcgttggcggccagcgtcctggtgtggtgtccggagcaatggcaatagtgtggtggcccacagggctaggcgttcactccgtgcgccaccgttctgccgcgtctgcgctcccaccacgcgtctgcaatcccctgatcactggggcccattcctccgcgcaggcagtctgcaatcccctcgcatttcatttccacgcaggcagctgaccattacagtccgcaatcacttcgatgtgatcagaggattctatggcccctccgcgcagctgcagtccacgcaggcagctgtagatctatggcccctccgcgcagctgcagtccacgcaggcagctgtagatctatggcccatccgcgcaggcagtctgcaatcacttcgccgcaatcccctccacgcaggcagtctgcaatctccattacacctccacgtaggcagtccacaatctgcgcccacaatctgcactgcgctgatgaacgtttcatggcacggttgcaggagctgctgtacaaggtcgtcggcgacaccaaggttgtctccgacatcagtcttagcccctgcagcacgcgcgggtacctctga

SEQ ID NO: 26763 - DNA, 465 bp, Zea mays
  Peptide Sequence Number=SeqID_68542
atggcggcccgcgaggcctccgccccggctccggcttcgccccacgcaggcgacgggccgggccgcccgccgcggcccacgctcgccctgcccccgcgctccgccgtcgagtccctcttcgccaccggcgcctcctcctcggccggcgccgccgagaccagccccggcccgctcaccctcgccgccgcgctcttccccgacgcgtcctccccggccttccacggctccttcacccagctcctcgtcggcgccataggctccccggccgtaccctcgccgccctctccgttcgccgtcccgccggggctcagcccggccacgctcttcggctcaccgggcctattctctcccacgtgtttgcggatttgtgagggtattacggcgtggaggctggagggttccactctgttggacccgccctgggagatctacatccgaggtggaaaggagcagttacggaaatag

SEQ ID NO: 26764 - DNA, 969 bp, Zea mays
  Peptide Sequence Number=SeqID_68543
gagaaaccagctctgccgaaacatgcaggtaatagcaacattgaatcaaatgaggtttcacaaggactcaaaacttctgcacccacttttgataaacctgctgacgatggatacaactggcggaagtatggccagaaggcagttaagggtggcgagtatccaaggagttactacaaatgtacccacacgagttgtccagttaagaaaaaagtggagcgctcagcagaaggacacatcactcaaataatttatagaggtcagcacaaccaccagcgtccaccaaaaaggaggtccaaagatggtggtggtccactaaatgaagcagatgttcttcatgagaatgaagacatttcaactagatcagaacctggctctcaagaacactctggaaaacatgaagggtcaaatgatggcatattagggccttctgtgtcaagaaggggaggaggagatgagcaattgtcaggctcaagtgatagtgatgaggaacaagatgatgaacaaagggctggcgacgaagaccctggctatgcaaatgcaaacaaaagacatgtgccaactccagctcaaaggataattgtgcaaacaaacagcgaagttgatcttctggatgatggctatcggtggcgcaagtatggacagaaagtggtaaaagggaatccctacccgaggagctactatagatgcacgtaccaaggatgcgatgtgaagaagcatatcgaaagatcatcccaagacccaaaggccgtcataacgacttacgaagggaagcacagccatgatgttccagcagtcaggaacggtagccatgctgctgccaacgccaatgggtcatcttccaccagcttaccagtaccacacaggggtaaattatatctgttctctgatccatttcctcctaggtgtgctgcttcacgctctgcgccgcagcaaaaattgggcactgcaagcccccaccattggttttag

SEQ ID NO: 26765 - DNA, 210 bp, Zea mays
  Peptide Sequence Number=SeqID_68544
atggccgtcaactgggagctgcagggttgctgccaccgcgaccagaggatcttcatcaccggcgtctccaccatcgtcatcctcctcctgaggacgttcctgctcaagccgttcaagctcatcaccgtcttcctccacgagaccagccacacgctcgtctgcaagctcacctgcagtgatgctgcaagttctgagctggaatggtgctaa

SEQ ID NO: 26766 - DNA, 534 bp, Zea mays
  Peptide Sequence Number=SeqID_68545
atgcccccgcctccatctcgatcgtccgattgccggatcaatcccgcctccatcccaaccgtacgattgcctctctctcacacccgctcccacagccacacccgccgccacgggcacccagccatgcgcgcagccgcctccgtctcgcgcagccatgccccccaacaaccacccgcgtcccgccccaaccccgccgccatgtgcgcagcctggtggaacctggtggggctcgggctcggcgacatggtgggcgccggcgtgttcgtgaccacgggttgcgccgcccgcctctacgtggggccagacctcgtcgtgtcctacgccattgccggcctctgtgcgctgctctccgccttctgcgccgttgtcgatgagttgcgcaggatgctggatcccgggaagccatccttcacccccagcaaagggaagcccaatgtggtcatgttcgtcggcttgcaggtgccaaagatcatatcgtcggtggagggggtcgtcggcctcggcgaccatggctgggcggtgaaggactcctag

SEQ ID NO: 26767 - DNA, 348 bp, Zea mays
  Peptide Sequence Number=SeqID_68546
atggcgacagaagatcgtgcaatgccggggaagtctgtgcttggtggggcggtaggcgtggccagtctggtggaagctgcggccatggccagtgcttgcttttccaccccggatgacaggggaggaaagtcgatgaccatggcgtctagggaggactatgcagtgcatgaggactccgtgcccgacgcggtggtggccctgcccggcgcgtggacagccgtggtaggcgtggtggccttgatggccagtttggcggtgttggacgacagcaagcaatctcctctcgtcatccgactgcgctgcgtacaggagactaacaagaacagtgatatctcagcgatagaatga

SEQ ID NO: 26768 - DNA, 144 bp, Zea mays
  Peptide Sequence Number=SeqID_68547
atggaagcgcacaacctggagacgccgacgtcggacagcaggctgcacacggcggcgctggcctcggacgagccggtcaagctgaacaagggagcgctcaagctcttcctccactgcattcctcttgctggtgggcaagcttga

SEQ ID NO: 26769 - DNA, 276 bp, Zea mays
  Peptide Sequence Number=SeqID_68548
atggagcttgcccccgggagtatgcggatgtatggtggaggagggatcgcggcacaccgtcccaggtccgccggcggcaatgagctcaaaagaaagccccggcggcttggttcccgttggttagggcgaacggcggcgctagctggtgtcgtggccgcgatggctgacgagggtgggagccgggtgctagtgcgtgttcctgagaccgagcagtgggccccgctccgcagtggcggcacaaagaatggctcaggcgcgacttgggctgcgcggcag

SEQ ID NO: 26770 - DNA, 327 bp, Zea mays
  Peptide Sequence Number=SeqID_68549
atgcccccctgtgacgtggtcggttcgagccctgggtcaggtgaggcagaggctcctccgagatcgaggtcgagtctgtcttccgaggtcgaggttgagtccgagccctggggtcggacgaggcggagttcatcgtccgaggccgagacgggggccgagccttggggtcgggcgaggcggagcttcctatggcgcccgaggccggactttggctgctgtcagcctcactctgtcgagtggcacagcagtcggagcgacgcagacggcgctgtcttcttgtcagatcttaagataaagcctgccgcttcagaattggcaacaatataa

SEQ ID NO: 26771 - DNA, 255 bp, Zea mays
  Peptide Sequence Number=SeqID_68550
atggcggcctcacgctggctgtggccgtttcctattcacatctgctggctagagggtcttgtagaggacgtcgttgcagccgtggagggctcctgtagccgccagatcaagggagagggggcggcctggccaatggatgttgttgctgttttggattcctctacttcaagtctgaatttgggattttcagatcctacaactattaatggaactgaggtccctgaaattgattggggtcatcaagtgattgtgtag

SEQ ID NO: 26772 - DNA, 135 bp, Zea mays
  Peptide Sequence Number=SeqID_68551
atggaggaagctgatgtgaagaccaagtgggagaacagctcatggggcaagaagctgattgtccagaagaggagagcatcgctcacccaacgagccctccacggctgcaacgacgtcctctacaagaccctctag

SEQ ID NO: 26773 - DNA, 858 bp, Zea mays
  Peptide Sequence Number=SeqID_68552
atggggtttgcgtccccagatctaattgtgagagtaagaagggcgggcggaatcgcgggcacagccgcacgtggacagatctgggaggaggatggagagtggaaggaggcgatcaacaacggggaaggaagggtggcggcgcagagccaaggtggaggagggagaggaaccgctggagtccgatggtggggtggaggagagggaggggagaccaccggagttgagcgcagtggaggaagctgcgcaagcccgtggctggagccgccggcgaggattaggtcaaatgcgacaacacggtcggccgcacggtgggatgcacgctgggacggtgggctgcacgatgggacgatgggccttaggtccacacgaaaatcattgggccgcacgaaccgctgccacaggcgcgctgacgtgtggtgggggatgtgcccgacagcatggcttggcgagtgggtgcagtggacgcgccgggctggaccagatcgcaggggtgggcatcaacggttaggcacgggacacacggagggcatcggtggcaaatcaccaaccttaggcatgatgacgggcattggcgataaggcgccaacattcgacatgatggagggcattggtggcagcgtcacttttggcatgacggcgggtactacagccagcataggggtcaatgcggcggtgttcggcaccacatggatctgtggcacgtcgcccaccatgggaaccgtcagtatggcgagcattagtggaagggtggccacgagcacgatcgcgcgacttcagcacaataggaatgcccgggacgacgacaggagcgatggggcacgggagcatgagcaagatgttgcatggaatgacacatag

SEQ ID NO: 26774 - DNA, 465 bp, Zea mays
  Peptide Sequence Number=SeqID_68553
atggtggggctgagaggggggtcgacgaactcagtcaagttgtggtcagcaacatcgcggcgtggagcagcacgacacagtggcgaagaggcgacggcggaggtgacaaacgtccgaagaagtgctctggcgagggacgatgaacgacgaccgacgatggatagcaaggaacagcgatgtagtaggaaaacatccgacaaaactgtggagctcgagcgcatggaggtggcatcaaacggggaatggagaaaagggcgagcgcggcagcacaatgacgttgcgaacttcgatgacgacgatgaggctgactggaggggtccgtatcaggcacggtggcggaaaacgacgtgcggcgaggctcggcgcgagcagcacgcaaggaggccggatgagatatatggagtgagggaagagcttggtgcaaggtggggatgggatcagcgagcagggcgctatcttttatag

SEQ ID NO: 26775 - DNA, 666 bp, Zea mays
  Peptide Sequence Number=SeqID_68554
atgaggcgggtggacgacgacgtcgccttcgacgccgggaagccgccgccgttccgcatcggcgacgtgcgggcggcggtgccggagcagtgttggcgcaagagcccctggcggtcgctgtgtggccatggcagcttctcggacagcgcgacgctcaacagcgtggtgggccatctccttcatcctcgtcccctaccatggatggtatactattgctgcggcagtgctctgggcctccgggctccggccgtccagcggtctggctccggcctccaagcgagcagcgctgcgtgctgcggcggcgggccgacggcggtgctccgaggctccggccgtccggcggtctggctccggcctccaggcgagcaacgctgcgtgctgcagcggcgggccttaggcgatgggtgcctgggtggctcctccacggctggcgggcggcggaggctggtgttcgtgatgtggcttgacttggtgacgtacctgcaccaccatgggcaccagcagcttcctctcccctggtaccgcggccaggagtggagctacctgcggggcggcctcaccacggtggacagggactacatggctggatcaacaacgtccaccacgacatcggcacccatgtcattcaccacctcttcccgcactaccatctcgtccaagcggtaa

SEQ ID NO: 26776 - DNA, 270 bp, Zea mays
  Peptide Sequence Number=SeqID_68555
atgggacaaagaaaagaattcgggatgtctttttgccaaggtaggatcacgatcctcttgtcacagtcccctttagatatctgggagagtctagccgccacctacatagcgcttgaggctgccgacgatgagggggtcggtctctgtgaccgtctgttgcaggcggaccaccgtgtcatggagctggagtcgaaggttgtgggcctccatgagggtgtagatgaagtggtcgccttcgtccgtgcccagggtgccgatcgaggagagtga

SEQ ID NO: 26777 - DNA, 675 bp, Zea mays
  Peptide Sequence Number=SeqID_68556
atggtgaggcgcccgtccctgcgaagcccgacggcgcgttgcacctctctgccccaacaccggaacccgcccctcccggtctccggcgagctacccatcccgccctgctcgtgcccgctccgcgccgtcacgcttgctgagcatttagccccgttcaagctcgctcggccaagtttccctctggccgcgccttgtgccccagcgtacgccacggccaagtcgcgactgcgcagccctgctgtacgcgctcgtcggctcgtggcgcgccggcaagccatcccgcagcttcgtcgctcgggcaaggccacgccaccccagcctgctccttgccacaattcgccacgctctgagccactggcgtcgctcagccctgcctcgtcgctccgtccggtcgtgcaccctgctgcgagcatctgcaccgcattgccctgtggccacggtcaagcgcctgcccctacttcttcccagtccttagcgcttgccgcgtgccccaatcccggtgaaccgccaccgccagccttggccaccggtgagtccgcccagccggtgccgctctggtccatgcctccatccgttgtcgtgggccggttgaaggagaagactagaagaggtaaagaagaaggcgtcgaggcgaacctccaggagttccaggacttcgacgagttcgaggattag

SEQ ID NO: 26778 - DNA, 725 bp, Zea mays
  Peptide Sequence Number=SeqID_68557
tgctggcagcgaggaagccagtggaggtgccggggctgcaggaacagcggcgtttcgccgtggaggagctgtgcagcgaggggcaccgggcacatggcgaggaggagctgtgcgcagggaatcctgggcgccatgggaggtggagctcggtggccaggaagagaatagctctacgcacacacaggaaaagcagaggggaagagaagaagctgctgccatgcatgaaggggagaggcgtcgagcgcccaggtggccgaggggaggagctgagctccctgctggcagtggagcaagggacacacagggctgctgccgtgtgccacagattagagagaaaatgtggcttgggagagggaatgggtagagatgtagtggatctcgagtgtcgagaggccgacggcgatggaggcctgggcgagctcggccgtggagctcctgctagaacttctgggcgcttgctcctccctgcgcaatggcaatggccgagctgggagagggaagccgctgctccatgctattggggaagaagggcgccgctactcgcctgcaaggggatgccgagcgccagggggaagaagggcgtgcgcatccaggtgcccaaggagaagatccggtgcaggggcatccatggaggtggctctgttcggccaccatgggagagagcaggggctcaggggaggaagaaaggggtcgactggagaagggagaaggggagtggcggctga

SEQ ID NO: 26779 - DNA, 162 bp, Zea mays
  Peptide Sequence Number=SeqID_68558
atggccgccatgggcagggacgctcccctgctcggctccgttgggaggatgatgggtcgcgggccgcccattcatcgctggacgtctaagattaaaggagagggaaaacttaccccgagatccctgagcttaccaaaaaatgaggcgcagtccagagattag

SEQ ID NO: 26780 - DNA, 225 bp, Zea mays
  Peptide Sequence Number=SeqID_68559
atggtgctcgtcgtcacaactgcgcggctgtcgtcttctgttgagcgaggggagaagaaggtgtatcgcttggagaagtctgagccgtacaatcaggatctagtgaatgtagttcaatctcggagaatagaatctgggttgttgatcgttaatcttacggacggatcagggcaggcgcggggcaagtacacgataatggatcggggatccaacggctccgagtga

SEQ ID NO: 26781 - DNA, 491 bp, Zea mays
  Peptide Sequence Number=SeqID_68560
atggcccaccgcatagcgtctcccgcggtacgcgcgagccggaggtctgacaagccagctccgcttgtcggcgaatttgctccagagctaggtgcaaggtcagtctgcccgcgggcccgcgatgggctcgactgcaaaaaccaggatggtgggttctattactcggaagccgagggtctctttaacaaaaggaccacacgaagtggcgagggttcggtgcggattcagggtgacatggcgaacgcggtcgtgggcacgacatcggtgcagaggcaccggagggtggcagtctacggcgaagtggcctggcggcagcgcaagcctactcatgcgagcaattgcgcgagcaccatggtagggaatgggaaatcaggggcatggggaggtgggttacctcgagagatggctttggggagcttgagcgatggcgagaacatagcggagccttgggtcaacggtggtggcgacatggctgtacggtggagagtcca

SEQ ID NO: 26782 - DNA, 951 bp, Zea mays
  Peptide Sequence Number=SeqID_68561
atggcgacaccggcagcagcgagcaagatgagcaagaagctgcagggcggtggtgaccgtagtagtggcagtagtagtaggggcagcggcaacagtgataagcagcaggtgccggcggcggcgatgaggaagggcccgtggacagaggaggaagacgctcagctggtatggttcgtccgcttgtttggtgaacgccggtgggatttcttagcaaaggtctcaggtctgaggcgcaccggcaagagctgccgcctccgctgggtcaactacctccacccggggctccggcgcggccgcatcaccgccgacgaggagcgactcatcctccagctccacgcgcagtggggcagccgctggtcgcgcatcgccaggagcctccccggccgcaccgacaacgagatcaagaacttctggaggacgcgcgccaggaagcagaaggcggcggcgcagcagcagcagcagcagcaggacagccggagcagcaagacggcgacggcgtcggcgttctcagggtcagcgtcgtccgtgactaccaccacgtccagctgctctggctctcctagtccgaccagccgcggctgtggcacggccacgtcatcgtccgctctgaccgagtccgcgctgcggcaaagcggcggcgaagacgaggacgccgagctcgacgaggcgtccaccaccaccaccaccacggcaagccagcgtcaacaccaagacgacgaccaccagcagcagcaccaggagtgctacgcctcggaccacttctggaacgacatcgcggcggcggaggcggccatctacatgttgatcgacggcggctggacagggtccggccccggccatcccgccgccgatccgccttcgtcgccggcgtgggagtactgctctgattactcgctctggaggatcgacgacgacgagtactacgagaagatgctcgactcctcctcctga

SEQ ID NO: 26783 - DNA, 1014 bp, Zea mays
  Peptide Sequence Number=SeqID_68562
atgcccggcatactgagggatgtcgccgagcactcgctggatatccgagctggatcccaacccatgaagcagcctctgcgccgattcgacgaggaaaagagcagagccataggcgaggagacccacaagctaatggcggcagggttcatcaaagaagtattccatcccgaatggcttgccaaccctgtgcttgtgagaaagaaaggagggaaatggcggatgtgtgtagactacactggtctaaacaaagcatgtccaaaagtttcccaccctctgcctcgcatcgatcaaatcgtggattccactgctaggtgcgaaaccctgtctttcctcgatgcctactcagggtatcaccaaatcaggatgaaagagttcgaccagctcgcaacttctttcattacaccttttggcatgtactactacgttaccatgccgtttggtttgaggaatgcgagtgcgacataccaaaggtgcatgaaccacgtgttcggcgaacacattggtcgaacggtcgaggcctacgtcgatgacatcgtagtcaagacgaggaaagcctccgacctcctttccgaccttgaaacaacattttggtgtctcaaggcgaaaggcgtaaagctcaatcccgagaagtgcgtcttcggggtcccccaaggcatgctattggggttcatcgtctctgagcggggcatcgaggccaacccggagaaaatcgcggccatcaccaacatggggcccatcaaggacttgaaaggcgtacagagggtcacgggatgccttgcggctctgagccgtttcatctcgcgcctcggcgaaagaggcctgcctctgtaccacctcttaagaaaggccgagtgcttcacttcgacccctgaggccgaggaagccctcgggaacttgaaggcgctcctcacgaacgcgcccatcttggtgccccccgctgctggagaagccctcttgatctacgtcgccgctaccactcaggtggtcagcgccgcgatcgtggttgagagatga

SEQ ID NO: 26784 - DNA, 396 bp, Zea mays
  Peptide Sequence Number=SeqID_68563
atggccaggattagatctggcggagcgaacgtgtgcgcgcaaacgcgggctgaccagcgggccaggggcgtcagcggcctagggcgagacggcctgacccgccggccccagctacagggcgcgggtgagagagagagtggagagcgggttgggcagacaggatgcgcgccaggggactttgtctccgccaagaagccagcggcggtgctccccgcgggcatggcggcgccgtcgccggaggcgaggcgggctaggtctcctagggcgcgagagaagtgctctggtgagcgaggacaggacgaaccagagggcgaaaggacgaaccaaagggtgtcccgagctgagggtgatgcgacagagcttaccgagggaacgggcgcgacgagggctcaatga

SEQ ID NO: 26785 - DNA, 423 bp, Zea mays
  Peptide Sequence Number=SeqID_68564
atgcgcgggattcagttgaggaagaagctgacgacgccggcccacaggctagtgggcgagaaaacagaaaggcagaacgacgacggagttgcggagggcggctggcaaagggggcccgccagacagtgtatcccgctctcagcgcatccgatcgggaacatcaagtggcgccttcctcactacataagaaagcctcaggggctctcttttgtcacacttaccgtcttcttcctttcaccctttctcaaaaaccccattcctcttacaaaaaacacattggttggtggaggaaagaaggaggaggagccctcttgggactccttagacgatgaagggtcgtctgcctacatcagtagcaatagcgagtcgctgtcaaaggatgtcccgctagaggacctctctttaactgatgtaacaccctga

SEQ ID NO: 26786 - DNA, 912 bp, Zea mays
  Peptide Sequence Number=SeqID_68565
atggcgagcctcaccctgccgccggcgccccccaacccacggcaggacgccatcgacctccaaaaggccttcaaagatactgtggctgaatggacaggagattattctatggggccggaaaccgtcgttgctatttggttgcctggcggttaccttgattttctgcgcatgcgagtttgggggaaagctatgttgctgtggattcttgatcctgctggacgtgatgcaactgttttgagagaagctctaagtgttgacactatggatctgagagcagccactgatattatatgttccaggacgccatcacagttgcaaataatgaaacagacttattatgctagatttggtacttatcttgagcatgacattggtcaccacacatctggcgatcaccagaagcttttacttgcctatgtggggattccacgctacgaaggtcctgaggttgatcctaccattgtgacacatgatgcaaaggatttgtacaaagctggtgagaaaaggctgggtacggatgagaagacctttatccgcgttttcactgaacgcagttgggcacacttggcatctgtttcgtctgcctaccatcatatgtatgaccggaaattagagaaggttatcaagagcgaaacatctggaaactttgaattcgcacttttagctatcctcagatgcgcggaaaacccagcaaagtattttgcaaagctcttacgaaaggccatgaaaggtctaggcactgatgacaagacacttataagggttgtggtgacgaggactgaaattgatatgcaatatatcaaggcagagtacttcaagaagtataagaagccattagctgaggctatccactccgaaacatcaggaaactatcggacattccttctttcacttgttggtcctggacattag

SEQ ID NO: 26787 - DNA, 555 bp, Zea mays
  Peptide Sequence Number=SeqID_68566
atgtgggccccacccgcggcgtcgccgacaggggcattcccctcgctccggccgtcgaggacggcggtggtccgcgtcctagtcacgctgcctgccgctgcgcggccgcaggatcagccgcggcggcggctctgtctcgcggtaccacggcccgctccggagatggcctctgcggctgctgaaggggagggggaggaggaggacgtggtggtggtggaaggggacacggggaagaagacggcggtggagatggacgcgacggtgaggcgggagctggcgatccggagactgcgagaggaggccgaggaggaggcgaacgaggcggggacgaggaggaggagcagcagaagggatttcgccgtgttcgagaccgccaggggcgacgcgctcttcacgcaatcgtggactccggccgccgacgatcgcctcaagtattcacatctgccctaccccactaacccgcgacttcctttttttgaatcatataagtgcgagctgtgttggaacgtgatgaaatcgagcggttgggtattcaaacctgacatgttgagataa

SEQ ID NO: 26788 - DNA, 474 bp, Zea mays
  Peptide Sequence Number=SeqID_68567
atgacgattaagctcaaagaaaaaggggctatacttacttggggccctggaccttccagtgaccctggaagcgagatcgccgctcttgctgctgctgctgttgctgctggtggtgcccctggggagatcacccccaaatggtggtggtggcggcgggaccgatggtggtggcggtggcggcgggaccaatggtggtggtggcggcagactgacgcgtctcttcgcgccgtgggcctaggagctcgcctcctcgaccccgctagcggtcctctggcgcttcttgggaggctccgaaatgagcaacccatcagcgcgacgcagccagcatcgcctctcctccttcgaccctcggagctacctggggtgggggcaccggtggaggtaccacttgcagcccctttgcccttgtccaaggggctgggggccacggcgggagtggcgctgcgagcgcaccggcgggctggggacctctag

SEQ ID NO: 26789 - DNA, 141 bp, Zea mays
  Peptide Sequence Number=SeqID_68568
atggccgtcatcccagcgcacaagaattcatggccggccagtagcgacttacgtggcaggttggacttcaggtggatgatgagctggacggtaagaaacatggattcatctttggcattgatttatgaaaatgacttataa

SEQ ID NO: 26790 - DNA, 171 bp, Zea mays
  Peptide Sequence Number=SeqID_68569
atgtcgcgcgcgttcgacgactactatatcaaggattgtggcgtcatatcggcgccggaggggaaacttcatgtgatggagatgatccaaaagcttgccaggaagaagcattcccatgacttttttgttcgggccacctttgctagagttggtaagggtgcttgttgctag

SEQ ID NO: 26791 - DNA, 267 bp, Zea mays
  Peptide Sequence Number=SeqID_68570
atgcagcttcatatccttagagatataagcttcctcgagttctgcataaagcaatcaactaccaaagcgaaaatgctccttcaagggaacataggtaatgcaaatgatgcattttaccctcctctgtcacatgttgttgtccagcctgatgctattgccctcaatgataatgacttcattgaggccaaggacaaaaagaacaaaaataaggcagcaaaaaacaaaatcttctactgtgaaagctccatcacatattggtttctttga

SEQ ID NO: 26792 - DNA, 414 bp, Zea mays
  Peptide Sequence Number=SeqID_68571
atgttggtagactacacaacgggggcatctctagctgaggtgcaggggaaggctacctcccagactccacctcctgctgaagcgaggggaagagtcctgctgctcctgctcctggtcctgctcctggcatcggcgctcctgctcctcgtgcaggcaatgatgcagtctctccagggcgacatggcgaactcgaccgtgggcttcacgccagcgcgggagcaccagagagcgcgggacaaggaacgcctggaagacggcggggaggcggtgaagtcttgggtcgatggcggcgggctccggctgcgcaagaagtgctccgggcgagagagggggcgagagagctcgactgaggacgcaaatgagtgggggaaagtgggcgagcggggcacagggtctaaagggacgagggcatga

SEQ ID NO: 26793 - DNA, 567 bp, Zea mays
  Peptide Sequence Number=SeqID_68572
atgggcgcaaagaatgacggcgcagaggagccgcgcggtcagtcatggaagcaggggcaagccaggagctccggctggggttgcggcaccagtgagcagagcgctcgggcgcggcgaggacacacgcgcagggggcgagccaggcgcgacaacagggagatgggagggcacgatgcaggggaggacgcaggggatgggcgcgccatggaagtgacggtcgggcgctggggcgaagtcaagggcgcgaccatgggcgagctggccgagcacctgggagatggggtgcgcagggcgagctcggctgcgcgcggcatgggcgagcgcgccagagagctccggccggcgagcacgcgcaggggagctggagcctgggcacgccatggcgaccgagtgcggcatcgggagcaagcagggcaccgagcagagaagcgcgtagggaactccagggcacgacaacagggagacggaggaagacgcgcggccatggacaggggctcgcggccggcgagcagaggagctgggcacggctggggaagagaggagcagggagctccggggaggagataa

SEQ ID NO: 26794 - DNA, 309 bp, Zea mays
  Peptide Sequence Number=SeqID_68573
atgcgcgaggtcctgttgtatcagttggggctggcgacagcgggtgcgacctccacgttgttcctaccagagggaaaccccaccggcgccccccgacctctatgcactgtgggcaaggcggtcggggtgctcgtctccattggcacctatcttgtcaccgctcgcctactggacgagggcctcctgcagcacgtgctggaccaccccaccgcgctgtggttcgttggccccatgttcatcgcgctcaagcaagagaggcaaagggggtgtccattggcgaggccgtgcccctcatcctccctgccttga

SEQ ID NO: 26795 - DNA, 303 bp, Zea mays
  Peptide Sequence Number=SeqID_68574
atgggccgctttgagacaacaacgcttggaagcagttttggtagtcctcaacggaccccgtgcgccggcactcggcgagctcgaagagtggcgcagatcagcacggtgactttggactacagcgtggcaatgaagccgttgagttgctcaatcatcttggcgaggtcggtattggatggttcagccatgggtgaactggaggatgcgactgaaggtggggagggtggtgggctttgtggtggcacggtagggctgagtggagcgctagcggcggactcgacatcggcggaggtggatgagtag

SEQ ID NO: 26796 - DNA, 243 bp, Zea mays
  Peptide Sequence Number=SeqID_68575
atggcgcgcggcgccgaggtcgtgtgcttcatgttctctctctctccgtggcgagctctctggatcgatggaggcgcactgagggacgagccgatcaccatggccccagtttttatgggcaggcacgaccccaccgtgattctgttgcgccacgggcgcgcggatctcagcgagtttgttgctgcgcgcgtccgattcggtggagaagacattgctgacaagtggagcctacttatgttttaa

SEQ ID NO: 26797 - DNA, 318 bp, Zea mays
  Peptide Sequence Number=SeqID_68576
gccaagcccctcgccgccgacgacctcatccaccactgctcatggccagcacgactccggccacctccgaccaaaccaaagcgtgggcgagtgggcctcgccggtgggccccaccaggcgaccaacctcctcggccgagtttccctatggtggttccattcgtatgctcgttcgtctgcttttgaggaggaggaggatgaagagatgatgatgaggataatgctggtttctattgtgcttatgattatggtttctagtaaagaaggtgtcgaggtggatctccaggagttcccagacttcgatgagttcgaggattag

SEQ ID NO: 26798 - DNA, 420 bp, Zea mays
  Peptide Sequence Number=SeqID_68577
atggcaaagcgtccaaggggtttcacggacaactcccagagctgttcgtggcacattctggcgggattgtccaacggagcactccagaatttctcgtcggagcagggagtactcgtgcgtccgcatctcgccgcgggcccgcgtctgcacgctgctatcgttgcgttagtgtattgcggggtgcgcccgtgtattggccaatcgttgtgcgccggtgacatgcgcagccacggggtgcccttgcgctgccgcgtccgtggtcagactggggaagatggtcgcggaccgttggatcaggcgcgtgtggatcagattagaagccaaataacgattcggccatggcgtatagcaatcgtaggattagaatctagtggcggggaatggatccacggatcattagatctaaaccataggatctag

SEQ ID NO: 26799 - DNA, 396 bp, Zea mays
  Peptide Sequence Number=SeqID_68578
atggagcctggtcgtcgacttagaaaatccaaagagctgtccaatctgagtggcatgcagagtgacatcctcgcgctcaaagtggaaccccagccactgatggtcagggtcaatccaaacggtggcatagaacactctgacccactcctcaatgtatctgccactagaggcaggcaaccaagactccacgggtacatgtctgaaccgacatacccgggtagcagtggctcgctgaaggtcaagcaaatgcggatcaacagccagtggtctcacctcagtcttgtcacgctccctaaagcgaggtggaagaatgggcggagtggaagcgggagcgcgagcagtggaagctggagcagtggaagtggtgggcacagtggaagtggtggatggctctga

SEQ ID NO: 26800 - DNA, 399 bp, Zea mays
  Peptide Sequence Number=SeqID_68579
atggggaagaagggcctcgctgtcctctgctggccgtcgagcaaggagcagggagctcgcaccaagaggagaacagggagggcgctcggctgcttgccatggacaacagagagagggaggaagagatgggcgccatggtggccgaggggaggagttgagctccctgcgctggctgctgctgtcgtgagcagcgaggaagaaggcagggagtatggctggtggcggctaggaaaaatggaggacgacgatcagcctgtggttcctgagcatgttgccgaagatcttcctgagcaacaatcgggggacttaggccattttcctgagtacctctcctgcttaggaggagatactggcaacatggatgactttgaggagtttcaggactacgacaagttctag

SEQ ID NO: 26801 - DNA, 246 bp, Zea mays
  Peptide Sequence Number=SeqID_68580
atggcgtggcttaccggcaacggtagaggtccggcgaagggtcaggtgaggtccgggggtctctggcgatcacgtcgaggtgcggatcatcggcagtggtggtcagagatgggctggccgcgtgcgcaggcggtcgggctcgcaggcgggatggcggacggtggagagctcgccggagttggagtttttgctcggggcatgaggcgaagtgaagagcagactgctacgcaccagaggtacttatag

SEQ ID NO: 26802 - DNA, 807 bp, Zea mays
  Peptide Sequence Number=SeqID_68581
atggctggttgcaaatatctctctctgatttttgttcccatcggccttatctcgacaccaccctctgatgggatattttcttcagccctatcatcttcgtgccttcatctcccagccgacggaagcctggaggcttcatctgctcacgacacctccctctgcgctcagctcccgacaaatcttgcctccctccgcaatcggctgctggagcttctctctgcgcctctccctggagttgagtccctcacgctcggcctcttctccaccttcctcagctcgcccaaccgagctcccggcgttggatcccctacgagctcccctacagctcgtccccatcttccatggccgcgcgcgaggctcctctgcttggccgcgctctctgctggctcgcgctctgtcgagctcctccccgaactccgccccgctatggcgctggccgccgcgcccttgccggttctctgctcggccatggaaatcgcgacccccagcttcctctgccgagtccggccggagctccctcctgctttgcttgtcggccgcgcgagctcgccggcgtgctcctgctccagccttaacgcgcgcgcctgctccctctgtccggccaccctcgccccacctctctcctttgccggtgctctgcccagtctccaccatggccgcgcctgctcccttgtccactcagttctttgctcgccggttgctgctcccggttgctgcgagctccagctcggattcagccctgcgcgccgtctctgctccctcgccatggtcgccgtgtttcctgcgtgcgacgcgcgctctcactag

SEQ ID NO: 26803 - DNA, 783 bp, Zea mays
  Peptide Sequence Number=SeqID_68582
atgtcgggcgggtgccgggtgcagaggagatccccaagcctgaaggcgaaaaatgatgacctacctggcctacctctagccattctttgctcacattgttatgtggcgttccctcaattcgaggtggcggaagatgacgaggacgaagggggcctttggtatgctgcccgcttgagtagcgggcgcgatttggttgaggaatttatcgggtatggggtatggcccttggcacatggctgggtgctgggcgaagtgtgcccccagtggatgccgaccctgggcgaccggttggtgcgaagtcctgccttcgctgtggatctgcgtggtcggaactcagccgcatttgtgcgtgaagtggaggccgaggcagtgaagattgtgggaaagtatgttccgaggatggagaccctgaggagttgggatatccactgttcaaacgttcagttgaaccgcgtctttgagttgaacagtttgccatatgccggctacccaggggacgacgacgccaatgatgctgtcagtcgggggaaaaaggcgatggcgacggttgacgaaggcccattgcggggagcagcgccgagcgcggccgccaagaagaggaaattaggtacaacagccgaagggttgggggcttccgaatgttttgctgcggaattattggacacctgcgcagttcctggggagacgatgtcttcgcccgagctctgggagtcttctgcgcgaatgctgaaggggtggccaacgagatttgttatcctcgtcgttcgggacgagtattggtga

SEQ ID NO: 26804 - DNA, 339 bp, Zea mays
  Peptide Sequence Number=SeqID_68583
atggccatgtgtggggagaagctccgccgcgccccgaccgcatacagatctcggttgcgtcgtgcgggtgctactgctttgacgggttccgtggttgtgcttccttggcctccattgccgcgcaacgggagagagaacgggggcagcaccgccgccaggagaaatcatcggggtgtcagcgtgcgcgaatgggctcctcgccggcggggattgctcgcggtcgctaagggttcgccgtcgggctctccaccgtctgtgcacgatcgttacgaccaggaacccttggatctatcaccggagtcactgactcgcggtggagctgcccctcatcgtggatag

SEQ ID NO: 26805 - DNA, 282 bp, Zea mays
  Peptide Sequence Number=SeqID_68584
atgatgtcgcgcgagctcccggcgaacgttgggtcttctgttacggggatgacgatggctccttctatcgcttgctacgaggtgggagaaggatccaacgatccgggtccatttgctagagaaacaaaaggcgtgcacgcggcacaggagagaacccgactcgagtggcccgctatcagcggaaccgagcaacccacgagcgcggctggtgtggagaaaatgactgatgaggggccccacgcgtcggtgacagtggtcatcatcgtgggctacacgtggtaa

SEQ ID NO: 26806 - DNA, 687 bp, Zea mays
  Peptide Sequence Number=SeqID_68585
atggtgcggcttctcgggctacggagcctaagcttcggcccgaaggactcgccgcgggagatcccctccactgccgacgtggccccgcccgttggcagcagtgcctggcacgtgcgcttcttcaactccgccttcttctgcgggtggattttcgtcagctacctctacaagcacgaccatgctggagtgcacgactacatctgcaaccgcatgtacacgctcccgctgccggggctcgaggcctacctcttccaggtctgctacatgctcgtccacaagcctagcccttccctcgactgcttcgtcatcgacacctgcgccaagtcgctccgcatcgctctcaaggtgcactggttcctcgctgcagagcttgagctggaggatgatgacgatctcgatgggatcgatatggtgcaggagcagtgccaggatgcagcgaccgtgcagggcgagtggccaccgctgcctcgggcgcaacagggagctccgcctcgcccgaccccaggccttggcctcagcctcggcctcggaagaaggtccccgcctcgcccgagctcagcctcggcctcgggaggagtcacaacctcgcccgacctcagcctcggccttagaagaattcaccgcctcgcccgacctcggcctcggaccgactacgctacaggggatacatcattaccctacctctag

SEQ ID NO: 26807 - DNA, 2268 bp, Zea mays
  Peptide Sequence Number=SeqID_68586
atggggagttccaagctctccttgctttgcctcgtccccttccttctcctcgccggcggcgacacgcttaccacattcatcgtgcacgtgcagcgcccggagccagaggagaaccagaccaccggcgaccgggaggtatggtacaggttgttcctgcccgaggacggccgcctcgtccacgcgtaccaccacgtcgcaagcggcttcgcggcccggctgacgcaggaggaggtcgacgcgctgtccgccatgcccgggttcgtggcggcggtcccggacgagatgtacgagctgcacacgacgcacacgcctctgttcctcggcctggacgcccggcaaggcgacagtccgtctcacggctccgaacgcggcgctggggtcatcgtctgcatgctcgacaccggcatctccccgacccacccgtccttcaacgacgacggcatgccgccgccgccgccggaaaagtggaaggggcgctgcgacttcggtgtccccgtgtgcaacaacaagctcatcggagcccgctctttcatgtccatccccaccgccggcggcaactcttcgtcgccggtcgacgacgctggccacggcacgcacaccgccagcacggcagccggagccgtcgtgccaggtgctcaggtcctaggccaggccgcgggagtcgccgtcgggatggcgccccgcgcgcacgtcgccatgtacaaggtgtgcaacgacacaatctgcgccagtgccgacatactcgccggcgtcgacgccgccgtgggtgacggctgcgacgtcatttccatgtccatcggcggagtgtccaagccgtactaccgtgacaccatcgccgtgggcacgttcggcgccgtcgagaagggaatcttcgtggcgctgtcagccggcaaccatggccccaacgccagctccgtcgcaaacgaggcgccctggatgctcaccgtcgccgcgagcaccatggaccgctccatccggtcgacggttcacctggggaacggacgctccttctacggagagtcggtgtaccagccggatgccccggcctccattttccacccgctgatctacgccggcgccagcgggaggccgtacgccgagctctgcggcaacggctcgctggacggcgtggacgtctggggcaagatcgtgctctgcgactacggaagcggaccggacggcaaaatcacgaggatccagaaaggcgtggtggttcgaagcgccggtggcgtcggcatgatactgatcaacgcgtttccccaaggctacaccacgctcgccgatgcgcacgtgatcccggcgtcgcacgtcgactacgccgccgcctcagctatcatgtcctacgtccagaacacggcgaaccccacggcaaagatcctcttcggtggcacgatcctcggcacgtcgcctgctccgtcgatcgccgccttctcctctcgcgggccgagcctccagaaccccgggattctgaagcccgacatcacggggcccggcgtgaacgtgctcgccgcatggccatcgcagctccaggttggtccgccgccgacggcatctgctgctctccccggaccgcgaggaccgacctttaacatcatctccggcacgtccatgtcgacgccgcatctcagcggcatcgcagccttcgtcaagagcaagcaccctgattggtcaccagcagcgatcaggtcggcgctcatgaccaccgccgacgtcacggaccgtgccggcaacgccatcctgaacgagcagcgcgtggcgtcggacatgtttgccaccggtgccggacacgtcaacccggaaaaggcggtcgaccctggcctggtctacgacatcgcgcccagcgactacgtcggctacctgtgcggcctgtacagtagccagaacgtctcgttgatcgcgcggcggccggtggactgctctgccgccacggtgatcccggagagcttgctgaattacccatcggtctcggttgtcttccagccgacgtggaataggagcacacctgtggtcgttgagcggacggtgaagaacgtcggagaggaggtgtcgacggtttattacgcggcggttgacatatttgacgacgatgcagctgtcgccgtgtttccaagcgaactggtgttcaccaaggtgaatcgggaacagagcttcaaagtgatggtgtggcggagccacaataataagggtgccaaggtcgtgcaaggcgcgttccgttgggtgtcagacacgtatacagtcaggagccccatgtccatatccttcacttga

SEQ ID NO: 26808 - DNA, 801 bp, Zea mays
  Peptide Sequence Number=SeqID_68587
atggactgggttcgctggcgcgtgcgggtagggagcgggggcagtctacacaggttcggccctgagggtgtgcaggctgcagtaaaaggcgcagtttgggagcaagcgaagtggtcatcagaagcgaggccggccagggccacagcctacacaggtgacaagcacatcggcgaccggtcgccttccgctgcaactgcaccggaacgggacgggggtcgtacgggtacaggaggcccgtcgtccttacctgcgacgccactgccgtgcactgggtccagccacacaccaacgaacgggaccacggcccaccaggcacaggcgcagtggcagccccgtcattccagcgctgatttgagcgtggccccaccccgcgtgctcctcgatgcgcgcgtccgcttcccggacaccacccctaccccacgtagaccggggcctctcgtacgccctgcggaccccccatactgtgtcccttgtccccggcgacgtgggcccctgcgcggttcaatcattaatcacgcggcatgcccccaaagcaacctctcgtcggtgttcgtgcaccgcccgttgcgcggccaactcatccggcccggcgcggcctctccctccctctctctcctcctccgtcctctggctcggctccgagtccgaccgctgctacgactgctgccgctgttccacgtctctgtctccgctttaaggctgtcacctttccccatcccctacgcccccttcctcctgctcccgcccctccttcgcccctcaatcaatcacgacgccacagccgcaccccgcgaaccctag

SEQ ID NO: 26809 - DNA, 270 bp, Zea mays
  Peptide Sequence Number=SeqID_68588
atgaacaaagtgcaaatcacaagtaaagccaacaggctgtttcggtctgaggcaccggactgtccggtggtgcaccggacagtgtccggtgcgccaggctgcctcgacctgaagacgccgctctcgggaatttgcggacaagtaaagccaaaagactgcttcggtctggggcaccggactgtccggtggtgcaccggacagtgtccggtgcgccaggctgcctcgggcaaagacgctgctctcgggaatttgccgacggcgtacggctaa

SEQ ID NO: 26810 - DNA, 156 bp, Zea mays
  Peptide Sequence Number=SeqID_68589
atgacagtatggggttgggcgcgatcaggcctcgtcggcgtatttgggctgtctaggtctccgcacttttctcccaacgacaggaagcgcggtgaagctgacctagtaattgtctgcagtcctgttgcgctggtgtctcaggctcgtcttaaataa

SEQ ID NO: 26811 - DNA, 438 bp, Zea mays
  Peptide Sequence Number=SeqID_68590
atggccacggcgccgatgaatccatgtctaagagcaattccggcgagccaaggcgatttcccagaccgagacgtccacgcgaaaatcacaaaggaccctgacgaggctcccagcccatgggttcgagttcaaccgacggtgctccctgattccgccattacggcgctacccctcctctcatgctcgacagcggagggccttcttctccctaccgaactggtgactctaaaatctcggcacggcttggggtccaatgggggcggctcggcctttattgcgcggcagccaagcttgctccgaattcaactccgatttggggggggggggaatcgatcggaggtgcgcgcgctatgcgttgccgcggggaagacggtgggttctgtttcacccgtgcgcgcgaataggagggagccaacactgacacagcggtcccactag

SEQ ID NO: 26812 - DNA, 156 bp, Zea mays
  Peptide Sequence Number=SeqID_68591
atggccacctgccttgacctcacttacagcagggctgtcagcacggcactggtagtcgaagccaaatatgcaggcccaggaaaatcccagggctatgaaggtgacaggcccaaccaggggcctgagaagagacaaagaaaggaaaaatacttatga

SEQ ID NO: 26813 - DNA, 426 bp, Zea mays
  Peptide Sequence Number=SeqID_68592
atgaccgtagacgagcactatgaatcgcttcagcattgcaaaaatgctgacacgattggacctgccaatgatgtctacgagttagttaggacctctgaaccaaagcgcacaaagggcatctcgacatcggacatcatcactacgatcttgaaggactacaaccaatacattatgtgcaatctgacttgggggtacaatcataaagaccttggcatcagctatgttaaggagaatcaattgatggtcaacatggggattagcaagctaagggagaaggtgaaggagcaacaagagaagttttgtactatggatgaaggaatcgtttgcaacaaggtgtcaattgaagttcttctgcactctccttttgttttaactttgctgtgcaaaatgagatacattgaccttgataattacccaaataactaa

SEQ ID NO: 26814 - DNA, 1653 bp, Zea mays
  Peptide Sequence Number=SeqID_68593
atggtggccggcagggtcaaggcggccatgggcttccagcggagcccggccacgcccaagcccggggcctcctcctcctcctcctcctcgcgcaaggcgccgccgccgctgcagctgcccgggtcggccgcgctgccggagacgccgcgccggaggtcctcgggctctccggcgccgccaggctccgggtccaagggcggcggcggcccattctcgcgctacttcccgcggtcgtccgcgcaggtgcagccggcgcgcgcgtcgggccagcccgagccgccgccgccgccgccgccgccgccgtcgtgcccgggccccgccgccgccgctgacctcgcccgcctcgtcgaggagctccgggagcgcgagtcccgcctccgcaccgagctgctggagcacaagatcctcaaggagaccgtcgccatcgtgccgttcctcgagaccgagctcgccgccaagagcagcgacctcggccgctgccgcgacgcgctgtcgcgcctcgaggccgagaacgcaagcctccgcgccgagctccacgccgccaggggcagccagcagagggtggttcagctggagaaggagctggcggaggtgaagaggcaccgtcgccgggactccggccccgatgccgaccgtcacgatgatgactgctcgtcgtcggtgtcgtcgcacaactccgactccgatcgctccaatgcgccgaccaacgcggtcgtgcccgggctgttgatcgtccctcctcctgctcctcctcctcctcccccgccgccgccgccgccttcttacaagtccaggtcctacttctctgcctcgtcgcgcgcatcgccggccaactcctcctcgtccagctccacctcgtccgcgccatcgacgccaacctactcttcagacaccgcggcgtcgcgaaaccgcgtgccggagctctcccagctcccgccgatacccgccccacccccgccgccgcccccacccccgccaccggcaatgccggcgcgcggacgccgcagcgcgtgctcgtcaccttcgacctcgagcggcagcagcggcggcggctgcggcagaggctcggggcctcctgcgccgccgccgccgcctccgcctgcggcgaggaggagctccagagcttcgtcccctgcggcttcgggaacggccccggcgcccgccccctgcgtcaggcgagtccccgaggtggtggaattctaccactcgctaatgcggagggactccaggtctagggacgccgccgctgccgccgaagctggcgccagtgggggtgccgccgccgcgagggatatgatcggcgagatcgagaaccgctcttctcatcttctcgcgatcaaatcagacgtggagaggcagggcgacttcatccggttcctgatcaaggaggtgcagggcgcggcgttcgtcgacatcgaggacgtggtcacctttgtcaagtggctggacgtcgagctctcacgtctggtggacgagagggcggtgctgaagcacttcgactggccggaggggaaggcggacgcgctgcgtgaggccgcgttcgggtaccgcgacctgaagaaggtcgagtcggaggcgtcgtccttctgcgatgacccccggcagccctgctcttctgctctcaagaagatgcaggccgtcttcgagaagtaa

SEQ ID NO: 26815 - DNA, 186 bp, Zea mays
  Peptide Sequence Number=SeqID_68594
atggcgcaccggaaagtccggtgccccctgccacgtcatcactgccgttggattctgaccgttggagcttctgacttgtgggcccgccagggtgtccggtgcacaccggacagccttgtcgcgctgtgctgctactacttgatcgacgagtgctgctgtgacccgtctgtcatcttcgtcagctag

SEQ ID NO: 26816 - DNA, 1128 bp, Zea mays
  Peptide Sequence Number=SeqID_68595
atgggggcagcagcggacgacgctgcgtcagtgcgggccgcggtgatgcggctcagcttcggcgcggcggcggaggagaggcgggacgccgcgggggaggtcgcgaggctggcgcgcgcggacgagcggaccaagcgcctcctgcccgagctcggcgtcctgcccccgctcctggacatgctgggcggcgcgggaccgggggcgcgcctggccgcggcgggggcgctgctggagctcgcccgagggacgcacagaaataaggtgcgcatcgtgcaggccggcctgctcaagaagttgccggtggtcgcggacgacagggacgtgtgcagaagccaggagctggcgctgctgctcctgtccatctcgtcgctagccaacaccgacttcccgctccgcaccaccgagctcctcccgttcctcgtggccacgctgggagccaccgacgtcccgcccgacgcgaagctgccgtgcctggccgcgctccgcaacctgtcggcgaagctggagcacgcgcgcgacgtggcgtccagcggggccgtgcgcgcgctcctgccgctctcgctggagcccaagacgtcggagccggcgctggccgtcctcggggagctggcggcggcggcggggcgggaggcgatggaggcggagggcgaggcggtgccgcgggcgctcctggaggccatgacgcggcacgggagcgcgcggtgccaggagcgcgccacgtacctggccatggtgctcgcgcacggcagccgcgcgctgcggcgcgccatgcgccggctcggcgtcgtgcaggcgctcctggaggtctcgctactcagcagcagcccactcgcgcagcggagggcggccatcatcctgcgctggttcaaggaggatgggccgcagagcaggacgaccagggcgcattcggggcctcgcgtggagggagtggcagaggccacgtcgtgccgcgacgacgacgtagccggcgaggcgaagggttgccgggataccaccgtggacgagattgtgaggcggagcctggataggaacatgaagtctatactgaggagggccacggcgtccgtggacctgaccaatgttaaactgctcgttacgagctccagctctaagagcttgccttgctga

SEQ ID NO: 26817 - DNA, 2049 bp, Zea mays
  Peptide Sequence Number=SeqID_68596
atggccagaccctgcggcgccgcgctccagcggcacgcggcagtggccgtccttcgcgcggccgccgccgctggcgacctgtccaaggggaaggcgctccacgcccgtctcatcacagccgcccatttcgacgtcgtcctgcacaacaacctcatctccttctacgccaagtgcggccgggtcgggctcgcccgcacggtgttcgacgccatgcccttccggaacgccgtgtccgcaaacctcctcatgtccggatacgcttcctcggggcgccataaggaatcgctccagctgctcagggtggtcgactttggcatgaacgagtacgttctgtcggcagcggtgtccgcgaccgccaatgtcaggagctatgacatggggaggcagtgccatgggtatgctgttaaggctggcttcgcggagcaacgctatgttttcaacgcggtgctatatatgtactgccagtgtgctcacatggaggatgcgtccaaggtatttgagagtgtgtccggttttgatgcattcgcgttcaactcaatgataaatgggtatcttgatcgagggcaactggatggttcattagggattgtgagaaatatgaccggggaggctgagaaatgggattatgtgtcttatgtcgcagttcttggtcattgtgctagcatgaaggactctgttcttggggctcaggtgcatgcccaggctttgaagaagaggctagaactaaatgtgtatgtggggagtgcacttgttgatatgtatgggaaatgtgaccatgttcatgatgctaatcgtgcatttgaggttttgccagaaaagaatgttgtttcttggacagctgttatgactgcttacacccagaatgagctgtatgaagatgcattgcagttgttcttggacatggagatggaaggagttcaacccaatgagttcacttatgctgtggctctcaacagctgtgctggccttgcagccttgagaactggtaacgcccttggtgcctgtgttatgaaaactgggcattgggaccatttgctagtcagtaatgccctcatgaacatgtactcaaagagtggaagcattgaggatgcgcacagggtcttcatttccatgccacttcgtgatgtagtctcttggaatttgatcatcacaggctatgcgcatcatggccttgcaagggaaggaatggaagcatttcacagtatgctatcagcagcagtgatcccatcctatgtcacctttgtcggagtattgtcagcttgtgctcagttgggtcttgttgatgaagcattctactacttgaatactatgatgaaggaagttggaattacacctgggaaggaacattatacttgtatggttggtttattatgcagagttggaaggctagatgaggctgagaggttcatagtgaataactgcattggcacagatgttgttgcatggcgatcactgctaaattcttgtcaggtatataaaaattatggtcttggtcatcgagtagctgaacagattcttcagttggagcccagtgatgttggaacctatgttttactctctaacatgtatgcaaaagccaaccgatgggatggcgttgtgaaggtccggaagcatatgagggagagggccgttaggaagtcacctggtgttagttggattcacgtgggaagtgatgttcatgttttcacatcggaggagaaggtacatccgcagatggaccaaatcgccaaaaaacttgaagagctgatcgaccagataaaagctatcggatatgttccaaacttcgcagtggtccttcatgatattgatgatgaacgaaaagaggagcaccttatgtatcatagtgagaaattggctctagcctttggccttattcacacacctaagggagcaacaatccatatcatgaaaaacctcaggatatgtgatgattgccatgttgctatcaaactcatatcagttgttactagcagaaaaatagttgtaagagatgctgttcgatttcattgtatagaaggtggcatttgctcatgcaatgattattggtga

SEQ ID NO: 26818 - DNA, 453 bp, Zea mays
  Peptide Sequence Number=SeqID_68597
atggccccgttccgtcgaaactcagcggccttgagcgccatcgctgaaggagtagcaagtgcacggggcacggcagcgacggagggcgcgcggcgccgccgacgctccagcgatgtccagagggtgcgggaccaggttgctccgccaatgtctcctagtttcgcgacacagctcgtcgtcgtcaaggtcaagtttagattatataaatatagattatttataaagacaacaatacccttgtttgtttatctaagtggcacagatgcggcattcacccctcacatcgaccacgccggcgccgacgaggcagcatgcagcagccagcaggggcccccggccgggcgtcaagtccgggctcctccggggaccggggtgtaccgcgtcctgggggacaggatcacgcacagtagtgcgcggccggtagctcacggcgggggaccaggggccgggtga

SEQ ID NO: 26819 - DNA, 537 bp, Zea mays
  Peptide Sequence Number=SeqID_68598
atgctgcggcagaagctgtaccgcggcgtgcggcagcggcagtggggcaagtgggtggcggagatccggctgccgcagaaccgggtgcgcgtgtggctcggcacctacgactcccccgagaccgccgcgcacgcctacgaccgcgccgcgcacaggctccgcggcgagtacgcgcgcctcaacttcccgggcgccatggacgggccggacccggactgccccgagcacctgcgccacctccgcgccgccgtcgacgccaagatccaggccatccgcgcccgcatggcgcggaagcgcgcgagggcgcgcaggcagcgcgaggagagggtcagcgcccggtccggcttgcaggccgcgtcggagggcgccgcgacgacgacaacgacgacgaccacctccgagacgtcggcggccacgccgtgcgggtcgcccgacggggtgctgtccgtgagcgccgcctcgggcgtcgccgactgcccgctggaacggatgccgtcgttcgacccggagctcatctgggagatgcttaacttctag

SEQ ID NO: 26820 - DNA, 696 bp, Zea mays
  Peptide Sequence Number=SeqID_68599
atggagaacggcagcgccatcagccatcaggtgggtgtcgaggacgcgggtgccgtgcagcgacgcgacgcgagctccaagacgtcgtgcagcgggctcccgcagtcccacgggcgacgtacagtgcaccagccaccacaacacgaggagcgccgattgcaatttgctagtcccgatgtgccccaaatgctggcgaccacctgcagccggccgccgtgcccgtgcccgtgcgcgcggtcgcggcggctccccgcggcgaccttcggcggcaccagtagcgcgaagcgaagggcgccgaggagagcggcggcggcggtgcggtgcgggctgctgcccgtggacccgtgggcgccgacgatggactcccagagcgtggcgtcgcagctcttcgccgtctcgctcttcccctacctgggattcctctacttcatgaccaggtccaagaccgcgcccgggctcacgctcttcggtttctacttcctcctcgtcttcgtcggcgccaccacaaaagttcattatggtacctcactgtccaacgttgactggctgcacgggggcgctgaatcgctgctgactctcaccaacctgtttatcgttttggggctgaggggagccctgaggaagctggaggaagagggcacagacgagattgtttctgaagcttctcaagacagtgcagaaaaaagttctgtctag

SEQ ID NO: 26821 - DNA, 399 bp, Zea mays
  Peptide Sequence Number=SeqID_68600
atgaggacatttcgcatcatgcgtgcaccatcgttttcgtcgtcatcggatgtccccttcgtcttcccagccttcgccctgttcttcctccccaacctgctgcccccgcccacggtcgcagtcacgagccgaccgacgctcgtcgacccggatgcccaggtcttcgttgtgtccttctccgacaatgaacaggatcgacaaacggggaacagtctaccaaatggacgatgtgaggctggcctttatccaatcaagtcttctgatgtcgccgctcttaatcaagcactactcaaaagggaaaagctacaaaggttgacacagcgccgaagctgtgaagcaggaaagcttcggcatgttcgcagaaaggggaaccgacttaaagatgaaaaggccatttag

SEQ ID NO: 26822 - DNA, 375 bp, Zea mays
  Peptide Sequence Number=SeqID_68601
atgggcggaagcagcggtccaatcacctacaggatcgcaccctctcctgaaacgggcaagcgacacctctggcaggagaagcgggcgccgttttgcctccatcatgatcaccgcgtcaaaaaagggaccgggaaaggggatatttcgaaaaaggatccgagccctcctactgatcaggggttcgaaggtttcgccctccggggtttggcaaccgccatagagcactcgggctccgagccctttactgatcagggggatgaccctgggtacttccgttacatggccgaggctcgggctacgctcccgagaggctctggggctgctctcgcaccaagctacggccaaactgttgaccacgtcaacaaaccagcgtga

SEQ ID NO: 26823 - DNA, 2382 bp, Zea mays
  Peptide Sequence Number=SeqID_68602
atgtccacggcaacggccaaggaggaggaggcggccgcggccgcggcgcccgcaatggtcggcgaggaggccgccgcgcgcgccgcgctgaagcgctacgaggccctcctcactgtgcgggccaaggcggtcaagggcaagggcgcctggtactgggcgcacctcgagcccgttctcgtcccgcccgccgaaaccggcatgccgcccaaggccgtcaagttgcgctgcgccctctgctccgccgtcttctctgcctccaacccgtcaaggaccgcctccgagcacctcaagcgtggtacctgccccaacttcgcttccccgccgtctttattcgccggcgcctcggccttgcagccggcgcccacgcccacgcagcagctcgcgctgccgtccaactccaccgcctcatcccctgtccccatctcctccatcgcgccctcctcgtcgcaccaccactccaatccgcaccaccaccaccaccaacaacaacaatccggcagtcgcaagcgccattccatgccacccgcgtacacgccggcggaacccgtgtctcaccatcatcacctcgtcgttgttgacccgtccttggtctacccttcggcgttgcccgcgctgccggcgccccctccgccacaccagtcggagctcgtgctctccggcggtaaaggcgacttcagcgctctcgccatgctcgaggacagcgtcaagcgccttaagtcacccaaggcatcgccggtcaccatgatgcccaagccgcaggctgacgcggcgctcgccttgctgtccgactggttcctggagtcatcgcctggcgtgtcgctctctgccgctagccaccccaagctccgggccttcctacgccatgtcgggctaccggacctgcagcgcgccgacctcgctggtccacgcctcgacgcccgcttcgccgaggcgcgcgccgacgccaccgcgcgtgttcgggacgcgctcttcttccagcttgccgccgacggctggcgggagcaggtggtcactctctgtgtcaacctcccgaatggcacgtccgtgttccatcgcgctgtgccggtacccgccatggcgccctcagactacgccgaggagctcatgctggaggccgtggcttcagtctcagcctcaggttcctctagcgacctccaccgctgcgcaggcataatttctgaccgcttcaaatcgaaggcgctgcgtgatcttgagaagaagaactactggatggtgaacctatcttgtcaaatccatagcttcacccgtttggtgtgggatttcgcgagggaactctcgctgttccgctccgccacagccaagtctgccaagcttgctgccttcttcaacgccgaacagacggcgcggtctttgctgcacaaacatcaaattcaacagctcggccatgcctctctccttcgagtcgcacatgtgccgtttaacggcaatggcagaaactaccgtgcggcctttgagatgctggaggacattttgaactctgcacaccctctccatcgtgctgtgcaagaggactcctacaagctcgtgtgcatcgatgactcggctgccagggagattgcagagatggtgcacagtgaggctttctggatagaggtggatgctgtgcattcgctcgtgaagctgatatttgatatggtgagggagatggaagctgatcgacctcttgtagggcaatgcctgccgctatgggaagaattgcgcagcaaggttagagattggtgtgagaaatttaacactgatgaaggcgctgccctgaatgtgcttgagaaaaggtttagaaaaagctatcacccggcctggtccgcagccttcatcttggatcctctctaccttgtgaaggatgccagtgggcgttacctccctccattcaagtgcttgacgcctgatcaggagaaagacgtcgacaggctgatcactagaatggtgtcccgggaagaggcacacctagttctgatggagctgatgaaatggcggtcggatgggctggacccgttgtatgcacaagccgtgcaggtgaggcagcctgacccgtccacagggaggatgaaggtcgccaataagcagagcagcaggctcgtatgggagacatgcctgagtgagctcaagtcgctcggcaaggtagctgtgcggctcatcttcctccatgcaacctcccggggtttcaggtgtacaccgtcaatggtgcgctggctctgtgcacctgggaccatggcaagcggcaatgatcgagcgcaccggttggtctttgtcgcggcaaattcgaagctagagaggagagacttctccagcgatgaagacaaggatgcagagttactcgctgaaggggatgatgatgatgtacctggcactgtggaaccctaa

SEQ ID NO: 26824 - DNA, 381 bp, Zea mays
  Peptide Sequence Number=SeqID_68603
atggaatcactcgagccatcacccgcagttcttcccggcgcacgaccaccgtggctagagatacttaagccttcccagccccaacccctgacacactccccagagccccatgaagctttcatgctcactcccccactcgctaccacccgacaatggcgagccaccactcgccgaagcaaaccaccatactttgatggtgaagattattctatgtggagtgataaaatgaggtatcatctaacctcactccatgaaagcatttgggatattgttgagtttggagcgcaggcaccacaaatgggcaatgaggactacgactccgatgaggccgcccaagtgaggcacttcaactcccaagaaatcgcttccctatgtagatag

SEQ ID NO: 26825 - DNA, 285 bp, Zea mays
  Peptide Sequence Number=SeqID_68604
atggaattcggcatggccgttgtggacgacaggcctgacatgatggggccccaggcgcagcgagatagaaccgttttgtgggggccgaattcctcaccggcgctcttcaccgtcgcggggtccacgtttcgtcgtggccagggcggagatgcaaacttagggcacgggtcggcgatggcgcgccgacgtggatgggctggtgctatcacggttctaggccatgggaaagtgatagatgtggagagcaatctggccatcagatcggatttctgcgggcatgattag

SEQ ID NO: 26826 - DNA, 120 bp, Zea mays
  Peptide Sequence Number=SeqID_68605
atgccctatggccctgctctctggctagatgatcccatgggcctggggaaggttaggctagataggtcatacaacctactatgcatgctagtttgttgttcactgcccgagttgggctaa

SEQ ID NO: 26827 - DNA, 309 bp, Zea mays
  Peptide Sequence Number=SeqID_68606
atggctcccaagaaagcgacttccaaggccaccacctctctagacaacacagcacaggtagcccttgtcgagaagaaaggcaagacagcccttgtctacgacattccccaagaagcacccaaaaatgatggagcagtcaacagcaagtgccctcgcacagagaacccacccacccccgaaggcaccgttcgcacgtacaacttcgatggcctcccttggaacccttcgccaggttttaccccccggaggctgattgccaaacccggggatcatgacttcccattcatctctaccgaggagatgaggtag

SEQ ID NO: 26828 - DNA, 240 bp, Zea mays
  Peptide Sequence Number=SeqID_68607
atgggtatggcgacaacgcagaggccccggaaggtagctgcccacggcgggatggctcggcgacggcgcaaccttgctctggtgagaatttgtgcacacccgagggcaggaaaggggaaattaggggcaggggaaggttggttaccccgagagacgaatccaggacccttgcggcagggacacgacgaggcctcagatcgacggtcgcggcactccggctacacgatgaaggtccagtga

SEQ ID NO: 26829 - DNA, 273 bp, Zea mays
  Peptide Sequence Number=SeqID_68608
atgtcgatcgccgagcctgatcccggcgtgcacacgaaccgtggtggcgggtcactcatccgcggcaatggtgatagctggcacggcggtggctatcggtgcaagcttacctggctgaggggagaggtgaaggtcgtagtcctggttcttatatgcgcaaggggatcgacatgggccgccggccaaatctcaacgagcccaccctcactcatggagttcggcattgccgctgtggacgatgggcctgacatggtggggccccaggcacaatga

SEQ ID NO: 26830 - DNA, 210 bp, Zea mays
  Peptide Sequence Number=SeqID_68609
atggccgaggctaacttcgtggggagaatcccggtttccacgacggtgggttcagacagagcaatgtcagccatggtgagggaggtgatgactctaaccggatggtcccacacgccagcgacaccaagaactaggatttcgaatatgaattcaaactttgttatgagtttcacgtttaggctaaatgcaccaattgaaatactaggatga

SEQ ID NO: 26831 - DNA, 657 bp, Zea mays
  Peptide Sequence Number=SeqID_68610
atgcaccagtactctggagtcaacgaccttgacctccattccttcgtgccactcgcgctaacggagattgaggctagggttagggtcattacaatgttgccgtcgaggttctttatggatgaggattcaccccttcccctttccaaggacgtcatgaggaccttgctgagttccttcttcctggggatcaaacccctggcgccgtgtctcccaccccttcctgaggtcgtcatcattgaggcagagcaggagcggaagagggacgcagggggaaaccttggcggagcgctcgaggcgcctttaagcaaagaaggagaagaaggcctcccaacccacctacgtaaaaccagggccgacttccctagccgtcctagaggcccctacggcatcgactcctggcacctgcctcattgtggtgacttcccccatgccgccccgagggaggttttagcgatcaaagtggctccccttgacgcagcttcgtcggtggaggaggcagctctagtctcgatgtcgttgtcgccagccccgggcgccgtaggggtgggcgtccaatctgaggtggcgcggcccccaggggccaccgatttcctggctcaaccatcgtcggtcatcgcttctgggcatggtgcttgtgctgccaggagagtgccatga

SEQ ID NO: 26832 - DNA, 327 bp, Zea mays
  Peptide Sequence Number=SeqID_68611
atgggcaagactaggggcaccacgtggcaaggaaagataatacttcccaaggaggacatgttgggtccctcgaataagctccaggctccccccagtaaggaccgagtcttggcaaggtcccgggatgaggaggaccccggcatgggggacgcgccgcctgccaccacgctgaccggcgacttgccctctcggcatttaatgcgtcctgttccatctactggcaggcggtgtcagacccatccagcaaacgacacgtctgatcagtctactggcaaacgggcgggtgcactccaccacccggccgatgatctactctccaacatttag

SEQ ID NO: 26833 - DNA, 771 bp, Zea mays
  Peptide Sequence Number=SeqID_68612
atggcagcacagcgtggaagccggggtgggagtgagcagcggatgcgcagccctgggcttactgctgctgtgcgcgaggttgattggcaacgaagggacggaggctacgagcccgcgccaggctgcgcttggctggctgagctcgtgccggaggtggggagggagggcgaggggccgcgcccgggccgccatgcccacgtctgcgcccgcgtcgtcgggggccgctgcgcccgctgcaggggggcacacccgagccacctcgcagccatgtgcctgctcgcgtggcaacgacgagcctggtcgatggcggcgcgagggatagggcccgcgcgcggccagggctggcacggctggggtctgcgagggtgcggcctgggcagcgcggctgggggcggcacgatcgcatcggggggagagtggaagcagggacgtcggccttggggagcatgggcgccgagcaccatggaggtcgtagaggtgaaggggagctgcacgacgccggatctagcaccgtggtcgccgcgcctagacgtgcccgcactggaccgcgcctggccggaggccgcgagcccgcgtcagggcagggagcgtcggtctacgaactgggcaccatggggtgctactggaggaggagagcttggctgggaggaagaaggccgtccccaggagggaaggatgagcctcctgggggcagtgcctggtcctagggctggcggcggatgtggggtgggttcgaattcataccgtgtagtaccgatccatgtagggtga

SEQ ID NO: 26834 - DNA, 315 bp, Zea mays
  Peptide Sequence Number=SeqID_68613
atgaccgtctctgccactacttcgaccaccattgagggaaatccattagttccgccgcggcttgtgggcagaatgttgcatcacactaatcacggtgaggaagcctcccccgagttcgcgttgtccttcttcgcgtattaccttaacgagtcgagatttggggcgcttggcggggctttggtgcgctctggcgagccttgccaccgtgggcagggtgcctccggcgtagtgctgggtcggggagagaagaagatccctaggccgttgatccggtatcatgcggctgtgaatagaatacatgtatcccttgcgtga

SEQ ID NO: 26835 - DNA, 297 bp, Zea mays
  Peptide Sequence Number=SeqID_68614
atggggaggctgctggagaggtggctcttgcgcaagatagcagaagagggaacggaagcgccccagggttttattcctacggttgggctcagtcagcggcagtttcgcggagctcgcgctagttctcccatgtcgaaaagctcgggcccagttgcgcgcgagtccgttggaggaggaggttctgacgcgccgggcccacttgaaagagaggcgcacgcggtgactgacgccgaggtcctttcctgtcggcgcgcatcacagcgacagggtagcgcgtatttctttctccactgctaa

SEQ ID NO: 26836 - DNA, 594 bp, Zea mays
  Peptide Sequence Number=SeqID_68615
atggtggcacgactgatggcggcttgctctgctgttgctggcggcgtggtggttgtgcgactgttagcggccgagcggtgcataaagttcacattcacatacaacgaaattgagttggggaattctacaaaggagcatacaagatttggcgcagcctgtggcgcaccggacactgtctggtgccctaggctgcaaccctcgcgaactgaccgctctcgggttttcttagagctcatctgctataattcaccggactgtccgcgtgctatcttctggggtgtaaaccctgacctttgggtcaggcggcaacgacgccatacatcacacccttccttggaggtgtcgctttggaggatcgcgtcggctgacttgcttggtgatgtgttctgcggcgaagtcggagctgctatgttgatgaggaagtcgcagctgctatgctttggtgctaagctcgacaacgatgacttgagccaggctatagggaccaccgacgaggtgcttctccttgctcctgatgcccgacgttgtggctccaagctcgttggtaaagaatcggagtttcctagcgtagggtgtgtcgaggctgggcaatga

SEQ ID NO: 26837 - DNA, 768 bp, Zea mays
  Peptide Sequence Number=SeqID_68616
atggatctcacccacaacccaccaggccgtcccccatccccatcctcccacagtgcctccacaccgcgcgcccgctgctaccgccatcaaggctcctactcgcgcgacccacccccgctcgtggggaccccccaaaacctagccgtcacccgcaccaccacaaaccactacacatggcgagccgccatactcccacctcgctttgtggtgcaccagatctgcaccgtcgccctcctccactgggcgttgccccaccgggcggactaccgcaaacatctagggagttcgagttggacgtcggtacaggggtttgtgctagaggattctacaggtctatcgccgaatggggacctcaatgtgcatcctgtgattgcggggtctttgcccctacacaaccaatctgtggatgtcaaggagcaccctgttgtcatctatacgaagggttatcctgatgctcctaggtgtaggtttagtgcattagcagtgaagactggaaccggaaaggcaaataccatagagggagagatgagacagaagtgtcggtaccctgaaacagggtgcacccacccgtaccctagatcctccaccagaaagcttcaatttgaggtttcccccaaagcactcaagaactccgcacggtttgccctcgctgtggccagcttgctccgggttagttcaagcgctttgatcgtttgttctagcatccctaagtcctcctcaagcttcacggcccctctgattgaactagaccgccctgggttgccatga

SEQ ID NO: 26838 - DNA, 312 bp, Zea mays
  Peptide Sequence Number=SeqID_68617
atggcgttgaccaaggcagcgatagcctcggccaaggtaggagatggtctagctcccattgctgccacatcaggtggcacgttcgggtgcagcagatcatacaagcttacgctttgtgccatggatgttttaatgattaggaaccttgtagagaaccatcaaggacttgagaaatgccaagatgtcaaggaggagaaactaggatgttcacaacaagagaaagccaagtctgactcaacatcgtctccacctcggatacaggaccagactgcactaaaatggacgcccaggatgcatccgaactatgattag

SEQ ID NO: 26839 - DNA, 1017 bp, Zea mays
  Peptide Sequence Number=SeqID_68618
atggacctacataggtccgatggacaacagatcggactatgcataggttgggctaaattgttagaccacacttggaggacagcgttgtcactatcctcgcaagccgctcgggactatcggctgattactctggtggcggcaagttgtccctgttctgccgctgttcctgccgctgaatatgaccgcctgacctgttgccacgagagggcccacggccagctagcgatacttgccgggccccacgcgttctctccacttcctcctgacctttttgagtctcttcttccacccggcggcagcgggcagcgcaggcgagcagaccaagtcgcctgcagagtgcagactgcagatacagtccgtgctctgacggagcaacaggagaagcagagcgagccgaggcggagtcgacaggcgagtggttccaccgaccgtctcccctgccgcaagcgaacggcttggtgccttatcatggaggaagcggggaggggctgcggcttgctcaaggtggttgtgacgcacggccggaacctagccgtccgggatttcacgtccagcgacccctacgtcatcgtccacgttgccgacaagaccacaaaaacaaaagttatcaacagttgcctcaatccagtttggaatgaagagatgacattctccatgaaagaaccagtaggaataatcaaatttaacgaccatcacctttggcaggaggtgttcgactgggaccggttcaagtacgacgacaagatgggccaggctttcctggacctgcagcctgtggcggcggcaaccaagctgcggagggcgctgcggctcacagctggcgagaccaacctgcggaaagtgaacccggacgccgacaactgtctgctctcagatagcttcgtgacgtacgccaacggggaggtcgcgatagatgctaggctgcggctgcgtgaggtcgagtccggcgagctgttcgtcactataaagtggattgaacctgacagcgccaacactggaaagcaagcggatcactag

SEQ ID NO: 26840 - DNA, 171 bp, Zea mays
  Peptide Sequence Number=SeqID_68619
atggggcgcggggctgcggccgtgggcgcggggcggcgcggcgtgggaccggcagccgacgagtgccctagtggccagggtgtcatgctccacaagatcgtgacagccataggaagtggtgtatcggtttctaaggcgcatcgtctttggaaggctgtagtcgggccgtga

SEQ ID NO: 26841 - DNA, 1359 bp, Zea mays
  Peptide Sequence Number=SeqID_68620
atggcccctgccccggtgccccccacccccgttaccctcgtccgatcctcttccttccccgcagtctccgatccgtccggcttcaccaaatccacccctccccatgcaacagccaccgaccatgttcgccgccccacctccccgcctggcgtccgtgttgctcgccgccctggaagggacgcgtccagaagaggcaaggccgtgcccccgcccgcccccgcgcaaccgccgcggcgctcgacgtgtggacgtccgagcccggcgcccgtgcaggagcggcgccggaagctgctccagatgctggggctcgccggggaccccgccctggcgcgcctcgagatgggccgatcggtctcctacgacgacgagcctatcagacggtggcgccgtgccggcctcggcaacccaagcccgccgctgggagggcggtcgccggggctcctccggaggccacgcccgaaaggggaggaggaggaggaggccgacccgaggtgtctgatccggaacgtcgacgacggcagcgagttcgtggtcaaggaggggtccgagctccgcgaggtcggcacgggccggcagctcaccatggaggagtttgttgacctctgcgtcggccgctcgcctatcgtccaggagctcatgcggcgcgagaacgttgcgagctccggctcgtccacccccgtccagcgctccaactccgactccagcaacgaagcgacgcgccaccggcggcggcggcgacatagcagctggcttcggggcatccggaacgtcgccggctccgtggtggccagctcccgcgaccgccgcagcagcgacgacaaggacacgtgctcggagaaaggcgggcgccggtccagctcgaccacagacgacagccaggacagcgctggagccgtgcgccacggcccggtgcgcgttaaggtgaggcagtatggcaagtcgtacaaggagttcagtggccttttcatgaaccaggagattcaggctcacgatggctccatctggagcatcaggtttagtccagatggccggtacctcgcgagtgctggggaagactgcgtgatccatgtctgggaagtgtcagagttcgataggaaacacgaagagaacggagcgtgcaatccttttgttgcgatggtgtgcaacggttcgccggagccaacattagctgtggccagcagtgtggatgggagcaatcgtgagaagaagcgtcgggcaaggttcttggagggtcgtaggtctgtgagctcagaccggctaatgctgctagagcatgtgtttgcgctgtcagaaaaaccgattcggaccttcatggggcactcagaagatgtgcctcatgaccaatttagtttgctgtga

SEQ ID NO: 26842 - DNA, 498 bp, Zea mays
  Peptide Sequence Number=SeqID_68621
atggaaggagaatcagacgcctcggatcgccgccccagcctccatggaaggggagtcctctcgatccgtgtccgtgctgtccatggaagaaaccttgctgtcagcgcgtctccacttggtttgtatcgctcacagtcctacatctccaaaccctatttcgcacacagtcctctatctacacccactactattctatatgagcctactgtggacgtccacagtactcaccatgcccccgcccttcccaccacacatcatattctgccccgtgcatccgtgatactgaactttgtttatcttgccattggaatagagcttgcttcaacacatcgctataagatgattgagaggaggcatgcaccccctcctgctggcagcgacctagctcaggcgacctcaacagcgactccctctcaccaaaccgcccaccgtgccgtcgaagcagcagtccacaagcagcagcggccgccacagctcgataggtgcacactgttctag

SEQ ID NO: 26843 - DNA, 240 bp, Zea mays
  Peptide Sequence Number=SeqID_68622
atggaggtttcggtggttgagcctcaaaaccacccgatgcaacagttcgctgttttcgtcaggtttgtacctcaaaatccgatggtacggtttcagcgagaattagatgcggcacatggcatcatcacgaagggtgcatcaagcactattcttaaggtgtcgcctaagcgtctaggcggaggtccaacgcttagacaccttgtccacctacctcacctaggcatcgagacggtggtctaa

SEQ ID NO: 26844 - DNA, 906 bp, Zea mays
  Peptide Sequence Number=SeqID_68623
atggacgttggcgcgaaggaggaggagatgggtcaagtgtggtggggccaccgcgcgtggtccctcctctccgctgttcgtgcacgggcgccgctagtgcagtgcatcaccaacctcgtctcaatggacatcgccgccaacgtgctcctcgccgcgggcgcctccccggctatggtccactccctccgcgaggtgcccgactttaccccgcgctgcgacgccgtgtatgtcaacgtcggcacgctctcggaggactggctcccctccatgcgcgccgccgcctccgccggccgcccctgggtgctcgaccccgtcgccgccgccgcctccgggttccggatgaaagcctgcctcgagcttctgtcgctctgcccagcagtcgtcagggggaacgcctctgaaattctcgcgctcgcttcccgctcaaccgccgcctcttccaatttcaagggtgtggacagttcacattgctctgttgatgctattgaagctgcaaaagcgttggcactgtccagcagtgctgttgtcgcggtatctggagctgttgatttcgtcactgatgggaagcaggttatcagcgtgagcaacggtgtgcccatgatgcagaagatcaccgcaacagggtgcgctgtgactgctcttattgctgcatttgttgccatggaaccttctgatgccatagttgcagcggcatgcgctcttgccatctttggtctggtgggagagattgggatggagtcagccaaggggcctgcctctcttaggatgcacctcatcgacgctctctactgcctcaatgaagaaacagtcacttctcggtccaagctgaagacatggaggcacgatggaataatgcacgcagcaaacgctgcaggagaagaagtggttcgcgaagtaggagcatga

SEQ ID NO: 26845 - DNA, 273 bp, Zea mays
  Peptide Sequence Number=SeqID_68624
atgtctctaaagaaacgaagtaaatttcgaagctcaaaagtcattcctaagggaatggagagccaaaaattacgatctgaagcttcaaaagtcgttcctaagggagcgcagccatggcttaagaacaggtaccttcagactcagaataaaagcatatacgatgagaagagcatgatcatgacgaaggttgccattgctccaaagctacatgcaaggaagcttcggctcaatcgcagaaaaaggaaccgacttaaaggggaaaaggctatctag

SEQ ID NO: 26846 - DNA, 326 bp, Zea mays
  Peptide Sequence Number=SeqID_68625
atgaagaaccttggaacgaaggaggaggaggaggagggtgacaagagccagaaggccctggggtcaccgagaataggtctaggggcggcagcaggagcagactggaagaaggagtcgtcaaactcctcagcttcgtcctcgggagtaacgaatggcacaccatactcttgttggtgtcattcaataagagtctcgggccctgacctctacctctaccgctacggtccatcgaacgtgaggcagcggcagcaggagatgaggtctcatgaagcggaggctgaggagctggctcatcagaagaagcagggcctcttgaccctattgga

SEQ ID NO: 26847 - DNA, 1200 bp, Zea mays
  Peptide Sequence Number=SeqID_68626
atgtgtggtctcgatagaaatacttctcttacagtattttttgatgtctcaccgagtgaacgatcgagccagccaggaaaccaaaatccccatttgtatatacaatttgtgacaagttaccaacacccagaaggtcaaatgaggataagagttactacgatatgcaggaaatgggtagatggttccactaataccgaggggacaaaagccaaagccaaaagccaaaccaaacacaccctgagtagcactcctcaggtcctgggtttgactccccgtgggagcaaatttcaggctgtggttaaaccccccctcgtccgtcccatactcccatgccaaagcacaggtctaaggcccggtcccgatcgtggtcgtttctcacatgggttacggtgccactgtgtatgggtggggcaggcgttcgagggttttctcgacctgcgtgaggaattagttgaaggttttgaccaggaaactgcagctgttgtgttggcaagatacatctctttgaaaatggagatggaggaagagttcgatgcaacccggtggcttgatagatctctcatacgtctttgttcaagatttggggattaccggaaggatgatccctcttcatttagcctgcattcaaatttctcattgttccctcagtttatgtttaatcttcggcgttcacaatttgttcaggttttcaataacagtccagatgagacagcttatttcaggatgttactcaatcgtgagagtatcactaactcggttgccatgatccagccttccttgatatcattttcttttgattcacctccatctccggtatttctagatgtggcatcaatagcagcagatcgtatactgctacttgatgcgtactttagtgttgtcatttttcacggaatgacaattgctcagtggagaaacatgggttatcagaaccaacctgagcatgagcaatttgcacaactattacaagcaccacatgaggaggcacaaatgataataaagggtcgatttccagttccaagactagttgtctgcgaccaacatggctcgcaggcaaggtttttgttggctaagctgaatccatcggccacatataactcagctcatgatgttgctcctggttctgacatcattttcaccgatgatgttagcttccaggtcttctgtgagcacctacaaaggctggctgttcagtcttga

SEQ ID NO: 26848 - DNA, 297 bp, Zea mays
  Peptide Sequence Number=SeqID_68627
atggggagcttccgagaggagccgaaagcggagcaccacttgcgcgtagagaaggcccacgactctctacggagttactcaactgagttctcaaacataggaagagcatcgccggtcattgagcaaccgtctatcattaggatgtcggaggaaggtgatgcaacagtcacagacacaatcacaaggcatgcatcgcaaactcgtttaaagagaccaggaacggccctgaacgaggaaaatgagaagtataatatggtcactccaagagttaagtataatatcgcaaaagaaatataa

SEQ ID NO: 26849 - DNA, 333 bp, Zea mays
  Peptide Sequence Number=SeqID_68628
atgggctacgaactccataggcgaggcctcgatgtcttgggcgtcgaagcccttgacaacttggtatcggtatctaggagatcttcttcgttcagaccagccgtctccatcacgcccacaacaccatccccatctgtcgcgcctccgatggccaatctcacgaccaacgaccgcgccaatctcatcaccaagctcaccacgaccgtcgagacgctgaagaacaagctggacaccctagagcagcacaccaccgactcctcgacgtccgacgccaaagggacattcagcggttggcgcagcaatggtgaggccaatgaagaaaattttctatag

SEQ ID NO: 26850 - DNA, 342 bp, Zea mays
  Peptide Sequence Number=SeqID_68629
atgcatgagatgagattcctctctacgactccgcactcactctgccgctcgctctccccgttccatgtgaatgtaccagaccgcccaagattcctgacaaattcgcagtgcccctgggaatattctaggtttccggcatgcgccacattggtcgtcgactcgtcgtctccaacattctcagtggctggaggccagagcggcacagcgtatcttcggactcgtatcagaaagggagaagctcaaaagatacgaaggttgacacagcgccgaagctgtgaagcagtaaagcttcggcatgttcgcagaagagggaaccgacttaaagatgaaaaggccatttag

SEQ ID NO: 26851 - DNA, 705 bp, Zea mays
  Peptide Sequence Number=SeqID_68630
atggagcaaatggacatgagtgtgctgtccggggtgccaccggacagtgtccgcggagcaatggctctctgcgtcaacggtcgactctgccaagtgaacagtgatgaacagtaccacggcagaagtcagagcaacgaagtgttaaaggttcacactcagccaataaaaagatcaaatttggattcaacacaggagcaaagggccaaccgaaggcacctctggtttggtatcctgatgcctgctctgcgccagctggaagaagcttttgtcagtgcgcaaaaagatcctgaatttcaggctcagttcaacgacctgctgaaaaactatgccgggcgtccaaccgcgctgaccaaatgccagaacattacagccgggacgaacaccacgctgtatctcaagcgtgaagatttgctgcacggcggcgcgcataaaactaaccaggtgctggggcaggcgttgctggcgaagcggatgggtaaaaccgaaatcatcgccgaaaccggtgccggtcagcatggcgtggcgtcggcccttgccagcgccctgctcggcctgaaatgccgtatttatatgggtgccaaagacgttgaacgccagtcgcctaacgtttttcgtatgcgcttaatgggtggcggaagtgatcccgtgcatagcggttccgcgacgctgaagatgctgtacgaggcgctgcgcgactggtcgtag

SEQ ID NO: 26852 - DNA, 963 bp, Zea mays
  Peptide Sequence Number=SeqID_68631
atgccgtacaccggatatcctctagcgccttcccacaatcgcgcttctgcggttctgccgccgacgtccgcgccgccgacgtccgcgcccgcgtccctcgctgctttgccctctccaccctccgccatcaccgccgcggcgtccttctgtaccggatccgtcgcagccaccactccgcagatccgctgggttgacgtccacggagctgctccggggatgtcgtcctccgcttccagcgtcgagggcgacgccgccggagagttcacggaggtcgtaatcgtgcgtcacggcgagacgtcatggaacgcctcgcgcatcatacagggacacttggatgcagagcttaatgatattggaaggcagcaagctgttgcgatatttttagtagtgtttcttatgaggagttttatctcaaaggttgctcatcgtctttctaaagaagtgaaaccagttgccatatactcttctgatctgaagcgagcagcagagactgcgcaaacaattgcaagaatttgcaatgtgccaaatgtcgtgttcgatccagcactgagagaaagacacattggagatctgcaaggcatgacgcttcaagatgctgctacagagaggccagaggcatacaaagcttttatgtcccacaagagaaatcaacaagttcctggtggtggagagagtcttgatcaactgtcggagcgatgtgtgtcttttctgtacgacattgttggtaaacacaaaggggagcgagttatcctggtttcacatggcggcaccatcagagagctctacagacacgtgagtcccacgaagccgctccacggcaaaatacacaacacgtcggtgagcgtcatcctcgtgtccgacgccaccggccggtgcatcgtcaagatgtgcggggacgtcagccacctccaggagacgggcgtcctggagaacgccttcggtggcgacaagacctccgcctga

SEQ ID NO: 26853 - DNA, 333 bp, Zea mays
  Peptide Sequence Number=SeqID_68632
atggccttcatgctggcgcaggggcaccagagagcacgaaccacagcggggcgggctaacggtgacgcggggttgcttcagcgagcaattgcgcgagtaacagagctaaaacgaccaaatcaaggacacatgcagattgctcaccttgaggggaagcgctggcgtcacgaagcaacgacggaggcacagagactcgatggggcgacgacggtggggctccggctgcgcaaagattgctttggtgagcgcggactggacgcaacagagagggaaaaggcacaccgaagggtgtcccgagcagctgacagtatggcagagctcaccgaggcatag

SEQ ID NO: 26854 - DNA, 204 bp, Zea mays
  Peptide Sequence Number=SeqID_68633
atggcagtcggggtcagtgaggcattgtacgccaaggcgactcagctagtgcttttggcaacccaaacccctaagccaaatagctgcatgtctagaggttctctggaggatatggttgctggagtgacttggccgtccatcttgccactgggttggacagtcgagtgggaccctacctcagcagaggaggagcatgaggagtga

SEQ ID NO: 26855 - DNA, 219 bp, Zea mays
  Peptide Sequence Number=SeqID_68634
atggccggcaacgatgcatacaagtccttcctcgtgacggtcgtcaagcactacacccgcggcgctctcctcctcgtgaggagttcgatggccggactgggcatttggggtagcgcggcaatggcattgtgcgtgggtgcaatgggcaccgacaccgagcgctgtcgggaggaagaagggcgcagggccattggatccgtaatggacgcctgtgattag

SEQ ID NO: 26856 - DNA, 444 bp, Zea mays
  Peptide Sequence Number=SeqID_68635
atgatccagggccagtacggcggcaccagcgactaccgcaaagcaacgcgggcgcggcaaggtggaagagtgaatgacgggggtgggtcgaggcgagtccagaggacgcgattgcgagccgaagcggtcgccggcgacttcggcatagttgttacgggagcgaagactgagtgtgcagtcccacacgacagaggaacacgccgagtgcaagccaccaaacggcgggcccaggccgtcagagtggggtgcgggagagccaagcgcgcgcgatgcagagcgagggcacggagcgactgtagggatttgcgttcggtcaggagaagaggaatagtggaggctgacaaggtggccccaaatggcagcgatactgggagacaagtccacgcgctggggaagtcccgccaaggtggcccacccatcagcggttggaggaaagtgggctag

SEQ ID NO: 26857 - DNA, 231 bp, Zea mays
  Peptide Sequence Number=SeqID_68636
atgtcaggacaatccacaatcccaatgctaatgaagaaagagccaacaatgctcagagctgtcatcacagctcacagtcttcaagcatgcaacaaactttttacagaccaccagctccgagaggaagaggagggagaagcttcaatggaggaagcaagtcactctcaagcttcttgggctcaactaccaccacccccaccactggcgcctgccccaagtcatgatcagtag

SEQ ID NO: 26858 - DNA, 510 bp, Zea mays
  Peptide Sequence Number=SeqID_68637
atggaaacagatcgacaggaggctgcgcggaagaagtggaaggctccagtgcggctggtggatccccgacgcgacacgaaggtgccgcatcccaccgcgaagggacctaccgtgactgctgccatgcctccccctgcagtgcctgctatgaagttttgtggccaggggaggcctggagctatggtgccagagggcttcactcctcaagcctctggaggggtgaagcgtagcggagggttccgagggaggccatcagagcttcatgtgcgaacggtgccttcaggggtgggtggattctctatgtcaggtcgcttgttgttgactgctccatcctcgggtgcctcttggggaatttcactgataatggtgccttgcatttcttttggcgagggccgccttcgctgtgttgtccagagaggtggtggccgtcataatcactttcttgggagccatcatgggatttctttgtcgaagcacccacggtgggcgtcaaatgttggaaccgactaa

SEQ ID NO: 26859 - DNA, 915 bp, Zea mays
  Peptide Sequence Number=SeqID_68638
atgtcggggctcgcctttctcgaaggaactggggcggtggtcaggacactcctgagcttcagcttcgggttcaccctcttccacgagaatttatggcagctcctcgacaattcccactggaaaacagaaaaaccactttgtatgttagcccctcgggttccaactatccgcaaacgattaccacaaggtcctcggtcactattcaccgagtctatgacagtttacagaaaaaccctcgggtttggcttattcacgcgcgagatcccttcttctacctcagaacagagagagagagagagacgagtgcacggctcgggtgacagcttaccagcagtgaagttggctaggcaaggtggcggacaggtgcggtcaatgaaggcgaatttgacggtggtcttggctcggtgggtcgcggatggagatgttcggtccacgcgcgccggcagggaccaaggaacggcggcatcgacggtggtgctcggggccttctccgagctcgagcaagggctccggatttgtgaacttgacgacaaagcggttgcaacttggttcgtggactacggtggtcagtggaggcgcgagcacgagctagctcgcgacggccatggcgatcggcgtcgagtggaagaagagacgagagcgagggcgagtgacagcaaggcgagagcagaacgagagagtgaggcacagtggagtgctcgaccgaatgaagccaggcgcggctgcggcttgcccacgcgcgcggacaaagcgaggcacggagcagggcgtgtcgtccatgcgtccgggcgcgcgccacttggtggttgtcgtctgctcggactgcagacgcgagtgagacaaaatgggagcatgaaacatcatccacctccagccaatttgctcacctctctaccggcttcaactttgctatag

SEQ ID NO: 26860 - DNA, 372 bp, Zea mays
  Peptide Sequence Number=SeqID_68639
atgacgaagatggtgcgcactttccagaccactcgcgtgaacaccacctatgtccccccacctaagcaggctcctttttactcagttgtggttgaagtagaccctgaggagatgcaccaccttgttggaggaaatggtgtaattgtggaggatagttttgaggaggttctggctacacccactttgtccccagcacttcatgccattgttgctagagcttcttcatcagcaccacctgcgctagtcgcccaagcccctactcctagaggtgatgaccttgatgattctggtgatgatgaaggcgatgaagaaaataaagaagataaccaagacaacaaaggcaacaacaacaatgaaccagaccaggattga

SEQ ID NO: 26861 - DNA, 1239 bp, Zea mays
  Peptide Sequence Number=SeqID_68640
atggaacttattgctttgggggcgctgaccttggagtttgctaccgaaaggcggcggcttgagggaaggattgaacgcctccgcacgcaacatacagaggcggtaagggacaagtcgacagcagagaataaaagccgcaatctacttgagaagctctcggtggcagaaaaagagagggaagacctcatctgccgacttgccgaggaaaaggagggcgcggaaaaaactcgcgcggaggcccaggccgcccgcgcagaagctgaagccatgcgcgctgaggctgaactttccctcaagcgtgccaccaacaaggagtcagagctaaagagcctccgcaaatattgtgagaagacggaggcctccacccgtgccggtgtcgagcgagcgcacactctgtttgtggaagcgtgccgtgagctcggcgcactgattgctccttttgataaatttggggaggaggtgggtctttgctttcttgggtggctgcaggaggagctggagtcactcccgtccatcatgatgggcctcatgtcctacgcatctcttgtcacctgcgaggggcggcgaatgccttgtcccgcgaaggatatgacgaatgaagaagaagttgacgacttctccggtattgagagctcgatgactcggatgggtggcatggaagaggtgggagttgaagggcattcagcccctcaggatggctccagcgaagaccctgcggcggtgtcagttgctgcgcaagttcctatgtccgggcctgtgcaagcaaaccctgatgatgttgatactaatgatgttttgatggctggaaatgcaacgtttcttagtggaaatgtgtctaaggggtctgagcttgggtcgtggtcttcggatgaagaggaatttgggagtcctttctcgtgggttgaggaatcttttgaggaggacttagattattttgctacgttggagtctccgctgcgagctgtccctcacgaggcgctggcgacctcaactgatgcaagagctgactcgcagaggcaaagggtggttgtgtcgaaacagagcaccggtgagtcgtcacgaagtggaagacgtcatcgaatgggtatggaaaggtctcgtctttggggtggccttcgactggatcgtggtggtcagcgcgagctactttcgtcgacgtttgggacgtgcattggagagggggacttgcgggacctatttgagggggaagagttgaggatgatgttgttcaatttttga

SEQ ID NO: 26862 - DNA, 174 bp, Zea mays
  Peptide Sequence Number=SeqID_68641
atggcggtgccccagctcgacagcgaacgggccgaccccgacgcaacacatctccggctccagcgtcgtcgtaccacccgtctcctgtcccaagtgtcgctcccaaatcagattgtgattctgtcagcatcaaatatggtgggtgaggactatcgatggatgtatgaagtttag

SEQ ID NO: 26863 - DNA, 456 bp, Zea mays
  Peptide Sequence Number=SeqID_68642
atgctggcaacatggaggactttgaggagttctaggactacgacgagttctagttatgttagtggcaaacccctgcctgtgaaggccttatcttctacgtttcgtattccgcacttcgattatgttaatgactatgttatagactctgtggatgtcttggacatcttgatatggcccataatagatgcactgcacgaacacgtcggggttgtctcaagttccgtggtgtgcgtgaaccgagctcttgaatggcgttccgaccaaattggggattcccagtggagcgccaggggtagaattaggtgtagaccgaagtcgagtgcggattattgggtattatggccagtacaagctcgccggagcaactgctccgccgtccgtggtcgaggacctgatcttgtgaagaaaagaaaagggaagggccttggtgcaaatgtcagagacatagatgaatag

SEQ ID NO: 26864 - DNA, 324 bp, Zea mays
  Peptide Sequence Number=SeqID_68643
atgcagtacaaggggtcaagcagtctcattagctgcgagaagcagacaattcgaatcgattttttaaaccttgcaagggctcaccgccttggcatacaatgctccactgaccccggctaccgctatgcagtgactgcacttgtacccaccatagctagcatgggagacccagtctcaggaaagttcgcgcccagcttcactcagggcttcgatccttgtttggagaagcttcacggctccccggagaagctgtccaagggctcggttgaggctaagggtctctggaaatggctggccgcggtggctggcactcgggtggcgtag

SEQ ID NO: 26865 - DNA, 531 bp, Zea mays
  Peptide Sequence Number=SeqID_68644
atggccttgatcggccacacggccaggcccagcaaggcttctaagccgctggagtggagggggaatctcagatcccgatgggataacggggatctgagacatagtcatagcgattccagtcactccgagcgcctaggggatcggttcctctcaaagtgtcgattaggcagcccatcgccaaggcccacagccccccgcgagtacgcccagagaatgccaggaatcacctgtggccagcggcgaggtccacgcgagttgaccacgacggcccatcttctcggtgcggcaatgcacatgggattgactacagcagcggcggcgcggtggagttccccggccatggaaaatcgacgaagcgcccatggcagcgagcgcggctgggttcatggtggcgccaacagtggagaaccacggcggcggtcgcggtcgggttaccgatacacgcgtccaggcatctcggttgcggggagcctcgatgggaccccagatgagcacgtggaccggtcatgggatggtccatggagtagatag

SEQ ID NO: 26866 - DNA, 239 bp, Zea mays
  Peptide Sequence Number=SeqID_68645
atggacgggagcgactctagctcatcctgcagccaccccaagaagtgggtccccacctcctcccctaatttgtcgaaggggacagtttgcatatcgaggtcacactacgccagcaacggcagcaggcgaggcaagttcgtctccgccatcagcggtggtgcaaaatttcaaccatgggtccagcgaagtccatgtgtcaccctttgccgtacccaccaggccggcgggcactgtagccg

SEQ ID NO: 26867 - DNA, 489 bp, Zea mays
  Peptide Sequence Number=SeqID_68646
atgggtgtaggcacttcgaggccttcgattgagtcaacgaggacttcgacgctggcgatgagggaagaagaggtggaggacctcgcaggcctcgagtgctcggtggcccagaaggatgctgcggttaaggcgggagtggaggagcaatccttgctccaggaaggcggcgctgaaggtcctacagcggttccggcgtctgggcctgcgcaagcaaaccgtgatgataacgtgaatgatgatattttggtggatagaaatgtggtgattcttagtagtgatgcatttggtgaatctgatgttgggttgtggtcttcggatggtgaaaagttggggagcccatttgcatggatagataatgaatctttggaagatgatttagattattttgcgacgttagatttagctgcagcggagtctccattgagggtcgcaccccttgaggcgccgacgacttcgctcggggtagtccctagtgaatcgtgggggtga

SEQ ID NO: 26868 - DNA, 246 bp, Zea mays
  Peptide Sequence Number=SeqID_68647
atggcgagtggtcattattgtcggtcctcctctgctcatctccagcgccgagatgacgccacaatacttgatatagtagtagttgaacctgggctgccaaatgaagtgcaccccgggctcatcagcgaggtggatgatgagttggacggcgtgatggcgctgtcgtcggttgcggtgccccagaacaacgcgagagtcgtcggcattggcgatgactatgaggtccccctatttgacaatggatag

SEQ ID NO: 26869 - DNA, 276 bp, Zea mays
  Peptide Sequence Number=SeqID_68648
atggcgtcaacggtgcagcgcagccctgcacccctgcaccacacatgtgcctcccagaaaactgatgaaatcagagattctcttgagataatgaagcacacatttgaagaagatgataaattggaaactgtgataaaaaaatttgatgatgaaatgcaagagaaaggaaaccagttctacaaaaaggatgatgaaggtagtacatgggaagttgacaagcatggatgtcttgtgatagagaagaactgtgttgaggtgaatgtttaccaccattag

SEQ ID NO: 26870 - DNA, 288 bp, Zea mays
  Peptide Sequence Number=SeqID_68649
atgccgtcatcggagaagaccattagtgatccggcggcggtggtggaactacagcacgggcatacggtcgaatttggtacctcgaggatttacttgggccgcgtgctggagatgcagcgtctaggctattttggaaacggagtcgggcgggctccaggggctgaaaatgtccctaagctagaaggggagttggttgtgttcgaggcgttctttgctgctggccttcgtttgccggtgcatcgctttgtagttgaagttttgcagaagtttgaagttcaaattcaataa

SEQ ID NO: 26871 - DNA, 198 bp, Zea mays
  Peptide Sequence Number=SeqID_68650
atggagctcaaggaaggtgtttttcggaccttcggcattccgaagcctttgagatttttcgcagatcgagcttgttacgaaaaacgatctagcaccgcgaaagggctactgttgggggccttcttcttcttcgccgaaggtcctctaagcaaagacacctccgatagaacgatatgccagaagttaataaggacataa

SEQ ID NO: 26872 - DNA, 438 bp, Zea mays
  Peptide Sequence Number=SeqID_68651
atggagctctgcgagcaagagagacgggcgcgcagaggagcaaagagggagcgccatgggggtgtcgcggctggaagaggagcgagcaccacagggctctgcgcggcgtcagagagctccaaccagggagccgagcacagggagataggcggccgagcgccagggagaaggaagagagcgccgggagagaaggggagctcgcggcgtctggaaatatccaaaggtgcgctacgtaagaaatggagaggagaggggataagaagaggcatccggtggaaaaatcttcaggagatggacaccagcgcgcggcggtggaaaaaatcagacgctcgctgggcatcgagctgggcgatggaagggcctggcgcgtacgatggctgggatggatgccgacgtgaagagattttttttgctggagatcgagcgtggatggattag

SEQ ID NO: 26873 - DNA, 774 bp, Zea mays
  Peptide Sequence Number=SeqID_68652
atgccgaggcggctgctgcagagtagaggacagagcgagcgagggccactgccggggcgctgcgcagggctgctgccgggcggggtagtggtgcgggtctgcgcagaggggcgccgagcacatggtgaggaggagctgggcttcctgctgctgcgcgaggaagaaaaaaaagaacaggggtgctgccccgacggtgccgacatcgagatgaaccgagggaagcgctgctcggcgaggaagctcagggaggaggaagaagagggcctgctcgccaagggagagagaagtcgagctgccgctggccgtggaataggggaggacggggaagattgcaggggcgccatggacagggacgccatgggctgctggagaaatcagggcgccatccatgggaagaagaaaagggtgtactcgccatggaagagagggcgcgggggaagggagcagggcggccagggagaagaacccgagctcgccgggggctggcggccatggctgctggccgagcagaggcttcaaccctggggacagcaggcgtccatggagcagaaggggcgctggggaggggatgagctgggcgctggctgggagatgcgacgccctggagaagaggaggcgccatgggaggaagggagaaagttccctgcgctggctgctgctgccgtgagcagcgaggaagaaggcagggagtatggttggtggcggctagggaaaaaatggagggtgggagtgcaaaatagcccaagtgcaagggaagggcacccctatttatag

SEQ ID NO: 26874 - DNA, 417 bp, Zea mays
  Peptide Sequence Number=SeqID_68653
atggggtacaatacactacacctcctttctagaagtggctactgccctaatgggtattttcctggtagagctttggctcaagcttttgggagcctcatgtggtctagggtatggtggttttgggctcaggttgggctgggggctactagaaatggttggccacggcggtcggctcctgtagacaatggcagtgagcgtggagttcgccggagtggagtgttggctcggggagttgggcaacagatggagggcttgactgagggctcaggcagcctttataggtgtgagcacgagcggggcatggcggtggcggactgtggcgcgggtggggcgtgctcccgtttcccagctgatgtcgagcacgtggcgacactcggtgtagtcatttttcaatcgttcattagctccatatcttag

SEQ ID NO: 26875 - DNA, 294 bp, Zea mays
  Peptide Sequence Number=SeqID_68654
atggcgtgtgggttcagtgattcagggtttaagtgggctctactgccgtatctcatcgtgaacgccgcggcgccgctggtgaacgcagctgggatcggccttgccgtggcggaccttgtttgggggcagtcgcgtgtgggctcttgggttcgttttctccgtagtgggtcgctaatgccttctacgccgtggttgggagccctacggcgccgctgtctcggcttgacaccatcggagttgggcgccgccggcgcgcgcagaggcagcgtgggcgcatgtggagccggagcctaa

SEQ ID NO: 26876 - DNA, 204 bp, Zea mays
  Peptide Sequence Number=SeqID_68655
atggaggcaaagggatccccgacaggaggaaagagctcacaaattgagccacttgttgaggcaatctttggggcttcgtcactagaggaggatgaaggcaaatcaaaagatgccgaagggcgtcgtgctaagcaaagctttgaaaatgcagcaagaaaaggaagatgttggctacgaagcaaccatttcagaccttcaaggtga

SEQ ID NO: 26877 - DNA, 294 bp, Zea mays
  Peptide Sequence Number=SeqID_68656
ggctctcaatcttgctgaacacgaagggcgaggaggggtgggcaccttttcactctccggcaactctctaatcattgacatcctgcttgagcaagttcacttggatagagacaccctctttgtttctattcacatggacataagatggtctgtgcgcaagaccgtggcggacctgcgcctggggattaatcgtgagcagagagacagggacatcacgaattcgtcgccggacttcaactcccacggccggaccgctgcgctgcgacggcaggcttcctcagagtttaatcgctg

SEQ ID NO: 26878 - DNA, 1154 bp, Zea mays
  Peptide Sequence Number=SeqID_68657
gcgcccctatcgcccgcctcggtgaatcagaggaggaggtcgcgctggcgcgggcgcgcgctcaggccctctcgcagggacaaagccaggcaccctctcctccccatgccgccgccgccctggggccacctcctccagcgcctgtggcgcctccagcgacaaagggcatcgcgacaccttacgccaagaaactcgcgaagcagcacagggtggacatcgccggggttgtcggcaccgggccacacggccgcgtcacggcggctgacgtcgaggcagctgctggcatcaagcacaagcgaccccctccacctccaccccctgcttctgttgacgctgcgccactagtgcccgcaagtgcggtgctgccaccagtacccggtggcacggtggtgccgttcacgacaatgcaggcggcggtgagcaagaacatggtggagagcttgagggtaccgacattccgggttagctactccatgatcactgacaagcttgacgcactctatgagaaggttaagtcaaagggggttacaaagacagtgctgctggtgaaggcggcagctgtggcgctcacccaacaccctgtagtaaatgctagctgcagagatggaaagagcttctcctacaacaatgatgtcaacattggagtggctgttgcactcgagggtggccttcttactccagtattagaggatgctgataagggggctatcatggctgttggagcgtcaagacctactgtagtggctgataaggatggtttctttagtatcaagagtgaaatgctgctaaaccttaaagcccaaataatctgtgatccgtctgcttgttccctagaacatgtgaatgttactgctgatcacaggattatctatggtgctgatttggcagcattcctgcaaacatttgcaaagattgttgaggatcctgaatgcctcacattgaaattcaacagatcattttttcctgttttgagtaaagttaaagcaaacgagcatagcctctctggtcgcatcagatggacttttagaacggtacctagattttttttctggttacttcaacaagccttcacagttacagaacaaaatgatgcaggattcctaaattacaagaaggtaaaagatgccaggcaggcatatggttacgtcctctga

SEQ ID NO: 26879 - DNA, 3816 bp, Zea mays
  Peptide Sequence Number=SeqID_68658
atggcgtcgcgccgagccagcaacggccgctctcccctcgtgcggaaacagagtcagatcaccgcctttttctcctcccctaccccctctccgtccccctcgggcccgagccccggcgcatccaagccctctccatcgccgctgaaccctagtgcgaggacgaggtccccacttgccgcggtatccccctcctctcccaagctgccacagccgcagcagaaacagaaggaggtaaagaaggttaaggaggagcatgatgccgccttggtgcctgcgcccgcggccgcggaggtggtggggaggtgtttgcgggtgtactggccgctggacgacgcgtggtacaagggcaaggtggaggcctacgacgcggcctcccgcaggcaccgcgtgaagtatgacgacggcgacgaggaggaggtcgatctcaggaaggagaagttcgagtgggccgccgtcgttgaggagtcgaccttgctgccggcgaggaagctgcggcgtctccggcggatgtctgatatctcggtggcaaaatcaccggctgaggcagaggatggcgcaggggattccactgaggacgaggactggaagagggatactgttgtggaggatgcttctgaggaggtggagctggatgaggaagacgaggaggaagttgttgcagtgcgatcacgaaagagaaatccaaagaattccttgatgtcaggttcaacaccatcgacattgggttctggtttgacatcagaatcggagccaagaatttcgaagaggaggaaaaacgtggatgtggcctcattggattttgctaaaaggttcaccttcgaagcagttaataccaatagaaaagttgacccagaagtgccaatgagctgtggccagaaggggcaaactacggggaatgactacactgctcctactggggatgcagctgagcgctttgggcagcgggatgctgagaagtttaaattccttggagaagggcgcaaagacgcaaaaggcagacgtcctggaaacccgggctttgatccgagaacacttttattgccacctcagttcttgaagaatttgacaggagggcagaggcaatggtgggaattcaaatcacagcacatggataaggttctgtttttcaagggtgaacagccccactgtggattcccagagaagaatttatcagtgaatttggagaagttagctgagaagggttatcgagttctggttgtcgagcaaactgaaacacctgaccagcttgaacttcggcgtaaggagatgggtataaaggacaaggttgtcagacgtgaaatatgtgcagtagtcacaaaaggaacactaatagaaggagagcacctactggcaaacccagatccttcatacctcctgtccgtgactgaaagttaccaacgaagtccaaataagagccaagacacatgtaccattggtgttagcatagttgatgtttctacaagcaaatttattgtaggacagttccaagatgatccagagcgccatggattgtgttcaattttgtctgaaatgaggcctgtggaaattataaagcctagtaaaatgctgagtccagaaactgagaaggcattaaacaacaacacaaggaagcctttaataaatgagctggttccgtccacagaattctgggacgcagaaaagactattgatgagataaaacagtactacagctcagccaataaacagaaaaaagccgatgatatacaagactgtgtggactgtctgcctaacttattacgcgagttaattggagcaggtgataaaacatatgcactttcagctctaggaggttccttattttatttaaggcaaacccttctggatgagaaaatacttccatgtgctgagtttgagccacttgcatgctcggggttcatcaacaatatccgaaaacatatgatacttgatacagcagcattggagaatctagaacttttggaaaatacaagaactggtggcctctcagggaccctgtatgcacaactgaatcattgtgttactggatttggaaagagattgctcaaacggtggatcgcaaagccattgtatgatcgcagagaaatacttcggcgtcaaagtgctgttgctactttcaagggagttggccaagattgtgctgcacagttccgtaaggatttgtctaggctccctgacatggaacgcctgcttgcacgtctttttctcaagctgatgttccatgcatgttcttctattagtacattgatatgctcagagggatctcaacttattgatttgctgtcaccaggcaaaggcctatcaaatatttcatctattttagaccgattcagagatgcatttgattggtcagaagcagaccgcaatggtcggatcattccttctgaaggttgtgatcctgaatatgatgccacttgcaatgcaatagaagagatcaaatccagtctaaaagagtacttgaaggagcaacgaaagcttttgagacctgcatcggttaattatgttaatgttggaaaagatatgtacctaattgaagtgcctgagagtttgggaggttcagttcccagaaactatgagttgcagtctacaaaaaagggtttctatcggtactggacgccagaactgaaagagctaatattagaactttcaaaggctgagtcagagaaagaatcaaaattgaaagccattcttcagaatctgattcagctatttgttgagcatcacactgagtggaggcagctggtttctgttgttgctgagcttgatgtattgacaagtcttgctattgcaagtggttattttgagggaccaagttgctgtccaactataaaagaatcaaatggcacagacgatactcctactttccatgctagaaatcttggacatcccattctacgaagtgattccttaggcaagggttcatttgtaccgaatgacgttaagataggtggtccagggaatgccagttttattgttcttactggtccaaatatgggtggtaaatcaactctcttgcgccaagtttgtcttaccattatactggctcagattggagcagatgttcctgcagaaaaacttgagctttctcttgttgaccgtatcttcgttcgaatgggagcaagggatcatattatggctggccaaagtacattcttggtggagctcgaggagactgcctcagtgctttcatcagctaccaagaattctcttgtggtgttagatgagcttggacggggtacatcaacttctgatggacaagctatcgcgttagcaatggaacacaacgataccaaggtatcgctgtgccatatggcgtgcgaggtggtcgagggagtaggaggtctggaagaagtgactttcctttatagattaacacctggtgcttgccctaaaagttatggtgtaaatgttgctcgattggcaggaattcctactaaattgcttcaaagagcgaatgaaaagtcgagtgaatttgaggccaattacgggaagcgacacaagatgaccaacgataagcacgtcagtgcacagagcgatgataagttttctgccataagggatctgtttcgaattgtgaagacatggcctcgtcctgaagatcaggaagcgagtataagcatgctccgtaaattgcagaagcgtgccaagctttactatcccttccaacaattttgtgccctcactaattctcctaccaggccaggagccccaagatctgagcatagaccttctgatccaacgaacttgctcgaaaaaaaactgattaatgcaaatctgattaatgcgatgtatgggtatatgctagtgtttgaccagtaa

SEQ ID NO: 26880 - DNA, 1869 bp, Zea mays
  Peptide Sequence Number=SeqID_68659
atgggatgtcttgcggctctgagccgcttcatctcacgcctcggcgaaagaggcctgcctctgtaccgcctcttaaggaaggccgagtgcttcacttggacccctgaggccgaggaagccctcgggaacctgaaggcgctcctcacgaatgcgcccatcttggtgccccccgctgccggagaagccctcttgatctacgtcgccgcgaccactcaggtggttagcgccgcgatcgtggttgagagacgagaagaggggcatgcattgcccgtccagaggccagtctacttcatcagcgaggtactgttcgagaccaagatccgctacccacaagttcagaagctgctatacgcagtgatcctgacgcggcggaagttgcgacactacttcgagtctcatccggtaactttggtgtcatccttccccctgggggagatcatccagtgtcgagaggcatcgggtagaatcacaaagtgggcggtggaaatcatgggcgaaacaatctcgttcgcccctcggaaggccatcaagtcccaggtcttggcggacttcgtggctgaatgggtcgacacccagctcccaacagttccgatccaaccagaactctggaccatgttcttcgacgggtcgttgatgaagacgggagccagcgcaggcctactcttcatctcacccctcggaaagcatctacgctacgtgctacgcctccatttcccggcgtccaacaatgtggctgagtacgaggctctggtcaacgggttgcggatcgccatcgagctaggggtccgacgcctcgacgctcgcggtgactcgcagctcgtcatcgaccaagtcatgaagaactctcactgccgcgacccgaagatggaggcctattgcgatgaggttcggcgcctggaagacaagttctacgggctcgagctcaaccacatcgcccggcgctacaacgagactgtggacgagctggctaaaatagcctcggggcgaacaacggttcccccggacgtcttctcccgagacctgcatcaaccctccgtcaagatcgacgacacgcccgagcccgaggcaccctcggcccagcccgagaaggcacccgggggctacacgcacctgttggtcgccatcgacaaattctccaagtggatcgaggcggtggcgttcttcaccaacatcatccatcgttttggggtcccgaactccatcatcaccgacaacggcacccagttgaccggcagaaagttcctggacttctgcgaggatcaccacatccgggtggactgggccgtcgtggctcaccccatgacgaatgggcaagtagagcgtgccaacggcatgattctacaaggactcaagcctcggatctacaacgacctcaacaagttcggtaagcgatggatgaaggaactcccctcggtggtctggagcctgaggacaacaccgagccgagccacgggcttcacgccgttctttctagtctatggggccgaggccatcttgcccacagacttagaatacggttccctgaggacgagggcctatgccgaccaaagcaaccaagctagtcgagaagactcgctggaccagctggaagaggctcgggacatggccttactgcactcggcacggtaccagcagtccctgcgacgctaccacgcccgaggggtctggtcccgagacctccaggtgggcgacctggtgcttcggctgcgacaggacgcccgagggcggcacaaacttacgcctccctgggaagggccattcgtcatcgccaaagttctgaagcccggaacgtacaagctggccaacagtcaaggcgaggtctacagcaacgcttggaacatccaacagctacgtcgcttctacccttaa

SEQ ID NO: 26881 - DNA, 186 bp, Zea mays
  Peptide Sequence Number=SeqID_68660
atgaccacttcacaaccttgggaaaagacctcgccgtcatcggtgatctgtgttttccctgtgatgggtcagggattgggacaggactataccaatgttgtccccagttatccctcaaaattgaagggacgagagacgacggcaggggacgtccttgttctggctgtcccacaaccaaacacatag

SEQ ID NO: 26882 - DNA, 468 bp, Zea mays
  Peptide Sequence Number=SeqID_68661
atgcccgcagtaccaccgagtgccgcaattttcgtacctggtgttgggcacgctgatgcatgcacctgcttgatcgtgctgaaattcgacccaagtgatttagtcacaagcaaccgtccttctgcatcccgcattcgctggcttcgctattctgaaacgacggggatctgtagtacgagagatcggggaggtcggggagcagactcgcctgccgccgccgtcaacgttcggcagcagcgcagacggttctcgcgggggttggagctttcgccggtccaagatctcgagcaaatccgtgttgggtacaagaagcgatttccaggcgaccgcgcgctgactcggcaacaacaagcgagaacatcccgagccaggtcgaaagcagagccgatcggatcaggtgcaagtgtgcaactcgacccagcagctggaaatgtggccaaatgcgcgaatggttttggtgactcgtaa

SEQ ID NO: 26883 - DNA, 1227 bp, Zea mays
  Peptide Sequence Number=SeqID_68662
atgccgactctccgcagcgcgacggcgaacgcgtcccccatgggcaccccattacctgccgagacgagcacgccgcgcagcgtcaagcgccggctgacgccaggtcgagccggcgagtcgcctggcgcgtcgcggcacacctctcctcaccgacacccgcacgccagcaccggacctacgggtatgggtagtaccaatccgtacttatatccgtctacccaacgggcaaaggatcttgcccattacattactgtgggtagagaaatcatctcgtactcgccttcgtatcgggtacacgtgcctaagatgctctcggcgtcgcccaagtcctccaggaagcgcctctacggtgacttcgtcgcagccgagaagcccaagtggaacccccgagatgccgcgcagatgagggctgtgaaggaggcgctgcacgtggcgacagtgccgtcgtctgaattggtttgccgggacaacgagctcaggcgtgtccttgagttctgcgaggcgtgcgtcgagcaggagaaggctggtagtctctatgtctgcgggtgccctggcacagggaagacattatctattaacaagatcaaggatagtttggtgtgctgggggaatgagacacctgatgccttaacaatcaattgtacaaacctagcaaacacctctgatatttttggcaagatgctagaaacatttcagaaccgaaagaagggacgcaacaaattgtcgccacttcaccaacttcagagcatgttttccaacaaggattcagctccaagaagaatgatgttggtcatcgtggatgagattgactacttaataacaagagaccgtgctgtgctgcatgatcttttcatgctcacaacttgtccattctctagatgcatactcataggaattgcaaatgccatagacttagcagatcgttttcttccaaagctggaatccttaaattgcaagcctcttgttgtgacttttcgagcatattctaaggatcaaatatctgacatagttaagcataggctaaaggttcttgagtatgatgtctttgaaccactagctctggagttttgtgctagaaaagttgcagctgcctctggtgacatgagaaaaagccctaggcgtttgcaggttgcattgatgttggttattcaagatttgagattgcatgcttcaacaatgtcaaccacatccttatttgaattccaggagtgctgtggaggttcttga

SEQ ID NO: 26884 - DNA, 513 bp, Zea mays
  Peptide Sequence Number=SeqID_68663
atgtggtacggcgggttctgtcgggaagcggacgcagagctcacgctggccggtcacgccgctgtcaccgcgtcgcgtcggcacgccgggacaaaggaagctgcgagacggaagcagcttgggcacgcgatcgtgcggcgacgagagttcaacaatgaactagttgacgacgaatattcaagaacggagatagtatataagaagaaagcaaaaaccagtttgctgcaaataggtcttacatttactgtgaccactcgaacacaaaagaaaaaacgtgaaaataaaaagagactcgtgaagtatttccagatattccaagccgagtacatcaagatgcctgcctttgtttttttttttcttcgccaagctcccgatattccctccctgcgacgacatgacttctcccaccagattttgcgtggtctgcacaccctcatcgatgtccagaattcattctccaacccatttttcaacgagcacccagacttcatttgcaaaaggacagtgcagtga

SEQ ID NO: 26885 - DNA, 210 bp, Zea mays
  Peptide Sequence Number=SeqID_68664
atggctttattgtcgtatcgtatgcagtactgttactctactaccaggccggtttgctgcctcggctcagctcagatattttcgttctgggcctctcgggcaggacagtcggagtcgggacactgtctctgcttgcagattttgcaagaccgaccgacgcacaaaatgtttagcttcggtgagcaaaggatcaaagcgctgctgatatga

SEQ ID NO: 26886 - DNA, 282 bp, Zea mays
  Peptide Sequence Number=SeqID_68665
atggaggaacagaggccgagccaatggagcgcgcctgtgcacgagcgaacagaggaagaaggcaagggcgcgcgtggcatggggaaaaattggagcgcgcacaggggaaagaacaggcggccggaccgccatggcagggagaggaagatggtcgtggaggaggagcggctgggctggagaggagtacggcgagcgccgcagccggcggccagagccccacgccgaggtcgagtagggacctccactggggaagaagaagtgcccacgggagagagtggctga

SEQ ID NO: 26887 - DNA, 612 bp, Zea mays
  Peptide Sequence Number=SeqID_68666
atgaatgagatgttcggccaccagcgagggagtatgccgagcggggaaaatacacagggcgcgtacgagctaagcgacgacaggacggacagatcgacgccatgggcgagatccaaggaagcaacggccacggcaagggagctccgcgagctgggcgacagcacgtcgagcgccagggacgagctcacggcggagtcagactcggctggtcatgcgggtcggggaaaaagagaagctggacgccgagcagaagttcgacacgcgcagggaccaagcgagctggaggccggcgagcacagcagggagaagacgccgagaggaggggatgagggagctccggccatggaagctgctcggcgagcgcagaaaactgggaagctgccgcacgggggaaaaacttggggcgcgccggtcatggagaagaagctgagggggtcgcgacgcaggaagctgggaagttccacggcgaggactcggctggaggggacgcagcttgtgatggcggcagggaatggaagtcacgagggacggagggagatagaagagacacgatgcttgcagaagataaggaagcggctggaaaaaaaatcaaggggagcacggcggcagtag

SEQ ID NO: 26888 - DNA, 576 bp, Zea mays
  Peptide Sequence Number=SeqID_68667
atgcctggggagctccaaacccgcacactagcgccacaaactctgaaccccacggtgctacacgtagcggagagggaaccaaggaggatggggatgccacgaacgaccactacgggtgtagacgctcctccacaacccaaccccgagggcagacaaccaagggtgataagattcaccggcggcggcgagttgtccgtgtgggtagtggcggcgcaagagctggcgtggagtggcggtggcagaaaaacaagaggggcccgagcggatgagttcgtggggtcgatgcttataggcgaagcggggtaccgggcgattgaacggctccggagctttcgggcggtgcgcggcttcgccggcgttcgttgcggagtccgcgtagtgaaggaagctctgtcgtggtggtcccacgtgaaagacgcgggcgcgactgcatcacgggtcccacgcgtcatcggcgagacagccatcacgcgcacgaatgagcacgggtctggcaagtgggtcccgcgcgccagtgaaacggtggaaacaacgcggcgcgacgacgggaaaaagaaaagtgggccgcgcggatga

SEQ ID NO: 26889 - DNA, 489 bp, Zea mays
  Peptide Sequence Number=SeqID_68668
atggctgtacagttggccggcacaaagatcgctgacaacaaagtgaattgcaatttggtatttggggtatgcacccgcacaataggactgaggtctactgttggtcacttgttctctaatgttgtgaatcaagaacaaggcaacacaattgttaaagataaaggaccttcgtcctccgaagcattgcctcctctcgggcttattgatcatcggagcaagctcatgaaggacatgccttcatcatgttgtgttgacgcgggagtgattacaattcagcatgaacagtacggtgctactgttcatctatttataggcacgggacgcagcccagaggggacccatcctaggcgactgttgatgtggggggccttcttgctaatatcaacttcatctattagtagttgtgggtggtgttcgaggggcacaaacccaagtggggtgggtgggaacatgcttcttgtcatatttgaccatattttggcatggtag

SEQ ID NO: 26890 - DNA, 483 bp, Zea mays
  Peptide Sequence Number=SeqID_68669
atggcggggaggaggccacgaatccgagggcagagaggggagaacggcggagagaaggtctcgggcgggttttttgtaactccggtgaggaatcccggttgcccgaggggggcaatcggtcgtgatagggctcaggctagttctagtggaggtgagggaacaccctgggccaaagcccaggcactggacgaggtcgggatggccagacaccgttcgggcgcggtgagcaggtgcgaccgcacgccggcgaagccaaattggctaaaagcagacgcgaataagctcgtccgcaaattgaggacaaaccgggaaactgaggactggatgttcaaagggattgcgcgagacgacccaagggccccggcttttaaccccctgagcgcggaggaggccgacccggttccccggcatcatgacacgaggttgttgcaacagcttgtctgcaaattagggacgaacctcacaagaagggcccacacgtaa

SEQ ID NO: 26891 - DNA, 501 bp, Zea mays
  Peptide Sequence Number=SeqID_68670
atgggttgcagtttccatggtggcgctacagcggtggtgcgtgtccaggtggtacccggagacgatcagcgcagcgaaagggggagcgccacgaagaggagcaccccgaggccgcggcgggcggaaactactgccaaggcgacggcgcgcgagcgggatccacatcggcggcccatttctatacatcttcccagctccttcaccattccagacgagcccccctgctccctctctcttggctttgtccgagcatggcggcgattggtgagcccagggccgcggatcgggtacttataccggcggccatgcctacattggcggcagattctgttgcgcccggagcttcacgcggcggagaagacggacccgcccagagcagtggacgagtacggctgggtcacgcaagggcagaggcgacgcggtgcagatgaagaggagacggggtcgtggaaggtggatcggcctttatcaccccgggtcacggagtcggagttcagctag

SEQ ID NO: 26892 - DNA, 501 bp, Zea mays
  Peptide Sequence Number=SeqID_68671
atgggttgcagcttccatggtggcgctacagcggtggtgcgtgtccaggtggtacctggagacgatcagcgcagcgaaagggggagcgccacgaagaggagcaccccgaggccgcggcgggcggaaactactgccaaggcgacggcgcgcgagcgggatccacatcggcggcccatttctgtacatcttcccagctccttcaccattccagacgagcccccctgctccctctctcttggctttgtccgagcatggcggcgattggtgagcccagggccgcggatcgggtacttataccggcggccatgcctacattggcggcagattctgttgcgcccggagcttcacgcggcggagaagacggacccgcccagagcagtggacgagtacggctgggtcacgcaagggcagaggcggcgcggtgcagatgaagaggagacggggtcgtggaaggtggatcggcctttatcaccccgggtcacggagtcggagttcagctag

SEQ ID NO: 26893 - DNA, 201 bp, Zea mays
  Peptide Sequence Number=SeqID_68672
atgtccaatccacaacttgaggtccaaactcatgtttgggatggttcacgcaattttgttgctgcatgtcacccattcagaaaacgggacgagtgccctagtggccagggtgtcacgctccacaagatcgtgacagccataggaggtggtgtatcggttgctaaggcgcagcgtctttggaaggctgtagtcgggccgtga

SEQ ID NO: 26894 - DNA, 375 bp, Zea mays
  Peptide Sequence Number=SeqID_68673
atggccggcgttcaacatgaatgcgatccacgcgctaaatctcctaaccgaaggcagcgccgagtagcaggaacaatagggtacttgtggggaggatgtttatcggaaattagggattgcatggagccacccacgggtcgcagcagaatccggacaccggcgagaaactccgatgcccgcagatgttgtatctgcgccaatcaaccaccaccgcccatcttgaagctctgcaatgcccctaggccaccacaaggtgtgaatttggctatggtgggcaaggtcagcgtcggcggcgccctcaactcacaatttgccacggcactggcccaagcgatcgatacggagaggtcagggaaggtaccccacgacgggtag

SEQ ID NO: 26895 - DNA, 405 bp, Zea mays
  Peptide Sequence Number=SeqID_68674
atgaatgttgtggtaacttctcaccaactcgtctctttatatagccccacaggagaagaaggcgaaccaccaagacgcacgtactggctgatcggtggaccggtgaacagtacgccgtactgttcacgctggactgtaatcgctcttgcgtcaacaccttggaataagccaaaggatctccgcagatcggagtctcttgctagccttacacaagttgatgggagcttgaatttcaatggaatcaagagagaggaagaaacacacacaggagcaaaatcacaacaccaaaagatcgaagaacgcaagcgcaaaactgaagcagagctctcttacgcgatactggtgcttggatcactttggtgtgtttctataatgctaggaatgaaagcacttgctcttgaatga

SEQ ID NO: 26896 - DNA, 522 bp, Zea mays
  Peptide Sequence Number=SeqID_68675
atgtcgtggaccgtctggtaccttatgccgaaccatttggacatgtcgtggaccatccggcctggaccattcggcccgatcgcggaccgtccagccctttacgacagatggtctaggtacgagactacccaggcaacaccatatattgctggacagttcggatataccttcggaccattcggcccggtcacggaccgtccgaccccttatgtcgtaccgtccggcacctaccccgctaatcgatgccccagctccgacagaacctccatcgaatccgatgccaccgccccaaccaacaccaccgtgacgctcccactgctcaccctccgcaacgtgcctcgcctccctgccctcagtggtggtggtcctgaaacccatctcgtgtcgcgccctacttcgatggtgtcgcggcaccatgccaacacgacgctcgagctgctcgcggattggttccacaagtcatccaggagcgtctccctggccgcgatagagcacccaaagctcaaggatttattgtgttag

SEQ ID NO: 26897 - DNA, 186 bp, Zea mays
  Peptide Sequence Number=SeqID_68676
atggcggcggagtttctccgttctccctccattcttccgttccgctcgatggaggtgcgccaggctcccgaggtctcggtgtttgccccgaacggacacaacggtgcgcggaccagatgtaattatggacattactccataactcatcacactcaatcaaagatccaaatgagacaaatatcataa

SEQ ID NO: 26898 - DNA, 507 bp, Zea mays
  Peptide Sequence Number=SeqID_68677
atggccgtgagggagcaggaaaccgcgacgagggagctcagcgcgcagactgggcgagcaccaaggagatctgagctagggcgcagggaggaagaagctccacggcttggagactcaagggactggggcgagacctcggcagagaggtggaacgagctgcagcccacggccatgggcgagctcgatggaggtcctgacgcgcggaagaagctccagggagaggggcgcgtgaggaccgcggcaatcggagcgcacacaaggaagcagggccaaccggccatggcagatcgagagcgagagagatcgagggactcagaggcgcgtcgcggggaagctccatgccggctggggttcagcgtgaagctagggaacgacggcgaggtcgatgccgaggtgagcacaggatccggtggcctggagagcagcgggatgcagagtaccatggtggacaacctccacggcgagctgagcgacagcataggggtgagcagagcagagccaagctag

SEQ ID NO: 26899 - DNA, 330 bp, Zea mays
  Peptide Sequence Number=SeqID_68678
atggcgtgccatggaagggagcagcgagctcacaggggccggcggccatggaagtcgaaggggaagagaggagctcgtccacgcctagagaaaggaaggggtggcgctgggcagaggaggctggctgggagatgtggcgccatggatctgatgggggaaggggcggctgcactaggggagctcggatccggcgcagcacagtggggaagaaggttgatcgagctccacggtggctacacgaacctggctgcggacaagcgcacaccctgcggcctggcgtccagggctagtgctcgtgcacggtactggcagacggcggctagagcttga

SEQ ID NO: 26900 - DNA, 408 bp, Zea mays
  Peptide Sequence Number=SeqID_68679
atggggcgcgcgtgcacaggagctccacggcggggtcgcggcactaggggatccaccggtgaggttggttggcggcaggacacagcgagttcatcgggccgagccggtttgattcggagcaggagaatcctcgccatgttgcccgggtgctacagtcgcgattcacgggagtctgacaaggagtcgaggagggggagaaagaggaagcaggggaagcgagcagcgagcgcggccaaggaagagcggcaacagggagttctggtcagaaagaggagcttgaggatcgcgcgtgtcagggcgggacatctggtggcggcgcgttgggagatggccataccgagctcggccagcggggatatctcgatgcgcgtaggagaagaagaggatggaggagagaatatcccgtga

SEQ ID NO: 26901 - DNA, 453 bp, Zea mays
  Peptide Sequence Number=SeqID_68680
atgtcggcggaatcctgtagctggtcaccgaggccaaatgtgggcgcacacccgaattacccagggccgctggattcccaccacgacgacaggatcccaccaacgcactgcacggcacatggcagcggctcccgaggtctctgtgtttgccccgaatggacacaacggcgagcggaccaggtgacggccctctgcgctctctacatagtaatggctgctgcaaagtatggcccggtggggaagaaaaaggagatgcccaggccacctttatacggaggagaggaggtcggtagcgcctcgattgtggatcgcacgctggtgaggcgaggtacgccaaactcggccaagccattgcagcgcgcggtaatggcgggtacaacctctgtagagtgtaaaactggtatactagccgtgctcgtggtcatgagcagctcaggactctcgcatgattaa

SEQ ID NO: 26902 - DNA, 330 bp, Zea mays
  Peptide Sequence Number=SeqID_68681
atggagagaattttctacgtattttcaaagttaagcataaaatctggaattgtgcactcttcaactcacccaagggcccacctgccattggcacaagggaggtattctttctccttgcttcctgcacgtgaacagcaaggaggggcacggccagaagctgcatgtggctgcggctgctgctcatccgggcctcgacgggaggtgcagggggcatggagaagtggatcccgggctgccgaagttgaggaaggcaagctcaaggggctaagtgccatggaaacggcaaggccgagcaagagacggaggtgctgtaatgcatatgaagcctag

SEQ ID NO: 26903 - DNA, 360 bp, Zea mays
  Peptide Sequence Number=SeqID_68682
atggggttgtccgtcacggcgcaggcgtactggcgatccatcgagcgtgcgaggctcggtgggtcagacagctcagaggaggcctcggaggaggaggtggaggactcctctgactccgtggaggggagcagcagcgagggcaacgatgacgggggcgacgacagcaatggtggcggcgatggtagcgatgatgacgacagcgagggcagctgcgatgatggtggcgacagcagcggcgagggcgacagcggcagcagcggtggcgacggcgatggcaagggcgacgacaaaggcggtggtggcagcgacgataaggatgacagcgacggcaaggccggtggcttaatgctaccagcttaa

SEQ ID NO: 26904 - DNA, 186 bp, Zea mays
  Peptide Sequence Number=SeqID_68683
atgaatgatgtctgtgaagaatgctattgcttgttcggatttgatgctagcgagaggctagacctcaatccatttggagaatttttcaatggcaaacaacagcagtacgaaagtcttcgcccgctgagccaggcatcaggcctcggccttgccaagagggagttctcctcgaaggataaactctag

SEQ ID NO: 26905 - DNA, 546 bp, Zea mays
  Peptide Sequence Number=SeqID_68684
atggccgcccagctccctccggcgtcggctgtcaagcaggattccctgcctccctccctcactcgactctcccttggctcgtcctcccccttgatatacgtccagcagaagcccctctccaagcttgcccatgcttgtctccctgccgggtctcttcttggtgaccgcgacgagctcccctcctccatgcacctgccacgcagggacttcctctggtccgagctcgagcagtcgcagctgggagcttgtgatgcgctctgctcgtcacacacctcctattccagccatgtatgtcgaccccatgtcatcccctttctcgccaagttcagcctcaaccgccatagccagacccatgctcgccactcctccatcgctcagggcgatcttgctcaagttacggtcacagctttccctccgcgtcgcgccctcggcatgctcgatgtattgcagcagcagcagcgacgcccttcgctgcgtcgcgctcgccaaaacgggcctcacatcgtcgatctgcgcagcgtctgcgcgtcgtcgtcgaaacccgcg

SEQ ID NO: 26906 - DNA, 207 bp, Zea mays
  Peptide Sequence Number=SeqID_68685
atgccggcacagccgccaaggggccgcgacaacaccggtggggggacctctcgcactttgaagccttcgactgctggaaagcaaactccaataggccgggtcgatgattattttgattctgagttatcggttgacgaggatgacttaggctttttcagggcgatggatgacaagtcctctaaagaggactttgattttttttcgtga

SEQ ID NO: 26907 - DNA, 451 bp, Zea mays
  Peptide Sequence Number=SeqID_68686
atgagagatcttgagggtgtcccagatctgcttggcattgtccaagccgctcaccttatggaacgggtccgaaaacggttggaagtgtttcctgcccgtatttacgcccatgctagccaccatacactgcccacgcccacggcccacaaagcctgtcgaccagccaccgcccaccagcctcatgtcgtgcgtagcgtagccaccagccagccagtggctaaacctaaacggctaaaccgtaaatacagacaggagactgtggcggcggcggcgctcctctgcgcatgtgctcggcgtctcggctatcggcttctccagttctccttccggcgcaccgtgattcaggcgttcagcgccacgctgccgtcgctcgcccccaggcctggcgtcgctcaccgagtctcagcgttcagcgccacgctgccgtcgctcgccgagtctcaggtgtcag

SEQ ID NO: 26908 - DNA, 964 bp, Zea mays
  Peptide Sequence Number=SeqID_68687
atgcgcctaggggtcccttttatagctccaaggcagctaggagccgttggatctccatttgcgaagccgaccgttgagccctcggtccccttggcacaccggacagtccggtgcgacctagtgaccgttggctctggccacgcgtcgtccactgatcgcgctgccgaccgttggcgtgggtgctgttggctcaccggacagtccgatgaagtggcacatgattggatgaaggaatggttttatgcagaagtggattctgaaaaccgtgaaaagttcaaggactacacagatcctgcagccaacactaaagctggagagaagtggaaaagagctacaaagactactagcaaagcatcaaagaaagctatcgatgatgaaataggaagtgatgagtctaagaatgacgaagaaccaccttcgggcccagaaaagaaggccaagattgctgtaaggaaaactccagctactcaagatcaaggaaaagggagcgctacgactacttcgtcattgggctatacgcggatccttaaggtaataacccaattgggatcgacgctgactcggttaatgacaactacgaagggtactgacgaaggtggacaaactttggcatcttcgaagggcaaatatattttgtccaaagaggaagtggacaacccgcgcattcagaatattggaggtgctgcttttggatattcatcatccttaggagaggaggatgaaaagaaagctgtcgaaggtgggggatcttcagggcacgagaaggcagaagaagaggcaaaggagccaagctttgcacttggaatagatacagttgaccccactcaatctagtggtgaagaaatagatgggcatgggttcttcgtgagacatcttggcgagggagagttgagtgacaaggaggcttcggagctagaaaacaagtccgaagctatgggttatggacctggggccatgctttttg

SEQ ID NO: 26909 - DNA, 285 bp, Zea mays
  Peptide Sequence Number=SeqID_68688
atggcggcgaaggccttggttgctgacgaccgcttcgaggccttcgtcgttcttgtttcttgctatggtcgaccactggatcgaaggtcccttcagttatgcacctgtgtaactagtcaacatgaaacaaaaggtggatctctgaacaaatctctcggtggaaaggtggcaagtgagtcatgctgcgtagccttcactgccacctccagagccttcgcaccttggagccctctgctctcttcggatagatggttgatcgtcgagggctcctcggccataccgtag

SEQ ID NO: 26910 - DNA, 1413 bp, Zea mays
  Peptide Sequence Number=SeqID_68689
atgggcaaaacaatctcgttcgcccctcggaaggccatcaagtcccaggtcttggcggacttcgtggctgaatgggtcgacacccagctccaaacagccccgatccagctggaactctggaccatgttcttcgacaggtcgctgatgaagacaggagccggtgtaggcctactcttcatctcgcccctcgagaagcacctacgctatgtgctacgcctccatttcctggcgtccaacaatgtggccgagtatgaggctctggtcaactggttgcggattgccatcgagctaggggtccgacgcctcgacgctcgcgatgactcgcagctcgtcatcgaccaagtcatgaagaactcccactgccacaacccgaagatggaggcctactgcgaagaggttcggcgcctgaaagacaagttctacgggctcgagctcaaccacatcgcccggcgctacaacgagactgcggacgagctggctaaaatagccttggggcgaacaacggttcccccggacgtcttctcccgagacctgcatcaaccctccgtcaagatcaacgacacacccgagcccgaagcaccctcggcccagcccgagaaggcacccgggggctacacgcacctgttggtcgccatcgacaaattctccaagtggatcgaggtccgacccctaaacagcatcaggtccgaacaggcggtggcattcttcaccaacatcatccaccgttttggggtcccgaactccatcatcaccgacaacggcacccagttcaccggcagaaagttcctggacttctgcgaggatcaccacatccgagtggactgggccaccgtggctcaccccatgacgaatgggcaagtacagcgtgccaacgacatgattctacaaggattcaagcctcggatctacaacaacctcaacaagtttggcaagcgatggatgaaggaactcccctcggtggtctggagcctgaggacaacgccgagccgggccacgggcttcacgccgttctttctagtctatgggtccgaggccatcttgcccacagacttagaatacggttccccaaggacgagggcctatgctgaccaaagcaaccaagctaatcgagaagactcgctggacctgctggaagaagctcgggacatggccttgctacactcggcgcggtaccagcagtccctgcgacgctaccacgcccgaggggtccggtcccgagacctccaggtgggcgacctggtgcttcggctgcgacaagacgcccgagggcgacacaagctcacacctccctgggaagggccgttcgtcatcgccaaagttctgaagcccggaacatacaagctggccaacagccaaggcgaggtctacagcaacgcttggaacatccaacagctacgtcgcttctacccttaa

SEQ ID NO: 26911 - DNA, 144 bp, Zea mays
  Peptide Sequence Number=SeqID_68690
atggatcaattgagaaggaacccaattgagccaagtccaaaaggagcaaaagaggtccagctgaaacaaccagtaaagttcctgatgtgggtgcaccagactgttcggatcacctattcaccccctctaggtgctctcagctag

SEQ ID NO: 26912 - DNA, 378 bp, Zea mays
  Peptide Sequence Number=SeqID_68691
atgacggggaagaggccacgaatccacgggcagagaggggagaacggcaatgggaagacctcgggcgggccggagcaactccggctcgggtctccggcggcgtctggcggcgagggcagagcacgagagaggacgagggtgtgcgaaatgaggcgaggggcgagtgcggggtactggcagggctctaaaaaaggagttgggcacgtgggcgggcatcgtggccgagaaacccggcgacttgcgcgaatgcgcactcgccagtcctcgatgggcgcggggaaggcagatctgacagggagggtccacgacgcagatagagaaaagggggcgcgtggggacaacggctcggcgctcgcaaaccgggcccgcgaaacatag

SEQ ID NO: 26913 - DNA, 186 bp, Zea mays
  Peptide Sequence Number=SeqID_68692
atggccggagcgcccacagtgctcaacggggagttggtcagcacagaagcccagagttcaagcgacgacccgccatcgtcggtgtggtggttcaaggaggtgctgacgacccaggtccacgcatcagagagtgaagtgtggcgagaggtatctgccgtgcgggcccacaaaccagcgaaagggtaa

SEQ ID NO: 26914 - DNA, 593 bp, Zea mays
  Peptide Sequence Number=SeqID_68693
gcaagacaacctttgtgaagaggcatctgaccggagagttcgagaagaagtatgaacccaccattggtgttgaggttcatcccttggatttccacaccaactgtgggaagatccgcttctactgctgggacactgcaggccaggagaagtttggtgggctcagggatggatattacatccatggccagtgtggaatcattatgtttgatgttacttcacgactgacatacaagaatgttccaacttggcaccgtgatctatgcagggtctgtgaaaacatcccaattgtgctttgtgggaacaaggttgacgtgaagaatatgcaggtgaaagcaaaacaggtgacattctacaggaaaaaaagcctgcagtactatgaggtctcagctaagagcaactacaactttgagaagcctttcttgtaccttgccaggaagcttgctggtgattccaatcttcactttgttgaaacccctgctctcgctcctcctgatgtcacaattgacatggctgcccagcagcagcatgaagccgagctggcagctgctgcagcgcaaccgttgctagatgatgatgacggcatgatagagtag

SEQ ID NO: 26915 - DNA, 315 bp, Zea mays
  Peptide Sequence Number=SeqID_68694
atggctcagacatcacccactgttatcaataagattttcagagtggtcatactgccaaagagtggcgacaagaacaagatcagggataagttttggaacattatccaccatatcacgaatgatgagacaagatttgagggtaggtgtgagataacacacactcctttcaggccctttaaaaatgaaactggatttctcaccagacctctcactcccttccttgatgatgaggaagtagctggggatgatgaagcaactaatcctgaggtagattcgactcagaagatgcctcctcctcagcatgagcagttttga

SEQ ID NO: 26916 - DNA, 531 bp, Zea mays
  Peptide Sequence Number=SeqID_68695
atggctgccccgcgaaccacccgtcccgtcgcattaactctgcggcagaagaggcggcacctttggcggcagaagcaggcgacgcttcgcttccgccataatgaccgcgtcaaaaaagaggacagcgccgcctgcgccgcttcgactgctgtgccactcgacagagtgaggctgacagcagccaagtccggcctcgggcgctataggaagcttcgcctcgcccgaccccagggctcggactcggcctcggccccggaagacgacgaactccgcctcgcccgaccccagggctcggactcggcctcggccccagaagacgacgaactctgcctcgcccgaccccagggctcggactcggccctggcctcagccgacggtctccgcctcgcccgacccaagggctcgggcctgacctcgaccttggaagacagactcgacctcgacctcgacctcggaggagcctccgcctcgccctacccagggctcggaccgaccacgtcacaggaggggccatcattaccctacccctag

SEQ ID NO: 26917 - DNA, 1434 bp, Zea mays
  Peptide Sequence Number=SeqID_68696
atggaggcctactgcgatgaggttcggcgcctggaagacaagttctacgggctcgagcttaaccacatcgctcggcgctgcaacgagactgcggacgagctggcaaaaatagcctcgggaagaacgacggttcccccggatgtcttctcccaggatctgcatcaaccctccgtcaagatcaacgacacgcccgagcccgaggcaacctcggtccagcccgaggtaccctcggctcagcccgaggcatcctcggttcagcccgaggtaccctcggcccccgagggcgaggcactgcacgtcgaggaggagcagaacggggccacgcctgatcgaaattggcagaccccgtacctgcaatatctccgccaaggagagctacccctcgaccaagccgaggctcggtgggtagcgcgacgcgccaagtcgttcgtcttgctgggcgatgaggaggagctctaccaccgcagcccctcgggcatcctccagcgatgcatctccatcgccgaagggtgccgattctatgcgaagcagacccacctgcccgctcaggctctgcagacgatacccatcacctggccctttgctgtatggggtctggacctcatcggtcccttgcagaaggcgcccgggggctacacgcacctgctggtcgccatcgacaaattctccaagtggatcgaggtccgacccctgaacagcatcaggtccgagcaggcggtggcgttcttcaccaacatcgtccatcgtttcggggtcccaaactccatcatcaccgacaacggtacccagttcaccggcagaaaattcttggatttttgcgaggatcaccacatccgggtggactgggccgccgtggctcatcccatgtcgaatgggcaagtagagcgtgccaacggcatgattctacaagggctcaagccccggatttacaacgacctcaacaagttcggcaagcgatggatgaaggaactcccctcggtgttctggagcctgaggacaacgccgagccgagctacgggtttcacgccattcttcctggtctacggggccgaggccatcttgcccactgacctggaatacggctccccgaggatgagggcctacaacgatcaaagcaaccaagctagccgagaagaatcgctggaccagctggaagaggctcgggacaaggccttactacactcggcgcggtaccagcagtccctgcgacgctaccacgcccgaggggtccggccccgagacctccaggtgggcgacctggtgcttcggctgcggcaagacgcccgagggaggtacaagctcacgcccccctgggaggggccattcgtcatcgccaaagttctgaagcccggaacgtacaagctggccaacaatcaaggcgagatctacggcaacgcttggaacatccaacagctacgtcgcttctacccttaa

SEQ ID NO: 26918 - DNA, 255 bp, Zea mays
  Peptide Sequence Number=SeqID_68697
atggccggctgcgcaatccgcgggcgatgcgtggcccgcagcaacggtcggttgggcacactggactgtccggtgcgccaactgcccccgaggaccaacggtcggatgcgccagaaaaggaaggagatcgtgcaccctgacagctacagtgactgtccggtggtgcatcggactgtccggtgcaccacccgacagaaggcaagtttggccttccaagttggcctccagcggctcctagctgccttggggctataa

SEQ ID NO: 26919 - DNA, 243 bp, Zea mays
  Peptide Sequence Number=SeqID_68698
atgaggatccgcaaaggggatcaggtggaggtgtggacgcaggaggcggtgacgccggtgggcgcgtggcgcggcggggaggtcacgtgggggcaacgggccactcatacaccctgcggtggaacggctgcggcgaaggtgtccgggcgcatctcgaggaagttgcttccgcccgcgtccgccggcccgcgccagtgcccgcgccacctggacgccggggaccttgtggaagtgtttgaatga

SEQ ID NO: 26920 - DNA, 1191 bp, Zea mays
  Peptide Sequence Number=SeqID_68699
atgaggatccgtagaggggaccaggtggaggtgtggacgcagcgggcgggatcgccggtgggcgcgtggcgcggcggggaggtcacgtggggcaacggccactcgtacaccctgcggtggaacgactgcggcgaggtgtccgggcgcatctgcaggaagtcggtccgcccgcgcccgccgcccgcgccagtgccgcacgatctggacgccggggacgtggtggaagtgtttgatgactgtgattgcctctggaagtgcgccgaggtccagggttcagccgccgccgacgttcgccacttcgacgtcaagatcgtcggcgcggccaagatcctgacggtcccgctgcagaggctccgcggccggcaggtgctcaggcacgacgacgtctgggtcccgatccacaagcaggataaccatatcgccgtcccgagcgcgacgccgcatcgtgccatcgtcgccgccatggacatcggctccaagcccatggagccaggcttcacgccgcacgtgcagaagaggagcttcggaatgttaccttctgacacaagcacccgtgccaagagatttcaggacgacgccaagaggcttaagcaagagccaggacgtggggtacaagtgcgagtcccaaacgtgtgcctgagcaacaagcaggacgagacgagcaaagattgtgacaacgacgttagagtaggctttaatcccgatgatgatagtgaccattggcagcagcagcacgaacacgatgaggaagaggaagaaaacggagacgacgatgaccacagtgattccgactcgtcttcagatgactgcagcagtggcagtgagagcagaaccaggagcatcgaaaccggcaaggattggtctgcagctccagctcccaccagcaggccttgtaaagacgatgatcagcaggaacccgtcaagaaagaagcaccacccgtcaagaaagaaccacattgtgacggcgagcccccgaaggatgagatgggggcgacggcgcgggaacaaatccaccgtctggagctggaggcctacgctgctctcatgaaggcgttccatgcgagtggcaacccgctgagctgggagaaggaggggttgctcagtgaccttcgcgtgcatctccatatctctaacgacgagcacctcaaggcgatcaacgtgatcttgaaccgcaaggggagaactcgctga

SEQ ID NO: 26921 - DNA, 534 bp, Zea mays
  Peptide Sequence Number=SeqID_68700
atggaggcaactttgaggggtgattggtaccttgcaatgcttgttaagattaacgggaaggcacatggtgtagttaaaggatctccaaccggtggtgaagcaggatcacaaggacaacaagagggagatgatgctaaagaagtaggctatcgtgttagtcaacctgaaccacagggcttgctgatgaatggtgctaaatttcctaaccttgatgttatcaaggaggttgtgaagcgatggtctatatgtttgaggaaggaattcagagtgctaaagtctcgaagcaatgaatatgagtttcaatgtgggtatctagaaccacgcaaggttctcactaatcttcattggtgccccgacgcaaagggaagcccacgcgagggccaagcaccaagacagtcaaatgggccagggtccattttccttacaatcaatccctttttggtgattgatgacaacataacaaaatctacaaatttctccccttttgaatcaaacaccgaaaaggaagacatgttaaatcataaaactacataa

SEQ ID NO: 26922 - DNA, 474 bp, Zea mays
  Peptide Sequence Number=SeqID_68701
atggtggtgctcgccccctccttcctttctccctattgcagcagcaagtgctcactgctcccctccattgtcttcaacctccagctcggcccctctcctgctcttgccatggccgagctcgccctagctgcagcgatgccgggtcttctctccctaatccctgcaccatcagcccttctccccacctctgctcggccaggccgcccctcagcttggcgtccgagtagggagcaggcgctcaccctccctacagctccccttcatggtggttgtccctccccctgcagcagcccatcctttgccctccacggacatgcccctgctcgcatcaaggtctcagcaagcagcagctcgcccgcacctcctgttgtttcctcgtcggctgagctcgctgcgagcagaccctatgccgagcttgcttcctcgctgccatcactgcgcgagtgccaagtgttcggcaaaatgtctaggtga

SEQ ID NO: 26923 - DNA, 411 bp, Zea mays
  Peptide Sequence Number=SeqID_68702
atgggcttgcgcagtcagctctgccttcctcgcgtccaccatggaccagcgcacgcgcactcgcgcacgtcgccaggaacctcggccatgtcgtccgcccacgcgtcccagctcttttttgaacaccgcccacccgaacgcagccccactctcactagcgctctgcccacgccatccgacctctccggagacccgcgctcgcctcctcggtcagccagctcgccaaaggccacgctaagcgaccccgtgcctcgccccgaggtgaggcatccatccacgcgcttgttttcccctattcacgcctacctggagccaatttggcctcgctggcgtgcggccacgcttgctcgccgcgctcgcacggtgtctagccagcccgaccccgtccagtgccccggtagtggcccataa

SEQ ID NO: 26924 - DNA, 195 bp, Zea mays
  Peptide Sequence Number=SeqID_68703
atggctcacacatgcagtgatcagatcatgaaaagagaggccataaaaaatgcttacgaacagaagaaaaagagcacccaggtgatgttagagaactctcgttcccgtatgcaaatgggagagtcttgtctgcatggaagcaaacgacctgagaaatccttatgtacagaggtagaagagatgggaagctggtaa

SEQ ID NO: 26925 - DNA, 309 bp, Zea mays
  Peptide Sequence Number=SeqID_68704
atggagtttcttcctgtgctcgcccttggtgctggccacgtgctcctcgtccggctcggccgcgacctcgccatcgttcctcagctcgtcacgcgcttgggatgcttgccggcgctcagccccaccgcgcgtcatgaggctcctatgcgcaagctgtctgtcggccgagctccctcgtggaggccttcccctgccagtgcccagcccagctccctctttctgttccccaccacggagctcctgtgcgcacgaattcttttggtggacgcgcgctggccatgctccatctcatccatcgcggcgctctag

SEQ ID NO: 26926 - DNA, 183 bp, Zea mays
  Peptide Sequence Number=SeqID_68705
atgggggactcggtagggagcacagccgagcaaagagatgagcttaagggagagcgagcgagctgcagggaggagcgcgcggggaagaagcacgcgccgcgaaggagagctcctggacgcgcggccagattgagaggagatacacacgaatcgaaccaaatgagatcgggactaagattttag

SEQ ID NO: 26927 - DNA, 240 bp, Zea mays
  Peptide Sequence Number=SeqID_68706
atgtctcttagtctgaagttgtacccaaaaggcaggcatgaagcttggaggacaagggaggcagatggggaggctcaacagggccttcagggagaaaagggcaaggcaagggtgactgatccagctctgtggtctgagattgccataatttgtactgctgaaagaagattgggaacacactttgatctttttgagtggaagcttgttaaatcacaactaattcttttcagtggaagctga

SEQ ID NO: 26928 - DNA, 579 bp, Zea mays
  Peptide Sequence Number=SeqID_68707
atggcaggttcaaaggatcgcaccgatgtttctcccagcaacatcatgaagcggactcttgagagtctgccggctgagcatcaacatcgattcaaggactacatgagccaccaaccaattcctagttgttacccactttctgccacccgcgaacggttcgccctcctggcccggacgatctggccctacacatcaactgttgaaatcgtaaagggaagtttcgggtggcctgctgatccaggggcaccccctagaagtctcctccgtgacggggtcccttgggggagttctagggttcttcgtgagcaagaagaccctctgcgcatgcgcagactgtgcaacccagaacgtggtatatttttgcggaagggaaagaaaacatataacagtaattctctgatctgtattactggtatactaacaggcaggcatggatggccaactcttgatcctgtcaggcaggcgcgcggcgcggcgcacggtcctctaatcatggcgagctgcttgctcctcagcacccatcaagggtccattccatttgatatccatccatccatcatcatgttgcgatgcaggtaa

SEQ ID NO: 26929 - DNA, 768 bp, Zea mays
  Peptide Sequence Number=SeqID_68708
atgaaggaacatctaatgcttaatattgatgacctaagcattcttgagcctaacgaggtcattgggacagtcaagaataaatcatctggggaaaccattgcacatccaccctccatggctcatgccattttagcagtgggagaaagcatggtttctgaagcggaacctcttctgcaagtggtggagtgtcgcatttgtcaggaggaagatagtatcaaaaatttagagagtccatgtgcttgcactggcagtctaaaggtggtggagtgggaggtgaccagcgacctgagtcaactgacaaccaatgggagagttgcccccaaggtggtgaagagggtggcaatcagtagcgtagagtccagtggccacctcacctctctgcacaccctcatcttcatggatgctgggtgggggccagaggaaatgatcaactgccaggctatatcggtggctggtggtggtgaggaaaaccctaggcagtatgctcataggacttgtgtacaacgatggtgcaatgagaaaggagatgtaacatgtgaaatatgtcatgagccttatgaacatgggtacactgcacctcccagaggccatcctgatgaaactaccattgatataagtggtgggtggacaattaccggtaccgcatttgacttgcgtgatcctaggatacttgcagtggcacaaaaccacatcatggaagctgaatatgatgattattctgccacaaatgcgagcactgctgccttctgccgctctgctgctcttgtt

SEQ ID NO: 26930 - DNA, 318 bp, Zea mays
  Peptide Sequence Number=SeqID_68709
atggctttcaccgtggcgagctcaccggcgatgatcgagtgggctaaggtgactcactgcggcgtggttaaagcaccaaggcacgtggcgcaaggtcgcgaggtggctaactctggtgagtctatccgaagcggccgtgacacaggcgggtacgacgactggagtagattagtgatcggagttcatagacgaactacagagctccaaagtcagccctgttcgctgattttcagacttagtcacatgagatgtgtagagtggctttttgcaaataagcccaaatctcatggtttgatttgcaaatcttcaaatatgtga

SEQ ID NO: 26931 - DNA, 447 bp, Zea mays
  Peptide Sequence Number=SeqID_68710
atgaacgtatgtgagctcacccttactgtactcacatccccccaggtcaaggacatgtaccacaagaccataatggtttcacacttcaggatcctatgcctaaagcgacccttaagaataggacacctaatcttaggaacaaaagcaaaactatttttattaagaaggagttcctatccgtcaaatagggaggcatgtcagtcatgcttcaaatgtggacatgccggtcattatgccaactactatcccaacagagctgcttataccactgcagctccgatgaagcaaggtcaggcctcaggaggtaagagtcaggccttatctgtcaatcagggtcaggtcaaccatgtcgaagcagaaactgaacctgaaggacccgaaaacccggtagaggtgccagttgaaggcgaagaagccagtgaagatgtgaatgagcaacaagattag

SEQ ID NO: 26932 - DNA, 246 bp, Zea mays
  Peptide Sequence Number=SeqID_68711
atggcgccattaatgaccatcaatgggggagaaacgactccattgaagcgatggcgaacgggacttcgggcggctcgagctggctcggcgcgcacgacgcagtgcgcaagtcgcgtctgcgggcgggcgtcgggcaggggcggtcggttgcgggggttcttcggctccaaggtcgcggtgtgcgcgggcggtgatgagcgcacggggctgctcggctgggcggctcggtgccctcgggcgcggtag

SEQ ID NO: 26933 - DNA, 558 bp, Zea mays
  Peptide Sequence Number=SeqID_68712
atgcaggtccaggtccaggtccagcagagaggatcccctgcccccacggcggaactagaggtctccctccgcgagttcgccctgtcggacgcggacacgagggcgttcatgtcgtgggcgtccgaccctcgcgtggcccgccgctacatcaccgaccacgtcctgccgcacccgtggtaccacgccatctgcgccggcgcgggcgcgcccctccccgtggtgggttccatctccgtgaaggctgggcccgccgaggacggggggccgttcagggcgtccgtggggtaccgcctggcgcgcgcgcactgggggcggggcatggcaacgcgcgcggtgcgagcggaggccgcggccatgttcgcggcgcggccctggctgctgcggctggaggctgtggcggacgtggacaacccggcgtcgcagcgcgtgctggagaaggccgggttcgccagggagggcgtgctgcggaagtacgtcctgctcaagggccggcccagggacatggtcatgttcagcatcgtcgtcgagacggagcaggacaaaccggatgggccgtag

SEQ ID NO: 26934 - DNA, 384 bp, Zea mays
  Peptide Sequence Number=SeqID_68713
atgcgatactctgttcgtgcactgttcactgtccggtgtgcaccggagagtccggtgcactcgcggacagaagggagctccgcctcgcctgaccccaggcctcagcctcggcctcaacctcggcctcaggggaaggtctccacctcgaccgaccctaggcctcggcctcgggagaaggactccgcctcgcccgaccccaagcctcagcctcagcctcggcctcgaaagaaggactctgcctcgcccgacctcaacctcggcctcggaggagtcgccgcctcgctcgacctcagcctcggcctcggaggagtcaccgcctcgctggacctcggccttgtatcagctgcgctactagggatccatcattaccctacctttagctag

SEQ ID NO: 26935 - DNA, 408 bp, Zea mays
  Peptide Sequence Number=SeqID_68714
atgaatgagcaaaggtacatgaagcaaattgagcttggtagaggacatagtgcaaatctatatggaccaagtaaaaagcctgtgccagctataaatcaccggaccgtccacgcggagcgccgaacagtccggtctgccagccgccaacggctagctaccacgtcggctgagggccaacagtcaagtggtgcatcgaacagtccggtgccccctggaaaaggaaaccagccaatcacacgattctctgaccgtgcactattcattgtccggtgtgaatcggacagtttggtgcacccgcagacagaaggcaaccagagccttccaaatggagctccaacggctcctaggtcccttgaggttataaaagagaccctaggcgcatggagcaccacaccaagaacccattga

SEQ ID NO: 26936 - DNA, 1116 bp, Zea mays
  Peptide Sequence Number=SeqID_68715
atggttgtgggagcaggacggggacctctagtacgagcttcattgcaggccgctgaagaaactggtcgcaaattaaaagtatatgctgttgaaaaaaatcctaacgctgttattactcttcatagtttgatcaaattggagggttgggaaagcctggttactgtaatttctagtgacatgcggtgttgggacgcccctgaaaaggcagatgttttggtcagtgaattgcttgggtcctttggtgacaatgaactatctcctgagtgtcttgatggtgctcagagattcttgaagcctgatgggatttccattccttcatcatacaccagcttcatccaaccaataacagcatcaaaattgcacaacgatatcaaagcacacaaagacattgcacattttgaaaccgcatatgttgtcaaactacaccgcatagcgacacttgcacctccacaacaggtttttactttcacccatccaaatttctcaccaaatgctagcaaccaaaggtacaccaagttgcaatttgaaatgctgccagatatgggttcatgccttgtgcatggatttgctggttattttgactctgtactttataaagatgttcatcttggaatcgagccaaacacagctacaccaaacatgtttagctggttccccatcttcttcccattgagaaaacccatctatgtgccggaagggtctcctatagaagtgcacttctggcggtgctgtgcccccacaaaggtgtggtacgagtgggctgtgactacaccgaccctgtcgccgatccacaacagcaatggccggtcctattgggcatttcaggtcattgtccgcaacaagaagagagtaggatataactatgaactaagcttgagatttagcggtgaatggttaatcaaagaagaaaacaagaagatcaaagggcatctagacattcccgagttttcattcggcgagatcgatgacttggaggtacaagtaaggctcggcgatgacaagggcctcgcctctgatgatagaacacggatctgcaaggatctcaagtcctttttggcgccgatccaggagaaaatgcgcatgtttgaagaagagctcaaagtgaaagagttctag

SEQ ID NO: 26937 - DNA, 450 bp, Zea mays
  Peptide Sequence Number=SeqID_68716
atgccgctggggcagcgtccgggggacaagagtgacgcccgctactgcggggtggaggtgctcgacttccctgccggcgaggacctccccgccgttctcaaccactccctcgcctccgccttcgacttcatcctcgtccctctggttgaccccaactaccggccggcgcccggctccgttctgcccgtgtcggcgtcggacctcatccttggcccggcccagtggagcaaccacgtcgtcgggaagatcagcgagtggattgatttggactctgaggacgagcggctccgccttgactccgagctcacgctgaagcaggagattgcgtgggcgtctcacgtctcgttgcagttgtggctcaggttgcctctggagaagtccgaacttatggatgacgatcttcataatattaagaataacagccgcggggtatttttttttgacaattga

SEQ ID NO: 26938 - DNA, 462 bp, Zea mays
  Peptide Sequence Number=SeqID_68717
atggcagattcagattggtgttttgctggtaccatgtccagtccgtggagccctctgagtattgaggaagacgaagagatacaagagcttggtgccgaggagcagcaggttggtgagcagctgcggcagggtgatgggcagcagcaggagttgacagctgatgcaagagcacaagagaccggaatgaaacgtgcaagatcagtgtccagttcatctactaatccatcaaattctcgtaaatctgagtcattgaagatattaccaatagtcctgccagagttagtttcacctcagataattggaaatcagattgtcacattgtcagaagtacaattattttgcattaatgctcattatattgacgctaaatggaaattgcataagaggaccatatggttcaataaattgcacccaccacttgatatggtttctattgctgatgaagtgcacatgtgcctttaa

SEQ ID NO: 26939 - DNA, 210 bp, Zea mays
  Peptide Sequence Number=SeqID_68718
atggtgacaaaacaagaaaaaagttcacagcggattaatgtacagggagaacttgagaggggcagtgaggtggcgggcccaagattttggggctggaacttagagctgctgggctgcgtgctccactgctgccgcctgacgcccggccctgaccgccgcctggccgcgttgacgctagggctcggcgttcgggaaaaggacaacgagtag

SEQ ID NO: 26940 - DNA, 702 bp, Zea mays
  Peptide Sequence Number=SeqID_68719
aagcaaagcagcagcgctcgccccttcttctccgccgccggtcgcaagatggagaaccaccgcaacttcagggacttcttatcccaaggttgctcttcatcgacgtccaggggccgcactggtcatgaagctcccgaggacgacgactttggcaccttctcgcagtcgccgtttgctctgccaccacgcatcaatgtcccagcacctcgcagccgcattgaagctcttgatctgaactcccagtcccagggtaccgattttccatatctctcatcctaccaagatgttctccagtcaggtgatggtggatccgacctaggtttgcctcctcttggtcgtggtagatcagcgcgcacactatttcaatccaccagaaccatttcagctcctatttctcatgcccgaggtccaattcgaggttgccgtggagttagggggagaggcactagtagtcgtggtggaggtcgatctgctatttctgcacctattgaccctgtcctcattgaagattttggagatgaaccaaccaatgaaatggattctcgagcttctgtgaaaagaaaagagtgcaggaagtttcaacatgcgattcctacatacatggaacaattagcagaaatgttccatggaattgttgttgatgggtctagttcttgtatccctggtgataggaaagaggagctttaccagtacagcacgtag

SEQ ID NO: 26941 - DNA, 1554 bp, Zea mays
  Peptide Sequence Number=SeqID_68720
aatttgacaaaatccatccactcttgcctctgtcttctcaacgtaaagacaggcagggcgggcacgaagcgaagggaccagccagcgagcggctcgccggcgacgaccctctccccgccccaccccgcccacggaagcacggagaagatgtccgccgcataccctcgtctcctcctctgtctcctgaccctagccctggctctcgcaggggtcgccgcgggcaagatctcggccccccgcaccccgatctcgcgcgacatctaccactccagtgactctcttctgcgtgaaatcaaggctttggttgctcggcattccagcaaattgagtatggacactatcaaaacaagcaacaaaggctattctgcagagctgtttgtagttacatttaatcatgtgaaggagcgcatggataatggctcaaaagttcatatccttctgagctttgggcagcatggcagagaacttatcacctccgaagttgcattacgtcttctctatgttttaacggagaagcccaagatcgctggtgtggatatttcatcctttgagaaactgctggagaaccttgtgatcaaagttgtgccgatggaaaatatgaatggtcgcaaacgtgtcgaagaaggggagctttgtgataggagaaatggaagaggagttgatctcaacagaaattggagtgttgactggggaaagaaagaaaaagactacgacccatacgaggagaatcctggtattgctccttttagcgaacctgaggcccagatcatgagggaattatcaaggtcgtttaaacctcatatttgggtgaacgtgcattctggaatggaggccttatttatgccatatgatcacaagaataccacaccaaatggagcatctgcacattcgatgcggtcagtcttagagaatttgaaccgtcgccatttccaagatagctgcctagttgggtcaggtggtggatctgttggatatcttgcacatggtacaacaactgattacatgtatgacattgcaaaggtgccaatgccgttcacctttgagatatatggagatgagaaagcatcttccgatgactgcttcaaaatgttcaatcctgttgacaagaaaacattcgacagagttgttaacaagtggtgcatggcatttctcattctcttcgaggaaggcctgcgaaacctgcgagacgcgcagatagtgtcgcaaggcacgctggaaaactgggtcccaattggaggagacatcgtcgagataaatgtggagcggaagagcagcatccgtgagaggaggaagctggaaggcctcgaccttggaatgcaggagctaaggacatatttccggctattcttgctgtcaacattcctgttgatgttcatgttctgcgcgcggatatcaaagaacagaaaccgagactcagagctggaatacagctctgccttcgcaccctggtattcggagctggacgtcccgtatactttggacacgaaggatggtggcaggcagtgtctgtttaggttacagcagagacgccagacgatgtggctaactgtttaa

SEQ ID NO: 26942 - DNA, 1413 bp, Zea mays
  Peptide Sequence Number=SeqID_68721
atgaagcccggcggcggcggcggcggcggcaacggcgtgaccgcgacgacgacggcgatcccgccggacgacctccgctcgcggcgccgcctggccgcgctgctggcgccactcctgctcttcctggcggccgcgctctccttcccctccacgctccacctggccgccgtcccgctcccaacgccgccgatgacgacggtgccgcgccggaccacgcccccgcgggtcgccgtctgcctcgtgggcggcgcgcggcggttcgagctcacggggccctccatcgcgcgccacgtcctgcgcggcggcgcgttcgcggtccccgcggaccgccgcgacgccggccaggcggccgccaccacctcggtggacgtggacgtgttcctgcacgctccgctggacgccgacgcgtacaagctgcccctcctcctggcgcctgcagcgggggcgggcggcggcagcggcaccaccagcaggaatagcaacaacgtcgtcagcctcgccgccgtgcgcgtgttccggccggtgtacctcgatgagacgacgccggcggcgcgcgcgcaggtgctcaccgccgacaactcgcccaacggcatccagggcctgctgcagtacttccgtctggtggaagggtgcctggacatgatccgcgaccgcgagtcgcgaggcaacttcacctacgccgccgtgctgcgcacccgcctggacggcttctggacggcgccgttccgcctcgacgacgacgaccaactcctgtccgggtccgcctacgtcgtcccggagggctcgcgcttcggcgggctcaacgaccggctgggctacggcgggcggcgcgccacggaggcggcgctggcccggctgtcggcgctcccgcggctggccgccgccggccacgcggggctgaactcggaggcggcgttcgcggcgcagctggagctgtcgggcgtggcggcccgcgagcggcgcctcccgttctgcgtcctcagcgaccgcgcctacgcgttcccgccggcgcccgggtacggcgtgcccgtggcggcgctgggcagcgccggcccgctcagcggcgccaagtgccggccgtgccgccccgcctgcgccggcgcgtgcgcccagcgcagcgtcgcgcggctcgagcccgcgtggagctggaccggcggcgccctggagctgtgcgacgcgtcgggcccctgggagccggggtgggaggcgctgttcgacgccgccgccggccgcgacgccgccagggccaggcgggccgtggcgcggatgggcgccggagagtgcgtcgcccggatggaggcgttcagggccctcgcggaccggtgggacgcgcccagccccgccgagatgtgccggatcgggctccgatcccggtcgtcggcgtcgtcggcgccgcctgcgacgactagatag

SEQ ID NO: 26943 - DNA, 207 bp, Zea mays
  Peptide Sequence Number=SeqID_68722
atgaatgtgggacatgctgcccacctgtccgggcagacagcgcacatgaatcaagttcctggctccggtgttggcattggtgttggcggctcagacgggctaccgcagcaccagccaatgcaggagatggcggcgctctcaggaatggaccagcagtttgtcatgcttcggaccgctatgcgcgacaagatgcattcaatgcactga

SEQ ID NO: 26944 - DNA, 3516 bp, Zea mays
  Peptide Sequence Number=SeqID_68723
gaaagaaaacagtcaccgggtgattggcggaaacggttgcctgaactggcaaaacggcttgaggagatcttgtacagaaaattcccaaacaagcatgagtactacaatatgatgaagggaccagttgagccacaattgcaatttgctatcaagaccttgagtgctcagaaccaacacaatcaacaaaacccacaaatgacaaggcaaatatcatcgtcctctagctatggtgctatgattcctacccctggtatgacgcaaggcaccagtgcaggttctaggactccttatgtcacggagaccaatgctctttcatcgtctggtgcatgcatggttcctcagaatgctaacatgggtacctcaatgcaaggtccaatgtctaacgggtaccagcatttaaataccaacatttcacaaaattctaccacaaataatgtcgaatctacaatgggttcagttggcgttcagcgacaactatctcatatgatcccaactccaggattcagtaatcaacagaatgtaccttcaaatcctgactattcaaatggaactggatacttcaacggtgagtcagctgtggcgccacatatgcagcaccagaaacaatttcctagcaaccacaatagcaatcaaattcaacatattgggggacacaataattctgggatacattcaagcttgctggacaactcatctgcctatggtttatcagatggccacatgaatggtggcataggagtgcatgggtcaaatatgcagctaacaaacaggactactgccccagaagcatatatgaacatatcctcttatggcaattcgcccaaacctatgcagcagcaattcaatcagcaccctcagcagagaataccgacatcagttgatatggctggttccggcagcttttatgctattggctctacccctttaaccacagcaaatagtcagagcatgaatgttgcaaatttacaatctagatcaagcatgaatcagatgttggtttccaatcagctaaacattcagtccgtccagcaacagtcccagataaaaaatgggcctttggatcaaacagagaaggtgaattttcagtcaacacagctgactcatgatcaactactacaccagcacccaatgtcgcagcatcaggtgcaacctaattcccagtttattcaaaatcagtatcatataaatcagcagcagccaaattcacagcatcagcaggctatgttaaggaacaattcccttaaacagtctcaaatggcttccaaccattcaatgcaactgccagaacaggggactctgccacacactgaactagtttcttcacaagctagtgatcctgctgaccttccaaacttccagggtcaataccagcaaagaaatgctcttgacaatgttaaaggagggcagatgcttggtcatctatctagctctcaaaattttcttccttctgcctcacatggttctcagcaattgttgccctctaatccgcagcttgataacggttcaaatgctgtaagttatgtgctgaaaggatcacagacagagcaaatgctgctttctcaatggcagccacaaacaatggaaaaggctcctgtcgctactaattcatcactcgaaaaacaagtacaagaagattgttgtcaaagaataatgtcacaagatggagtacagcaaccattttcatcagattggtgtctttctaatggcactctcgcttctgttgatcctgcagtgccaaaacccacagctggagggtttgggcaggtcaagagaaatattcattacctccgtcagataaagtggttgctgttgctgtttcatgcaaaaacatgcacataccctgttggaagttgtaagttcaatggttgtgttcaggtgcaggagcttttgaaccattttcagaattgtcaaaggaaagattgttcgtacaggagttgcactaagtcaaaagcaatgtctcaccattataaaacttgtgtcgatgagcaatgtcctgtgtgcagcgttgtaaggaagtttttgcgccaatcaactgaacaggcatctaagcaaaaaactcttgagtctagaaaacttgctcaacaaaatgtgcctcagagaatcatgaacgggatagaaggtgatagaatggatgttgatccaatgtcagctgaagcgttcgaggatcaaccatctgttccaaaacgtttaaagatgcatcttccatcactcagtggcccagaaaatgatatctctgtagtctccaatcatcatgtaaacccaggctttctattgcaggaagcacagcctgagcagcttgagcacaataataggacaacatatctgaaacgagaggtagatgcaaaggctgacattcgggctcctcaaaagcccataaaaataagttatgacattgatgaaaatgtgactacatcaaggcataatgtgattcctggtgttcccagtgagatggactctcatatcaagcaagaaaacttgtcagttaacaaagagacaagtgaaactgcccttgaggttaaaaatgaaacaaatgatctaactgatgcgactgtgactaaatcaggaaaaccaaaaataaaaggtgtttctatgattgaattgttctatccagatgaagtagatgtacatattgacagtctaaagctgtgggttggtcagagtaaggctaaagctgaaaagaatcaagctattggtcattctgagaatgagaactcttgccagctctgtagagtagagaaacttacttttgaacctccaccaatgtattgttctccttgtggagctcggataaagcgaaacgcaccatactacgctgtaggtactggtgatacacgccactatttatgtatcccttgctacaacgagtctcgtggtgagactattgaggttgaaggtcaaacatttccgaaggcaaagttagagaaaaaaagaaatgaggaggaaacggaagaatggtgggttcaatgtgacaaatgtcaatgctggcaacatcaaatttgtgctctatttaatggaagaaggaacggtggaggacaagctgaatatacttgcccccattgctacgttgaggaggtcaaatgtgggctgcgcaaacctttaccacagagtgctgttcttggggcaaaagatttgccaagaactgttcttagtgatcatatagaagatcggttatttaaacgacttaagcaggagaaacaggaccgtgcagctgctgctggcaaaagtattgatgagctcgcgcagatagctcagacgcgtttccagattacgcagctgcgtgtcatccagaccgccggtgatttccttacgataacgtgcgataaacggcacggtattcccttcgtcaagcaggcgaacggcagcgtcaacctgttccgggcgcgcctgaatttcacccgcaataatgcggcagaacgaatcattcatcatggtttgagttcatcttttcggatcaaaaatcaggggatagttatacggactggctggcaaaaatgccagccatcggcaggaggttaa

SEQ ID NO: 26945 - DNA, 279 bp, Zea mays
  Peptide Sequence Number=SeqID_68724
atggcggaggaagctgcatccctggaggcgccgccgccgctccacaatccctcactgcgaaaatcctcccttgacgatgagacccgcgccctcgtcgtccccgacgccgccgccctcccggcgtctcccccctccgccgtcgaggctaacttcgcgcgctacttcgtcgcagctccagcccatgttgtgtttaaagaggaaggagtcatatccactgttgacttcaatgtcggcaagtcagatcgcagtgagatgaaagtcacaggaaaacggaaaagg

SEQ ID NO: 26946 - DNA, 405 bp, Zea mays
  Peptide Sequence Number=SeqID_68725
atggccggagaatgcacggacgtgggcgtgtccatggcgggggatcgtgggcggaggttggggatgactgacagggttttcaattcaaactcaaatcaagtttcaaattcaaaccaaatcaagcatgtgcaacaattcaaagaatatttagggtgttacattttgttagcgcttatggagaatgatcggaaaacaaagtccaagaaacgaaaggaggtcatttgcattgtggacccaaggtgttctgcgaaggccctggcgatgaagacgacgaaggcgaaagacagcgtggacgtggcagaagctgcgaaggcaacgtcgcttgggttgatgcctattgaagcagtgatggccactggagatcttcaaggtgctgtaattggggcgcactttagtggtggatga

SEQ ID NO: 26947 - DNA, 372 bp, Zea mays
  Peptide Sequence Number=SeqID_68726
atgctctttgggttgtcacaccgaccaccgattgtcactcgcagtgttggaacatttcatctgaagctccgtgacatgatgagagctatgtgtgatgcactcaacatgaacatagaaaggctgaagagagttttaggacttgttgaacaggtggagactcgtcgaccacaacctacaacttcttctgcaagtgattctattcgtgcttttccatcatatgatgatacagatgctgaaattatattggagtgggaaactaagatagatgtctttttgcaaaatatttgtgtgaacagaaaaagatcaaaaagggaaactagtgttttgacccattatgctttatctttgtgggagtcctttaactccatctaa

SEQ ID NO: 26948 - DNA, 99 bp, Zea mays
  Peptide Sequence Number=SeqID_68727
atgggatctttgaacaagagcccacggtatgaagaagcatggaaacaatacgaaggatggagcagagccgaagctgtgtgcaagggagcttcggcatga

SEQ ID NO: 26949 - DNA, 882 bp, Zea mays
  Peptide Sequence Number=SeqID_68728
atggaggcctactgcgacgaagtttggtgcctagaagacaagttctacgggctcgagctcaaccacatcgctcgatggtacaacgagactgcagatgagctggctaagatagcctcgaggcggacaacggttcccccggacgtcttctccagagatatacatcaaccctccatcaagaccgacgacacgcccgagcccgaggaggcctcgacccagcccgagaaggcacccgggggcttctcgcacctgctggtcgccatcaacaaattctccaagtggatcgaggtccgacccctaaccagcatcagatctgagcaggcggtggcgttcttcaccaacatcatccatcgctttggggtcccaaactccatcatcaccgacaatggcacccagttcactaggaagaagttcctggacttctacgaggaccaccacatccatgtggactgggccgccgtggctcaccccatgacgaatgggcaggtggaacgtgccaacggtatgcttctgcagggacttaaaccgaggatctacaacgacctcaacaagttcggcaagcgatggatgaaggaactaccctcggtggtctggagtctgaggacgacgccaagccgagccacgggtttctcaccgttctttctagtctatggggtcgaggctatcttgcccatagacttagaatacggttccccgaggacaagggcgtacgacgaccaaagcaaccagacaagccgagaagactcactggaccagctggaagaggctcgggatatggccttactacgctcggcgcggtatcagcagtctctgcgacgctaccacgcccgaggggttcggccccgagacttccaggtgggagacttggtacttcggctgcggtag

SEQ ID NO: 26950 - DNA, 333 bp, Zea mays
  Peptide Sequence Number=SeqID_68729
atggggtgctcagcctcaagctacagcgtcatctccttgcgacctgcgccgcggcacgctaccaactcagccatgtactccaagatggcctgcgggggctctgtggcagcgtgcggcatctccatcgatgggaagctcctcaggataacgtccaggagggtcgcggactcgcggcggcggcgctatcctggactggactccggaacggcgaaatatccagagggcactgctgtgtccgtttcatgcggtaatcggccggtcaaggtgttgagatccaaattgagcggacggttcgacccttgggcccggacactccgcgtgccccgacagtag

SEQ ID NO: 26951 - DNA, 717 bp, Zea mays
  Peptide Sequence Number=SeqID_68730
atgctgtctgtgacaggcgaggaccctggaggccaggctcacccagcaccacgccaccaccaccacgccagcggcaggaagaagagcagggacagcctggaggcgccgtcgaactcgagcgacggcggcaagaccaccgaccatgccgacgaggccacgtgcaggcgggtcaaggtcgccagggccagggtctgcacccggatcgacccctccgacgccaccaccctcgccgtcaaagacggctaccagtggcgcaagtacggccagaaggtgacgcgcgacaacccgtccccgagagcctacttccgctgcgcgtacggaccctcctgccccgtgaagaagaaggtgcagaggagcgcggaggacagctccgtgctggtggccacgtacgagggcgagcacaaccacccgtgcccaacgcgcgccggcgacctccccagctctgcaacggcgagcgggtccgtgccgcgctccatctctaactccatcaactcctccggcccggccatcacgctggacctcaccatgaacggagcgggcggcgtgcgggtgctcgagggcgccgaggcgcccgacctcaggaagctgtgccaggagatcgcgtcgccggatttccggacagcgctggtggagcagatggcgcgctcgctcaccaaggactgcaagttcaccgacgcgctggctgccgcgatcctgcaacagctgccggggtactag

SEQ ID NO: 26952 - DNA, 990 bp, Zea mays
  Peptide Sequence Number=SeqID_68731
atgacgctaatcatcaaaagctttcgccaaatcctcaagcaaaggaaggggagagactacaaaccccgttccaagaaggtttgctacaagtgtggtaatcccggtaatttcattgctaaatgtccattatcaagtgatagtgtcaggggcgatgacaagaaaggaagaaggaaggagaagaacaagtactacaagaagaagggtggcgatgcccatgtatgccgggagtgggactccgatgaaagctccatcgactcctcctccgacgaggacgccgcaaacatcaccgtcaacaagggtctcctcttcccaaacgtcggccacaagtgcctcatggcaaaggacgacaaaaagaaggtaaaatctagagcctccactaaatatgcaacatctagtgatgaggataactctagtgatgatgaagataacttgcttgccctttttgccaacctaaacatgcaacaaaaagaaaaattaaatgaattgataggtgctattcatgagaaggatgaactcttgaatagccaagaggacttccttattaaggaaaacaagaagcatgttaaggttaaaaatgcttatgctcaggaagtagagaaatgtgaaaaattaactagtgagcttagcatttgccatgatactatttccaaccttagaaatgagaatgctaaattaattgctaaggttgagaaattaaatgtttgtgatgattctcttgtcaaacttaaaaatgataatgctaatttgattgctaagattgacaagttgaatgaatcaattgctagccttaagatagaaaatgataaattgattactaagtctaaaaatttaaatgtttacaatgatattgtttccaatcttagaaatgaaaatgtcatgttacatgctaagattgaggaattaaatgtttgcaaaccctctacatctaccattgagcatgttactatttgtactagatgtagagatatgatgctatccatgatcacctag

SEQ ID NO: 26953 - DNA, 2784 bp, Zea mays
  Peptide Sequence Number=SeqID_68732
atgggggagaagggcggcgctcccgggctcggcttcctgagcctcgatcggatgcgcgtcctcctgccgccgctccgcctgccggagaagctgtcggccaggacgctgcggacgcacctcttcactaactaccggatgcgcaaggtgcgggacagctccagctggctcatcccgctctgggtcagctcttgggtcctcgtcgcctccctcatctacctttgcatgagctaccaggccgtcggcaagcgccgggagaccaatttaaacgtcagcatgaaccacctccaggcgctcgccatcctcgtctccaccttccaccactccaagacaccctccgccatcgaccagaaaacgttcgcgaggtatgcggagaggacggcgttcgagcggccgctgacgagcggggtcgcgtacggggtgcgggtcacgcacgccgagcgggagcagtttgagcgccagcagggatggagcatcaagaagatgtactcctccaagaccaagaatcagtcgcagggacccgggaacgccgaggacgccgaggtgcgggagccggcggaggagtatgctcccgtaatcttcgcgcaggacgcctacaagcacgtcatctccttcgacttgctatccggcgccgatgaccgggacaacgtactccgagctagagaatctgggaagggtgttcttactgctcctttcaagctgctcaataatcgccttggagtgatcttcacctatgctgtgtacaagtatgagcttcctgcaaatgccaggccacaggagcgcattcaggctgctataggctatttaggtggcatatttgatattgaagctcttgttgataagttgcttcaccagctcgcgggcaagcaatccatcatggtgaacgtttacgatactactaatgagagaccaatcagtatgtatggttcgaatgatacaggcagtggcatgtgccaggtcagcacactgaacttcggtgacccttcaaggaagcatgtgatgcactgcaggttcattcagagcccaccttggccttggatggcaataacgacatcaattggaactctagtgattgctttactgattggatacatagttcatgctaccgcaaaacggattgccagagttgaagatgactttcaggagatgagtttgctcaagaagcgcgcagaggatgcagatattgccaagtcacagttcttggctactgtttctcatgagatcagaactccaatgaatggtgtcctagggatgctccaaatgctcatggatactgatttggacacaacacaacaagactatgttagaaccgcacaagccagtggcaaaactctggtatccctcatcaatgaggttcttgatcaggcaaagatcgagtctggtaaacttgagcttgaggtggtaccctttgatcttagaacagtttgtgatgacattttgtctctcttctgtgggaaagcacaggagaaaggactggagttggcagtgtttgtttctgatcaagttccacaaacactaattggcgatcctggaagaataaggcaaatcattacaaatcttgttggaaactctataaaaggaactgaactcatccgagatgccttttgcacccattgcatcagactcaataagctgatgatatcagttgaagatacgggtgctggaatcccgttcgatgctcaatcccgtgtcttcacccctttcatgcaagtaggtccatccatcgctcgcatacacgggggcactggcattggattaagcatcagcaaatgcttggttggcctcatgaagggagagatcggattttcaagtaaaccccaagttggttctactttcaccttcactgcagtgcttacgagggtccattccagcagaaatgagaataaatcatcagaatttaaagagatcaatgcattggtggtagatcatagaccggtccgtgccaaggttactaagtatcatttgcaaagactgggagttcagactgaattgacaactgacctagatcagtatatttctaaaaataattgtggatcacagattgcaaagcttgtgctcattgacaaagaaacctggctgaaagaatcccactccatgcctcttttggttactaaattgaggaacaaagatcagccagactctacaaagttatttcttttggagaaccctaaaagttctgtcaagagcaattcacatatattcagggaatataacttgaatgtaattatgaagccacttcgtgcaagcatgcttcaggtttcgctacaaagagcattgggtgggatagataaactgcattgcaggaatggagtagtcggcaattcaacactgggcagccttcttcacaagaagcgaatcatagtggttgatgataatattgtaaatctcaaggttgctgcaggcgctctaaagaaatatggcgcggaagtaacttgtgctgacagtgggaaggaagcaatcacactgctgaaacctcctcacaattttgatgcttgtttcatggacatacagatgcctgaaatggatggatttgaagccacaaaaaggattagagtgatggaaagagatctaaatgagcaaatagaacgtggagaagccccaccagaatgcgtaggggttcggcagtggcgaactccaatattagccatgacagcagatgttatccaggcgacacatgaacaatgcttgaaatctgaaatggacggttatgtttccaagccattcgagggcgagcaattgtacagagaagtagctcgctttttcctaaatcaagaccaagttcagtag

SEQ ID NO: 26954 - DNA, 270 bp, Zea mays
  Peptide Sequence Number=SeqID_68733
atggctcaccctttgccgagtgtccactttacagacactcgacaaagaagctccctgtgggcccctttaccaggtccttcaccgagcgtattaggtgacactcggcaaagagatcgccagcgggcccctttgtcagttcctttgtcgagtgtcaaggccacaacactcggcaaagaggctttaccggtgcccagtttctatgtttcaagtgacttgaagttcaaatctgaattatctaagaaaaattcaattaaacaaacaaaaatttaa

SEQ ID NO: 26955 - DNA, 999 bp, Zea mays
  Peptide Sequence Number=SeqID_68734
atgccagtgtgccacatgatgtgccttttgtataatagaacaaaaacagacagcaatataatcaagttggctcacaaaggaaatctgcatgggattcttgttgggagggaggtgttccccaaaggaatattgtatgcttctcgtgagtcccattattcagtattcaaagcagcaagaatgtacaggatggattgcgtcaaagtcgacactcttatgtctggggaaatagattgtgctgatttccagagaaagttattgcagaaccgagacaaacctgccatcattaatgttaacattggaacaactgtgaagggggcagttgatgatctagatttggttatcaaaaccctcgaggagaacggctttaaaggtcggttttatattcattgtgatggtgccctctttggattgatgataccatttgttaagaaggcgcctcaagtgacatttaaaaagcctattgggagtgtcagtgtctctgggcacaagtttgttggatgccccatgccatgtggtgtccagataacaagattggagtacataaatgccctgtctagcaacgtggagtatctggcgtcaagggatgcaacaatcatgggaagcaggaacggccatgctcccatcttcctctggtacaccctcaacaggaagggctacagaggctttcagaaagaagtccagaagtgcttgagaaacgcacactacctaaaagatcgcctcaaggaagcaggaatcggagcgatgcttaacgagctcagtagcacagttgtgtttgaaaggccaaaggatgaagtatttgtccgaaggtggcagctcgcttgtgaagggaatatatgccacgttgtggtgatgcccagtgtcaacattgacaagctagactatttcctgaacgaattagtggagaaacgggcgacttggtaccaggatggaataagtcaacccccctgcattgccagagtcgtaggctttgagaactgtctctgtggccgtcataagtag

SEQ ID NO: 26956 - DNA, 492 bp, Zea mays
  Peptide Sequence Number=SeqID_68735
atggctaggaaaaagccgcacctatcgcatccaacggttcgcaagatcacgaccctcttcttccccaaacctactgcccgcgcacggtggcgcacaagcggcacggcggagcgcccgccggagcacccacagcacacaccccggtgctccaaaacccaatccgagacgcggcaacgatgcaaaggtaatggcgaattcaatggaagggtgctcaccaagattacgcctgcagagaccctccgcccacggcgcagcgacgatgaagaaccccagcaagaaattactggcggtaccgcgcttcttcgatcgccgcgagaccccgaacagctccatcacgcgtccgcgatgcaccatggcccgttcacgcaacctgattggcaagggagcaagattttcttcccgtgcggtggcgcggacggtctattctcaccctttcactcaacgacggtggttcacgagttgcaggtcaagtgcgcaaagcgcctaggatag

SEQ ID NO: 26957 - DNA, 387 bp, Zea mays
  Peptide Sequence Number=SeqID_68736
atggttgggagcgtgggcaacgggctggcggatttggacgcaggggccatctccatgaacggggtggggaaggctctgtatcctgccaaggcggcggcggcggccgccgcggagacgctccctgtggagctggagccgccggaggccgtagtggcgccgacgggggaggaggctgccaacgggaagagggagatagtgatggggaggaacgtgcacacctcctgcttcgccgtgaaggagcccgacgcggacgacgaggaaaccggcgagagggaggcgacgatggccagcatcctcgcgctctaccgccgctcgctcgttgaacgcaccaagcaccaccttggaacaagtttattttgctttatagatggacaaattttgctataa

SEQ ID NO: 26958 - DNA, 975 bp, Zea mays
  Peptide Sequence Number=SeqID_68737
atgaaggactctactgcccaatctgtccattaccaaattgatgccccagatctactctcgcgaaacggtacgccgcggtctaatctccaccatagggaggcgatgcaacggcccacgctccctcttcaacctcccgccgaccacacccacggaacaggacacctgcggcagcgccgctcaccagcgcccgcggatccacacctcaacgccctcctaaacgaatccgaggagctctacttgcggcctactgaaggtgaaacgattagagaagttattaccgtgcttcgggatggagaggttgctgcccacgccccgcgccaatccacgaccaagaatgaacgacatcgaggaattacggaatcacttgtggccctactcccgtacaggagccacgacttcccccacacgccctcgagaatcgccctagccaccaatcaaagggcaaggcacgacgacggcacacactcaccgacacgcgaagtccgactccaggagatctggccagggaggccctgcgccagccgcgaggttctcggcggtggttgcaacggcccgcccgagatggagtcgagggaacgactaacaggagggtcccacatggcggagacgagggagacttcgtccgcgggtcgagagtatgacgtgtggggaccccgagaacagcgagagggcagaacagggcgcgagtgggagccactggcttctcttcccaccagctactgggtggaggccctaaacactgctacatacctcctcaaccgtctcccatccaaggcggtcagtcatcccactccattcttcaccctcttcagcaccaccccctccttcgagcaccttcgtgtcttcggatattcttctaatcacaaggggtaccggtgcctagatctcctcacccacaacgtcatcatctttcgtcacgtggtcttcgaccaggacatctttcccctttttagctcatccccgacaccctcctag

SEQ ID NO: 26959 - DNA, 237 bp, Zea mays
  Peptide Sequence Number=SeqID_68738
atggcctctggatggccgagtagccgaggccctgccacgatcacgaaagcgaaattcctcgacattcttcggcgagtctggacaggtagacaactgcgtcaaggcgcgaaggctcccaccagcgccagtgaagaccacacgtcggtccgctacttgcccattcgggatgacgacttcattggcccacctgtcagcgtaggatttgtggttttgttctatgggatttttattctttga

SEQ ID NO: 26960 - DNA, 369 bp, Zea mays
  Peptide Sequence Number=SeqID_68739
atgagtgcatttcagtttgaggctttcccacgctttgcggttgaggagagggaacacaacgaccgtgccttcagttttgctgttgttgccagcaactgccaagatctggttgaggagtctttggcgtcgggacacttcgctggttttgataggtcaattttgagtcctatctttgcaattgagcttgggcaccagtctcgacacacatttgttgcggattgggaagcgaaggagctttttggtccagttactgagcaggagattgagaaggcggtcgaaattcgcggagaccatgtgcgtgtgaaccatgtgtttaaccagatggggcttgcttatgaagagcacacaacgcaccccaagaggaggtga

SEQ ID NO: 26961 - DNA, 510 bp, Zea mays
  Peptide Sequence Number=SeqID_68740
atgtgggggtggggagaacggtggatcgcgctcctgggtgcccctaccgtagggatggcaacgggaagagtgaggctgacagcagctaagtccagcctcgggcgccataggaagctccgcctcgcccgaccgcagggctcggcccccgtctcggcctcggaagatggacttcgcctcgctcgaccacagggctcggactcaaccacgactcggaagacgacggactccgcctcgcccgacccgagggctcggacacagcctcggcttcgaaagacggtctccgcctcgcccgaccccagggctcgggctcaacctcgacgctggacgacgaactccgcctcccccgaccccagggctcggacacagcctcggcctcagaagacggtctccgcctcgcccgacccgaggctcggactcgacctcgacctcggaggagcctccgcctcgtccgacctagggcttggaccgaccacgtcacagggggggcatcattaccctacccctagctag

SEQ ID NO: 26962 - DNA, 711 bp, Zea mays
  Peptide Sequence Number=SeqID_68741
atgtcgggagctcacgccaagaaggagatggtgaccggcgacaagcccgccataagccatgggaaggctccatcgggggagtccggcaacaagaagagggaggaatcacctccccgcgtcaagtcgcaccggagtggcgacaagaagaagaaaatgaagaaagtggtctactacgagatcgattcttcgtcaccttccacctccgactccgacacgccatccaccacttctaagcgccatgagcgcaagaagtttagtaagatcctcttacgctatcctcgcatttccaaacatactcctttactttccgtcccactaggcaaaccaccgattttttacggtgaagattattgtatgtggagtgataaaatgaggcaccatctaacatcactccacactagcatttgggacattgttgagtttggtgcgcaggaaccatccgtgggggatgaaggctatgactcggacgaggtagcccaaattcggcacttcaactcccaagccagtactatactcctcgcctctctaagtcgagaggattataataaggtgcaagggttgaagagtgccaaagagatttgggacgtgctcaagaccgcacacgaaggagatgaggtgacaagatcaccaagcgggaaacgatcgagggggagcttggtcgatttatgctcaaccaaggagaggagccacaagccatgtacaaccggctaa

SEQ ID NO: 26963 - DNA, 165 bp, Zea mays
  Peptide Sequence Number=SeqID_68742
atggggaagcctgtcccatcactcctcatgctcctcctcagccgaggtcgcggacggtccggccttgaagggcggactgtccggacccacctttttgagtctgctctgacatgtttcaacggtcattatagccgttatggtgtacggcggaccgtccggccctag

SEQ ID NO: 26964 - DNA, 645 bp, Zea mays
  Peptide Sequence Number=SeqID_68743
atgaggatgagggcgccgtcgtcgaccggattgaaggcgatcgtggcatcggcctggttggccgtgctgcttggttccgcctccctcgccgcctgcgatcaggacgcaggattctcgccgccgccgaccgccgtaccagcggttccgccgcgcccggcactccgcgccgccgccgccgctgttcccgtgccggtgccagctccactgccccgcaagatactccgctcgccaggcgtcgtcgctggcggtagcggagaaggagcagccgcagcagggccggtgcggccgagccggatggacgaggggtgcgcgggcgcggaggacatcgccatctaccagcgccacgcgtcgtcgctgccgaacggggtgccggcgtacaaggtggacgtgatgaaccagtgcctgggcgacccgggcggcggcgactgcgcgatcgcgggcatccacgtgcggtgcgggtggttcagctcggtgaacctggtggaccccctcaagttcaggcgcctgcgccacgacgactgcctcctcaacgacgggcggccgctgctcggcggcgacaccatctccttcgagtacgccaactcgttcccgtacgagctctccgtccgcgtcgccacgtgcgtcgaccccaccaccgccccgtag

SEQ ID NO: 26965 - DNA, 303 bp, Zea mays
  Peptide Sequence Number=SeqID_68744
atggcgcagtgggttcgtgtcctcagtcgtggcgagctcaccggcgatgatttgacggctgtaagcagccacggtgacgcgacgggagtgttcggatacgtggcgcaaggccatgcgacggcggttctccggcgagcttatctgctcaagccgcaaagcagggggtacggcgggaatcatcagagtgttgtccagcgcacggggggaaacgatctttttaccccgcggcgctatccaaccatccaggcacaaatcccgacgccgggtgacacgaatcgcggcagagggagtcgtcggcggtga

SEQ ID NO: 26966 - DNA, 782 bp, Zea mays
  Peptide Sequence Number=SeqID_68745
atgggtcctaccacagctcgcctccttcccctcctgcccttcgtcgccgtgttcctcctcgcctcccccgtggacgccgactccgccctggacgcggccacgcggtgcgcggccacgatcgtgtccatctcgccgtgcctgccgcacgtggcggccgtggcgccaccgctggctagctgcccgcctgccccaaccgacgcctgctgcgtcgccttcctccgcgctgtatccccgttggcagcgggaggcggagaggagggctgcctgtgccacctgctccgcaacccgcttctccttggctttcccatcgacgccgcccgcctcgccgcgctcctccctgcctgcgctgcgggaaatgccttcgccgccgccaacgtggaggccgccaccctcttcgctgacgcctgccgtgctgctgtccctgaattgatgtccaagccaaaggaggcggttccacttccaccagctggatcaatggttcgttcaggcactgagaagcaggtcaaagatctactcagtcttgatgagatcgaagttgaaacccgccgatatatcaggagttgtggttcagggccaagagacagattggtcttagaccgaggggatatcatgcggtactctgggcagcagatgatgaactccaccttcatgccttcaggtgcgctgatctgcattggctccactccactggtcgagcgacactcggcaaaggagttacctttgccgagtgtcggcctgacagcactcggcaaagaatccgctagagggggtccccatgtcag

SEQ ID NO: 26967 - DNA, 369 bp, Zea mays
  Peptide Sequence Number=SeqID_68746
atgggcaagagcaagaaaggtgggagttcctcacaccattccggcgataagcggaagcgcgagccgactcctccctcggaggacttcggcgattccgagtactcggaggaggagttctcctccgagtcagagggttcaccggtccatgcctctcccccgacgtcgtctgataactcagatgactcccaggggatcgccgcagaggactcgtccgaggagggcggcggtgacggcgatggcgacgacgacgacagaggcgacgacgatggcgacggcgacggcggcgaaggtggtggcaaggacgacagcggtgacggcaaggacggtaccaagggcagcagcaagggcagcaacaaggccagtggctag

SEQ ID NO: 26968 - DNA, 219 bp, Zea mays
  Peptide Sequence Number=SeqID_68747
atgtcggcgcattccagccactgggccacgcgaggcttaatggtggagtgggccgagcggatgcagataagtggatgtgggcaggggggaagtcggcccgagtgcaggatgaaatatatctttaaagcatatatagttttgggtaagaaggaaatgggggtaagaaaagactccatccaagattgtggatcttggactacttttgaagatctggcttga

SEQ ID NO: 26969 - DNA, 318 bp, Zea mays
  Peptide Sequence Number=SeqID_68748
atgatctcgcgggagaggccagtccacgccggaacattcaccacagacgagatcaccggccggcgaaggaggaccgaacgaatccatacaaaaccgccgtcgagccgtaccaagctgttaccgccaggacctccggaatcaaaccccacccgtcgccggacctctatcaccgccgattgcaacctcgctgacggagagtacgtcctcgtgccggagcaaggagttgctcagaaggtagccccggatccagcacgagagcctgccctagaggatctgcctgccccaactttggaaggcaagccccgattctatgcataa

SEQ ID NO: 26970 - DNA, 261 bp, Zea mays
  Peptide Sequence Number=SeqID_68749
atgggtcagggagcttcaccagagatcaaggaagatatctttggaaagctccacgtgccactagcaaagctaaccgaagggcaggcgcaacatggacgtggctggagtgagctggccagggtggccgaggctcgggctgtgatggtgggcggaggaaagctcgccggagctaaggatgggtgtctggctagcgagggttccgctaactggatcaagagatatggaggggtgaagttgggcttgtctcactaccgaacatag

SEQ ID NO: 26971 - DNA, 768 bp, Zea mays
  Peptide Sequence Number=SeqID_68750
atggccaccacccgcgaggtctccagcagcgccgccgccatgttccacgtctaccagacgataccgatgccgacgccatcgacggcagcggccggcggcggcggcgccatggtgtcggtgtcggcccccgcgaagccgggcaagaaggagggcggcggcaaggaccggcacagcaaggtgaacgggcgcgggcggcgcgtgcgcatgccgatcgtgtgcgcggcgcgcgtgttccagctcacccgcgagctggggctcaagtccgacggccagaccattgagtggctgctccgccaggccgagccctccatcgtggccgccacgggctccggcaccaccccggccgtcttcgtctcctcctccgcgccgtccacgtcctcctcctcctcccactaccaccaccagcagcaggccaccgtcgtcctcggcaagcgcccgcgcgaggaaggcgacgccgcggggtccgtgttctgggccgcgctgccggcggcgccgcgggccacggaggcctggggcttctcgccgctggaggcgcaggcggcggcggccgcggccgcggcggcgtacgtcccgatggcgcaggcgcaggcgcagcaccaccacctcaacctgctcgccgcgctctccggcgccgcgaggcgcgccgaggaggagacccgacttcttttgacacctcctcctgctgctgctgcacgagaatcgatggcatctgaaaaacgttcagatgtgccatgcccatcatcagtacaggcttatagctgcagatga

SEQ ID NO: 26972 - DNA, 402 bp, Zea mays
  Peptide Sequence Number=SeqID_68751
atgcaggcggcatgcaaccgcgccaagtgggtgcacctctccgacttccagcgcgcccagcatggaagcccaagcccacgcgtcatgcaaccggtgcgccggatgctacgtgtgagcaactgcaccgccactcgcgccactgccacgcctcctcggctgtggaaccagtaccgcgggccggagcagcggtcacgtcgtcagccaagcttacgtcccatccgggggcagcgagagaaccctctctcacggcgtgaaaacgacgcgcccgtgttccgttcctcgaacggctcgcgcacgcgcaacggctgccccgcgaaccgcatgcctcgtcgcattaactccgcggcgggacaggcggcgcctctggcaagagaagcaagcgacgcttcgccttcgccataa

SEQ ID NO: 26973 - DNA, 329 bp, Zea mays
  Peptide Sequence Number=SeqID_68752
ccgtcaacgcgtcagcagcaactagcaaggccgccaagcggcccaggagtccaggacccaggcccagctccaagcgaacagcctaccgagcagcaagtcgccgagcagccgagccaccgccgaacacagggcgccgccgagcagccgagccgccgccgagcgccgagtcttctctgcttctctccacgacctcactcttcaccttcggcgcgggtctccttaccttcggcatccacctctcctacgtccacatcgagccccagcgcgctcgcacgctcgctcgggaccaattcgtccgtgactacctccgcaagaagcacgacaagtag

SEQ ID NO: 26974 - DNA, 1778 bp, Zea mays
  Peptide Sequence Number=SeqID_68753
acacaagagcaccttgctgtgaacttgtaacaggtttgaacttcgaaggaaaagataattttggtgctgtgattgatttcactgtgaggagtgaaatgaggctaagtattgggcaagtccatcgaaatgttcttgcgctggcatcttctcggtcatgttttgttctgggagatcgtgtttcgttcaggatgctgtcccaaccacgggtagctggatttcatcagactgcttggcgtggtagtcaaattttggaagataacaggggaggaccattgactcttgctagcctagaagtgcaaagcagggttgaatatggaaaaaaggggaaaatggaacgaactggaggtccaaagccaagttcaagagcttcttccctctatgtgaaaccaaaggtttcttcaaatgtcaaaccagcaaagagtgccttgatgaagccagctgggataaagaagacactgaaggtagatgaggctctgttttcggccaagtcatttgaagaacttggtttgccacctttgcttgttgaccagttgaacaaggaaggtctgactgccccaactgaggtccaatccgcagcaattcctataatagcacaaaagcatgatgttgtgatccagtcatatactggctcagggaaaactcttgcttatcttcttccaattctttctgatataggccctctgaagaggactatggaacaagaccattctgagaaaagatcaggtatagaagcagtcatcgttgctccttcgagagaattaggaatgcagattgtgcgagaagtggagaagattttgggtcctaatgacaaaagactggtccagcaacttgttggcggagctaatcgttccaggcaggaagaagcattgaagaagaacaaaccaatcattgttgtcggaacacctggccgtatttctgaaatttctgcagcagatgaagtcgaccagcttctgtcttttaattaccgtgaagatatgcatagaattttggagcatgttggaaggagacctggaggcacatctagggatattcttggcccacttgcgagacgatctgagcgtcagactatcctggtttctgcaacaataccattttcagttatacgagcagcaaggagttggggtcatgatccagttctcattagagctaaaagtgtagttccacttgattcaatcactgtgccaagacctgcgttatctcaaagtgacgctaaccccagttcgtcatcgcagtcagtgaaccaagctgctgttggcagcttgccgccatctttggaacactactattgtacggccaaggcgcagcacaaggttgacacattacggaggtgcatccatgctctggaagcacagacagtgattgcatttatgaacaacaccaagccactgaaggatgttgtgtttaagttggaggcccgtggtatcaaagccactgagctacatggagaccttggaaagcttgcaaggtcgacagttttgaaaaagttcaaggatggtgaattcagagttctcgttacgaatgagctgtctgccagaggactggacgtgccagaatgtgaccttgtggttaatctggaccttccaactgactccacacattatgctcacagagctggaagaactggacgtcttgggcggaaagggatcgtggtcacaatatgcgaagaaagcgagggatttgttgtaagaaaaatgcgcaagcagttagatgtggccatcaagccatgcgagttcactgaaggcgagcttgttgtccacaaggaggaagatgtggaataa

SEQ ID NO: 26975 - DNA, 489 bp, Zea mays
  Peptide Sequence Number=SeqID_68754
atggagccagacaaggccggggaggcagcgaaggagccgacggaaacggaggctggagactccgtggatccccgcgaactagtgtccagcgacgacgagatcgactactccgtcgagcctgatttctacgaccccgacctagatgacgtcgatgagcggtgggtgagcagacagaggaaaggccgcacatctgacgccgtgcttagctgccccgcctgtttcactaccctgtgcttggattgccagagtttcagatttttgttgtggtatataacctacggttactcacatcaggagcctggtacaatcaattcacaaataggagttcttaatggatgcatcaataaatctagcattcatggcacattctcatctcttccttgctatggaatcataggacttgctcatgctttaatttgccaggacaagaatgagaatcccaggaatggcaaaaaggcctctagcgtaatggttaaggctttcgagtag

SEQ ID NO: 26976 - DNA, 705 bp, Zea mays
  Peptide Sequence Number=SeqID_68755
atggggagccagccattgccgcctgcacatgcgcccacgcgacaaaatgacaatgcagtcacggagggaggtggggagggaagcaagatcggccgcaacgctggtccgaattctgagatgagctcaggtgttccagctttcacatgggatgcagggcacgatggctctgacactagtgaagcgtggtacgagtacggcccagcgtgggccttgggtgctgccaaaagcacgatagatggagagattggacgcagcggcagatgcaacacgcgcctgacctgtcagctgccactgccacccaccctcttcaatgacgccgtctcggtgtcactgtttggtcattacatactagcagtggacaggaggggcgccaccgccgcgcccggagattcttggatcgtctctagtcgcatcccggaacagaagaagagaaggaaaaaattggcccgccacgaatcagattcgctccatccgtccatcaccgtgaagtctgccgatcgtcagatcctggtgcaacgagtacgacagtacagcggaagagaagccagggttcccgccttcccggtgctccagggaaaaggcactcggcacgcaagccatgatgaatggaagtactcgcagccagtacaagcaatgcttccactgttccacaccggtcactcgaaccaatgtagtacaagcattaggtcttcaccggctacttga

SEQ ID NO: 26977 - DNA, 678 bp, Zea mays
  Peptide Sequence Number=SeqID_68756
atggcggagcaaagcgcacgagatcaacctccgcccccaaacaaagcaaggccgcagtggggttctagtgcattctacaagcattgtctcaaagggaaatcagaggaagaaggaagaacacttgttgttcttgacaagaacaataacagcaatctgcaaatcaacagcaaggtatggagcataccatttccatgcgcatacgtcgtatgcacgaagttctacacactgttgatgatgcgatgttggaggcgttcgccactgggcaagccgcagcgcttccaccagtgcactgtgcacgagatccctaaacgccgcgtgcaagtgcaaaacgtgcacttctgcgtgctgcatgggtgggcagcggtcgtcccactgccggtggtggagtgcggcctccccactgcatccccgtcaccaccggtgctggtggttgacgcggggtcgtctgcatctgcccccatgaaagtcgatttggcggcaccaccgccgcctccacccactgcaggggcagttgaacgtcgttcccctttgccgccggcatcggtgcttgttggaaccatcgcttcccgtcgtggacagccccctcgcgtcgtcgacgctccacgaggacgcgtcatcttcactggccaccgcccaaacggggtggccctatcttcctaccccaatgggagggcctaa

SEQ ID NO: 26978 - DNA, 399 bp, Zea mays
  Peptide Sequence Number=SeqID_68757
atggttccaacaagcaccgatgccggcggcaaaggggaacgacgttcaactgcccctgcagtgggtggaggcggcggtggtgccgccaaatcgactttcatgggggcagatgcagacgaccccgcgtcaaccaccagcaccggtggtgacggggatgcagtggggaggccgcactccaccaccggcagtgggacgaccgctgcccacccatgcagcacgcagaagtgcacgttttgcacttgcacgcggcgtttagggatctcgtgcacagtgcactggtggaagcgctgcggcttgcccagtggcgaacgcctccaacatcgcatcatcaacaattgctgttattgttcttgtcaagaacaacaagtgttcttccttcttcctctgatttccctttga

SEQ ID NO: 26979 - DNA, 405 bp, Zea mays
  Peptide Sequence Number=SeqID_68758
atggtgagcttcgccttattgtcagctgctcgggacaccgttcggtgtgccctttccttccttgctgcgtccgatccgcgctcaccggagcagcttttgcgcagccggagccccgccaccgtcgaccagaggctccatcgcacccccgccgttctccaaacgtctcggagttcacactcgagagatagctgcgtcgccgcggaaccttttccactgcggtctgcgttctctggcgcccctgtgccggttctacgccacggtcgtgttcgccgtgtcgcgctgaacgtgtctaaccctttccctaagccaccagagccccgccatggccagccttctcgtctccggcgaactctcgccgcggggccaagcggcgccaccgcgcccaagccagcccctggacgttag

SEQ ID NO: 26980 - DNA, 279 bp, Zea mays
  Peptide Sequence Number=SeqID_68759
atggccggagaggccaaatcgagccctagtgagctaatgtgcaatcgaaacaatgctacacgctatggagaggtcggtgaagatgttgagaaggttctcaacgacgaaggcgctatggtggggtcggtccacgagaagaggcggatctacggccgcggcataagaccggcgaccaaccgccgaggctctggtctcccggcgcccattgatcctcgcccaaaaccttcaccgacacccgcacatccacctggttcccccacaagccaaatcgttggctaa

SEQ ID NO: 26981 - DNA, 506 bp, Zea mays
  Peptide Sequence Number=SeqID_68760
atggtggatgacgacgatggatctcgtctggttcggatcgtcttcgccagccaggttcgtgccataccaactcgagccctcgcgcttaccccctacgccacctactcgagccctcgtgctagccccctacgccacctagccatccgccgagcgtcgagtcctcccagccgcctcccgctcgtcgcgacctgcaggcctcggtcatccggcggcggagatgttggtgctcttctaatcccccacgaggtttgccctattcaaggtgctccacgaggggaagctcgacaaggtcgaggatatatggaaggagtttacggcgttgtccaacgagaaaggtggttgagcttggctttcaacaagtttgagaacacatctgtcaccctatcggccggagcagtagccggaaatggttcagttctggatttgtatttatttgtcgctgatggaagtggtgtccctcctagaactgtgcctaaaacatgtaaacatgtcaaggatctggtatg

SEQ ID NO: 26982 - DNA, 1977 bp, Zea mays
  Peptide Sequence Number=SeqID_68761
atgaacctgcggtctgcggcggacaggcgtccggaagcccgcgtctggtccatgtacgcggcacagcgcgtacagtacagggagccgactggccgtctctggctggctctcgatctctctgcgtcgtgtggatttcagtgggctgtgaatgaagaacagcagcagcggctgagggccgaccgccggaccggccggggcgagaggaggaggaggaacaccaatcatcgcgctcgctcatggcagtgccacacatgggctccgccgtggctttcttcagcggcaagcaacgccggtgcggtgcctgagagtgagaagaatggccaagcagcagcagcagcagggcaggggacggtgcactgcacggccacaatgatccatcgagtggccatgacggcggtcgcgttgccgcactgctgcgcgccggcggtacagacaaaaagggggggcctcggttttctagagaaggcacgcaggggccaggcccaggccctgccgctggagcgctgcggggggtgccggtgccccgtcttgtccgcccccgtccattcaccgccggaccaaccgagcaaaagatgtcccggcccccggctccgcctccgcctcctacacttcataattgtgcatggtgaacggagagcgccggagatccatcggtcaaagggagaggacgaaagggatctcatctccgtctgcctgcctgcccttcaactgctcaccgcccttctccttcacacgcacacgctcgcgttctctctctctctcttctctggcgaagccgacagacggctcaactgcctctctgtccatccgttccactgttccagcatctctgatcagtctctcgcggtctctcctgagcagagcaggagcagtggcgagctctgctttcccagcttttatctctgcccagcccagcgcctgcctactgcctccactagaaagggctcccagtcccagttccaacactcgacctgccccgtccgccacccctgtgcgtgcctaccacaatccacacaccccagccgcccaactgggctgggcagcagccatatactccactccaccggccggtgcgcgcgtctcaggcctctccagttccccactctcgctctgatgagggacgcggtggtggtgatggcggtgcccggaggcggaggcgggggcggaggatcggcctcgtcggcggcggcggcgccgtgcgcggcctgcaagctgctgcggcgccggtgcgcggcgggctgcgtcttcgcgccctacttcccgcccggggagccgcacaagttcgccaacgtgcacaaggtcttcggggccagcaatgtcagcaagctgctccaggtatacagcagcctgcaccaccgtcaccaactcaccgttgtttgctttgccgcggaggtcactagactacagcatgtagccacgctgcgcacgaccgctttgcctgcggctacgaacagcgaaccatctgctacagcgcacgctctgcgcctgccgcaccgaagcgaagaaagaacgaggtccccagcagcggagcgcggcagctcagctcagctcacctatgcccatacggtcactcagacgcaaagactgtctgcgtctcaggagatcccggcgcagcaccgaggggacgcggtgagcagcctggtgtacgaggccaacgcgcgcgtcagggacccggtgtacggctgcgtgggcgccatctcgtcgctgcaggagcaggtggaggcgctgcaggcgcagctggcgctggcgcaggccgagatggtcaggctcaggatgaccaacgactacatcgtgcaccgcctcaaggcggccagcagggccggcggcgggggcagcagctacgccggctcgccctcgtccatgtcctcgcccaagacggcggagccggaggcgcactgcaaggccacgccggagctgctggacatggtcgtggaccagcccggcatggacgacgcccacttctggtcgtcctactag

SEQ ID NO: 26983 - DNA, 288 bp, Zea mays
  Peptide Sequence Number=SeqID_68762
atgggtgttgtctattaccaatataagagtgaaaaggaaatctgttctatgcccgtgccccatgcttttatttctgtgtctgaactcaagcagcttatcatgacgagcggtaggcacggccgtggtcgaacccgcggtcgtgccacagaggatattgtcatctccaacgcccaaactggcgaagtgtatgattgtgtaaaatttcatcgtagttgcctttactctgcaccacaacagatttcacagcctaataaaattgagaacatatctggtgcagttgacctttga

SEQ ID NO: 26984 - DNA, 975 bp, Zea mays
  Peptide Sequence Number=SeqID_68763
atgaccgcgtcaaaaaaggtgcgccacgtcattcgatttcgtatccttttccacttcctctttctctctcttgccacagggaccgggaaaggggatacttcgaaagggatccttctccgcgaaggaagcgggccccgagcccccctactgatcagaggttcgaaggctggcccctcggaagggttcaacaaccgcctcagagcactcgggctccgcgcccactactggtcagaggttcgaaggccggccccttggaagggttcaacgaccgcctcaggccactcgggctccgcgcccactactaatcaggggatcgtaggctggcccccgaagggttctgacagccgcctcagagcacgcagagcaagggatgaccctgggtacgttcgatacatagccaaggctcgggctacgctcccgagtcacttcgccgctccactgaccgacctgacaagaagacagcgccgcttgcgtcgctccgactgctgtgccactcgacagagtgaggctgacagcagccaagaccggcctcggggcgccataggaagctccgccttgcccgaccccagggctcgggcacagcctcggctccggaagacgacgaactccgcctcgcccgaccccagggctcggactcagcctcggctccggaagacgacgaactccacctcgcccgaccccagggctcggactcagcctcggctccggaagacgacgaactccgcctcgcctgaccctagggctcggactcagcctcggctccggaagacgacaaactccgcctcgcccgaccccagggttcggactcagccttggcctcggacgacggtctccgcctcgcccgacccggggctcggactcgacctcgacctcggaagacagactcgacctcgacctcggaggagcctccgcctcgcccgacccagggctcggaccgaccacgtcacaggggggccatcattaccctacccctag

SEQ ID NO: 26985 - DNA, 315 bp, Zea mays
  Peptide Sequence Number=SeqID_68764
atggcatggctgacggtcggagtcccattttgcagaaactggagttcaagttctgaataccaaaataatgtagaagtttttttcgagtatgtcgaagcagtaaagttgactggtgatctgagtgtccctgctggccagataacattccgtgcgaagattgggaagggcaagcggcttgagcatcggggcgtgtatccagaggaattcggtgtgattgccagttataaatgtcagggtagaatagctcagcctggattcaaaaatcctcgatgggtagatggtgagttattggtgctcaatggcaaggtagactga

SEQ ID NO: 26986 - DNA, 562 bp, Zea mays
  Peptide Sequence Number=SeqID_68765
atgcagggcagagaaatgaggactaagcgtactaacatcatctcaaagtcatgttcttccacagtagtgcaagatgaagatgctgtaattgcagcagtaattgatgctgctgaactcaaatgggaacagctcccctctaaaagaggacaagacagtggaaggtttacatcaagacgtaactatgggccgttggaaggggaaacacctccacccggctatgtctgccgctcttgtggtgttccaggccatttcattcaacactgctcacaggaaaacaagatgcctccacctggatacatttgctacagatgccgaattccagggcattttatccaccattgtccaagcattggcgatcccaagttcgacaacaataaaatgagtcggtctcttgtcccagtagttacacctgtcgatggcattttggattcacttgtcccgtctgccccagccggggctgttgatgacttgccagcagagctccactgccgactatgtaaaaaagtgatgagagatgcagtattgacaagcaagtgctgttttgacagtttttgtgatagat

SEQ ID NO: 26987 - DNA, 249 bp, Zea mays
  Peptide Sequence Number=SeqID_68766
atgaagctccgccggacgttgctcctcaccctactgctggtgctgtccaccgccgtgacgcccatcctctcgctgcctgcagacaacgtggtagcctgcgactgcgacaagcccaaagcgcccaagccgtcccagccgcgcccgcccaagaccaagccctcccacccgtcgccgaaacccgagaacccgaagccacccaagggcccggcgtgttggaactcactagcgctcaaacactcaagaacttga

SEQ ID NO: 26988 - DNA, 425 bp, Zea mays
  Peptide Sequence Number=SeqID_68767
atgatccgaccgtgctccgccccctcccctcccccgtcccagcctttggcaaccaccccgcccccacccttcggcggcgtcgcccacgagggcacgaggccgatccaccgccaacagcccgccaccgccaccacccgcctctgcgccgtcttgccgtccccgtcctcgccctcccgcgtgggctcgttcggcttcgacgcgctcaaggagaccttctccgtggacgtgtcggcgaccggcgcgcgcccgcttcgcgtcccgcttgtcgcgcccttcaccatcgcgtcctcgcgcctcgccgcgctctccaacgtcgtcgtgcgcgtcgatctccgcagcggcgccgtcggctggggcgaggcacccgtgctgccctccgtcaccgccggggaccagccgacagcgctcggagccgcgggccggac

SEQ ID NO: 26989 - DNA, 174 bp, Zea mays
  Peptide Sequence Number=SeqID_68768
atgtctgacgagaaaacagaagccgccaaggccaaggtacatcgcctgcttgaggccaaattcatcgagccaatcgcctaccctacatggctcgccaatgtagtgatgttagggttttcgcggcgcgcggaaaggccccacgtggccgcggcgcattacgggcctaatttgtaa

SEQ ID NO: 26990 - DNA, 480 bp, Zea mays
  Peptide Sequence Number=SeqID_68769
atggcggtggcaggcaggcagaagcagcggtcacgtcgtcagtcaagcttacgtcccatccgggggcagcgagagaaccctctctcacggcgtgaagacaacgcgcccgtgttccgttcctcgaacggctcgcgcacgcgcaacggctgccccgcgaaccactcgccccgtcgcattaactccgcagcgggacaggcggcgcctctgggaccgggaaagggggataccccggaaaggatccttccctgtgaaggaaccaggctccgagcctccctactgatcagaggttcgaaggctggcccctcggaagggttcaacagccgcctcagagcacgtgggctccacacccactactggtcagaggttcaaaggccggcccctcggaagggttcaacggccgcctcaggctactcgggctccgcgcccactactgatcaggggttcgaaggctggcccccgaagggttcacagccgccttag

SEQ ID NO: 26991 - DNA, 696 bp, Zea mays
  Peptide Sequence Number=SeqID_68770
atgccggagctgccggaggtggaggcggcgcgtcgggcgctgcaggcgcactgcgtggggaggcgcatcgcgcgctgcgccgtggcggacgacgccaaggtggtcgttgccgccgccggccgcgcggccttcgagcgggccatggtcggccggaccatcgtcgccgcgcgccggaggggcaagaacctctggctccagctcgacgcgccgcccttcccgtccttccagttcgggatggcaggcgcgatatatatcaaaggcattcctgtgacgaattataagaggcagcttgatgatggtttggagttctctttcactgataaacggcgctttgcaagagttcgtttgtttgaagatattttctcacccaagttatatttgcagcctgaaaccttacccccaatttctgagttaggcccagatgctctgtttgaaccaatgtccgtcgatagtttcttggactccctgggtagaaagaagatagggataaaagctcttctacttgatcagtcaagggatccatcccattacaaattgctttcaaatctacctagggaagagtttgtgaaaccactgcccccaaagtatccaaaaggtggggtcctaatggggactcccctatgtactggaatttacttttccacccgaatattggataagcattcccaaccttcctggaatcaagaaattttctag

SEQ ID NO: 26992 - DNA, 285 bp, Zea mays
  Peptide Sequence Number=SeqID_68771
atggcctacctcgtgctccagatggtggacctcgtcgccgtcttctcaggcaccgcctcccctgaggacgacggcaacggggacgccgccaaggccctcgagctcgcgcagatggtggtcggcctcgccgctggcgtgcactactacgcgcggtcttccaccatgccgcggcaggggctgcgccccgcgccaactggcgcgtgtacgcggcctgcttcgcaaatcttcgactacctcatcccaccgatggggatggacaaatgcagcgcgaatggacaagtgtag

SEQ ID NO: 26993 - DNA, 2943 bp, Zea mays
  Peptide Sequence Number=SeqID_68772
atgaccgtctttctccggaccaatatgcatcgtgactcaatatcagatggaaggatatacatgggtgccctgttctttggggtcctgatggtcatgttcaatggactggcagaagttggcctaactattgcaaagctcccagttttcttcaagcaaagggatcttctcttctaccctgcatggacatactccttaccatcatggatcattaagactcccctctccttgctcaatgtaacaatttgggttttcataacatactatgttattggatttgatcccaacgtagaaagacagttcctgctcctcttactaatgaacgaggcatcatcaggattgttccgtttcattgctgggcttgcaaggcatcaggttgttgcaagcacccttggttcattcggcattctgatatgtatgcttttgggtggattcctcctggcaagagagaatgtgaagaaatggtggatttgggggtactggatatcacccctgatgtatgcacaaaacgccatatcagtaaatgaattcctgggtagcagctggaataagcaagtaatccccggttcagcagaaccgcttggaaaactagttctagaatctcgtggactttttcctgaggcaaagtggtactggattggtgttggtgccttgcttggatatgtgctgctattcaatatactctacacaatctgcctcacattcctcaaaccatttgacagcaatcaaccgacaatttctgaggaggcattaaagataaaacacgcaaatctaactggtgaagttttagaagcatcatcgagaggacgggttgccagcactacaacaacaggtactttggacgagagcaatgatgaagcagcttccaaccatgcaacagtaaattctagtccagtcaacaaaggaatggtcctcccttttgtacctctctccatcacttttgatgatataagatacagtgtggacatgccagaggacgcaaacgtccgtcgaggagtagctgccgcatgggttgtactcgtctccgacgagcacgccgtagatgttggagctcgattgcgacagcaagcagcaggtcgccatgggacgagcatcagcgctgaggacctcggctaccgctgcacgccggagctcggctggggaggaagaccagcacagaggagcgaaggccctctactgctactgtggagctacgccggagaggacgaagaccagcaccgacgacctcaggcaatcagagcacaaggtgtcacagagacccggttggaactactgaagggtataagtggttcgtttaggccaggagtccttactgctcttatgggtgtcagtggtgctggcaagacaacactgatggatgtgttggctgggaggaagaccagtggatacattgtgggcaacattaccatatcaggttacccgaagaaacaagaaacttttgctcgtgtgtcaggatactgtgagcaaaatgatatccactcaccaaatgttaccgtctatgaatcccttgcattctccgcatggctcagattacctgctgatgttgattcctcaacaagaaagatgtttattgatgaggttatggagcttgtggagcttttacccttaaaagatgcattggtaggattgcctggtgtcagtggactatcaacagaacaaaggaaaaggctaaccatagctgttgagcttgttgctaatccttctataattttcatggatgaaccgacatctggacttgatgctcgagcagcagctattgtcatgagggcaataaggaatactgtggacacaggaagaacggttgtttgtaccattcaccaaccaagtatagatatatttgaatcttttgatgagctcttccttatgaaacgtggaggtgaagagatttatgtaggcccactagggatgcattcatgtgaactggtcaaatattttgagggcatcgaaggtgtcaacaagataaaagatggctacaacccctcgacatggatgctggaagtgactagtacaatgcaagagcagataactggtattaacttcagtgaagtatacaagaattcagaactgcacaggaggaataaaactttgataaaggagctaagcacgcctccagaaggttcaagtgacctatcctttccaaccgaatactcacaggctttcctcacacagtgtttggcttgcctgtggaagcaaagcatgtcatattggagaaaccctccatatactggtgtcaaatacttctacacgacagtgattgccctgttgtttggaacaatgttctggggtgtgggcagaaaaagggatagtcaacaggacctgttcaatgccattggttccatggaaagggcggctcatatgtactcgccattgccgtatgccttgggacaggtcgtaatcgaactcccatacatctttgttcagtccttaatatatggcgtgctggtgtatgctatgatcgggtttgaatggacagctgacaagttcttttggtacctcttcttcatgtatttcaccctagcatactacacgttctacgggatgatggtggttggcctgactccgaactacaacgtctcctccgttgcttccacggcgttctatgccatttggaacctcttctcgggattcttaataccaagaactagaattccagtctggtggagatggttctactggatttgccccatcgcatggacgctcaacgggctggtcacttcacagtttggagatgtaaccgagacgttcagtgacggtggggtgcgtatatctgacttcgttgaggactactttgggtaccatcacgacttgctgtgggtggtcgctgtggtggtggtcgcgtttcctgtgctctttgccttgctctttggcctctcgctcaagatattcaacttccaaaagagcgtattcgttgatcagagcttctcaagctccagacaaattgtgtag

SEQ ID NO: 26994 - DNA, 135 bp, Zea mays
  Peptide Sequence Number=SeqID_68773
atggcgctcaacgaggaacggtcaaccgagctggggagaggcacgataatggcggtgagggaagcggctcggtggttacagcgtaagagatacagcgctgacaaaccaggaccacgcgacaacgagctgagttga

SEQ ID NO: 26995 - DNA, 1581 bp, Zea mays
  Peptide Sequence Number=SeqID_68774
atggtttccgggaatgcaactcttcagtgtatcactcacactgtaccactttttctcaagctttgctcaaatgatcatttcactccatgctcattttgcatgatccgaactactgttaacctgcagataatgaggatgggttctgttctttctgtgcccttaaagaacatgttgacgaatcaattcgaagagttatctttggattttacaccaggacagcaagaagatgcacatgaattcctacgttgcttgctcgataacttgcatgagtgtactcttgatcccaagtcaaagagcaagggctcatcctttgaagaagaaagtatagtcaaggagatttttggaggccaactgaaaagccatttatcttgttgcgagtgcggtcacagctcagagacatttgagcccttcctggatctaagtttggagattgatcaggttgatcacctggtagatgctttgcaatcttttaccaaggtagagcaggttggggactctgaaaacaagctcacctgtgaaagttgcaatgctcgagtttgtaagaataagcagcttacactttatagagcaccagatgttattgcatttcatctcaagcgttttacaacccttgacaattctgttaagaagattgacaaatatgtggcataccctcttgaggttgatttgaagccatttcacagcaacccagagactgtgggggaactgaaatatgatctttatggtgttgttgagcattctggattacccaactatggccattatgtctgcaccattcgttcttcaccaagtacatggtacttgatgaatgactccaacgttgattctattactgattcaagtgcattaaaccaggaagcatatattctgttctatgttaggcagggcaaatttccatggttctcgagtttgttagaaggcaaggttgtcctacaagctgagaatacctgtggaacatctcctgtgtcagttttggaaaatatagatgtaaactgttcaacttcttcaggaggaggcagtagcagtagttctggtgataagttagagaaaaatgaagccagccaattagaagagacaaagaaagatgaaacgagtcagtacaaaacgtcattccttcccgacgagccatctaagagttcttttggtgcttctaacagcaataatgcaatggatgaagataatccacccagggtttctttccaaaattctgtggctagttgttcccgcagtgtagaaaccaccaatctcgagaagccttctactccacggtgctcccagcgactggcctctcatgatgagtttagtgtgtttgagtttgaggactttgatgaggaaaaggagactttacttccaaaattgaaatttccatcgaaggtgaagaaagctaactctgcatctagagctatgaagggtcgttgcattgatcagaatgcagtccgtttgatgaggagcatgacatccacacgaagaaaaggtttaatagactgcatagcacagcaaactgcaaagcatgagtctaatagatgccctgcaagtgatcctctggacaaaaagaaaaggaagctggttcttcagtactag

SEQ ID NO: 26996 - DNA, 909 bp, Zea mays
  Peptide Sequence Number=SeqID_68775
atggcgagggatgacgggttcccggtgtgggaagcggcgctgctcgctggcgtggctgccgtcttcgctgcggggctggctggcgtctacatctccatgcctcgctccgactacagcttcctcaagctcccccgcaacctccaggagctccaagtcctcactgtccatctggagggctacagcagtgactacaccatccaggtgctggtgggctactgtgccgtgtacatattcatgcagacgttcatgatcccagggaccattttcatgtccctgcttgccggggccctctttgggcagctcggtggtctagccctggtgatctttgctgccactgccggtgcttcttcctgttatttcctgtccaagctagtagggaaaccactggtcttctcgttgtggccagacaagctcacgttcttccaaaagcaggttgcaaaaagaagagagaagctgctgaattacatgcttttcctgagagtcactccaacactgcccaatactttcatcaatttttcttcacctatagtgggtgtgccataccatactttcttctttgcgacggccattggcctcgtcccagctgcctatgtgactgtcagggtattccagcttctaatgtacccgttccatcagtttagtgcatctggtgcgttgcgtgtggtctgtggagattttgcgtttgttcggacacggccagagcccagagctggccccaggaggttggatgctggatgcatgtgtattgtcgtattggagggcatcgagggacatctaatttcttcggtgaagctgaaacctggagtcatactaaacacctctatacgcgtgaagctgagaaatgaatcaatgaagacacaagaaattaatcgacaccattgtgttctcactggtacgaattcaagctga

SEQ ID NO: 26997 - DNA, 174 bp, Zea mays
  Peptide Sequence Number=SeqID_68776
gttcttagtattgtgaaagcatctcatgttcctaggaagattatcatggtgttaaatgataatgctggctttcgtgaagatgctggttgccaagttctggagcaaagaggaccattgcaatccgagatggaccagatgtcaggaatcaaacaccctcttggcaacacaaagtaa

SEQ ID NO: 26998 - DNA, 699 bp, Zea mays
  Peptide Sequence Number=SeqID_68777
atgtcgttttctgctcgtgttcctcgcagccgctcagtggaaattttctcaatggtcagagagggtcaagttggtggacttgcaccccacggaggcatggatgttgagcctgtactcgaggagtgcctgcatccgggattatcacacacaggtctacctatatggtatataaaaattgggtctttagttaatcctggatccgccactgtagacaaggacaatgatgatgaggagaggggacgccatacatcaaagatgactaaagaagaggaagatgaagaatacctcgaagaggaagaagatgcccttgctggtgcaggggggaacacatttagtttcacaaccttcatgctcttaacccctctgatcctggtgcgtggcagattagactccgatggggaagtcactagcgaggtggatcaagttcgtgctcttcaggaagaagtcgtcatccaggtccagctccaccaaggccaagaatttatcgataagaatgctgttacgatttcaagtgtgagtaacaaaggggaaactgctgccaggaaggagcccacgttctctgagagctctccagtgatctcagagcttgtgcttgttagcgcccataacaacgagatcatgcgggaggtggcaaagggtgaaaattctagcgtgcaagaagtgctagtgactgatgtcagtcaagacttggagaagcag

SEQ ID NO: 26999 - DNA, 303 bp, Zea mays
  Peptide Sequence Number=SeqID_68778
atgttggtctgggatatcaggttgcagcaccagtccatcgaccaaatcccagataagcagatattctgtaatgaccggtaccgctttagatacaaaagggatgttctcttctgctatgacctccaacttcctgctgattttgttcctaataatgaagatggtgaggttgatagcttcagactagtccctgttatacatgctgcaaacattataaggaggacagattttttcaagccgaactgcaaccttgtgatcatcgacttcctcttccgtcatgggtactatatgcatatagcattgaga

SEQ ID NO: 27000 - DNA, 126 bp, Zea mays
  Peptide Sequence Number=SeqID_68779
atggtctcccattccggttatggtggatacaagtgcggtcactgcacgacggcagtcggggtcagtgaggcattgtacgccaaggcgataatgagcctgcttgatccattgtactgcattgagtaa

SEQ ID NO: 27001 - DNA, 1710 bp, Zea mays
  Peptide Sequence Number=SeqID_68780
atggatcagtacgaggtgctggagcagatcggcaaaggagcatttggctctgccctgctggtcaggcacaagctggagaggaagaagtatgtgttgaaaaagatccgtcttgcgcgtcagacagaccgcactcgccggtccgcccaccaagagatgcagctcattgctaatgtgaggaatccattcattgtggagcacaaggattcatgggtggataagggttgctacgtctgcattgttatagggtactgcgagggaggagacatggctgaagctattaaaagggctaatgatacccacttttctgaggagaagctttgccagtggctagtgcagcttctcatggcccttgactatttgcatgcacatcacattcttcaccgtgatgtgaagtgctcgaatatatttctcactagggaccaaaacataagactcggtgactttggtctcgcaaaaatattgaccgccgatgatttggcattctcgattgtaggaacaccaagttacatgtgcccagaactcctcgccgatataccttatggtaccaaatctgacatttggtcactaggatgctgcatgtatgaaatggctgcgctcaaacctgcttttagagcttttgtgagttctgaaaatgcttttattgactgcttatctgctgtctgtgcacgatatttgattaaatggttaagtactaaagtaacttcacgatatgcaaaaccttatcaacaagattaccaagtcgatagtatcacctttgccaacaagatattctggtgcattccgtacgtcctgcaactccatctgaagtcacacctttctcgcagcatagttcctgttcaccagtctccaagcgagaagaggatgacattcgccgcagagcccgtttgcagaagcaagggcaggaggaactctttaggcagcgaaaggatgatagcagcctttagcaaaccttctcctgatagaagttctgtcagctctattcggagtgtcaaggacgactacaccgccacacagagtgtcagagagctatcggttgatgaaagcatggtcgaggttgctagtaaacccgtggcatcaaggacctcagatgtcatgaggactccgaaggcgactccgtggaagatgatgacgactctgaggaatcggctagaagctccacaagcatcatatgacagaacgagtcatacagagttttcaagaacaccggttgacaagaggaacagccgcgtggcccgcagagcatcgcttcctctgcccgtatttgagaccccgaagcagcgcagcagcatgagcgtcctggagcggctggagtcccccgacgtctccgtgaactcgcctcgcatcgacagaatcgccgagtttccgctagcttcgtgcgaggaccccttgttctcgaccgtgaagccaccgacacccgccagcgccagcgccagcgccacgcctccgtttcgtggaccggtccatcaccaaggacaagtgcacggcccagacgctccgccgaaggggcggttcgacacgacgtcgtaccagcagcgcgcggaggcgctggagggcctgctggagttcagcgcgcagctgctgcagcaggagcggtacgaggagctcggggtcctgctgaggccgttcggccccgacgagatggtgtcccccagggagacggccatctggctcaccaagagcttcaaggaggcgatggccacgggcttgtag

SEQ ID NO: 27002 - DNA, 264 bp, Zea mays
  Peptide Sequence Number=SeqID_68781
atggctgagtcgcgcagggaggagcacgatgggctgccgagctcgcgttgtgggtgggagagtgggttagcggctaacccccttaacagaagcgttgatatacacttggtgaagatgctgcagactctgatcttgactgatttggaggagttggaggttaccaaatggacaggtgcaagaagaaagaatagtgagaaaagggaaactgctctaaggccatcgaaaggcaaggggaataataagacatacagaataggggcatga

SEQ ID NO: 27003 - DNA, 273 bp, Zea mays
  Peptide Sequence Number=SeqID_68782
atggcgcgccgccgtgttatcccctgtgcgccgtcgcggctcgggctgggagatagtaaggcgccgctagtgggaggtagtgagagaaacccgccaccatggaaccgaggagagggaagcattgggtgccgctgttgggcaacccttctgcgtagtcgttcggagccttggggctgtgccatggagcgcgagctggcggggatcgtcgggcggaccgagcccctggtcggcggacaccgcagtaggcgggtagcgaccgctgctctatcccgc

SEQ ID NO: 27004 - DNA, 348 bp, Zea mays
  Peptide Sequence Number=SeqID_68783
atggaggcaagaagagcttcgaggtaccaagtgcacaggagaaggtcaaagaggttgaggaacccaaagccaagggtgaagaagaagacttgcaaagtcaaggatctgagcaaacggtggaaggagttgaaacagactccaagcccaggacattttgagacaggatcttctattccgctgcaacctactcgaagggtcttcactccactgcgttctagtcttcgagtagaatgtttaatatttttggatacgggtgatccgaaaaatgactcatacccgtatgggtatgggtatgaggttaaatctatatgggtgacttacggggttatatttttgaaagggaattag

SEQ ID NO: 27005 - DNA, 297 bp, Zea mays
  Peptide Sequence Number=SeqID_68784
atggccatggagaaaatggagctgctgtgtcatgccatggacatggacctcgccgaggtcgacccaaggagctcctgcgcgcagggtagaaatgctccctgccgcagccgctctctagggggaggagcaggaggaagaggggcgcctgcagctgcgcgctggggaagagggaggaagaaggggagtcggctggagcaggcctgcgggagggagaaggaggaaaggcaccatgggaggaaggtaggaagctccctgcatgtcgccatgtgggaggaggagtgtgcgctgcttttgtga

SEQ ID NO: 27006 - DNA, 231 bp, Zea mays
  Peptide Sequence Number=SeqID_68785
atggctcaggatgcaaaagtcaccatcatcaacgtggaagatctcgtggtggatctatctactgaattagtggagaagtatctccagactgagcagatgggtaccctaatccatgagctagaagagcaagtggacgaatggagccacaccattgaggttctggaaaaccagcttcagaatacccagcaacatctcgaggaggcgaacgagcacctattcatgcatcactag

SEQ ID NO: 27007 - DNA, 180 bp, Zea mays
  Peptide Sequence Number=SeqID_68786
atggagagagcaacatcggtcaccaagctacgaaactccatacaccccatcgcaactgtccatcccagatccaacgacaacgagcagcccgtggttcccgagtgtattgacaaagatcttcaagagcaacaacctggtgaaggcaagtgtcctctgacctattatgtcctacttacttaa

SEQ ID NO: 27008 - DNA, 426 bp, Zea mays
  Peptide Sequence Number=SeqID_68787
atgggtgtgccgcgcgcttgctcccaccgaaccgttggccccacttgccagccgtatgacctgctcgtctccgtcttctccgctcgaacggaccgcgggcgaaccgcgcgtgattcgcgcacgccgtctgctatgcgccaggatcttcccggtgtgtacggctttgggcgtgataggacttctcgtcgatgtggccgggactcatgcgccggtaaccccgaccacgaccgccgccacggtcctccatcctgcacgccgttggtggccacctgggagcgttcgtcgcgtgggtgctctgcacctgggcgtggttgctgtgtgatccgtggcagtgggcagggccgggttggtcgccatggtgcgctcaactgggaggagcagcgccacaccatcgatccttcatgtcttcgctacctcgggtggtaa

SEQ ID NO: 27009 - DNA, 696 bp, Zea mays
  Peptide Sequence Number=SeqID_68788
atggaggtgaagtttaccggtaataatgggttggtgaaggcggttcacggagcaaggcgagatcgcggcgtgataggattccggcgaggaattctgctcgtcccgggctccaattcacatcggggcggtgacgatttcacaccagggaacacttcgaaggtctctgggctagcctcgcgcttcaatctgctacacaggcgaagagcagatgtggcgactctccttctctctcttcgcagtgctggcacggtagtttggataggcgcggtcaagggtgtccagccctactgtaaccctctgaatttgggccgcgcgcgggtgccccctctccatgacaggtgggtcccacctgtcagtgtcaaccgcgtccgcgcgctctccctctgcccgccctgcccgcactcgctctccctccccagccttatttcgcccacgctcgccctctctcgcgctctgtcgccgatgccaaagcccgctggagatctgcgcccgtcgtgccagtcgtccaagccgctcggagccatccccgctagtgtgttcgccgagtcctcctcaccagttctagccaaccccggcaaccccagacccccggaggcagctcttgccagtcctgatccagcggtccggatctctggataccacttcaggcacgcgccctgcccctgggccccacccgtcagttgcctgcgcccctag

SEQ ID NO: 27010 - DNA, 189 bp, Zea mays
  Peptide Sequence Number=SeqID_68789
atgcctacagggcaaggatatcatgatttgaacaagcaggggaaagtcaagaagcaagctggccttcccgagtacgagtatgggttcgttggatcattctattctatgtcaattggaagttgcatttcagactctggaagccccgttccttctccttttaaggtaaggaaacttgaaatctcgaactag

SEQ ID NO: 27011 - DNA, 333 bp, Zea mays
  Peptide Sequence Number=SeqID_68790
atgggcaagagcaagaaaggcgggagttcttcgcatcactccggcgataacggaaacgggctcgccgcagaggtgtggacctacatccgggccgtcgagcatgccaggctcgagggttcggatgagtcggagtactcctcgaacgaggagggcggcggcgacggcgatggcgaggacgacgacggaggcgatggcgatggcggcggtgacggcggcgaaggtgacggcaagggcggcgacggcggcggcaagggtggcagcggcgacggcggcgatggaagcaagggcagcagcaagggcggcagcaagggtaggaacaaggccagtggctag

SEQ ID NO: 27012 - DNA, 396 bp, Zea mays
  Peptide Sequence Number=SeqID_68791
atggcgcgggatggggccggtgaaaattccttaccggtgtttggagatccgccgttgacgctctgcaccgttgccagaaattttggtgccatacacgccggggcatatcatcattggattggggattggagcactagagcctcctggttggatgacgccgccatgggctgggtgacgctgctcgtgggcaagatggtaccgttgccgtccatatggggttggacatctgggattaaatgcagactcttccttcgtcttagcgccgagcgaccatccgatgctgagaggactggtgagattaggggcgtgttcgccacacttttaagctacacatgtggcggtcgatttggccgccatatctgtggtttaaaagtatggcgcgatgtggtggtttag

SEQ ID NO: 27013 - DNA, 180 bp, Zea mays
  Peptide Sequence Number=SeqID_68792
atggcgcgacccctctgcctagctcggtcatgccgttgggaggaggatctgacgagttcgacccccgtgtcagtgaaagtgaatgacgaggcaggcccacgtgacagcgacaccagcaaaacggtgtggaaaaggatgacgggctgcgtggtggaattccaggatgggccgatttggtag

SEQ ID NO: 27014 - DNA, 1497 bp, Zea mays
  Peptide Sequence Number=SeqID_68793
atgcatggacgacagtcgtcgtggcccaaggccaagacggcggtgaagagatggctgaacctcaagtcccattccgactgcatcgataggagctttgggcttgggctggtggagagctctgctgacgggtatggcggctccccgtccccgccggggccgacctcgtcgcggcggcatcccaaggaactcagcatcttcgttgggacatggaacgttggagggcgagcggcgcacggagggctggatctctcggactggctcgctgacgacggccttggtggtggttcctcctctcctcacatctacgttctcgggttccaggagatcgtgccgctgaacgccgggaacgtgctcggtgccgaggacaagggcccggcgcgcaagtggctggacctcatccgacgagcgctgaaccaccatccagcagcgtcgccgtcgagcagcagcagcagatggcgcaggtctccgtcgcgtgacatgcacttgctccggaaaggcggccgggtgagcttctcggacctgctggcggcggaggaggacggcagccgcaggccgagcacggcgtcgtcggagccggacgacggcagcgaagcgtcgagcccgtcgtctagcagcgaggaggagccggcgtgcgcgccggcgccggccccgctgccccgcggaggacgacaccgccaccacgaccgctaccgcctggcggccagcaagcagatggtgggcatcctgctgtgcgtctgggtccgcgccgacctcctcccacgcgtcgcccgcgtcagggcgtcgtgcgtcggcaggggcgtcatgggctacatgggcaacaagggctccgtgtccgtcagcctcacgctgcgccccggcgttggcgggggacggggcgcgtcgctgtgcttcgtgtgcacgcatctcgcatccggtgacagggacagcgacggcgctaggcgcaacggcgacgtggcggagatcctcaggcggacgagcaacgtgatatggctgggcgacctcaactaccggctggtggcgccggcgggcggaggaagaggaggcacgcggacgcaggagctggtggaacgacacgattgggcggcgctgctggagcgggaccagctgcgggcggagcagaaggctgggcgcgtgttcgccgggtgggaggaaggccgcatcgggttcccgcccacgtacaagttcgtggccggctccgacgcctatgccatgacgagcctcgtcgacgacggctccctgtctcgggagaggaagaagcgcacgccggcatggtgcgaccgcatcttgtggcgcggcgagggggtggagcagcggtggtacgcgcgcggcgagtcgtgcttctcggaccaccgccccgtcgccgcgttcttcttcgcgcgcctgggcggcggggactacgacggagcagagcgcgcggtgggggctggcagacgagacgacgacgactacgacattctccttgggaactctgatccaacgcgcaagctttctttctga

SEQ ID NO: 27015 - DNA, 420 bp, Zea mays
  Peptide Sequence Number=SeqID_68794
atgtccggtggtgcaccggacactgtccggtggtacaccggacagtccgcacaggaggccgccgatgttgaagccaagctgttgcggttgcagcttgctgaggccgaaggtcgcgttgctgccttggaagtggagctcaagatgatgctccaccgctcaggccagcttttggattacattggggcccatggtgcctctttgatcaagtgcctggataatgcctcatgtcacgttcgagacattgcagacttcgacactcatcgtgctcatggcagaggtctacttgggctgcaaccttcaggatctcgttggtccctcttggatgaagggttggaggacctactgcacggctacaacgacgtagccagccgtgtcattcttagggtgtctactcaggacgtcgtccgcgttgcacactaa

SEQ ID NO: 27016 - DNA, 486 bp, Zea mays
  Peptide Sequence Number=SeqID_68795
atggccccccctgtgacgcggtcggtccgagccctaggtcgggcgaggcggaggctcctccgaggtcgaggtcgagtctgtctttcgaggtcgaggtcgagtccgagccctgggtcgggcaaggtggagaccgtcttccgaggtcgaggtcgagtccgagccctgggtcgggcgaggcagagaccgtcttccgaggccgaggctgtgtctgagccctggggtcgggcgaggcggagtccgttgtctagcgtcgaggttgagtccgagccctggggtcgggcgaggcggagcttcctatggcgcccgaggctggatttagctgctgtcagcctcactctgtcgagtggcacagcagtcggagcgatgcaggcgacactgttttcttgtcaggtcggtcagtggagcggcaaagtgactgcggtcactttagctctgtcgactgaagagcgcgtgtcaggacaaggagtcagacgatccttgcattaa

SEQ ID NO: 27017 - DNA, 237 bp, Zea mays
  Peptide Sequence Number=SeqID_68796
atgggtaaagtgtgcaacctctgcagagtgttagaaactagtatatcagccgagctcacggttaatagtggccttgggtcctctttgattaaaagaactttggttacttttataatgatggttaataatgatggttataattttgatcactggtatttcctcttggaggagtgcttaggaggagatactggcaacatggaggactttgaggagtttgaggactacgacgagttctag

SEQ ID NO: 27018 - DNA, 170 bp, Zea mays
  Peptide Sequence Number=SeqID_68797
gttggatgctggggcaggaaggcgaggttcctggttgctcagacaatgatactgatttcctccctactggttgttctgacggtactactgctgctactgccgagaaaactgtgtctggtattgctggtgctggttctggcgaggatgctggtgctggtgaccttgtttga

SEQ ID NO: 27019 - DNA, 162 bp, Zea mays
  Peptide Sequence Number=SeqID_68798
atgggggctcggtggatgcggctcgctctgccgagggtggattgcccgttggggaggagtatggtgatgacgaggatgatggtttttgattatgattatggtaatggtttctggtattctttccgtttggaagagtacttttgggttaacaacttgggttaa

SEQ ID NO: 27020 - DNA, 165 bp, Zea mays
  Peptide Sequence Number=SeqID_68799
atggccctgctgaaagtctgtgtcaacttgctctatagcatactgggagagatggttgaatttggcaaggttgaacagctacaaagtttgcccaccgggtactggcgggacctctcagttgctgagaagcaaatagaggcttctaggtctctgtacattgaataa

SEQ ID NO: 27021 - DNA, 960 bp, Zea mays
  Peptide Sequence Number=SeqID_68800
atggaggaagtggaggaggcgaacagggaagccgtggagagctgccgcagggtgctagccttgctctcccatccgcatgaccccgcgcaggtcaggagcatagctctggggacggacgaagcatgcaccaagtttaggaaggtggtctccctgctcagcaatggagaagtaggaacaggagaagccggaccatcaggcacaagcgcaagcgcaagccatcctagagctaagcttgttagcagaagacagaatccagggttcttgactcagaaaggcttcctggacagtaacaccccggtcgtggtgctgaacagcgccgcccatccttctccgacctccgcgcaggtgcatccaagagccggagcattggatacggagggcgtgcaccccctcggagttggaggacctcccaagctggtccagcctttgtccgcgcattttcagttcggcaatgtgtcgtcgaggtatcagcagttaccgagtcatcatcatcgtcatcagcagcaggagaagctgcaggccgccgagatgttcaagagaagcaacagcgggataaacctgaagttcgagagcgccagcggcacgggtacaatgtcgtcggcgaggtccttcctgtcgtctctgagcatggatggcagcgtggtggctagcctggatggcaagctgccgtcgtcgtcgtcatcgttccgtttgatcggtgcgcctgcaatgagcgatccggcgaacgccgcgcagcaggccccgaggcggcggtgcacgggccgcgggaaggacgggactggcaagtgcgctttggcgggcagtaagaagttgcgggtgaagaggtcgattaaggttcctgccgttagtaacaagatcgctgatatacctccggatgagtactcgtggaggaagtatgggcagaagccgatcaagggttcccctcatcctaggtatggactgaacactgaagtagtatga

SEQ ID NO: 27022 - DNA, 807 bp, Zea mays
  Peptide Sequence Number=SeqID_68801
atggccgtggcgtcggccgcgacgctggtggccgcgcagtgcgtggaggcggccgaggccatgggcgccgagcgggagcacctggaggccgccgtcgggtcggccgtgagcgtccggacgccgggggacatcgtcaccgtcaccgccgccgccgccaccgcgttgagaggcgccgcgacgctgaaggcgagggctctcaaggaggtgtggaacatcgcggcggtgatcccggtggagaagggcccgggcccggtcggcggaggaggaggaggccaccaccaccaacaccaccagaagcacggcgcgcccaagcagcagctgcaccgcaagatggatagcgacggcagcagcgtcagcgacctctcgctggaggaggagaacagcttccttggcatctgcagccaggagctgcttgctcgcggcaccgaactcctcaaacgcacccggaaaggcgctctgcactggaaggtcgtgtcggtgtacatcaaccggatgggcctggtgatgctgaagacgaagagccggcacgtggcagggacgatcacgaagaagaagaaaactgacgagcgtgtccgtcactgtcgctgttgccgtgcaggtgtggtggtcgaggtgtgcagggacgtgccggcgtggcccgggcggcacctgctggaggacggcgggcaccggcggtacttcggcctgcgcacggcggagcggcgggtggtcgagttcgagtgccgcagccagcgggagtacgagatgtggaccaagggcgtggcgcggctcctgagcgtggccgccgagcggaagcgcctggcgtga

SEQ ID NO: 27023 - DNA, 282 bp, Zea mays
  Peptide Sequence Number=SeqID_68802
atggcgaccaacccctccaacggcgccggcgccgacgtccctgcagccccggcggcggctaagttcagcgtggaggtgcctacttccatcattcacgagtgctaccaatccacgctacaggagtacgacaaacgtgttaaggtatcactttctgcgcaaactggctgcaaacacgtggacgagcacacccatatgaaatttcgaaacgcattattggttcctttatatgacagcgaggttgggtatgttggaaacaattcctggcacagcaatgcattttaa

SEQ ID NO: 27024 - DNA, 120 bp, Zea mays
  Peptide Sequence Number=SeqID_68803
atgggccagcccgccatcgcgggagctcacgctctgtcgctgctgattgacgggaggtggaagaagcacgagggcgcgagtcgtctgagatcatcccggtacctaaaatctcaagtccag

SEQ ID NO: 27025 - DNA, 186 bp, Zea mays
  Peptide Sequence Number=SeqID_68804
atggagaagcaagcggctgccgaagcatccagaggtcgtggcgcaacacttgaatgctccacagattgcccagtgtctgtggttcacgtggtcaacgacggcgggcctgtgatttcccccaacgcgcacggtgtgcaggcggctgagggtttggatgtcatgagcacattattacattgctattga

SEQ ID NO: 27026 - DNA, 207 bp, Zea mays
  Peptide Sequence Number=SeqID_68805
atggctccctcatctcatgtgctccacctcatcgtgctcagtgtcgacctcacgcagtggcgccaaccagatctacgcaaactcagcctcatcgtcgaaacccaggtgagggcaaccaacgatttatgcagcctcggcgcgccgtcgtcaaaccatgccccatttcgtcgtcgtgcttcacgctttgcccgttcgacaaaatgttga

SEQ ID NO: 27027 - DNA, 222 bp, Zea mays
  Peptide Sequence Number=SeqID_68806
atggatgaagctaatcaggctccagccgtggagtccttctactgcgctgagaaccgacaattgcccgccgtgagcgccaccatgggtcagcccgccactgcgggagctcacgctctgtcgctgctgattgacgggaggtggaagaaggtatccctggccgttggatcggcagcaatggtccatattagaggtggaatgccggtttgggttgatggagcctag

SEQ ID NO: 27028 - DNA, 351 bp, Zea mays
  Peptide Sequence Number=SeqID_68807
atggcatggggccagggagattcgccatgcagctctggactcggccgtgaccttgtgagcggtggtgatcggtctgtgttggctgaatcgctcatcggagcatggtcaccgtcgtgtgcccgcctatcaccgtggacagggatctgcattgtgttgctgcctcctagacgacttggtggtgactccgtcgagctcttcaagaagtattatgaagaagtcgtggaggagattgtgagagtcggtatccttgatcttacaccgtcggacatcgctcgcaagagggtcgagagcaaagcatgtctagagtggaggacagggccagccagcgcgacctatgggggagcagtgtaa

SEQ ID NO: 27029 - DNA, 193 bp, Zea mays
  Peptide Sequence Number=SeqID_68808
catggtcaccgtcgcgtgcccgcctgtcaccgtggacatggatttgcattgcttgagctccgaattagagcgcctgggccgcggggcaatgctcgctagcgtggcatggccgtcggccgtcgcgcgccaccgcgcgatgatagtcggtgtggttagaaggggcgacgatcagggaccatttgatcttgatcag

SEQ ID NO: 27030 - DNA, 966 bp, Zea mays
  Peptide Sequence Number=SeqID_68809
atggggtcggcggcttggctggcaacgacagtcgtcttggcggcgctcgcggccgccgcctcctcggtggcggtggcgcacgcctggccaccaccggcggaactggaggtcggcttctacaagcactcgtgcccgcaggccgaggagatcgtgcgcaacgccgtccagcgcggcctggcccgggattcgggcgtcggcgcggggctcgtccgcatgcacttccacgactgcttcgtgcgcggctgcgacggctccatcctcctggactccatgccgggcaacgtggccgagaaggactccgtggcgaacaaccccagcatgcgcggcttcgacgtggtggacgacgccaaggccgtcctcgaggcgcactgcccgcgcaccgtctcctgcgccgacgtcgtggcgttcgcggcccacgacggcgcccacctcgccggcggcatcgactacgccgtcccctcgggccgccgcgacggccgcgtgtcccgagccgacgaggtgctcgtcgacaacgtcccggccccgaccgacgacgtcgccgagctcgtcgagagcttccggcgcaaggggctctccgccgacgacatggtcacgctctccggcgcgcacaccatcggtcgctctcaactgctcctccttcacgtagcgcctctacaacttcagcggccagctgggggcggaccgacccgtccctcgacccggcctacgccgagcaccttaggcaccgctgcccgtggccgtccagcgacggccagatggaccccaccgtgggtcctcttcgtctccgacagtacgctgctccacaacccctggacggccgggatcgtccacttcaacgccgcggtcgacaaggcgtggcaggtcaagttcgcccaggccatggtcaagatgggcaaggtccaggtgctcaccggcgacgagggagagatcagagagaagtgcttcgtcgtcaacccacactactag

SEQ ID NO: 27031 - DNA, 429 bp, Zea mays
  Peptide Sequence Number=SeqID_68810
atgacggcggcacaaaaatctcccttggcatgcacttcacgcccgggtgatgatggtggcttcgagttgtcgacgcagcctgatatggggtcacggatctcggcgactgcctctttctctccctccctccgagccgccaacctacccagccgccggcttctccccggcgccggccaccctgctcccatggcgcacctcccccacaccggtgctaacgctgccaccagtccgggtgcgagcgccgccacggctctgcccgcggacgccgcctccctgcccgcgacccccttcctggccaccgcccacgtcgtcattcccctgagcgcggccccctctatgcccgcctcactaggcgcggccgaccctctagccgccgtgcagacagctggcctcaccactgtgatggccgccctgggcgcgaccctatag

SEQ ID NO: 27032 - DNA, 231 bp, Zea mays
  Peptide Sequence Number=SeqID_68811
atggcgaatgcgagggatgagatcttactgacagcgtcatcgcagaggacccggtcgacgatggtctgtggctccgcggcggcgcaccagccacgacaagcaattccggcagtccggatcacggcttcgcacgagaaggccacggtcgagttacgcgcggtatggcgaagctccctggcccagatccaaggcccgaacggctacccaggcgagctcccgcggcggcggtag

SEQ ID NO: 27033 - DNA, 399 bp, Zea mays
  Peptide Sequence Number=SeqID_68812
atggcgctgccatctacctcagattttgcccttacccttgctctagagaaccagacctgctccctgctggctgagctagacaagcgtatccagtccatggatagcaagtgggagttgcaggtgtccgtcctggagaacacggtgacaaatgcagccagatccgtcaccaaattttccactaccctccgcgtcgatgtggaggcccatctcatagcctcggatgccgctatagaggggcgtctgcaccacttcgaagcagagactggcaaccgcatcgtcgctctcgagtccgcgatgcagatgttcgacttttggcgtccccgagtggactcctccatcgactcgctccagtcgaacatggactggatgcgcgccaagatcgccaagatggatgcttag

SEQ ID NO: 27034 - DNA, 369 bp, Zea mays
  Peptide Sequence Number=SeqID_68813
atggcgcgtagcctgtggccctcgtgcgcggtgtgcgtgtccgcggcacggtcggccccctgtgcggtcgggccccggcgtggcgcggccccccgcaacctgctcggtccggctcgtccccggcgcggcatggtcagcccctggcgccgccctgctgcctgcgcgcggcgtgcccgacatggcctgcccacggcgtggtgcccctgcgcacggcgtgacctctcccctgctcgaggcacgcagcgcggtggtggcgaggatgatgtttatgactatggtaatggttgtccgcattgcaaccactactccggagaagatgaagccgtggaaggagacttccaggagttccaagattacgacgagttctag

SEQ ID NO: 27035 - DNA, 216 bp, Zea mays
  Peptide Sequence Number=SeqID_68814
atggccgagcagaggaactccggccgggcgagcgggagagagaacgcgaggtctaccaggggaaaagtagggagcgagcagggcgcgtcagagagctcagcacgcggcagggaagagggaggagcagggagcttgggcgcgccagcagaagtgcggacacggtgcagcaggcgttggggcgtgcagcgcgatggaaggaagtcggagatggcatga

SEQ ID NO: 27036 - DNA, 156 bp, Zea mays
  Peptide Sequence Number=SeqID_68815
atgcagattattgaaagaaagtgtgaggctcaaaagggtgctgggacaagggagatcctctgtggtaggctcgggagctggctattggacttcctcttggacagatcctttctcgggaatgagcatgtactctccgtcagcgaggttgcaatctaa

SEQ ID NO: 27037 - DNA, 609 bp, Zea mays
  Peptide Sequence Number=SeqID_68816
atggtgggagggtggctgaaaattttcagcctacatgactacctgtttgaggagagtgtttgcctccttctgagggcagcttggtttgaacctctgatcgtagaggctcacgaggaggctctggaagaagaagagtttctccaccagcagtaccaatacgatgatgacgaagatgatcttgacgaggaatcttattacatgaacaggtccccaagcatccgtattggtaacaggagatggggtgacaatgggtacatcaggggaggcaggaaagaggcgaggccagtgaatactgatgtggctgctggtccatccaggactccgaagaagaaagagaaagccgcatcctcttcggcgtcggtgtcagtgtctggttcggggtcaggatcggggtctgtatccaaggatgtcgctggaaggcgggcgaagagggcgcagaagcgagaagctgcagacaaggcagctgcagagaagcacctgaagcacctgcagaggttggggctgagaaaatcgccagagcctgtagtgcccgaggaggttgggccacagttattgctaatcacaggggatgcaatcggcatctgtgttgattactatggggacaaatga

SEQ ID NO: 27038 - DNA, 225 bp, Zea mays
  Peptide Sequence Number=SeqID_68817
atggccgccgccgccgccgccgcgtcctcctcttcctcctccgaggttccgatcgccgcccgcacctgcgtctccgtcggcgaggtggcggtgggcgcggtggctacaggcagcggcgaccgggtggcggcggattgcggggtgtgcgccatctgcctcgacaggaaagcgctccaggagacggccctcgtcaagggttgcgaccccgccacaatggttcgctga

SEQ ID NO: 27039 - DNA, 577 bp, Zea mays
  Peptide Sequence Number=SeqID_68818
gggggccctagggtttggagttgagatcgccggaatttggatccacggaggtgagttttccccctccccttccctctccctctctctcctctccctccccttcttctcccccgcgcggcctccctgcccgcgctccgcgccgccctcggccccgcacccgcgcagccccttggccccgcgtcccgcgccgccccctcggcctccccacgcgctcgcgcccccggcgtcccctccgcggccgtgcgccgccttcggcgagcccctcccctggcggctcccctccccggcggctccccttctcggccgcgagcccctcggccccatgccctggccgtgtgctccgcgccgcgccctcggtcgcgcccgtgccccggcgactcgcgtcccgcgcgcctacacgccgtcgtgccgtcaatggggctcggcgtatgcggctcgctctgccaaggttgatttgtcccttggggaggagtgcggtggcaatgagaatggtggttttggtattgattatggtaatggagaggatgaagccgtggaaggagacttccaggaattccaagattacgacaagttctag

SEQ ID NO: 27040 - DNA, 270 bp, Zea mays
  Peptide Sequence Number=SeqID_68819
atggtgtatggttcacgaatccatacccgcgagataaaacccaacccatacccatgcccatcaggaggcgacaacaaggcgatggtggtttcagtgtacgacagatggggcacactatgtaatattgaggatgggcgcgtggtacaacgggactcagaaggatggggacacaacaatgaaggatgggcccggtgcagcatggaggatgggggcactggacacaacatggaggatggcgacacatggtggaagatgggggcgatcgcatga

SEQ ID NO: 27041 - DNA, 207 bp, Zea mays
  Peptide Sequence Number=SeqID_68820
atgggctcaaggaattcaggggagtgcgacgaacttggccaggggcatagcacaggcacaaaggcgctggaggggggcggttcacagcgaggcggctcggcggtggcgcaacactactccggcgagcaatcgttcaagaccgagggcaaacaagggaaaaatagggggtgttacaacccttcgtcggagctctaccatcgccggtaa

SEQ ID NO: 27042 - DNA, 366 bp, Zea mays
  Peptide Sequence Number=SeqID_68821
atgacaagcgacccacctcccgcaaacgccataccccatcactcccacatcgagcccaaggaccattccagcctcacctataccacagacgctggcctggagggtggaggcacgagcgcgacgaggacgctgggagctgcggcctgtcatcaactcgcccaccagcttgaggacacccatggcgagatcagggtggtggccaaggtgctagggagccacagcgaaggggaggggactggtgccgagtgcagctgccgcttcggtggctacgtgcaagcggctgcaagtgatatggagcaggaaagtgcgcctaagaatgaacgtgttgggcaagtgagaagagtagcattcacaggaggaggctaa

SEQ ID NO: 27043 - DNA, 816 bp, Zea mays
  Peptide Sequence Number=SeqID_68822
atggacatttttcttcaggcttatcttattcactggatatttcttggcgtcgttctcatccgctcacaccgcgcaggctctggaccagattattctctctttgcttctcacgctcgtctccaagctacgcaggcacactccctgctccactccgtcaccgcttcctgctgccatggtggccggcttccatcccctgatcttcctcgcaagctgcgctccctccagctcgcccatggatgcgcgctccatcttccccaaccgcgcgtccctctgccggccgagctccatctctggcgagctcgccctgcccctgtacggcgtttctcccctttcttcaacctccagccgtggagcttccccgccgagtccatggttttgctcggatttcgcctaggcccgcgcctccctgcttgcgccatgtccctgtccgtcggcggcgcgcagaccctttctcctccctgcttcccagctcgccaaattgtgcccctgctcgacgccggtgatggccgtcgtggagcaccgctgcgagctccctgcgccctcgtcctcttccctgcgtgcgccggctctagctcggtcgctcctactgctctgtgcgtgcacgcccatctccttagcccctgttcggatttcacctggccgctgcgcagctccttctgccatggtcggttgctgctccctgcgctggatctcctcccctgcgcgtctctgatctctggcgcccagcctgcttgttctatggtcttcactgttaatgttttggagtctgccgtgatgccgtaccggcgttctgtgtgcagcgggaaagctttgcga

SEQ ID NO: 27044 - DNA, 570 bp, Zea mays
  Peptide Sequence Number=SeqID_68823
atgctcggggatgttgagctacatctgtgccaggttgttgctcgggggtataaattggaggccatcgcgactctccccctgggccatctaaccgcggcctacgtcggtgttcgtgcttcccacctgtctgggagaattagcagagagggtgaggaagttgctgccaccgcagggtcttgccaccattgccgtttgtgtcgcgtggtctggcatggggcggcttggatcttctggaatggtgcttgtggccgtgtctgggtgaatgaatggtggatgacgctggaattgcacactagagcaatctcctcgccgcggagctaccaaccgccatgggcagggcgtgacgctatgcaatctgcgatgtgtcctccctccatacgtttgcttcggtaccagtattgtgaagagcttcatgtatgcatgattgggttaccgggcattagggcgcgcatcgccggtaatggcgccaccgttggggcctgcatcgccgccactatctgggtacggtggtgggcgagggatttggaagaaggctgccgaccgtccgatcttatcgggtggttggggtga

SEQ ID NO: 27045 - DNA, 213 bp, Zea mays
  Peptide Sequence Number=SeqID_68824
atggcgccgccgtggggggggggcgtcgccgtccatgactcgaataggacgaagtggcttgcgccgttggatcaggttaggactagcttcattaaatctgggccgtacattagggatccgatggtgtctgacgagcaagccactgtggattctgaggttcagcaagtagaagtagctgagcaggagctcattgaaggcaagttgtgcccttga

SEQ ID NO: 27046 - DNA, 2051 bp, Zea mays
  Peptide Sequence Number=SeqID_68825
atgaagacagacgatctgagattcgtccactccagctccaccgcggcggcggcgccacgccgcacgctgtggcagagcttcgaccacccgaccgacacgctgctgcccagcgccaagctcgggctcaacagggccacgggcgcgagcagccgcctcgtgtccaggctgagctcggccaccccgtccccggggccctactgcttcgaggtcgaccccgtcgctccccagctcgtgctcaggctctgcgactcatcgcccgtcaccacctactgggccaccggcgcgtggaacggcaggtacttcagcaacatcccggagatggccggggacgtgcccaacttccacctcgcgttcgtcgacgacgcgagcgaggagtacctccagttcaacgtgaccaccgaggcgaccgtgacgcgcaacttcgtcgacgtcaccggccagaacaagcaccaggtgtggctcggcgcgtccaagggctggctgacgctctacgcggggcccaaggcgcagtgcgacgtgtacgctgcgtgcgggccgttcacggtctgcagctataccgcggtgcagctctgcagctgcatgaagggcttctcggtgaggtcgccgatggactgggaacagggtgaccggacaggagggtgcgttagagatgctccactggattgcagtactggtaacaacagcaatgccagcgcgccatcttcaacgtccgatggcttcttctccatgcctagcattgggttgcctgacaacgggcgtaccttgcagaacgcgaggagttcagctgaatgctcaacggcatgtctgaccaactgctcctgcactgcgtattcctatggtggcagccaggggtgcctcgtttggcagggtgggttgctcgacgcgaaacagccgcaaagcaacgacgccgactatgtttccgacgtagaaactcttcatcttcgtctcgctgcaacagagtttcagacatcaggacgcaggaaaagaggagtgaccatcggtgccgtcaccggtgcgtgcgctgctgccttggttttgctggcgctggcagtagcagtgatcatccgtaggaggaagaaaaccaagaacggtcgaggggctgctgccggtggtgggctcacggccttttcataccgagagctgcgttccgcgaccaagaatttctctgaaaagctcgggcaaggtggcttcggctccgtcttcaaggggcagctgcgtgactccacgggcgttgcggtgaagaggctcgacggcagcttccagggagagaaacagttcagagcagaagtgagctccatcggcgtcatccagcacgtcaacctggtgaggctggtcggcttctactgcgagggcgagagacggttcctcgtctacgagcacatgccgaaccggtccctcgacatccacctgttccagagcggcggcggcgtgttcctggactggagcacccggtaccagatcgccgtcggcgtcgccaggggcctctcctacctccacgacggctgccgggaccgcatcatccactgcgacgtcaagccagagaacatcctgctgggcgcgtcgctgctccccaagatcgccgacttcgggatggccaagttcgtcgggagggacttcagccgggtgctcaccacgatgaggggcaccaagggctacctcgcgccggagtggatcggcgggacggccatcacgcccaaggtcgacgtgtacagctacggcatggtgctgctggagctcgtgtcggggaggaggaacgccggcgagcagtactgcacggccagtggctctggtgacgacgacgccgcgcgggaggagctcgcgttcttccccatggaagctgcgagggagctcgtcaaggggcctggcgtagtcagcgtcagcagtctgctggatggcaagctctgcggcgacgccgatctcgtggaggtggagagagcctgcaaggtggcatgctggtgcatccaggacgacgaggccgaccggccgaccatgggggaggtggttcagatactggagggcgtcttggactgcgacatgccacccctgccgag

SEQ ID NO: 27047 - DNA, 828 bp, Zea mays
  Peptide Sequence Number=SeqID_68826
atgggctgcgtgaagcccagcagacagcccaacattcgtagaactggcccggggaattgggcactaggtgaggctggcgatccgcatcgaagccgtcccagccaatcacctcgcagatcactcaacacgcggatcgaccccgccagcaggcagcagcgacaccctcgccctccatcccaattcccaatccaacgacccatagttgtccgccgcccgcgccagcgcccagcgcttccgaaaattttcgccatcccagcgtgcccgcccaagcaggcaagcacaccctctgccaccagtataaacccaaagccccctccgacggcagaccgcatcacacagcttgcaaggcgccccatctctcaaaccatccgaacccccctcgccgctcactcccaagctaatccccgccggcagcgatggcccgcacgaagcagacggcgcgcaagtcgacggggcggcaaggcgccgcggaagcagctggcgaccaaggcggcgcgcaagtcggcgccggccacggggggcgtgaagaagccgcaccgcttccgcccgggcaccgtggcgctgcgggagatccgcaagtaccagaagagcacggagctgctgatccggaagctgccgttccagcggctggtgcgggagatcgcgcaggacttcaagacggacctccggttccagtcctccgccgtggccgcgctgcaggaggccgccgaggcctacctcgtgggcctcttcgaggacaccaacctctgcgccatccacgccaagcgcgtcaccatcatgcccaaagacatccagctcgcgcgccgcatccggggcgagagggcctga

SEQ ID NO: 27048 - DNA, 867 bp, Zea mays
  Peptide Sequence Number=SeqID_68827
gatttgactgctgagatttctgaattggagaagcaaaaggatgaacttgaggctcagttaaagaaggtcaacatttcactgaatgctgctatttgtcgactaaagcagacaagagaagagagggaccagtttcatgaagcaaacaatcagatgatatttactttacaagcaaaggagaatgacctgtcaaaatctattgactcatgtaacatggaggccagtgtagtcaagacttgggtaaatttcctcgaggatacatggcaacttcagttgtcatacaatgaacagaaggaaactaaaacgaaggaggagtcaatagaacatgaaggggatgatgagatttctgtgcagacaagtccacaaaagtcccttgaggaggaatatttggaaactgaaaagaagatcgtgattgccttcagcattgtagatcgcatgaagaagatgttttattctgagcaagcggctaattctaggcaagatgatgcagaggtcaggaccttattttctgagattgagaaactgaaggaagtgtttgagtcggtagaaaggccgacactagactttgaagtccgcaaggcaaaggatccaatgaaggacaagtctggatcgaatcgttcagccaaagacaaatctgaatcgagccattcacctgttcaggtgccctcttcacctaaagatgtgcccgtggagtctccgaaatctccagtgaaacctgagcagacgatggacccagattcagagtttgcaaagttagagctagaattcggaaaagttaacagagaccatgaggagataggcggttgggatttcgacgagcttgaagaggagctgcgagctgacctatctaaatcaaccaatccaaaataa

SEQ ID NO: 27049 - DNA, 597 bp, Zea mays
  Peptide Sequence Number=SeqID_68828
atggggtcgggcgaggcggaggtcgtttggccgaggccagggcggagtccgagccctggggtcgggcagagcggagttcgccgtcttccgggtcttagcccgagtccgagccctgggtcgggcggagcggagttcgccgtcttccgggtcttagcccgagtccgagccctggggtcgggcggagcggagttcgccgtcttccgggtcttagcccgagtccgagccctggggtcgggcggagcggagttcgccgtcttccgggtcttagcccgagtccgagccctggggtcgggcggagcggagttcgccgtggcgcctttggcaaggcctgactgtctgtctgactcactctttgcgttaaatgctcctctttttgacgcggtgccaaagattcaactcaaaaccaataaaaagaacaagacagggttcaaaagaaaggagcaaagagaaaccgaagtgctccctggtatggcgcaccggactgtccggtgtgccaccggacagtgtccggtgtgccaccggacagtgtccggtgcaccagggaggattgtcttcaaactcttcaccttcgggtttctcaggcgcagcccactataa

SEQ ID NO: 27050 - DNA, 216 bp, Zea mays
  Peptide Sequence Number=SeqID_68829
atgggcaagagcaagaagggcggaagttccttgcaccactcaggcaacaagaggaaacgcgagttgagtcctccctccgaggactttggtgactccgagtactcggaggaggagttctcctccgagtccgaggggtcgccggcctacgccctctccccccagcatcgtccgatgatttcaaacgacctccaaggggatcgctgccgaggggtggac

SEQ ID NO: 27051 - DNA, 1944 bp, Zea mays
  Peptide Sequence Number=SeqID_68830
atggcgcctcctgttgacgtggctggtctgtgccctagtttgggcgatgtgaagctcctccgaggccgaggtcgagtctgtcttccgtggtcgaggtcgagtccgagccctggttcgggcgaggcgaagtcgtcgtcttctagggctgagcccaagtccgaagcctgggtcgggcggagcggagttcgtcgtcttctagggctgagcccaagtccgagccctgggtcgggcggagcggagttcgtcgtctttctagggctgagcccaagtccgagccctgggtcgggcggagcggagttcgccgtcttccgggacttagcccgagtccgagccctgggtcgggcggagcggagttcaccgtcttccgggactcagcccgagtccgagccctgggtcggccacggccagcccagtgcccagctcgtggtcctcggctcctcctgcaaagccgaagcgattcgacggcggccggccagcctcccaggaccggaaaaaccttccatcccgttcttgtgccgctggtggccactcacgccgcgacaggcgacacaaccatggcttgaggcaacagcggccgccacgtccgaggcgtcactctcactcccgccccgccacgtccttctccgtctcaaaagcctgacggctccgggcactgccacccatctccacagaaacagggatagcttcaccgacatccgggccagccgcttccccgatccgccatgtcagtctctgctgcgacctagccctccgctccgttgcgtcctgattcctgaaccctaccactccacgatccctcgccgacagatgggcccacgtcgcctggggccaagcaggagacgcccgctccccacgcgccggcctagtgggtgggtgggtggagatggagaaggcgttggtggatcgacgcacgggacacccttgcagcagcagcagcagcagcgcccatcactcgcgtccctctcttttcctcttctccattccgtcgctccccaacaccacccccgctccgccgctgtggctgccgctcccctccccgctgactccggcgccatttcgacccgcgcggccggatccttggatggttccgatcgatccgggaccaagagacccaaggcttcgtcacctcacccgggccccggcgccggtggatccatggccggggagaaggcgccgcgcgcgttctccatcgaggagctcccgggccacctcatcggggaggtcctgacctcgggtgggctcgctgccgccgacctcgcgaggctcgaggccacctgccgcgcgctcaggccgctcgccgagtacgccgcgtccaagctttgcgccgcgcgggcggcgttcgctgccatggggccagccgcccggggtgagctgctggagaggtgcgggggaagctggaagagggtgctcaggttcctgcagtccgtagagcagtcgtcaggcaccgtcgagacctcatcgggcagcgttgctactggtctaagttttactgtgattcttacaagggatggacaagtatatacttgtggaagcaatacacatggccaacttggtcacggtgacaccatagacagggccactccaaagcttatagaattgtttgaaggccccactcaggtggtgcagattgcagccggcgcaagctacacttttgctgtaacagatgatgggactgttcattcgtttgggtcttgcactaatttctgccttggacatggggatcagcatgacgaacttcttcctcgtgcaatccaatcatttaagaggaggaacattcatgtagtccgtgtttctgctggagatgagcatgctgtggctcttgatgcactaggacacgtttatacttggggcagaggatactgtggagccttaggtcatggtgatgagaacgataaaactagcccagaattgatcggcagcttgaagggccaagttgctgtgcag

SEQ ID NO: 27052 - DNA, 252 bp, Zea mays
  Peptide Sequence Number=SeqID_68831
atgtcggctgctgcgccgctgctacctctcgggtgtgctggatggcagctgatgcctcgcgagggtccggcgcaggcccctgcccagctggacccgccctgctgcgcgcctcctttcttcgccgccttcgttggttctgtcgctgccgtggccttcccggtcagatccacgttgctgtggccatcctgtctaggcttcagctgcgagtttcctgaatgcgaccacctcgacttcgactacctcggcatctag

SEQ ID NO: 27053 - DNA, 351 bp, Zea mays
  Peptide Sequence Number=SeqID_68832
atggaggcggcctcgggtaaggaggctccaggcatggtgactactagggcgaaggctagagacactatgttgatgccccatgttagtatggttaggtcgacgcccaaagtctctgcccctagtggggactttgggaatccagattacaaagtttttgactttgagtggacaacaggaggtggtgggtccatgttaggttacctcgccttggtctcggtggaaccttcactgctagatcgtttggctccactcgcgaaggcccacaatgtcttgacccgactttgtgctgacaagaaatcaatgaatgcgaagctaaagcagctgaggtcaaaggtcgtggagagggagtga

SEQ ID NO: 27054 - DNA, 222 bp, Zea mays
  Peptide Sequence Number=SeqID_68833
atggatacaggatatgtagttgtctatttctcgatcctgtatcttcgatatcgagcgggcattgtcaccgatgagatgctgtctctaccacagaaaccttttctagctgtaggactcttagaggcctttggagcagcagcagggatggcagctggagataatggaaaccaggtcccggctttgtcctctatgaaaggaggtacagccttacaaacaaagtaa

SEQ ID NO: 27055 - DNA, 516 bp, Zea mays
  Peptide Sequence Number=SeqID_68834
atgttcgacaatttcaggcgcgtatatgaggagctggaggccaccattcattcgcttgacctagagggtgaaggtctcttcgaccgctacattgtgtggctgggaacggagaccatgcgacttcctgacgtgattaggggactgatgactttcttggccttcatgacctatgagagcagtttcgagtcattaatccacgaagggtgcaaccatgtgtctcgtctgtcgtcgtcggaattcaactacaacgagaacctttacgacgagatcagtgaagctgcgggtatggaggtcgatgaaatgctggatcgtatgtgggtcccctttgactgtgaggcgaggaaaacttatgaggggacgggcgatggtgaaaagttagtggatgcagaggctgagaggccagaaattgtggaggccgacttcgccgcagctacgcgcgtgcaattgcccgagatgccagctgctgtcggggggatcgtgccaccaggccctcgtctgacgctgctgatgttgtga

SEQ ID NO: 27056 - DNA, 550 bp, Zea mays
  Peptide Sequence Number=SeqID_68835
ggatgaacgtcgacgagggagagtggttcgacggtcttggcgggtagggaacgggcacgaggtccggtcggggtgctgcgtggacggcgaagctccggcggggaacgcggacagcagggcggacgacgacaacgtggacagactccggcgacgttatggacgagcaaagagtgagagagagggagggagctcaggggaggaggagagctcggttgtgggaggaagaagagaggggctcggcgtccaatttatatgcaagaaaggggaggtcgagggaagaaacggcggtcgggacttcatggccatcaatggcgtcggttcatggatgagaggcgctggtgcggtcggcgcggtcgggctgcacggcctgggcatcggggcagggtcctggcgggcgtccgcggcgggtgtcgggcgcgggtcctgcaggcgcgcatggcaagggaaagggcagggagcggcgccgtgtcacaatgtcggagttttagagccaactgccgagcgacttgagggcgacgtcagcattttagaggtaatgccgagcgactga

SEQ ID NO: 27057 - DNA, 591 bp, Zea mays
  Peptide Sequence Number=SeqID_68836
atgttcgccacctttctcctgctgctgtggtcccatgccccggcgccggcgctctcgctgccgccgcgccctccggtacgctgcagcgatgggcgggaccacggggctgcgtgctctccaacgcctacggcgcgtgggtctagcgaccgcgccgactgccccgtctcctccgtcgcgtacccggcgtccgagcaggaggtggtcgcggccgtggcgcgcgccagcgccagcggcgcccgcgtcaaaggtcgcgtggaggtggacgtcgcggcgcggacggtgaccgcggacgccggcgcgccgctgcgggccgtcatcgacgcggcagaggcgagcgggctcagcctcacggcggcgccgtactgggagggcgtcagcgtcgcggggctcgtgagcacagggtcccacggcagctcgtggtggggccgcggcggtgccgtgcacgaccacgttgtggggctcaggctcgtcgttaccgccggggaggctgacggctgggccagggtcctgacgctgcgcagaggcgacgagctcttcccggctgcgcttgtctcgctcgggctgcttggggtcgtctccaagaggaattga

SEQ ID NO: 27058 - DNA, 600 bp, Zea mays
  Peptide Sequence Number=SeqID_68837
atgcagggtgccagagtccgtggaatatttgatggggtaggggcccactggctttgcggggcccggtgcggtggcaccggctgcaaccccccagggccggccgggacctacaaaagcgggattgagtcattggttcatgaagggtgcgaccacgtggcccatttgtcctcgtccgactttggtgccaacgagaaccttttacccgaggttggcgaggttgctagcgtagctgcggacgagatgctcatcgcatgtgggtccccttcagcgctgaagttgcctgcaagcgctctgtggtggagcttgagcaggccagggccaaaggaatgtggtaggactatcttaccgaggggtagtgtaagttgcccccaaatccaaacagaggattatatatcggatgcagctatttgggttaatgcccattccatcgaaggcatggaggaatataatgtcggcctggataccattgtccacaagggccttcagatctcccagcctgctatgttgcagttgataaccattgtgtctgtgtgcggagcgttgcgaaggttgacatcgctcatgtcaaacattagtgggatttgtgaccacttcgtctga

SEQ ID NO: 27059 - DNA, 891 bp, Zea mays
  Peptide Sequence Number=SeqID_68838
atggcgtactggccgcgcgcacggggatccggcggcaggaggaaagcggcgacgctggacgagctgggcacgcagcagcagggccgggatgtgagcgcactgggtcaaggcatcgtgggtaggtggaccagcggcatgcgcgaatggatcgggagcatgcggttgatgataggacgaagtcttcagcagctactaggcagcatgcgcaggtgggaacgtgggagcggggctggcgcgtgggcctggtggggcaccacctggtggctggctcgcagctgcaagctgctcacgcgtgggcgcgcagcgctgggtggcctacggagcatggtgtgtcgtggctgggctacacaacgctgggtgggggcgcgcgctgttgggctgcgcaaaggatcctcctggaagctgcacggcgaggatcacagggctaaccccgtgctaaggagagtgacatctgacacccttgcaaatccgccgaacgacacccttgcgcacatcattgagctggtgctgaagagcagcgaggacagaggccggcgcgagatgaagtctctgaactgccaggattccctgctagtgctacctcgcgaagctaccggtgcctacgagcttgcggtcgaggaagaattgtcgtcaggcagccaagtgcaggcgttcagaaagatcggaaagatcgatctagaggcggacacccttctctggctagcggagatcttgtcggaccggcacgcggtcgacgagctagcgtccatctgggcgaggcagacggagctggccgcggagctacacactaggataccggtgatgcatcggcacctggtgagctgcgtgaccgcgaggctgctggtggtggtcgggagaggcgcgacgctgccgtccagggagacgcggtag

SEQ ID NO: 27060 - DNA, 198 bp, Zea mays
  Peptide Sequence Number=SeqID_68839
atgggtgagatactagagcacctaagagccagagctgaatatgattggttgtctctccatatcccatctgaggtagcaagatgtggtgaagtctacaggatatcaccgcgagccgtctatgaagggtggcctgaagagcgctgcgacgtgagcggtgccaggagcaactccaccatgaggacaatgaggagggtctaa

SEQ ID NO: 27061 - DNA, 1071 bp, Zea mays
  Peptide Sequence Number=SeqID_68840
atggaggaggagatccgaaaggagttccagagtaacggcttctccatcggaggagccggccccgaggacgccgcccagatcctctccacgctgctgacctactgcatcaactacaagatgagccccgcggatctcgtctcaaactgggaggtctactacctcaataggctcttaagcaattcacatgtagatgaagcagcattccatgacacaccaggctatgaacaggaaaaggcacctgaaggatcatctatctctgagttaactcctctggcaagtgacagaccatcatccagcagagtggccaaaacaaatgctgatcgtattaccccttttgcaacacgagtaaataaatttacccaacagtatgttctcaatgctgataacgcagttggtgtgccaagtaaaagtgctgaaatcacagaagatgaaataattagaagagttcaacctagtcaaagatgttacttacaagttcagcgctcacagcctgaaccaggttgcagattcatgtatgacagaatggaagacagatttaattacttggaagatcggatacggaaatcggcgagcttgttttctgcatctggattttgtggacaacctgcagatgctacccttgcttcagaggagaaaatgtttgcagtcggtacagtagcctgtgacggggaaggtcatttgaatgaaaagtctatcttgctacagggcagggggcagtgtgtgcgccttgacttgaaggatcttgatcacttctctttgtttcctgggcaggtggtgggtattgaaggccacaatcccagtggacactgttttgttgcatcaaaattatttgattccataccggtctctgtggatgctcaacttcccagtgctaagaaacaagctattgataatgaaagcaaccaaaattctgacgctggcactctgtcaagagcattgtcatcggaaaaggtccagacctcctcccctataaatataaaggggtacggtcgattgagaacccccgaacacattccaatcgaaccaattaccttctttacttttcctgccctaggagtagatgtagcatag

SEQ ID NO: 27062 - DNA, 317 bp, Zea mays
  Peptide Sequence Number=SeqID_68841
atggaggcccgggcccacatgtcatgtaaccggcgcaacggttactacgtgcaaggaaactgcaccgccactcgcgccaatgccatgacttctcgactgcagaaccagtgccacgactcgagacagccctgcgtggcaagcgacacctccgacagaagaagcgggcgttgtttcacctccgccatgatgaccacgtcaaaaaggggttcgaaggctggcccctcggaagggttcgacagccgccctagagcacgcagagtcagggatgaccctgggtacgtccgttacatggccgaggctcgggctacgctcccgag

SEQ ID NO: 27063 - DNA, 432 bp, Zea mays
  Peptide Sequence Number=SeqID_68842
atggccgaagaggatgcttatccgatgacacatctgtgcatgctaggcccatcaggaaaaggtccagacctcctcccctataaatataaagggatcatcgcagcaggtccctatacaacaaccgataatatgttgtttgagccacttcaagaacttctttcatatgcttgtcgaaagccgcctcagcttctcatattgatgggacccttcattgactctgatcatcctgacataaaaaagggaactattgaccagagctttcatgacatttttcattttgaagttctgagaaagattcaagactttacccagtatgtggggacccccgttggtgcaattctcattccgtctgtgcgagatgctctgtttttctttttttgcgtcacgcttgtagtctcttcattgaaaggagatgtgacgaatcttctatga

SEQ ID NO: 27064 - DNA, 171 bp, Zea mays
  Peptide Sequence Number=SeqID_68843
atggaaacttgcctgatgatcaaagttgatccattgatcggctcggctaaaggagatcaggcctcaaaccaccgatatggtaggggacagatgatcgttgtcttcccactggtggccgctgctggggatcatgattctgccttggaggtggcgatggtagctcttggaatg

SEQ ID NO: 27065 - DNA, 228 bp, Zea mays
  Peptide Sequence Number=SeqID_68844
atgtcgggagatcatgccaagatggaaatcgtaaccgacgacaagtccgcaagctcggggaggactctctcaagggaatccggcaataaacacaaggaggaatcctcttcctccatcaagtcgcttcggaaaggtgacaagaagaagaagatgaaaaaggtcatctactacgagaccgactctttgtcacccttcacatctgttgggacttgttctcaaatgctatga

SEQ ID NO: 27066 - DNA, 1332 bp, Zea mays
  Peptide Sequence Number=SeqID_68845
atgcgagtgctgactcctgcaatcggggggtgtttgtcgattcgaggttctgactggtcccggaagaggccagtgtcaccatcgttggcagacttcgtgaatcggtcagcagaggaacggcctgtctgcttgcttagtgctccaggttttggtgtcactatcgctcggaatggaaggatatttcccttttcagctcaatgcttgctagtggcctctgtgttccccatgtttccatgttttctacatcagcaggagcaggaacatcttggagatgatggagcaaccctagctggatctccagattgcaactacgcaaaggggaagtggatagaagatgataagcggccgctgtactctggtaatgagtgcaaacaatggctgtcaaaaatgtgggcttgtcgaatgatgcggcgcacacatttctcttatgagaattaccggtggcaaccacatgactgtgagatgcctgagtttacagggcctaagttcttaaaaaggatgagaaaccgaactcttgcttttgttggtgattcacttggcagacaacaatttcagtcaatgatgtgtatagcaactggtggcaaatacagtccagaggttgaagatgttggttggaaatatggccttgtcaaagccccaggtgctctaagacctgacgggtgggcttatagattttcgtccaccaacacaactatccttttctactggtctgctactctgtctgaattggaacctctgaatacagaacacacagttaccagatatgcattgcatcttgatcgaccagttacatttttgaaggagtatcttaatgactttgatgtcctagtacttaacactggccatcactggaacagagggaaattcaatggaaatcactgggaattgcatgctgacgggaagcctgtaggcaatggtagtagactcgcagacctaaaccgtgcaaaaaatcttacattgtatagcattgctagatggatggattcagaactcacacggcatcctaagatgaaagttttcctcaggacaatttcaccaaggcactttgtaaatggtgactggaacacaggtggaacatgtggaaatactgtcccctttactaatggaagtgaagtgttgcaggatcattcaattgatatacccgcagaaaatgctgtgaagggaactcgggttaagcttttggatatcactgctatctcaaaactacgggatgaggggcatatctcaaactctagtttcaaaaaggcttccaccggaattaatgattgcttgcactggtgcttacctggtataccagacatgtggaatgagcttctctttgtacagatttag

SEQ ID NO: 27067 - DNA, 342 bp, Zea mays
  Peptide Sequence Number=SeqID_68846
atggggctccttgttgctgcaactaaataccgtggagagtttgaagagagactaaagaaacttatggagcaaattaagcgaaatgaagacattattctcgaagacattcaaacttcatttgcaacaaaagaaacactagaagggcatatcatctttgaaggtggttactacaaactgcactcacattttcacgccatattgagcttaatgttaaggtggaggcatcgaccaaccatcttttcgagaagcagggcacaacctctacaacatgcccatcaagtggctatgaaacattatctgcataagttgatcttattggtgatgatagatagcaaaagctga

SEQ ID NO: 27068 - DNA, 1179 bp, Zea mays
  Peptide Sequence Number=SeqID_68847
atggccatgggggatgggaatgaggatgatgatgggatgagcgccgcgcgcgcgtgtcggcacacagaatcatgcccagttggcccaccttacactcgcatggattggatactggtgctcaaggacatggtgctgaagctgtcgggcacccaccaccgccagcacggcgcgcagcacaggcgcggcgggtcgccgccgccgccacggggccgggccacctccctgtaccgcagcggctactaccgccccggcgtcgtgcaggacgacatggccgtgcccccggccacgtacctgggaggtggaggcgccggcgcgtcgagcgcgagctccaccccggcgtgggacctgcccgccgccgcccgcgcggacggcgaggcctgcagggagtgggtggcgcaggtggagcccggcgtgcagatcaccttcgtgtcactccccggcggcgccggcaacgacctcaagcgcatccggttcagccgcgagatgtacgacaagtggcaggcgcagaagtggtggggcgacaacaacgagcgcatcatggagctctacaacgtccgccgcttcagccgccaggtgctccccacgccgccgcgctccgacgacgccgagagggagtcgttctactcgcagtctcaggtagggagcccctcggccaccccgtcgccggcgccgctcacgccggagaggatcagctggggcgcgttcgcgcggcaggtggcagcgccgccagcatcatcaggtgccaccggcgccgcgcggcagcacagcttccggccgatgtcgccgccgccgccgtcgtcctccaacccttcggagcgggcctggcagcagcagcagcagcgacacatcggtggtggtggtggcggtggagcggccggcggcaagagccccgccgcctccgaggccgccgccgccgccacggaagcggcgcggaccaccacgtcgtccagggacgacgtgtccgtcagcaacgccagcgagctggaggtgtcggagtggatcatccaggaccagcccggcgtctacatcaccgtcagggagctcgccgacggcagccgggagctgcgccgcgtcaggttcagccgcgagaggttcgcggagctcaatgccaaagctgtggtgggaggagaacaaggagaggatacaggctcagtccctttgaaaactgagctggaatga

SEQ ID NO: 27069 - DNA, 1671 bp, Zea mays
  Peptide Sequence Number=SeqID_68848
atggcggccgagtccgccaggccgccctcgccgccgcgcgactccggctgccccgcgggcgcgggagactccaccagctcccagctgaccgcgacctacctcggcgtcagcttcgcgctcttcctcgccacgctcccgtcgggcaccgcggcgcgccacgtggcctcgctccagtcgcggggccgcctcctcgcctcgcgcctgctggccgccgaggaccagctgcggcagctgcgcgcgcgccgccgcgaggacgcccgcgccaacgcccgcgccgccgagatcttcgcgggccaccgcgccgcctggatggaggccgagcgccgcctgcaggcccgcgccgccgccgccgcggacgaggccgcctccctccgcgcgcacctcgccgacgccgaggccgacgccgctgcgctgcgcgcccgcgccgagcgactcgagcgcgaggccgccgagcgggatgagctgctcaccgcgctcctcgcggccacctcgcgcgccgggtactccggcggcgggcccctgccccgcgtccacgacggggaggagcaggaggaggaggagcgggcgcgccacgacgcgcgtggggagcgggagccggagcacgagcaggacccgctgcccgcgccgccgttggaccacgccgctgacaccaccgacgccgaggccctcgctgccgccgccgcgctctacgctcagcagcgccagaagcacgacgacgacttctacacggcggccatggccgcgtcgggaatgccgccgtggatggagatggaccgatcaaaagcctggcagggcaccttcagtgtgaagttttctcagaagggtttgggtcaatttcccgttcatgtgaagtcatttgctcctgttagcatcacctcattcactattcctatggatagtcacctagtagcgcttgatatctctactaatgacctaaagtatgatacaattgagtcaacgtacaacacaaagcatgctgtaccgaggagagaatcaccctggaaagtggatgtagaatcttcaggagttccagcaaaacttaggttgctggagcaggaattacttaacctggaaaaggtagtgaatggagatttgtccaagattccattggtgatgagaaaacaagtgaaaagataccaaactctagctgggaaaattgatgatctttgcaaacgaatgaaggtgaaacctaacggatatgtatttgtgcagcaaacaagtgacccttgtgattcaacacttaactcggagtttagaacacagcggcaaacagaattcttgctggaagcgtttcaccttcagcatcgtgcaactgaaaccaggcagaagctcggcacactgcaagcagagaccgcaaaaggcagctttggagatgagctaacagcagaagccaaaatgtgcacaagaagagcacttagttcaataaggaataacttcaaggaaatccagcgaagcttggagatttggctggcaagaattcttggagacctcgagggcatgctagccagggatggggcctcacgcattagggagtactttctgtctccatacacgtctgctgttcgtgactgcatgcgcatgaacaccctggagaatccctggatacacggtcagcagctgttgagaacatttgccgtggcaatgcctggttgtgggtttttcttcgactga

SEQ ID NO: 27070 - DNA, 741 bp, Zea mays
  Peptide Sequence Number=SeqID_68849
atgtcctccaacacatcgtctggccaggaccccgggccaaagcatgcagcctccgtcgacaccatcgccttgacatcccgcacaaaacccttacagaggggcaacgacacgctggctgccgcagccgcaaagctgcgtcatccgccagccccttcggctgggcatacgaaaccaggcaacaccatgccgcgagctacacaccgcctcgcgccaaagccagagctaggccttcaccatgaccaccgccaaaccacacacgtgacttgggcgtctccaccgtctcctgacaccgctgtgcatgtcacgggcgtctccgccatgcacgtcaacagcaggccaagaaccgccgccatgcctggcaccatgacacaccaccacgaggcgtcgctacagccggaccacggaggcaacgaccactggtctcgatgccgcggcaagccacggcgcgccccgttgtgccctggccacaggcgcggtcactcgtcgcgaccgtcgccgctaccaccgacggtgggccacgccgtcgcaggagggtctcaccgccacatggaggagggaggccccgttgtgcaccggccccgccgcacgcatgacgttggatcgcgtcgccacagcaggccccaaccgccgccgcagttccccagaccccgacgcacaatggcggctgtgatacacccagcccaggtggggttggccgaggcccaacaaattagggttgcccagagcccaacaattcattaa

SEQ ID NO: 27071 - DNA, 195 bp, Zea mays
  Peptide Sequence Number=SeqID_68850
atgtaccctctggcttccatctcactttttattgttggtacatgtctcatttctattgtcctcccaattttcagcaacagctgtttccagccagaagactttaaagtcctttcaggcagaacagctgatgcaccgtaccctgtggtttctgtccaatttatgatttattaccccgagacctgtattagtccatag

SEQ ID NO: 27072 - DNA, 195 bp, Zea mays
  Peptide Sequence Number=SeqID_68851
atgaaggacattgaaacccggtttatgtgtatagttgaagcaggaaataaggtttctagaatgcttgaaaccaagaagatcttgcttgacatatgtgctaaaataccaggtacaaaatacatggtgatccaaggtgaacctagagtggtcatccgaggaaagaagtttattgcatttgcaagcttcgtgtcctag

SEQ ID NO: 27073 - DNA, 276 bp, Zea mays
  Peptide Sequence Number=SeqID_68852
atggtgttgtgggtcttcggctacggctccctcatctggaacctcggcttcgacttcgacgacaaaatcctcggcttcatcaagggctacaaccgcacctttaatctcgcttgtattgaccacagaggcacaacagagcatccggcgaggacctgcacgcttgaaaccgacggcgaggcgacgacgaggccatatgccatctttgcatgcccccctttttacacggtgacacagtgttacatgggcaagatagtcccaactcacttgaattcttga

SEQ ID NO: 27074 - DNA, 579 bp, Zea mays
  Peptide Sequence Number=SeqID_68853
atgaatcagcttgattcgttcctcctcgccggctgcaacctgctgggcctggcattagaagcaggtgccggagtccaagggcaaatccctggaggagatgccggcgagaacgacgaggcggccgccgccgccgccacgccgaactacaacaaccgcacagtgcccgtggtacacgcactgttctccttcgatctggtcgaggttgtttgtcgaggcacagccgtcgccttccgttacgtcattgtttcctttctgtctggtgcttgtgtgcatgttcagttgaacttgcgcgatcgatctgatgggatcagagacgtgctcctaaataaccggaggtcaccgtcggatatagacgtgctctcctggatgttgtaccaagcgcgtcatgctgctttattagatcaatcaagtactgttgttttcgttcaaatgttcagtgctgcacttcatcacatggggggacgtgtcgagtcgagatcacaggatgctcgccgatgccagcccgtgcatgagcgtgcgtacagtggtgacgcgttgcatgctcctcacggcatcgtcgtctcaactcctagttcatga

SEQ ID NO: 27075 - DNA, 180 bp, Zea mays
  Peptide Sequence Number=SeqID_68854
atggcctcgatagtgtcctcagcctggtatccgaaagacccggagtccaacgaacgccagcctgactttttacttttcaaaaaggatgataattatggtttatcgattcctctgtggtggtacaagctccgataccagctgtggcggaaccgcccgaattattccaacttaagtgcctaa

SEQ ID NO: 27076 - DNA, 1701 bp, Zea mays
  Peptide Sequence Number=SeqID_68855
atgcccccgtcatccgtgtcggggggcagcggccccggaggcgtctccccggacgccatcatcgagtggctgcaggacgagatggggtaccccacggccccgcccgcaccggagcagctccgcaagatctgccggggcaacatgatccccgtctggtccttcctgctccgacgcgtccgctccgagcgcaccgttgccactgcgcgccgcaacatcctcgtccacggcgtcgcggcccggcgggcgcgggagggcggggtgataggggcgggcgtgggtgacgccgcggccagggaggccgaggcgagggagcgggacctcgccgccgaggaggccgagcggctgcgcggaatcgtgaggaggcagcgcaaggagctccgcgcgcgcatcgcggaggtcgccagggaggaggcggagcgcaagcgcgtccttggcgagcgctccaatgccagcgtcggctacatcagtttgtcaaccaagcaaagggacgtgcaaagatcaagtataggtgtggctggaactacaggttctgttgaagatatgcaattgcagagcaatagagacgacctttactcatcaactattaaaagcaataggttgtcagaggatcttttagaaactgcaggtgaaaggagcatccggaaggcatgtgaaactcttgctgcagatatgattgaaacgattcgaagttcattcccggcatttgaagggagtggcattaattcaagttgccaattaactgcagcaaagctgggtattgacttggatggtgaaatacccacagatgttaaagctgttgcattggattccctaaagaatccgttcctgcttctgcagtcaatcattacctacacatcgcgcatgaaaacacttatacatagagaaacagacaagattgacatacgtgctgatgcagaattactgaggtataaatatgaaaatgagcaggttattgatgctgcttcaactgatgcaagctcacccttaccgtatcaggtgtatggcaatgggaagattggatctcagttgccaactcgaggaacatatgatcagctattagaaagacagaaagaacatgtacagcaattcttggcaacagaagatgctttgaacaaagctgcagaagctaaagcactaagtcagaagcttttgcaacgcctgtatggaaccattgatatggcaggaagtaaaaagttgcctactgggaacaccacacaaaatgtgaccaacagtaggcatttagagctggatgtttgggccaaggaaagagaagttgcaggactaaaggcaagcttgagtacacttacatctgaggtacaacgtttgtataagttatgtgctgagtggaaggaagcagaagattcactgaagaagaaatggaagaaaatcgaagaatttgacgcccgtcgaacagagctggagtgcatttacagtgctcttcagcgggctaatatggatgcatcatcattttgggagcaacaaccattatcagctagaggatatgcatcaagtacaattatccctgcgtgccatactgtggtagacatgtctacgaactcaagggacctcatagagcgagaattagctgcatttagccagagcttggataatagcttgtgcaggttgccagcaaccccgcagcattctgattttttcaagattccagttcttattggagtgactactactgatgcattttaa

SEQ ID NO: 27077 - DNA, 282 bp, Zea mays
  Peptide Sequence Number=SeqID_68856
atggccgctgggcgctgcacatcgctctgcacatcgtggctctgcacaggctgcctgggagatggccgctgggctctgcacatcgtggctctgcacaggctgcctgggagatggacgctcgccgtgcctgggagatggccgctcgccgcgcctgggtctgggagatggccgctcgtcgctgggcgtgcgcgggcgcgcctgggactctgggagatggccgctcgccgctgggcgtctgggaagtcaggaagaatggagatggccgctggtggcgtgggctag

SEQ ID NO: 27078 - DNA, 183 bp, Zea mays
  Peptide Sequence Number=SeqID_68857
atggcggcagccggggtcagtggagcattgtatgccaaggcgctaatgagactgcttgaccccttgtactgcatcgagtaccattcaggaaatgttgatgatgtgacttggcctaccaccctgccaccgggttggacgatcgagtgggatgttgctccggcaggagaggagcacgaggagtag

SEQ ID NO: 27079 - DNA, 240 bp, Zea mays
  Peptide Sequence Number=SeqID_68858
atggggaattctagcacacccactcagaataagcaactgactcccacctctggcaaaggattcaacatagccagggtcaaccaagtcagtgtcgaggccactactgctggagcggacatcgctatcggtaaggttgctaggtacaaagcatataaagctaattaccaaagccagagccatgatagcactcgtggttgcactgttatcctgggtggtcactccatgttccaattaatatga

SEQ ID NO: 27080 - DNA, 345 bp, Zea mays
  Peptide Sequence Number=SeqID_68859
atggccatgttggatccaccatcaagttttatttttgaaaacatcgtcagggatatcttcataaaaaatataagtgacgcctctctaaaaatcacgctttgcggggatcaagcatcaggccaatcatatctaagcggcactgcagcaactacatggtacttcaatccagacattcctgaggcacaggaatactacatcaaccacagggctttaagtgcaccgccactatatcacgactcatacaagatagcaaatggtggtttccatcttgcaccaaatgcaaaaagtcttcacctcaaacctccactggataccgctgtacatcatgtggttgtacagatgtaa

SEQ ID NO: 27081 - DNA, 291 bp, Zea mays
  Peptide Sequence Number=SeqID_68860
atgcaacttagggcctctggggccgaaatttgcttaggactgttgctgctgcaggtgctggttcctcctctcagacacaaacctatgttagaaacagaaaacgacctagaaatgcagcagctacagctcaacacatacgtgaagaagatgacaatgctcctgctgaagatgaacaacaagaacaagagacagcaagatacaataaacgatgatgaagatgaaggcgaacatgaatcaggtggaaagggacctgctgttgatgaatttcagttggacgaagatcttctttag

SEQ ID NO: 27082 - DNA, 1746 bp, Zea mays
  Peptide Sequence Number=SeqID_68861
atgcgcctgatcgagcgactaatcgctcctagtcgtcgactagtcggacgaccagggcgaccagaacacctgatcggtttctttatgatgggaaataaaactggtaagcctgtcttcagtgagctcaaatccacagagtttagtttattggagagcactctagtacaggatcattgtgcaatcccgacttgtgtaccattggattttctgaaggccatcacgagtgatttctctaaggagcaagagctaggaagaggtgggtttggagttgtttataagggccttcttaaaaatgggaaggcgatagctgtgaagaagctttctgaaatgaacctagatgacgatcagttccataatgaagttacttatcttttcgggttgaagcacaaaaatattgtccagctaaaagcttattgtgctgaatcacggtgggaagcaatcgaattgcgcagaaaatatgtcatggctgaatctcggaaaaggctgctgtgctttgagtgtataaataataagagccttgataagcacctttctgctgaatctcatggggttgagtggcatatcagatatgagataatcaaaggaatttgccatggtttgcattaccttcacacagattgccaaattgttcatttggacctaaagcctgagaatatattgctagatgacaacatggagccaaaaattacagattttggtatgtccaggctctttggtctacaacaatccaaaatcatcaccaaaacttgtggaggaacacttggatacatggcaccagaatacttactaaaagggttgatttcagtgaaggccgacatattcagtttgggcgttataatcatagaggtgatgaccggaggccggaattatcccacttgtgaaaaatcttgcgagcaattcgctgttgatgtggttggacgttggaggaagaggttattggaggaggcaggaaggtacacacccttggaaaaatacgttgagcaagtagagacatgcatcttgataggattgatgtgtgtcgatgatgatcctaacaaaaggcccacgacattggacattatcgaaaggcttaccaaagtagatgtcacgaacacggacagagggccacccaaaactctggaggccgcgacagggcttacaggccaccccaacctcgcaactagatcatttcttgacaggttccgccgaaccatcgtgatagggatgctgaagaaggccctgaaaatccaggacgtatcgcagttggagcagctcctggccaaggaggtgctgctggagctccacaaaatcggcacgaatgcaactggaaacagatcgttcctggagaggctccacgcaagcatcaccatggctacgctggttcaggcgctgcattccttggacttggatccatcggcggcgctgcgtatggaggtgctgttcttggcgctggagaatatgcgtggaaaaaacaactcaaggcgaagaagcgaggacgtccttgagctggaggagcggccagagcagatccggtcggtgctggaggctggcaccagggccaggctcagtgatgaggaacacatgccgtcggtgtctgtgcaggctgaagaccaggcctttcccaaaccgaagttggccaaagtacgcgccaccgccccggtgtgcgtgtcagcagtgtggttggcggccggcataggattcctgtgtggattcaccctaggagagatgaggggattaaggcggacgagggtccacgaacgcacgtga

SEQ ID NO: 27083 - DNA, 543 bp, Zea mays
  Peptide Sequence Number=SeqID_68862
atgaccctgggcgtggttgtggagggcgcgtgcgggagtgtcacagcgggcgacgtggagaggagaaacccgatggagacgtgcggtagaccaccttgtgttgattcctcgagtcttcacctggtgcttccgtttgcagcttcatttttaactaaggcgtcgccttgccttacgccttatcgcttaaaaggtaaaaaggggtcggtcgccttacctcgccttaccgctttaacaactatgttacattttgtcaacttcataatgtgtgccatcactgcagttcctcatatgaagatgtcacaagccaaggaagtgaggtacactgcacggtctattacacctcctgctgatagaaatggcacttcaaggtcgcctcctccaaagagacgcagcccttcaaggtcacctccaccaaagagtgcttcacggtccccacgtccaaggagtccaaagagacgcagcacttcaaggtctcctcctaggagacgtggtagatcaaggtcaagggataggagtcggtccaggcaagtatatcacttgtaa

SEQ ID NO: 27084 - DNA, 579 bp, Zea mays
  Peptide Sequence Number=SeqID_68863
atggtgttagacctggcgcaagtggctgagctggacaaggtttcgacggacaaagcgaagatcattaaactcagcgacagctggccattgcacagttccatccaactctacagtctgaagatatcaaaggcgttctccggtgaagacgcagcaagagatcttgtcgcctttgagcttcaagtggccaaggagatgcatttgcccgaaggcagtgatcagcgcagcgccgtgtctagtgccaatgagtccgtgcagctccagcgaccggagtttggacatcttgagcagtgggcagttatcttgatcccattcttcttcagtagccatcattcctgtgtgcagttagccaattgtagtttgatatcaggacatcagttattgaatttggcaagcgaagatttatccctgatttggcaaggacatgttgcaggaatttacatggcgtctgttttcccatattactatactgtgccagcttgcaatgcttattatacttgtttgcatattgttatatttgttcaagttcttcaagctgatggtggaggtttgcttttggaaacatcttcagtgctaatttga

SEQ ID NO: 27085 - DNA, 387 bp, Zea mays
  Peptide Sequence Number=SeqID_68864
atgggacagaggagggaagcgtcactggaagcgagagggagaagtagcctgcaccatcgattcaaggaaaaagagggcgcagtggatcttggcctggagctggacggcgtcggcctcttgccttggatggagggctcggaggcgtggactgctcccaatgcgagctgcctggtcggcgtccatggagaagcatcagagggagggcgcaatggccagccaagcgccatgggcaagctagagaggccactggcttcttgctgccggagaataggggaggacgagacagcggagggggccggctggggagtgcagtgctccctacgcgccaaaccagagaagcacaggggagtagccatggggctcttgatgtcatgtgctaagggatag

SEQ ID NO: 27086 - DNA, 111 bp, Zea mays
  Peptide Sequence Number=SeqID_68865
atgcagaccctcgtgccctccactacggcttcttctgcaaggcctatggcaccgagatcggctcgttccacccaccaccgttggccggtgtgctcaaatttgggtggctga

SEQ ID NO: 27087 - DNA, 261 bp, Zea mays
  Peptide Sequence Number=SeqID_68866
atgaagctgtggaaggagacttccaggagttccaagattacgacgagttctaggtgtgggttagcggcaatccccagtcggctgcctgtgaaggccgcgttatctacgtttcttttccgcactttgatttatttgaccgcacttgtacccaccataactggaatgggagaccacgtctcaggtcgcgtgaggggatatgtccacttccaggttcactcaggatttaataacattatgctaagagaagaaaaactaagttaa

SEQ ID NO: 27088 - DNA, 315 bp, Zea mays
  Peptide Sequence Number=SeqID_68867
atggggttgtcaatggcggagagagcctacatccgacccgtcaagcgagtagggctcgagggatctgatgactcaaaggaggagaactcttcagaggactctgagggggaggactctgaggaggaggacagcggcagcggcgatggaagtggctatgatggcggcagcagcagcaatggaggtggtgcgggtggatgcggtgcgagcgactacgatgacaacggctacgacgacggcgatgagagcggtggcggcaagggagacgtcggcaagggaggtggtggcaatgtcggtggtggggcgccaccggcataa

SEQ ID NO: 27089 - DNA, 1398 bp, Zea mays
  Peptide Sequence Number=SeqID_68868
atggagattgaaggatttgttgaagaggctgagacccacacgctccctcacatcgccatattcccgttcctcgccaagggccacaccatcccgctcatccacctcgcccactacctccaccgctacggccttgccaccatcaccttctttaccaccgccggcaacgcaggcttcgtcctggaggggctgtccggtgcggacgcggccgtcgtcgagctcaccttcccgaccgacatcgcgggcatccctccgggcgtcgagagcgccgaggggctcacgtccctggtctcctttgccgtcttcgccgacgcaacgtccctgctccagccacagctcgacgcatccctcgctgagatgcagccgccagcgagcctgctcgtcaccgacccattcctgcactggacgaaagcgtcggcggcaaggctgggcatcccgaaggtgtcgttcttcggcatctcggccttcgcgcaagtcatgcgagaggtgcgtgtgcgccacgacccttgtgccacgctgcggcccgacaacgtcgacgccgatggccacccggccactttcacggtgccggagttcccgcacatcaagctcaccttcgaagacttcatggcacccttcggcgaccctgcgtccatggcgcccatgttgaagctcgatgctaagctgggcagggccatcgtggaaagtcaaggcctgatcatcaataccctccatggcctcgaggctccgtatcttgacttctggaaccagcatgtcgggcccagggcttggcccatcggacccctctgttttgcccaaccaacatcaatcggacccaaggcccggccctcttggatggagtggctcgacgacaaggcaacaactgccgcaatcctagagtcacaattgaaggaggtcgcaaatggactagaggaggccgaggttcactttttatgggctgttaggcccgagaatgtcgacctaggtccgggctttgaagagcgtacaaagggcaggggcttgatggtgagagaatgggtagatcagttggagattctaaagcatagcaacataaaagggttcttgagtcattgtggttggaactcagtacttgaaagtgttgcatccggtgtgccgttagcggtatggccaatgcatgccgatcaacctttcaattcaaagttcttggttgatgagctgaagatcgctgttagggttcacacaagcgatagaactattagaggctccgtaagaagcgaggagatttccaaggtggtgaggatgctcatggtaggagaggaaggggtagaagcggcaaagaggatggcacagttgtcagctagtgctaaggaggccatgatagaaggagggccgtcatggaaatctctaaaggagatgataagccagttgggcctaaagtag

SEQ ID NO: 27090 - DNA, 1464 bp, Zea mays
  Peptide Sequence Number=SeqID_68869
atggaggagctcgtgacccggcggaggaggggtgaaccatcaagtgtaaactctgcttcaattactcaaaaaatatcaaatgctatcaagtcagatgaccctacatgggagcattgctttgtcccggatatgagtaagaagcaagcaatacagtgcaagtactgtgacaaggtgatccatggtggaattactagagttaaatatcatcttgcaaacattggaggtttcaatgttacaaagtgcaagaaagttccagcacatgttaagcaagagatggaggcctttcttacaaagaagactggtgaaaaagaacagagaaagaagaaaaaacaaagagatagggatgaaattgatctagataaatcagatggatccaatgaagaagacaatgggcatgagaatgatgttattgtgctgaaatcaacaagggaaagtaataattgcagcagctctagacccccaacaaatggtggcagtggcactattgacaacttctacaagccacaatctgttgaagagtctgaccacaagaacaaaattcaaacaaagttgtcaacccataaaagagaagagagacgagatagagcttgtgagtatatatgccaatttttttatgaagctggaattgcacataatacaataaccctcccaagctttggccatatgcttgaggcaattggagcttttggtagaggtctgagaggtcctagtgcctatgagatgagtggaccattcttgaagagagcaaagcaaaaggtattggatatattcaagaatcaccatgaatcatggcagctcacaggttgctcggtgatgacaaatgcatggacagataggaagggaaggggagtgatgaacttggttgtccatagtgcacatggggtctatttcttagattcagtggactgctcaacagtaaagaaagatggaaaatatgtgtttgaccttgtggacagatgcatccaagagatacggaaagaaaatgttgtccaagtggtgactgacaatgcaagtgtcaacacagcagcagcaagtctaatggcggcaaagacaccctccatattttggacaggatgtgcagcccattgcttagatctgatgcttgaagatattgggaagcttggacctatggaacaaacaattgctagtgctagacaggacaacaagaaggatatagcaagactctttagatcggatgaactcaatgaattgggttacttaaagaaggcaaagggaaagaaagcaaacaaagtggtggcattagaaggattttggaaaaatattgatatggctatcaatttctttgagccattggctaatgtgcttaggagaatggacagtgatgtacctgccattggtttcttccatggatgtatgcttgaggcaaagaaagaaattgctacaaggtttgataataatgaaagtaaatacagagttgcttgggacataattgataaaacatga

SEQ ID NO: 27091 - DNA, 252 bp, Zea mays
  Peptide Sequence Number=SeqID_68870
atggagaagagtgctggggaagtggtgcgcatccggtgccaaggggaaggagtagagggcaccgagcggcccatcagagggaggaaggaggggacgtcagagctcacagccatggaggagcagaggggtccacggcttgtcctggcaggtggtgagctcgaacgtgagagaaatggcacccgctccttggggaagaaaggctctgcgcaagggacagagaggagggagctggagataaacgaatcaagctga

SEQ ID NO: 27092 - DNA, 357 bp, Zea mays
  Peptide Sequence Number=SeqID_68871
atggcggacggcaagggaagggagaattcggccgtggcattgaagacctcgccgtcagtgccgatggctcggggattgcgcggcggtagtaaccctctggaggagtggagcggccgcgtaaaagcgattgaggccgggttccgtgcgtggatggcgaagcagcccatccacatcgaggccgcggtgtccacggccgttggggcggtgcagggcggggctctgggtgggctcatgggctcgctcacagccgacggagggtcgccgttccccatcccgcagccgccgtccaacgccaactcggatgccatggcgtcgttcaagcaggcccaggttgtcaatcaatcttgtcctgggtga

SEQ ID NO: 27093 - DNA, 1278 bp, Zea mays
  Peptide Sequence Number=SeqID_68872
atgcaacggaacggggtggtggaatgcagcgtgtgccgctcccgggtggtggtgccgagcccccggagcgtgtccagggcgtacgacaagcaccgcaacaagatgtcgtccaagttccgggcgctcaacgtcttcctcgtcgtcggcgactgcatccttgttggtctccagcccatcctagtgttcatgtcaaaggttgatgggaagtttcagttcagtcccatcagtgttaactttctgacggaggttatgaaagtcatctttgctgtcgtcatgctcataattcagtctagaaagcaaaaggttggagaaaagccacttttggcacgttcaaccttcatacaggcagcccgtaataatgtacttctagctgttcctgctcttctatatgcaatcaacaattacctaaaattcatcatgcagttgtacttcaatcctgcaactgtgaaaatgctaagtaacctaaaggtactggttatagcttttcttctgaaatttataatgagaaggagattctcagttattcagtgggaagctcttgctctattgcttattggaatcagcatcaatcaactccgaactgtacctgtgggcaacacagcatttggtcttcctgtcactgctattgcgtacatatatacattgatttttgtaactgttccttcagtggcttctgtctacaatgaatatgccttgaaaagtcaatatgacactagcatctatctccagaacttgtttctgtacggatatggagcaatattcaacttgcttggcattcttgggactgtcctattccaagggccagagagttttaatattcttcgaggccattcaagggccacaatatttttcatatgtaacaatgctgcacaaggcattctatcttcattcttctttaagtatgcagacacaattttgaagaaatattcgtcaactgttgccacaatatttactggcctagcttctgctgcatttttggggcattccttgaccattaattttctcctgggcatatcagtggtgtttatttcaatgcaccagttcttctctccgcttgcaaaagtcaaagatgacaaaccagctgactcaatagagttggaagatacacaaaatgaccgcccatctgaatcttcttttgtaaatatgactgctggtgccgctgatgatctggacgcacgaagtgctgttggtgtgagtgccggcgacccctctcctagccagcagcaccgcggcgtcgagggccgtggcaccggactaccggagccccggcgaagttga

SEQ ID NO: 27094 - DNA, 532 bp, Zea mays
  Peptide Sequence Number=SeqID_68873
atggtctctaggtctaggtggtgcacgggctggagagaggaggcgctcggagtcacggagcgtgaaggaatttttgttgttagtcatgctgatgggaatctgtacgtgtatgacaaatgcaaggatggaaatactgattggacatttccaactgtaaaggatcaaagtcaggtgctgatttcacatgcaaagtcgagtaagagcaatccaattgcaaggtggcacatctgtcaaggtgcaatcaatgacatttccttttcaccggatggtgcttacttggcaactgttgggcgtgatggccatttaagagtatttgactttgctaaagaacaactaatatttggtgggaaaagttactacggtgcactgttgtgttgctcttggagctggctccctctctcctgtgccagctgctgctggaggagcctctggagccgctgcggcgccgatgctggaggagccacaacgccactgttggaggagccgctgctggagccaccactggcctctcccactcgccttaggtgcaggc

SEQ ID NO: 27095 - DNA, 399 bp, Zea mays
  Peptide Sequence Number=SeqID_68874
atggatttggataggtttgccggagatggcctcttcgcggccttgcgccacgtgccttggcacattaacctcaccgccgtgactcaccttagctcgtccggtggtcgccagggagcttgccacggtaataggccacgaatcaccgcgccagtaaccttcttctcccgccgccgcgcgtctctctcaaattcaccggccaccgctgtgggagcctataatttgccgaccccgcctgctccgctaagtagtgtgcaaccagtgaaagcaacccgtgcctcgcaatcatccactaaactcccccaatttggatttcccccaaatcactcaagaacaccgaacggtgttggctcaccatggtcagcgtactccagttcaaatagagaattttggggcatttaa

SEQ ID NO: 27096 - DNA, 270 bp, Zea mays
  Peptide Sequence Number=SeqID_68875
atgaaacattattcccttgaggataatgagccttggacgaaggagatcgtgactggcggcgacaagtccacaagctcagggagaactcattcaagggagtctggtcacaagcataaggaggagtccgcttcctccatcaagtcacaacgaagaggtgacaagaagaagaagatgaagaaagtggtctactacgagaccgactctttgtcaccctccacctccggctccgaatcatcatccgtaacttctaagcgccatgagcgcaagtag

SEQ ID NO: 27097 - DNA, 315 bp, Zea mays
  Peptide Sequence Number=SeqID_68876
atgaagcgctcgagccacaccaaggactacaaccgcctcatccaaatggcctcacccactctagccggcactaccgtgcctaaggtcgccccagaacagggaagagaatgcaagcacgagtgcaccagcggcggactgcgcctcctgtcgctcttcgcgcgagcgaccgttatggcgctcgcgctcgcagtctttctcctatttgccaccgcattcgccttgctcctcctcgttctcatccttgccacgcgtgccttcaaccaccaccacaacaaccactactgtgtcccatcgctcgaccctgtccctttgtag

SEQ ID NO: 27098 - DNA, 297 bp, Zea mays
  Peptide Sequence Number=SeqID_68877
atggggatccgtgggtttgggcgtgaggcgaacttccgtcgagaaattgcggccccacccatcaccaacgtgcaattagctgggctgttcaggtgcggtgcacacccgcgacaacccagggcgaggaatcgatgtctggcgatggcgtacgagcatgctcatggtggcggccggactacacacgacgacgagcaagttctcgacgcaccgattagagaaggcgagaaggggggaaagagcacggttcgatttatacaccggcggcgaagtccgagcggatcgagacgcgatttctaa

SEQ ID NO: 27099 - DNA, 267 bp, Zea mays
  Peptide Sequence Number=SeqID_68878
atggggatccgtgggtttgggcgtgaggcgaacttccgtcgagaaattgcggccccacccatcaccaacgtgcaattagctgggctgttcaggtgcggtgcacacccgcgacaacccagggcgaggaatcggtgtctggcgatggcgtacaagcatgctcatggtggcggccggacagcacacgacgacgagcaagttctcgacgcaccaattagagcaggcgagaaggggggaaagagcatggttcgatttatacaccggcggtga

SEQ ID NO: 27100 - DNA, 975 bp, Zea mays
  Peptide Sequence Number=SeqID_68879
atggctgtcccacaagttgacaagaaaatgcttggtgaacttgaagccatgggattcccaactgcacgttcagttagggcactccatttttcaggtaattccaatcttgaatctgctgtaaactggcttctggaacatgaaagtgacccagatattgatcggctaccactgattccaagagaaataagcattgaatgcggtgacacatcagatgaagtaagaaatgacgttgaaggaatgagggatactgtgcaggagcagaaacctaaagaacacactgaaactgggagacagaatgagacatcccagttggaacgagaaccaaatgcagatggacaggaggaagaagatagaaagaggatattagcactatataagcaaaaacgagacgaggaagggagggcaagagggcggatacggagtcaattacaagaggatcagagggagaggattcgagctgctaaagaccttatggaagcaaagagaagtctcgaggaaaatcaaaggaagcgggtgatggagagtcgggtagcagatcaagaggaggagaaaagagcgagggagaggatacgccagcgtatagctgacgataaggtaaagcctgctggacgcgccgtcgttgcgtcagagcagctgagagactgcctgcgaaccgtgaagaagaaccacagggatgaccctgctgcagtggcaagagcgtaccaggtgttgctcaagattgttggcaacgtagcgaagaacccaggggaggagaagttcaggaggatccggctcagcaaccctgtgttcaaggacagggtgggcagcgtgcgaggcggcgtggagttcctggagctgtgcgggttccgcaggttcagcggcatcgggtacctggtgatgccgagggacaaggtcgacgtggctctgctcaccgccgccggcgtcgagatcgcgtcggccttggagaacccctacttcggcctgctctccaagtga

SEQ ID NO: 27101 - DNA, 288 bp, Zea mays
  Peptide Sequence Number=SeqID_68880
atggatcagatgaggttgccaccggaggatgccctaaagccaccggataggcggagaccgtcagaggaggatgtcctgcggcccgtggtgcggatggagaaccccgcgcgcacctccaaggagccaccgctgctgtgccactgggaagccaccgacaccacgcctctggatcggggagtcaccatcgtcgcgtctccagatcggggagccgtcgccccacacgcctcggggagctgccgctttgtgcatcagggtggggacataaaaaaccgaaccctagtggtttga

SEQ ID NO: 27102 - DNA, 1356 bp, Zea mays
  Peptide Sequence Number=SeqID_68881
atgtccgcgcgcccgccgccgccgccgcgcccgcgtctggcgctgccaccgcgctcaacggcggagtcgctctttacgggcgccggcgacgccagccccggcccgctcacgctcgcctcagcgctcttcccatctgatgccgacggcggcggtggccccggaggcgcctcctcctccgcggccggggccgcaaccttcacgcagctccttactggctccctcgcgccgcctccgcagcagcagcagcatgaagcgcagacgggaggaggaggggtcgcgagggccggcccggcgctctcggtggcgccgccggcgtcctcgttcgctggcgcgtccctgttcacggtgccccccgggcctcagcccctccggtttgctcgactcccctgggctgctcttctcgccggccatggcgcgaaaaacagttttttggatgttgcttgcggttcttggttaattagtttcggcgaacttattttgtttgtggccttgctagcaactaatattattctaaaaaaaggggggtttggaatgtcgcaccagcaggctctggatcaagttacagcccaagcaacccattctccactcagaatgtttgatcaccttgaacagccatctttctccacagctgcaacaacttctggagctctacaccatatgaattctgcagccagtatggcaggaatttcagatatgacaatggcaacagcaaacaatgagaatccatcctttcagtctgctgaggcatcccaaaggtatcaagttaatgcccctgttgataagccagctgatgatggctataactggcggaaatatggtcagaaggtggtaaagggcagtgattgtccaaggagctattacaaatgcacccatcccaattgtcctgtcaagaaaaaggtagagcatgcagaagatggtcagatatctgagatcatatacaaaggcaaacacaatcaccaacgtccaccaaataagcgggcaaaagacggcaactcttcagcatttgatcaaaatgaacaatctaatgataccacatctggcttgtcaggtgccaagagagatcaggacaatatatacgggatgtctgagcaagcatatggtttaagtgatggagatgatatggatgatggtgaatcaaggccacacgaagtggatgacgctgataatgagagtaaaagaaggaatatacaaatttcttcacaaaggaccttgtcagagtctaagatcattgtgcaaacaactagtgaggttgatcttttggatgatggttatagatggcgcaagtatgggcagaaggtagtcaaagggaattctcatccaaggtacgtatggaatgtaaggggtaggcaacattaa

SEQ ID NO: 27103 - DNA, 309 bp, Zea mays
  Peptide Sequence Number=SeqID_68882
atggagtgcataccaccaaaggtcccttgcagcaccaggagttactacaaatgcacatttgctggatgcaatgtccggaagcacattgagagggcttcgtcagaccccagggctgtcataacaacctatgaaggaaaacatgaccatgaaccgccggttggtcggggcaacaaccagaatgcaggaataccacaacagaaagaagggcagaacaatatatcaagtaatcaagcttcactttcgaggccagattttagcaacgctaaccagatgccaattggaatcttacaattcaagagcgagcaatag

SEQ ID NO: 27104 - DNA, 441 bp, Zea mays
  Peptide Sequence Number=SeqID_68883
atgtaccaagacctgaagaaaagattctggtggtacagtatgaaaagggagatcgcagagtatggtgccatatgcgacaattgtcagataattaaggtggagcatcaaaggcccgcagtatgcttgcatggtgttccgaagaagatagtgtccaaccgaggaacccagttcacttctcatttttggcagcagctacaggaagctttgggcacgcacttgaagttcagttcagcttatcacccacagacagatggtcagaatgagagaaccaaccagatcctagaagacatgttgagagcttgtgctttgcaagataagtcaggttgggacaagaggctaccttatgcaaaattctttaacaacaacagctaccaggccagtttgaagatgtcaccgttccaagcactctatgggtggaattgtcgaactccgttgcactag

SEQ ID NO: 27105 - DNA, 1335 bp, Zea mays
  Peptide Sequence Number=SeqID_68884
atggaccacagtgtgtactactgccttgtagctcttcttccacttgtttacttccttctcaagtcgtcgtggaagaaagctcccttcggatctggtagccgccatggactaaagctccctccaggcccatggcagctccctgtcatcggcagcatccaccatctccgcggctccctcgtgcaccacgctctgagggacctatcgctccgccatgggcctctcatgttcctcaagctgggcgaggtcccagtggtcgtagcatccacgccggaggctgcgaaagaggtgatgaagacccacgacgccatcttctcgaccaggccactgagctcaaccattaggacggtctccaaggatggcctgggcatcgtctgggctccgtacggcgaccactggcggcagctccgcaagatctgcaccatgcagctgctcggcgcgcggcgcgtccagtccctgcggcccgcgcgcgaggaggaggcgttccggctggtccgagccgtcatgtcctcgtccaccgcggcaggaggagctgcgccgccgccgctcgtggacctcggcaagctggccgccgtgtacgtcgccgaggcgtcgttgcgcgccatcttgggcagacggttcaaggtcgaggaccgggacacgctgctgcgctacgtggatgacggcgtccggctggccggcgggttcacgcccagagacctgttcccgtcgtcgtggctcgtccgcgccctgacccaccgggccgtgcgcgaggtggatgcctaccgagactccttgttcgccttcatggatgtagtggatctgatcggagggggtatcgagacagcaacaacaacgctgcagtgggcgatggctgagctgatgaggaatccaggcatcatggccaaggcacaggccgaggtcaggggattgttcatgggccaaaccaaggtaaccgaagaccggctaggtgagctaccctacctgcagctggtcatcaaggagacgctgaggctgcatgtcccggggccgctgctgatcccaagggagtgccaggagcagtgccggatactgggctacgacgtgcccaggggagccatggtgctcgtgaacgcctgggccatcgctcggagcccggatcactgggaggagccagacgcgttcgtccctgagaggttcgtcggtgacgcgagggatttcaagggcaacgactttggagttcatcccgtttggcgccgggaggaggatctgccctggggatgtcgttcgggctggccagtggccaacgtcgagctcggtctcgccagctttgctcttctacttcgactggagtctcccggcgggcgtccttcctgctga

SEQ ID NO: 27106 - DNA, 306 bp, Zea mays
  Peptide Sequence Number=SeqID_68885
atgactcacccgagggagacctcgatgggagatgaggttccaattcgcctaaggccaacctcggtgggagacgctgtttcgattcgcctgaggccaactttgatgggagacgctgttccgattttgcctgaggccaaccttggtgggagacacaatctcagttcgcccgaggccatctgcggacgggagacacagtctcggctcgcccgagcccatcctcggatgggaaacacattcagggttcgcccgagcgcaatcacgactcgcctgagcgcatctccgactcgccgagcacatctcaggtga

SEQ ID NO: 27107 - DNA, 99 bp, Zea mays
  Peptide Sequence Number=SeqID_68886
atggcgctgctctcctggaaggcaccagttcttctgctaccagggcggtacacatttcctcccggggtgtggctgctggcaccttcgtcgaggctgtaa

SEQ ID NO: 27108 - DNA, 1338 bp, Zea mays
  Peptide Sequence Number=SeqID_68887
atgggatgcacaggaacccagacccagcagcagcgactccgactccggccgccccgaggcagaggcagcagcttcgtcttcgtcctccgcgcgctcacgctcatcctcctcatcttgctcgccgtcttcgcacagcctgcttccagccgcaggcctctgccgctcgtcgacgaccaccacaacaacggcgtcgtcaaggccgccgccgccgccgccgccaccgacgtcatactgctgctgcctcctctacacgccgacgccgagaaggctatgccgactacattattaaactcttttaaggcatcgtctagggtgaggcatcaggcgatgcctagacgtccaggcgcccatataattctaggccttaaggcgttggtacaactcctcaacttcccgtacgaccccgacagggtggcctcggccgacgaggccgtggcgtcggagctcgactcggtggccgcgctgcagtgcctgtgcagctcccgccgcgggatcgggccgctggtagacgaccggtggtccctggtgcagcgcctggaggccgaggccagggggagggacgccgacatcgccgcgctcgggagggagctccggaggctgcagcacgacaacgccaggctgagcaggcgggtcgtcaggagcaggaacgacgacgagcgtcgcaggacgcgtctgctgctctccgtgcccaaggagctggcgacgccggcggccctcgtgagccggttcgtggcggcgtccaggtcggtcggcgagttcgcggggctgctgcatggcgctggtacctgtgccagcagcagcgacgacgcagttgcagagcaggcgcggtcgtggaggaggtacgcgatcgaggcgcacctgtggcgagcgatgctgctcgctggcaccggcggcggcgacgccggcagcagtttccacgggatcatgaagccacgcgacgcgctcgacgccctgatgcagttcccacgctcggggctctcagcgttctgccgggcagcctacctggccgccgtgcagccggaggcggaggcggccgcgtgccggaacctggaccacagggccttcgtgtcccgcggcgggcacccgaggacgcggctctaccgcgcgttcgcggcggccgcgaggatgttctacgcgagcagggggagcctgtacagggcggagttcatggagagcgtgcctgcccttggcgcggaagaagaccgccgcgtggagacgggtgaggagaagctcagcgtcgcatttaccgtgacgcccggtgtcaaggtcggcgacacggtggtgccgtgcagggtacttctttgccgtcgccgggagggcttcgtccggattcgatga

SEQ ID NO: 27109 - DNA, 195 bp, Zea mays
  Peptide Sequence Number=SeqID_68888
atggagcttccaaacgtgttgggcgtccctccgagaccttgccacacgcaccggacgatgatgaggttgcagggtcacggcgtacggcggcccgcgacgcgatgtggcactacggcgatgcctaggcatcgttttatcccaatttcaaattcgaaattcaaatttgattcaaagttcaaggtttccaagatttaa

SEQ ID NO: 27110 - DNA, 222 bp, Zea mays
  Peptide Sequence Number=SeqID_68889
atggcggacgaggacgccgacctcggcgatgggggcgaagcctccactctgcaccatatcgcgacatctagctgcaaagagtcaagttgttcaagcttcagcgtaattagaaaaatgcttctcgggagggtatgcactctggcaagtttgagattcaggatcaagtccatcatcgaggtcaacatcttcagaggggtcctcgacatcatcttgcatatctag

SEQ ID NO: 27111 - DNA, 1929 bp, Zea mays
  Peptide Sequence Number=SeqID_68890
atgatcgctgctgcatctgcatgtggcgacacgatgccgctagcatctccatacatgtacataaaatcacccaacggccgccatggcaagagagatcgtcgggacattgtagtcatacatacagcatcccagtatctcaactccgccaagccaagctcagcgaaaactcaggcgatcggacgacgccccaaggaacaagtgcagcggaacgaagcttcggcgtcctcgtcgtcccgtcgcaagataaaagatatgaagaccagagggaagactttgacggagcggtacgagatggggaagctgctggggaaaggcgcgttcgggaaggtgcactatgcaagggacctcgagtccaaccagggtgttgctatcaagatcatggacaaggacagggtgctcaaggccgggctctcggagcaggtaaagcgtgagatcacgactatgcggctggtggaacacaaaaacatcgttcgtctccatgaggtcatggcgacacggaacaagatctacatcatcatggagtatgccaaagggggtgagctcttagacaaggttaagaggagcggcaggctgacggaggctgacacacacagatacttccaacagctcattggcgcactggatcactgccacagccgaggcgtgtaccaccgggacttgaagcgtgagaatctgttgttggatgagaatggggaccttaaggtgtctgactttggactgagcgcgttttcagagtcgaggaggacagatgggctgctccatactgtctgtgggacaccagtgtatatagctccggaggtgatcaagaagacgggatacgatggtgcaaaatcagacatctggtcttgtggtgtcgtcctgtttgttctcgctgctggctacctccctttccagggcccaaacatgatggagatttatcgaaagatacatgatagtgatttcaggtgccccagttggttttcacacaaactcaagaggctgctatacaagattctgaaccccaaccctagcatgagaccttcaattcaggagataaaagagtctacctggtttcgaaaaggtcctagggagatcagtgcagtgaaggagaaagttcttagcgagaatgccaccgccacaaatgctgccccagtgcttgctgctaggcgcaaggagattgctcacgaagataagaccctggttgccacaaaactcaatgcctttgaaatcatcgcgttctcagcagggttggacctttctggtctgtttatcaaggagtgcaggaaggagacacggttcacttcagataagcctgcattggccatcatctcaaagcttgaagatgtcgcgaaagcactgaatctcaggataaggaagaaggacaacaacactgtcatcattcaagggaggaagcatgggggcaatggtgtccttcagtttgacacgcagatctttgagatcacaccatcctgccatctcgttcagatgaaacaaactagtggcgatctacttgagtaccagaaactgttggaagagggcatccgaccagggctgaaggacgttgtctgggcttggcatggagatgatctgcagcagaagaagagaaagccgcggaagaatacgacaaaaaattggataccaaaagagttgcggactgccacatcaccaaatattgaagctgcaaacgaagaggaagcaccaagtggtgaactagtgacaagggcaccaattgttgtagctgctgatgaagatgaagcaccaattgtggaggctgctaatgatgaagcaccaaatgtggtggctgctaatgaagatgaagcaccaattgtggtagctgctaatgaagatgaacacatgactgctacttcgccacctagaagtgtcaaatgggtagttaagaaaattaccccccgaaagaaactgaagaaccgtgcagatcacagacagtag

SEQ ID NO: 27112 - DNA, 606 bp, Zea mays
  Peptide Sequence Number=SeqID_68891
atgtcgatgcttaatcttcgccgacttgtgaagaaactccggcgagtcgtcatccgcgagttcatccgggcatgtcacgtgggagtcctcgacaacgaccatgtcggcttcgccatccacagcgtcatcatgcagatgagtgtcgacggtttcaccgttgaggcgacgccgacctccaacccgtacccaccagactactgcccggtccatgggtatgcggcatgtgtgctgcgcgacgcggggatcctcgagaacaccattatctccaccctgcgctcgatggctgtcgcgtccaccacgttagtcgaggagaggcctcgttggaggccaccaacacccgcgctgcctggatttggtcgccgtccgacgatggcagcccggacaggttgcccgccaatctacaccaatgcagtggttgattccccgccaccttccgcactcctgatgtcgtctcccgcactgctcccgcaacgtcgccacgtgggagaggcggctgcgcgacgcccaggtctgcgccccatcaaggatgaggccgacctccccaacgtcagtcacgacagcggacagttctcctccgacgaggagaaggaggactccatctcctaa

SEQ ID NO: 27113 - DNA, 330 bp, Zea mays
  Peptide Sequence Number=SeqID_68892
atggcggggctggccgtggcggccgccgcgctgctgctgctctgggccggtggggtctccatcgcggcggcggggagtggcggcgaggaggagtgcgacctgttcgacggggactgggtctgggctggcggcggcggtggggttcctcgacgtcggcttccgatgcgccgagaacggccgccccgaggtatcctacaccaagtggcttcttcctcgcttccgtcgctgtcttcttcctcgcttccgtcgtcccctgtccgccatctccagaatgtagagatcggttacatcatcgtcgtggacaaaattgacttttaccgtagcttatag

SEQ ID NO: 27114 - DNA, 678 bp, Zea mays
  Peptide Sequence Number=SeqID_68893
atggggtggaaggatcctaatccaggccaagaatcttccatggtcttccaatccagagctgttcggccagacaccgtagaggggcacagcaacgaggacgttgaagccggatttgagaagcatggcttgtcagccgccttaaactcgcctcagcacgaaggccgatcactgccactgaccccacagtttggccagaactccagtcctggaagcagcctcgccgagaggatgcaggcaagagccggattcaaggtgccgaagctgaacatgcctttcagcacggtagctggagatgatagttcagtgccaggagctccatcgccctacctcacgatcccgcctggcttgagcccagcaacgctgctggagtcacctgtcttcatttcgaatgccctgggacaagcctcaccaaccacggggaagctattcttgtttggtagcacaaatgacaacgatcctattcgacctggaggccctccagttggagatggcactgatgctttttctttcaagcccttagatctgaaatcctcacactacactgctgaagtaatgaaggttattgctgataacatttgctctgtgctaatgataaaagtatctcgaaacttagaaagtatttgtataaacatgcggtttgctgtgatgtttgtttctgaaactttactccaagtctag

SEQ ID NO: 27115 - DNA, 213 bp, Zea mays
  Peptide Sequence Number=SeqID_68894
atggctgctactaaggaggcagatcactgcatcaaatatctagactgttctgtattgcaagtgcacttgtgttattgtattcaactcatgttattagtggaattatggagatggcttgactttgtcaagttagctttctatacagacacaagcttggcctgtatcgagctcgtcatcaccgtcatcagaaggaatgtgaagcaaaatttgtag

SEQ ID NO: 27116 - DNA, 239 bp, Zea mays
  Peptide Sequence Number=SeqID_68895
atgggagatggagaagaagatatcgcggggatggccggagctcagatggtgtggatccgtcaggcggtggcactagtcgccgggaacctggcggcgcgagatgagcgagaccaaaaccctagggcgaatcagtttgcgtcttctggtgaccagaagcccccagaagctgaaccaaacagtggccgaatcaagggattgcgggggcccgtctataaagggcagacgtccttccgtcggag

SEQ ID NO: 27117 - DNA, 297 bp, Zea mays
  Peptide Sequence Number=SeqID_68896
atgcccgcccacgcgcctagctcctttcttagagccatgccggtgccccacgctcgcccccgcctcatttcgcacagcctcaccctctctcgcactgtgcccacgccgccagtcgccgccagagacccgcgcccgtgttcccaaccatccaggccaccggagaccatgccaggcctccccgagcttcgccccaagggaactcaggcctttttctctgagtacctctctgttcgtggagtgaccacccgggacaacagtgcaacaatgagggttaatgggacgcccttagctaattaa

SEQ ID NO: 27118 - DNA, 520 bp, Zea mays
  Peptide Sequence Number=SeqID_68897
atggcggatcgcctccccgtcatcgttccagagccgccgctagcttcttctacccccatcttcatcttcctcgcagtgccggtgctacatctccagactgcccctgctccacgcggacctgctctccagcgcgactgcacagctgttgttcctagcgacggtggtgttctgtggcgtgacagcaaaattgacgattgtaggaacgtgctcgccttcgactctctaggcgccaccaaccgcatcatcccccgtgaggatgcccctcgcgtgccaaccgctatgtttgcggcgacttggcctcccatccaccgaccagatccacactgccaacgggctcaccgccgacgactccgactcaccgctcagttcgggccaggagttcgtcatcctgctcccctattaggtggaacaagtggaggtgcagttctagtcttggccgctgccgtgattgcagctaagccagaagaaaaggcggaagaagagcaagaattcccattagaagtcatctcaaatgctggag

SEQ ID NO: 27119 - DNA, 333 bp, Zea mays
  Peptide Sequence Number=SeqID_68898
atggcggagccgcggcagagtccggcgacggcgagaaacccaggacgtttgggcggaccactgagcgcaatacttcacgttgacgatcctcacacgccgatgaacaatcccgacaccaccctagcccccaatcggcgatacaggcccgtgtctatggtggcggacctctctcttattgcggacacagctctggcggcgacggcggtgtgttttcggggaaatgagctcatgcgagaagatagcaggggggaggaacgagtcacgggagcgcccatttatcccccggggtcccggttcgaagagaggggaaggtcttccacgtcccggccataa

SEQ ID NO: 27120 - DNA, 1022 bp, Zea mays
  Peptide Sequence Number=SeqID_68899
atggagccgctgcctatccctcatcctccagcaccgcctcctgctctcacgtccgccctcgcccacctacgctcccttctctccgccgcatcctctgccctcgccgctctaccctctcctctccaaccgcacccgatcactcccatcgcttgtatcccttcacctcagtctaccaccacaaaacctccactcccgccgccggtcaccgctatcaacctcccgctcccagctgccccagctccctactccgactgccctgccgtcgtccgtttaaggccttccccaacctccacggccatctccctccccgccttcctcgctgccgtatgcgcagatttctcctcttccactaccggcccgagcccctcccatccgccccgcatcctgccatcggagctaagcctcctgcgccgggagttggactcctgggctacgggaggccaccacctcccggggtcgtactcctacgctgtagcccgggtaggggcctcgttctgctcggatgtgatgccacggtgggaggccgagctgcggcagtgggtgcttgagaactcaccgaggtacggggtcaaggtcaatgtcacggatgcggaccatatcttggtgctattatgtctcttgttgaaggcgatggcactggaggccaggtacttgctggaggggatgcagaatgtcgacaacgaggggctaggctttgatcccagggccatgaggtttgagtgccctaggctggtcgagggcgtctcgtggttaggcgcacagcttggggttctgtatggtgaaagcaatgggaaactatttatgcttgcatctgtgaaggaggctgtgctacagatggcatattgcttggctctctgtgcaggagatggtgctgcaagtgtaggagggagtgatgctggagatgttgtggcaggccctgtttttctttctcaggttgctgcttccattgtggcattgcatgagaggttctacttggagaagaccaaggcgttgcaagctcaacgcccgtcaaaatatcagct

SEQ ID NO: 27121 - DNA, 351 bp, Zea mays
  Peptide Sequence Number=SeqID_68900
atggccaccgccgccttgtgcgtcactgacgccggcgacttcatcgggtcgtggattgtcaaaatcctgctcgcccgtgggtacgcagtccgggcacctcccgccacgcagattgcaagaggagggagaggtcaggatatggaggatctgagcggccagcgagaagtggatctggggggcgccgtctgcgagctgcgtgtgtcggcgggggcgcacgagaggcggatcctggactgcgagcttgccgaggggcgcgggggagaagcggatcgtggacgtcggggcgagcgtacggcgatggcgagcggctggtttatagatcggggggtgggaggaggcatcgcgaggtag

SEQ ID NO: 27122 - DNA, 310 bp, Zea mays
  Peptide Sequence Number=SeqID_68901
tttcgccttattcaccccccctctaggcgactatcactccgctcctgtcgaagctaggacaccggctgaagggccagaactgaagaaagcgacagagcaaccgaaggctctaagtcttttgcgagagaggagaatggccagcgtactagacgctgtcatggaatctgtaaaagtaccaactcctgcttcagcgcctgatacagagggcaaagccttgaagaaatctggcggagctggcatggcgcaggatatctctgaggctggaccctcagttctcgccgaagcatattcttcggggctgctcctctaa

SEQ ID NO: 27123 - DNA, 447 bp, Zea mays
  Peptide Sequence Number=SeqID_68902
gaatctgctagagccaagacaaaggaggaacttttagctgaagaacgtgattacaaacggagaagaacatcttaccgtggcaagaaagtgaatagaaaccctacagagatactaagagacataattgatgaacatatggaggaaatcagacaggcaggtggcattggttgtcttgtggaagctcctgctgatattgcttggaatgagctgaagggcaactctcacagcggtgcatatcatggaagttatgattttgcaagcagctcttctcatgataagacagctttggcttctcggtcatctaactgtgacaactcatgtgctgaatctttgggaagattttcatcaaggagcagtgacacaagagattcatacaataactcagggtgcgaaactcatagaaaccattaccagtatatatctgagaaggaaatgggtggaatatag

SEQ ID NO: 27124 - DNA, 1005 bp, Zea mays
  Peptide Sequence Number=SeqID_68903
atgggctcacgcgcttcctccactgcgctcaactccggtggcctcccctccctctcctccaccccatcatcgcattccacatcctcccccaccgcaccgtcggactccacctccccatcggcggcctccagcgcactgctgtcctccaactcctccccattggctgccttcacccaaccggccaggaactcactagagcggctggcgctcgatcggttcagcctccgcgccattccgctccccgcggtgggtctcgccggcctccgctcgctctccctcagccacgtcgacgtcaccgacgaggcgctccggggccttgtcgccaactgcccggcgctcgagcgcctcagcctgaagcgttgctcccgcctcgccatggtgagcgtggccagcgagacgctgcgggtgctggagctcgtgggctgccaggccttgaaacaactctgcgtcgacgcgcccgcgctggagtcctggctcgacccattcaaagacatgccgaacctagaagagttgcagctgctgatgaactacgaaggttactgccttgaggccgtgtccgctttcttcaagctcatcccacttccagtccttcaacggctctttgtgcgtctccatattgatcacaagcgggagggagaaggcagctcatcggcagcagtgtggagcgtcgagaacgatgacagcgaagacatggcacccaaggaggagatcgtccttgaccaactgacgttcgtcaagtttgtgaattttagtgggacatggtgccagctgcagttgctcagcttcttcctggataagtcccctgtcctccatcagctggtgctggtcacgccggaaggggagggagctctaggagacgaccgactaaaggtcatccatgagcgggtggccgcattggagaaggcgtcgagcgaggcaagcattaccgtgtgccggcccaaggaagacgataccccgaaccatccacacacgaggtacttccacgaggagtatgaaactatgtaa

SEQ ID NO: 27125 - DNA, 255 bp, Zea mays
  Peptide Sequence Number=SeqID_68904
atgactcaatcagtctcacccatcgtcgctcttgggaaaggtaataactcatcaaaggtcaggtcgactttgatcagtcgactgaattccttgaacgtgtttctcttccacgtacctatttctggtcatcaaggtttgaaggatgatatgcctggccgcctggttgcccccgcccccggcgttggaggtcatgatggtgttcttcaatgtgttccttcctcttctggggtcttttttgccaccagtttcctgtaa

SEQ ID NO: 27126 - DNA, 102 bp, Zea mays
  Peptide Sequence Number=SeqID_68905
atgggagacccagtctcaggtcgcatgaggggtaaagtcagcgcctggcttcactcaggcttgaaggtttcgctgactggatcaagagatatagaggggtga

SEQ ID NO: 27127 - DNA, 156 bp, Zea mays
  Peptide Sequence Number=SeqID_68906
atgactcactgcggcgtggttaaagcactaaggcatgtggcgcaaggtcgcaaggtggctaactctggcgagcctatccaaagcggccgtgactcaagcgaagtacagagctccaaagtcaaccctgttctctggttttcagacttagtcacatga

SEQ ID NO: 27128 - DNA, 321 bp, Zea mays
  Peptide Sequence Number=SeqID_68907
atggacgaggagtacgacgtgatcgttctgggcacggggctcaaggagtgcatcctcagcggtctcctctctgtcgacggcctcaagctctggaagaggtttaggggggaagacaagccaccggcacatctaggtgcaagcagagattacaatgtagacatggttccaaagagttcagagccaacaactaaactcaggtgttacaaggacatcaagctcgattttgctatgctacagagaatggtgcatgtggacccttcttccttatatgcatcaggtggtctaaagttggctttaacctttagcccaccttttcattag

SEQ ID NO: 27129 - DNA, 324 bp, Zea mays
  Peptide Sequence Number=SeqID_68908
atgagcaaggacaaaaagggtcaaggtttgccacgtcgctccggtgacaagcggaagcgcgagccaagtcctccctcggaggacttcggtgactccgagtactcggaggaggaggtttcctctgagtctgaggggtccccaaacgacaagggtggcggcaacgacggcgatagtggcgacaggagcgacgacggcggcaagggcggcagcagcagcaacaagttcatccatgcatctaacacttccggcatttttagaggtaaccgccgagcgatagctgatgataccagcgttttagaagtaacgccgagtcatgctcgataa

SEQ ID NO: 27130 - DNA, 228 bp, Zea mays
  Peptide Sequence Number=SeqID_68909
atggccatatgcatccttcaatatttcgctttattagaagaaggattatcgatcatcaccaaattcagatgtccacttaactctattcctatatgtcagaacaatgcaccccagtacctagtacactatagagcagtatacaacatatacgcccagtacccccaaatgatggacaagaataatgcatatggtctgaaaatggagaatttgcttttcctcaatgattaa

SEQ ID NO: 27131 - DNA, 495 bp, Zea mays
  Peptide Sequence Number=SeqID_68910
atggggcaggtgaaagacttcgggatgtccttcagccagggtgggatgtcgacccttttgtcgcagacctcctcagacctccaagagagcctgaccaccaccaacactgcgctcgaggttgctgatggcaaggtggccaatctccgtgttcgcctggaggaggatggtgtcattgactgtgactcgatggacttcggtgactccgagttctcggaggagcagttctcctccgagggcgaggagtctccaccgctgcgggcagggctcgaaggaacagatgactcgaacgaggatgactctgaggaggaattcaaggaggagggcgacggtggtgaggacaggagcggctatgacagcggtgacgagagtgacaacagtggcaatggcggcggcagaggcgatggcggcgacgacagcggctacgacgatgataagggcggcaacggaaagggcgatggtcacggcaatggtaggggcggcagggtgccatcgcgg

SEQ ID NO: 27132 - DNA, 738 bp, Zea mays
  Peptide Sequence Number=SeqID_68911
atggtgggaccgcttcgtgctcggaaattgtatcgtttcccggcaacgagctcagggaagggctactcccccgaggtcgccaaggtctacgtcgacgccacggccccgaccttcgccgtcgccgaggtatggaacagcatggcgtacgacggggacaacaagcccgagtacgaccaggacccgcaccggcaggcgctggtggactgggtggacagggtgggcggggcggcgtcgccggccaccgtcttcgacttcaccaccaagggcatcctcaacgccgccgtcgaaggcgagctgtggcggctcatcgacccgcaggggaaggcgccgggagtcatcggctggtggcctgccaaggccgtcacctttgtcgacaaccacgacaccggctccacgcaggccatgtggccgttcccctccgacaaggtcatgcagggctacgcctacatcctcacgcaccccggcaacccgtgcattttctacgaccacttcttcgactgggggtttaaggacgaaatcgccgccctggtggcggtgcgcaagcgcaatggcatcacgccgacgagcgagctcaccatccttgagcacgacggcgactcctatgtggcggagattgacggcaaggtcatcgtaaagatcgggtccaggtacgacgtcggccatctcatcccggcgggttttgaggttgccgcccacggcaacgactacgccgtctgggagaaagccggcgccgaacaa

SEQ ID NO: 27133 - DNA, 141 bp, Zea mays
  Peptide Sequence Number=SeqID_68912
atgagcacatgcatgatagctaaatcttcagagcttgcacttggtcccatggatgttttgatgattaggaaccttggagaggactgccaagttcttgggaaaggccaagatgtcaaggaggagaagataggacgttcatga

SEQ ID NO: 27134 - DNA, 306 bp, Zea mays
  Peptide Sequence Number=SeqID_68913
atgcaggaagggtgcaaagcctatctcttggatgattcagctgcttcactgttgatgaggtgtcatacatgcagtaaaggtgtgctggactttttccctgagcttccaccttgcgtggtaaacatgcagctccggcccgccggcggttctctctactcgacctccctcatcactgcatctgcacatacgccgctgcttgccgcgctccctggtgtgcgagcttgccggcacccagtcctcctctccacgccagagtccttacctcaccatcaagacatcgtcgtcgcgccgtcgtacgttatctag

SEQ ID NO: 27135 - DNA, 252 bp, Zea mays
  Peptide Sequence Number=SeqID_68914
atggagacgaacagggagtttcagaagtcttctatgtcgaagatcttcaagacgaagggagtttcagaagtcttctatgtcgaaggtcttcaagacgaaggtgagagtactacaattgagagtctacgcaggtttattggtgcagttgtcgaggtttttggacatgaatatttgagatcgcctaatgaagatgatattgcaagattaccggccactgaagaaagtagaggttttcctagtatgcttggttag

SEQ ID NO: 27136 - DNA, 546 bp, Zea mays
  Peptide Sequence Number=SeqID_68915
atggacattatttaccaggacagcagttgtcttgccctagagcaggcgctacatgatgaaggcgtgggaccaatcgacctacctttcatgcttctcagggccatcacaaaagatttctctgatactcaactaattggcaggggtgggttcggagaggtttacaagggagtgcttccaaatgggatggtcgtcgccgtgaagaagcttcttgacaagatcgatgtcctagaggcgaatttccaaagcgaggttgcttgtctcatagaggtcaagcacaggaacatagtccgatgtctagggtactcatccgagacgcaacatgtgagggcaccctacgaaggaagatttgtctgggcagacctgcgccaaaggttgttttgcttcgaatacctaagcaaagggagccttgccgattatctgaccggtaacatcgatcagtcgccacaaacatctcatcttttacatatagcaaatgttttgagcactactatatatacattttcctggcttgtgtcggtgttaagattgccacaccccacattttga

SEQ ID NO: 27137 - DNA, 1977 bp, Zea mays
  Peptide Sequence Number=SeqID_68916
atggggatgggcagcgacgccgccgcgctgttccccttctccaccagcaccaccgccacgtcgccgcggctctgcggcgccaccgccgtcagccacaggaggatattctcagacgtcgctgaggacgtgacggtgtcggtggacggccagtcgttcctgctgcacaagttccctctggtgtcccggtgcgggcggatacgcaagatgttggcggactcctccagctccaacagcaaggacgcagacggccaccagaagctggagctggcgaacgtgccggggggagcctacgcgttcgagctggccgccaagttctgctacggcacaaacttcgagataaccgcggcgaacgtggcgcagctgcggtgcgtggcggagtacctggagatgacggaggaccagcacgcggacaacctggtggcgcgggcggaggcgtacctggccgaggtggcgctgcggagcctggacggggcgctggaggtgctgcgcaggtgcgacgacggcgggcccgtggcggagcaggtcgggctggtggcccgctgcgtcgacgccgtcgccgccagcgcgggcaaggagcagctggtctccggcctggcggcgcacctggagacgtgcgactgcgccgccgccgcgcgctgccgggaggactggtgggtggaggacctctccttgctccggatcgaccactaccgccgcgtcatcgccgcgatgcggcggagcggggtccggccggagaccatcggcgcgtccgtggcgcactacgcgcagacgtggctcaagggcgtggacgtggagcagcggcggcgccagcgcgcctgctgggacggatcgggcccgttcgtcggcgacggccagcggatggtcgtcgagacgctcgtcgacgtgcttgccacggagaacgtcgcggccgtcacgctctccttcctgttcggcatgctgcgggtcgccgtcgaggtcgacgccagcctcgactgccggatcgagctcgagcgccgggtcgggatgcgcctggagatggcggcgctcgacgacctgctcgtccccgccgcgcagaccagcgactccatgttcgacgtcgacaccgtccaccgcatactgctcagcttcttgcagaggattgatgaggatagctcgggggacctgtcgtctcccccctgcgggtacgactccgacggcctcaagtctcccagccacggatcggtgctcaaggtcgggaggctcatggacggctatctcgcggaggtggcgccggatccgtatctcaagctgcagaagttcatggcccttattgagctgctcccggattatgcgcgcattgttgatgatggcctctatcgcgccatcgacatatacctcaaggcgcatccatctctgacggagtcggagtgcaagcggctgtgcaagctgatcgactgccagaagctgtcgcaggacgcgtcgagccacgcggcgcagaacgaccggctgccgatccagatggtggtgcgcgtgctctacttcgagcagctccgcctcaagtcgtccttctcgggcggcgggtccgggtgcgtcggcttgggcggcgccgacgggtccttctcgcagcggttcgtgtgcagcagcagcggcgtgccgagctcgtgcgtgtccccgcagcgggacaactacgcgtcgctgcggcgggagaaccgggagctgaagctggagatctcgcggatgcgggtgcggctgacggagctggagcgggagcaggggctgatgaagcagcaggggaggatgcgcggcggggacggcggtggcggcggcgggcggggcggtggcggcgagcacggccgcgccttccttgcgtcgctgtcgaggggcatcggccgcatcaccatgttcggcggcgggcctgcggcggccgacaggcggcgcaagaagagcggcggccggagctcccagtgctccgacggcaaggcccgcaggcggcagaaggcgtccttcgcctatgactga

SEQ ID NO: 27138 - DNA, 1902 bp, Zea mays
  Peptide Sequence Number=SeqID_68917
atgtcattgccaaacacggtctcaaggttttatcacctgaaatttctagatcttgaacaatggggaagtgatcgttctttgcctaaggacattagccgccttgaaaatctatgccattttgttgtttcggaaaagattgattccaatgttcctgaggtggggaaaatgatcttcttacaagaattgaaagaattccatgttaataaagagagtgttggatttgagctacaagaattgggtaaactagatgagcttggagggaagctcaatatatacgggcttgaaaatgtgagaaccaagaaagaagctaaagaggccaagctgatgtcaaagaggaatttagttgagttgggattaatttggaacatgaaacaagagtccaccgaagatgatatcctagatagtatccaaccacactctaatgttaggagtctttttattgtaaatcatggtggtaccctcggtcctagttggttgtgcagcagcgacaccatatacatgaaaaacttggagactctacatctagagagcgtatcgtgggctaaccttccacctattgggcagttctatcacttaagagagctaaggctgagtaaaattgttggcatatcacagattggacctggcttcttcgatagcacgacagaaaaaagtgtctcacacttgaaggcagttgagtttaatgatatgccagagcttgtcgagtgggttgggggagctaactggaatctgttctcaggaattgaaagaatcaagtgtactaattgtcctaggctgacagggttgctgttgtgccttccacccttgcctcacacttcaaaggtatcccgtattcatatgggagacttttcttatgaaggtcgtaccatgttgaaaattaataacccctctagatttgccttcgaaaatctgggtgacctagagacattggtagcttgggatgcactacccttgtcctttatggatcttaaaaagctacattccttgagacgtataaatgtcactagatgtgaggaaacatttttgagaggactggatgatggtgttgtgctacccacagtccaatctctctaccttggacgatttacacctaccaaaaattatttgtcaaaattattcaaatgttttccagcactttcttctttgcatgtgatggcatcaccatcagatgaggacaacgaggaagtggtactgcattttccaccctctagctcgctgagagatgtcaacttcacagggtgtaagaatctgatcctacccatggaggaaggagctggattctgtggcctctcgtcgctcgagtcagtgaccatacacaaatgtgacagaaatatcacaatggatggattcaatcctcacatcacatccagcctcaagtatctatgcgtgtacaatgagagaaatgatggaactgatccgtattctgtagcagcagatctacttgtagcggtggtgaggaccaaaacaatgcccgacgtttccttcaaactggtgggactttatgtggacaacatctcgggagtgcttgttgctcccatctgcaagctgctctccgctaccctcgagacgttaaacttcagtaatgattggcggacagagaacttcacgaaagagcaggacgaggcgcttcagctcctcacgtctctccaattccttgagttttataactgcagggctctgcagtccctcccccaaggactgcaccgccttccttctctccacggaataactatctatgggcctcaaaacattagatcactgcctaaggagggcctccccgattcactacgaatactacgtataactaactgttgtgctgagatttatgaggcatgccagcaattgaagggaacaaggccagatataaatgtacttgcctccaaagctcgtgtgcaaaattga

SEQ ID NO: 27139 - DNA, 330 bp, Zea mays
  Peptide Sequence Number=SeqID_68918
atggatggattcgatcctcacatcacatttaacctcaagaatctaagggtgtacaatatgagacatggtgagaccgagctgtattatgttgcagcagatctacttgtagatgtggcaaggactaaagcaatgcatatcagttccttccaactgatgcctctccgcaacctccagatgttaatcttctttcatgattggcggacagagaacttcatggaagagaaggacatggcgcttcagctcctcatgtctcttcaagaattgcagttcgaacattatagggccctacaatccctccctcaagggttgtatcgccttccttctctctag

SEQ ID NO: 27140 - DNA, 240 bp, Zea mays
  Peptide Sequence Number=SeqID_68919
atggcgggagcggagatcgcgcacagtccattgtggcacctcgaccgcgttcgcgtccttaaaggtagcacgtctaagctcgcctctccttccttgtcccctaccgcagcgacctatctgccctttgtccagttcgccatcgacaccgagaggaagaacgagcaagccactgtggattctgaggttcaacaagtagagatagctgagcaggagctcattgaaggcaagttgtgcccttga

SEQ ID NO: 27141 - DNA, 2046 bp, Zea mays
  Peptide Sequence Number=SeqID_68920
atgccggagccatctaccaccaaggggcagcgtatccagggagagctcaagaatctcctggaggatgccgcggtccgacgggccaaaagctctgcctcccgaaggcaggggtacccctcggaacatcgcgccgcgacttcccgattcatgcgggaagcctcggtccacaccgggcgcacgcgcaacacagcgcctgcggccccgggtcgcctcgacaacgagcaccatcaccgcaaccgtcgagcccacctcgatgagaaggtgcgccgaggctaccaccccaggcgtgggggacgctatgacagcggggaggattggagtccctcgcccaaaccacccggtccgcaggctttcagccgggccatacgacgggcgccgttcccgaccttgttccgaaccccgactactatcacaaagtactcgggggagacgagaccggaactatggctcacggactaccggttggcctgccacctgggtgggacggacgatgacaacctcatcatctgcaacctccccctgttcctctccgataccgctcgagcctggctggagcacctgcctccggggcagatctccaactgggacgacctggtccaagccttcgcccgcaatttccagggcacgtacgtgcgccctggaaactcctgggatctccgaagctgccgccagcagccgagagagtctctccgggactacatccggcgattctcgaagcagcgcaccgagctgcccaacgtcaccgactcggatgtcatcggcgcgttcctcgccggcaccacctgtcgcgacctggtgagcaagctgggtcgcaagacccccaccagggcgagcgagctgatggacatcgccaccaagttcgtgtctggccaggaggcggttgaggccatcttccggaaggacaagaagccccagggccgcctaccggaagatgtccccgaggcgtcaactcagcacggcaccaagaagaaaggcaagaagtcgcaagcaaaacgcgacgctgccgacgcggaccttgtcgccgccgccgagtacaagaaccctcggaaacctctcggaggtgccaatctcttcgataagatgctcaaggagtcgtgcccctatcatcaggggcccatcaagcacacccttaaggagtgcgccatgcttcggcgccactttcacaaggctgggccacctgtggaaggtggcagggcccgcgacgacgataagaaggaggatcacaaggcaggagagttccccgaggtccacgactgcttcatgatctacggtgggcaagtggcgaacgcctcggctcggcaccgcaagcaagagcgtcgggaggtctgctcggtaaaggtggtggcgccagtctacctagactggtccgacaagcccatcaccttcgaccagggtgaccatcccgaccgcgtgccgggcccgaggaaatacccgctcgttgtcgaccctgtcatcggcaacgtcaggctcaccaaggtcctcatggacggaggcagcagcctcaacatcatctacaccgagaccctcgggctcctgcagatcgatctgtcctcggtccgggcaggcgctgcgccttttcacgggatcatccccgggaagcgcgtccaacccctcggacaactcgatctacccgtctgctttgggacaccctccaactttcgaagggagaccctcacgttcgaagtggtcgggtttcgaggaacctaccatgtagtgttggggaggccatgctacgccaagttcatggccgtccccaactacacctacctcaagctcaagatgtcgggccccaacggggtcatcaccgtcggccccacgtaccgacacgcgtacgaatgcgacgtggagtgcgtggagtacaccgaggccctcgccgaatccgaggccctcatcgccgacctggagagcctctctaaggaggcgccagacgtgaagtgccacgtcggcaacttcgagccagcggagacggttaaatccgtccctctcgaccccagcaacaacgcctccaagcagatccggatcggctccgagctcgaccccaaatag

SEQ ID NO: 27142 - DNA, 537 bp, Zea mays
  Peptide Sequence Number=SeqID_68921
atgacccgagcaacaggcctaccatacaggatattatctccagtatcgatgaaacggacgctcgaagtgtcacaagttcttcaccaggagggcaggatgctgcgccagcagtgcacacaggagtgcgtgttcgcgccctacttccccgccgaggaacctcacaagttcgccatcgtccacaaggttttcggtggcagcaatgtcttcaagttactgcaggagctgcctgcccaccagagaggggatgcggtgagcagtatggtttatgaggccaacgttcgcaccagggaccctgtctatggctgcgtgggcgccatctccgtgctccagcaacagatctcccagctccagatgcagttctccatggcccgtgctgagatcttaacattgcagcaacagatggatgtcaatgatagcctacccagtcaaaatagctttgacagatatggcaatggtgatctgaaacctgactccccgcccgaaattctttcatcggaggatgaggttgaggaagtttcttccccaatgtctccatag

SEQ ID NO: 27143 - DNA, 1252 bp, Zea mays
  Peptide Sequence Number=SeqID_68922
atggaggtggctctgggaacggccaagtctctccttggccatgttctcaataatctccccgacgactggatgaaatcctacgtgtccagcgccgagctcggcaccaaccttaacatgatcaaagagaagatgcggtacgctagagcgctgctggacgtggccaaggggagggacgacgtcgtcgccgggaaccccaacctgctggagcagctcgagactctcggcaagaaggccgacgaggctgaggatgctgtggacgagcttcactacttcatgatccaggacaaacacgacgggactcgagacgccgcaccggagttgggcggtggcctcgcagcccaagctcaccatgcccgccatgctgctcgccacactgctggtaactggctctcatgcttctctggctgctgtccccgaccccgagacgatgctgctgctaccgatgccatgtctggtgacggtggccatgttggaaagttgtcatttaatcgagtggctatgtccaacaaaatcaagctcctcatagaggagctgcaatccaactctactcctgtctctgacttgctcaagatagtgtcagacactagtaaccctcaagacagtagctcctccactaaaaggtccccgacaagctctcaaatcacacaagacaagttgtttgggagggacgccatctttcagaaaactatagaggatattatcatagccaaagatagtggcaaaaccttgtccgttcttcctatatttggcctagggggcattgggaagactaccttcacccagcacctatacaatcacacagagtttgaaaaacatttcactgttagggtctggatatgtgtatcgactaattttgatgtgcttaggctcaccaaagagatcctgagctgcctacccgcaactgaaaatgcaggagataaaatagcaaatgacacaaccaactttgacctgcttcagaaatccatcgcagagaggttgaaatccaaaaggtttctgattgtcttggatgacatatgggaatgcagcaataatgaggagtgggagaaactagtagctccattcaaaaagaatgataccactggcaacatgattcttgtcacaacccgattccagaaaattgcagatttggtgaaaaaagaaactaacccagttgaccttcacggtttggatcctgatgagttctggaaattcttccagatatgtgcatttggtagtattcaagatgttgagcatggtgatcaagagttaattg

SEQ ID NO: 27144 - DNA, 2640 bp, Zea mays
  Peptide Sequence Number=SeqID_68923
atgaatcagcttgattcgttatcccgtccagaacccttgactgccgaggttgctgtgagggacttttgccctcatgggctcacttgcatgataccatgtcctctgggagcctactgccctcagtccactctgaataaaacaactggaatctgtgatccgttctattgtcggaagggttcaattttgaaaaccaaatgcttccacaaaggaagctgtaaaccaaactccacaaatcaggacatcaccatattcggtgcgctgcttgtgggtgctctgagtttggtgctgttgatcatttacaacttctccggacaactcctgatgaaccgggagaagaagcaagcaaaatctcgggaggctgctgtgagacacgctagagagaccgccgtggcccgtgagagatggaaaacagccaaagacatcgcaaagaagcacgccgcaggcctgcagtcgtcgctgtcccgcacgttctcacgcaagagaagtcttaggacacacgagtcgagcaaaggaggcaccggtgctggtctgccttcaacaagcggtgaccagacgacgacgaacgaagcaggagggaagaaggaggatagccatactgacatggcgcgttcgactgaagacaaccctgaaaagggcgaaggagtcagtgtgcaagtggggggaggagagaaaaagaagaccaaagggaagcatgcgcatacccagagccagattttcaagtatgcgtacgggcagattgaaaaggaaaagatgatggaacaggaggcccagaaccttacgttttcaggagtgatatcgatggccaccgatgaagatatcaagaaaaggcccacggttgagatcgctttcaaagacctcaccctgacactgaaggggagcaagaagaagcttctgaggtcagtgacgggaaaactcatggctggaagggtggctgccgtgatgggcccatcaggcgccggaaagaccacgttcctgagtgcgattgccggcaaggcaacaggatgcgaaacgacagggatgatactcataaatggcaagacggaacccatccgcgcgtacaagagaataatcggctttgtcccgcaggacgacatcgtgcatgggaacttgacagttcaggagaacctctggttcaatgcaagatgcaggctctccgctgacatgttaaaggccgataaggttcttgtcgtggagagagtgatcgagtccttggggctgcaagcagtccgtgattccttggtgggaactgtcgagcagcgaggcatctcgggcggccagcgcaaacgagtgaacgtcgggctagagatggtcatggaaccctcggtcttgatcttagacgagccgacatcaggcctggacagcgcctcgtccttgcttttacttcgtgccctacgcagggaagctctcgagggtgtcaacatctctatggtcgtccatcagcccagctacacactgtacaggatgtttgacgatctgatacttctggcgaaaggcggcatgactgtgtaccacgggcctgtgaagaaagtggaggagtactttgcaggactgagcattgtggtgccggaccgcgtgaacccaccggactactatatcgacatcttggaaggaatcgtgaagccggacgcaaaggaaccagtcaatgtgaaggatctccccatcagatggatgctgcacaatgggtatgaagtcccccgggacatgctgcagagtgcctctgactcagaatcatctctcagaggggaaagaggccatgcctcgggaagtgacgctggccaatctattgctggtgaagtgtggggtaatgtcagggacatagttgggcagaagaaggatgagtatgattacaacaaaacttctgaaaacctgtcgaatcgacgtactcctggcatccttaggcaatacaaatactacctggggaggtgtggcaagcagcggcttcgagaggctcgaatacaaggtgttgactatctcatacttggccttgccggtatatgtctgggcacactcgctaaagtgagcgatgagacatttggagcgcttggctacacgtacactgtcattgctgtgtctctgctgtgcaagattggggccttgagatcgttctcgctggagaagatacactactggagggagagagcgtccggcatgagctcgctggcatacttcctgtccaaagacacgatagatcacttcaacacgataatcaagcccatcgtctacctctccatgttttacttcttcaacaacccaaggtcatcgatctgggagaactatgtcgtccttcttgcgctcgtctactgcgtgacggggattggatacaccttcgccatcttcttccagccaagttctgcgcagctgtggtcggcgctccttccggttgttctaaccctgatagcaacccagcaaaaggacaccttcttcgcaaacctgtgctacacaaagtgggctctggaagcatttgtgattgcaaatgcgcagaagtattccggcgtctggctcataacacgctgcggctcgctgttgaatagtggctacgacatcaacgacagaatcctctgcatagtggttcttgttgccaatggtgtgatattccggtgcgtggcattcttctgcatggtcatcttccagaaagactga

SEQ ID NO: 27145 - DNA, 189 bp, Zea mays
  Peptide Sequence Number=SeqID_68924
atgcatacagggcaaggatatcatgatgtgaacaagcaggggaatgtcaagaagcaagctggccttcccgagtacgagtatgggttcgttggatcattctattctatgtcaattggaagttgcatttcagactctggaagccccgttccttctccttttaaggtaaggaaacttgaaatctcgaactag

SEQ ID NO: 27146 - DNA, 321 bp, Zea mays
  Peptide Sequence Number=SeqID_68925
atggcgagctgcgagaagccggtggaagcgcgcggatccgttgcaaccgttcgccgtgaggaaaggggagaacctgacgtgcgggacccacgcagcagcgacggatgcaacacgactgacaagtgcggcccgccagtcagtgaatcgcggaagatagagacgcatccgcggtgtgaagccgacctgtgggctccacccgccagagagggtgcggcaacgcgggtgcgggagcaggccgcgtggaggttatctcctgatgggccaaatgaagcacccgaggcccagctgtgggtagggcaggctatatgtggggtaggttga

SEQ ID NO: 27147 - DNA, 567 bp, Zea mays
  Peptide Sequence Number=SeqID_68926
atggcgtcgtccctcctcgtgtgcctcgtctttctgtccgcggctgcggccgccggcgctgtgaccccccgccggtccctcgcggcacaggcgagatcaggcgacattgcgtccctggcggctgggagcccgatggtggcagggctcatgaacgaacggctcaaggccctcaccacctcctttgcgcagcagatgggcagggagttccactactgcatcaagaacatggaccgggagtggaacactgccttcaatttctcttccgatcccgccttcctgacagcctgcatgaaggaaaccgacggtgacctaccgcagcgcgtgtgcacggccgcagagatgaagttctacttcgagagcttcctcgaaggcaacggaaggaagaactacgtgagaccgaacaagaactgcaaccttacttcatggatcgacgggtgtgagcctggatggtcctgcagcgccggcaaggaccaggaggtcaacttaaaagacgccgtcaacatcccgtcccgaacccttgactgccgaggttgctgtgctggcttctttgccaacgaatcaagctga

SEQ ID NO: 27148 - DNA, 276 bp, Zea mays
  Peptide Sequence Number=SeqID_68927
atgggctcaattgttctgtacattcaggttcaaaagcatctgttactcgggcattgcaaagagctgagaggctctcctcttgttcgatttattgaagcatttggaactgcattttctagaacaacattttgtgttccgatcagtgagcaaatcagaacattcatccagatgaggactaacctgaaggtggtcgataactccggggccaagcagaatcaacaaatacccataagggaaacctcgccaaaattagaagagaaccaaatgtatccctga

SEQ ID NO: 27149 - DNA, 608 bp, Zea mays
  Peptide Sequence Number=SeqID_68928
atggaggtgaagtttaccggtaataatgggttggtgaaggcggttcacggagcaaggcgagatcgcggcgtgataggattccggcgaggaattctgctcgtcccgggctccaattcacatcggggcggtgacgatttcacaccagggaacacttcgaaggtctctgggctagcctcgcgcttcaatctgctacacaggcgaagagcagatgtggcgactctccttctctctcttcgcagtgctggcacggtagtttggataggcgcggtcaagggtgtccagccctactgtaaccctctgaatttgggccgcgcgcgggtgccccctctccatgacaggtgggtcccacctgtcagtgtcaaccgcgtccgcgcgctctccctctgcccgccctgcccgcactcgctctccctccccagccttatttcgcccacgctcgccctctctcgcgctctgtcgccgatgccaaagcccgctggagatctgcgcccgtcgtgccagtcgtccaagccgctcggagccatccccgctagtgtgttcgccgagtcctcctcaccagttctagccaaccccggcaaccccagacccccggaggcagctcttgccag

SEQ ID NO: 27150 - DNA, 948 bp, Zea mays
  Peptide Sequence Number=SeqID_68929
atgcctctatcaactgacccgcacttggatgtagatcaagacatcaactctattccaaggtatcagctcattgacaacatgctcgaccatgtgtcccctccagggctagtggcacttttggagagcttggccaccttgctcatcaatgcacaaagcccaagaaaacaaatcaagggcaagaaagatgatgaaagtgaagatgaaaagaaggaaaagaagtttttcaagaaaaaggatggaaaacaaaagagattccacaaaagaaaggatgggaaagcatacattgttggtgattggctcaacattgaatccacaaacagctcttcctcaagtgaagaagataatgaaaaggtcgccaccatcatcgtggatctctcttcaccaccaccatcgccttcatccactacacacctatgccttatggccaaaggtgaacagaaggtacaaaatgatgatactagtgatgttgattgtggtagtgatagtgataatgaatatgcttctcctacctatgatgagctaaccgatttgcttaaagagtacactcaaatcattagaaaatctaaagcaaaatatggtaagttaaaagatgaaaataagtccttgattgctaagtatgacatagttgtcaaagctagtgatgaaatgaagcaagaaaacaaaactatgtcatccactaacaatgagcttaaggcctcccttaaagatgttaaagaaaaatatgaaaaattgaatgaagcaaatagggagctaaattataggcttgtcaagataaaagaagattacacaaaaattaaagttgatcatgataatcttcttgttgcatatgagtttttatctattgatacacataaggctattaaccccgttgttaagcttgatgtagcaacttcatgtgatgatttgagcacagatgatcaatctagccatcatgatgatttggtttaa

SEQ ID NO: 27151 - DNA, 234 bp, Zea mays
  Peptide Sequence Number=SeqID_68930
atggcgaggctgggcctgatggtggaggagcacggtcgcggacggcggtcgagctctaccggcgacgaattcgggcgcagggggcctggcgatggggaagctccggcgagcttgaagaacgggcacgcgcagctcgaacacatgccagtggactcatggcttcctgctcagcgtgatccagtggctggtcctctttttagcactctgacatatgagtccttctacagagcttag

SEQ ID NO: 27152 - DNA, 597 bp, Zea mays
  Peptide Sequence Number=SeqID_68931
atggccgtcgaggaggagcaaaatgcattgcaatctgagctgagcacattggaaaacacaattaagaatatcaaagatgatgtctcacgagcagaaagcagagcgcaaaatgcagaaataaggtgtatggagctaactgtacctaatatagagcttaatggggaactaaatgcccttaaaagcgagaagtcagataaggccagtcttttggagaagaaaattacagagtcaaatacccaattagagcatggaaaggcagcggttgatgccattgttgaacagcaaggtatgctgaaatgtacgatgtctgatatggaacatattattgaagatctgaagggtaaagtttcaaaaactgaaactagagctgagtgtgctgagtcaaaatgcacactgttaacagacacaaatttagaacttagtgaagagctagcatttctaagaggtcgagtagaaagtctagagaactctttacatgaagccaaccatgcgaaggtgtccactgccaaggacattgttgtgaaaactaaaattattactgatttggtcagaaaattggcactggaaagagaacaacttcatctccaggtgctgtag

SEQ ID NO: 27153 - DNA, 186 bp, Zea mays
  Peptide Sequence Number=SeqID_68932
atgactcttagctgggctaccagacgaagtgcacctcaggctcatcagcgaggtggacgatgggctggacgacgtgatgacgccgtcgtcggatgtggtgcccaggacaacccaagagtcaccgatgttggcgacgacgatgaggtcccctgcttgacagtagacagcgtggtggagccgttctga

SEQ ID NO: 27154 - DNA, 375 bp, Zea mays
  Peptide Sequence Number=SeqID_68933
atgcaggcggcatgcaaccacgccaagtggacgcacttctccaactcccgacacaccagcatggaggcccaggcccacgcgtcgcgcaactggcgcgccgggagcaacaggcgacgcttcgccttcgccgaaacaaccgcgccgaaaaagggaccgggaaagggggataccccgaaagggatccttccccatgaaggaaccaggctccgagcctccttactgatcagaggttcgaaggctggccccccgaagggttcaacagccgcctcagatcgcgtgggcccgacacccactacttgtcagaggttcgaaggccggccccccgaagggttccacggccgcctcaggctactcgggctccacgcccattactga

SEQ ID NO: 27155 - DNA, 1386 bp, Zea mays
  Peptide Sequence Number=SeqID_68934
atgtcgggagatcacgccaagaaggagatggagaccggcgaaaagcccactacaagccaagggagcacttcatcggaagcgtcccgcaccaagaggaaggagaagaagaaggactcctccaaagggaaggagaagagatcttcttcacaccacaaagagaagaaggagaaatcctcttcccacaagccgcatcagagtggggacaagaaaaagaggatgagcaaggtggtctactacgagaccgattcttcatcggcatccacctccggctccgacgcggcgtccgtcacttctaagcgccaagagcgtaagaagtatagggatgaaaactatgatgaggatgaagtagcccaaatcgagcacttcaactcccaagccacaaccatactcctcgcctctctaagtagagaggaatataacaaggtgcaagggttaaagaatgcgaaggagatttgggatctactcaagaccgcgcacgagggtgatgaactcaccaagatcaccaagcgggaaacgatcgagggggagctcggtcgcttccgtcttcgccaaggggaggagccacaagatatgtacaaccagctcaaaaccttggtaaaccaagtgcgcaaccttgggagcaagaaatgggatgaccacgaggtagttaaggttattcttagatcactcatcttccttaaccccactcaagttcaattaattcgtggtaatcctagatacacactaatgacccccgaggaagttatcgggaattttgtgagctttgaatgtatgatcaagggctcaaagaagatcaacgagcttgatgatccctccacatccgaagcacaaccagtggctttcaaggcgacggaggaaaagaaggaggagtctacaccaagtaggcaaccaatcgacgcttcaaagctcaacaacgaggagatggccttgatcatcaaaagctttcgccaaatcctcaagcaacggaaggggaaggattacaaatcccgttccaagaaggtttgctacaagtgtggtaagcccggtcactttattgctaaatgtccattatcaagtgacagtgacagggataacgacaagaagggcaagaggagagaaaagaagaggtaccacaagaagaggggcggcgatgcccacgtgtgccgcgagtgggactccgacgagagctccaccgactcctccgacgacgaggacgctgccaacatcgccgtcaccaagggactcctcttccccaacgtcggccacaagtgcctcatggcaaaggacggcaaaaggaagaaggttaaatctaaatcctccactagatatgagtcctctagtgatgacaatgctagtgatgaggaagataatctgcgtatcctttttgccaaccttaacatggaataa

SEQ ID NO: 27156 - DNA, 384 bp, Zea mays
  Peptide Sequence Number=SeqID_68935
atggacgcgctgggagcgttggccgcgcgtcaggggccgactgcgcgccatggctgcgagcgggcaggccacaagccgccgcgccggctagccgcgcgcaggctggccacgccgggccgccgcgacgccgactggtcgtgctggccggccgcaggccactacgtcggcgggccgcaccgagccgccgcgactagtcacgcccgcgccgggggccgcactcgcgccgcgcctgcgccgaggccgcgcccgcgccggagccacgcagcgggcaccacgagaaacggggaggagaggaaggttgagggggagaggggcgagcccaccacggggacggagacggctcgagcggcttcgaggggcgggggggcgactctgtgcggctga

SEQ ID NO: 27157 - DNA, 381 bp, Zea mays
  Peptide Sequence Number=SeqID_68936
atggttctagtcgaagatagatcacagttgctgggggtaaaaaaggggggccgcccaaccaccaattcaaccgttggggcaggccggtgcgccaccagacagtgtctggtgcgccagccacatcacccaactgttagggttcttacggtttcgaccgttggagctttgtcttctggtggcaccggacagtccggtgccgcaccagacaggttaaaccctatttccctttcagtcgtgctgaagcagcagggactcgtcggcgagtggctgatcctcatgttcgtgcagcgttggcttcagcctctcaaggtccgtcagaaccccatgtgggagtacgccggggtggaggactttgaccgtactccgtctaatcccttgtga

SEQ ID NO: 27158 - DNA, 258 bp, Zea mays
  Peptide Sequence Number=SeqID_68937
atggcgatgtcccgagccaagagtgtacgatctgcaggaggagaaacgcgcccaggctattgttcggctaggcgcgatccgcgcggttgtggagctccacgcgcgcggcacggggttctgttgcgctatactctggtggctggttccaggaagaggatgaccctggtcaagtggttgtacatggccgagttgatctacatcactagtttaggcttaagtgaattgggagtatggtcttatcctttgtaccagtattaa

SEQ ID NO: 27159 - DNA, 294 bp, Zea mays
  Peptide Sequence Number=SeqID_68938
atggcccgcatgcagaagttggcagtggcgacggcggcccgtggtggcctttggtgctgctggcggcggcggcgacctcggaggcggccatcagctgcgggcagcggcgtcaagagcctcaacaacgccgcccgcaccaccgccgaccgccgcgccgcctgcaactgcctcaagaacgccgccgccggcgtcagcggcctcaacgccggcaacgccgccagcatcccctccaagtgcggcgtcagcatcccctacaccatcagcacctccaccgactgctccagggtgaactga

SEQ ID NO: 27160 - DNA, 606 bp, Zea mays
  Peptide Sequence Number=SeqID_68939
gttgatgatgaaaagccggacgaatttgaaaaagaaaacggatggggttctctgttcatgagtgaccctcaagttctttctatgcacgatccacaaaatctccctcgttatattggccggcaaaaatgtgatccgatcagcacacaggagttttttgcactgcgccacgattggctacagctgctagatggcaagaagacatacctccgtggtactgccgactccaattatgccgactctaacttcgtaaccccaaaacctcttacggtcgcagtattatgtcaggagtcactatcatatttggttcttagaggtgcaagaaaacctatcacccagcaaaagttcaaggcttgtgatcaggaaaatcttgggaaaatgcaaggtagtcaagctgaggtgactcgcttaatggaatgcgtggcaaggtccaaagtgaatttctgtcgtttagaatggaataaagcatacttctcaaatccaaaagcatttttctcaagtgttgtttctgaatttgagcacttggtcaattcagttgcaaatgggctgaatgctgatgagctttacaagtgcctcaggagaattcgtcatccaggagtgaggatatga

SEQ ID NO: 27161 - DNA, 624 bp, Zea mays
  Peptide Sequence Number=SeqID_68940
atgcgcgtgctcaacgacagccgccccaccgtcgcccccgacgcgtcgtcggcgccgccgctgctcatcacgccaacggcggcggcggggatggtcggcgtggtccagctgcagccgggcgccgccggagggagcgacgctggcttcgacgccgacatggtcgtcatcctcgccgcgctgctctgcgtcctcgtctgcgccctcggcgtcaactccctcgtccaccacttcgtgctcaactgcggccgcaccgtggccgcacctgcaccaccacacgctgccgctgccgctgctccggccactgacagtgacagcaccgggctgaagaagagggagctgaggaggatacccgtggtgctgtacgaggccaataagcagcccagcgcgtcgtcggggaccgacgacgacgacgactgcgccatctgcctcggcgagttcgacgacggcgaggagctgcgcctgctcccgggctgccaccacggcttccacgtgcaatgcatcgacgtgtggctggtcatgcacgcgtcttgcccgacgtgccggaactcgctcctggtccaccaagaccgtcacgccggcgccggcgacggcgaggcagcaacggtggcaggggaagaggcatag

SEQ ID NO: 27162 - DNA, 573 bp, Zea mays
  Peptide Sequence Number=SeqID_68941
atggccgctctccgccacctcgccgccggccccacctgccaccaccaccaccaccacggcgtcgcggcagccaccgcctccctccggctccatcgcctccccctccccttccgcccccttcgctcccgctccggctccttcaccagggtttatgcgatctccagcaatgacatcagggtcggcaccaacgtcgagctacaggaaccatccctttcaaaggagaccaagcaatttacatacaaggatggctcccagttcgtgttcatggatctgacaacatttgaagaaagtcggttaaatgaagcagatgtcggtgacaaacaaaaatggctgaaagaggggatggactgcaatttgttgtactggaatgggaagatcattgatttcgacctcccaatcactgtgaggctgactgtaactgatactgacccaggggcaagtgatagtgcgcaaggaggaacaaagcctgcaaccctggaaactggagctgttgtcactgtgccctcttttgtgaacgtaggcgatgatattctggtggattcaagaactgggcagtatatgaatcgagcataa

SEQ ID NO: 27163 - DNA, 453 bp, Zea mays
  Peptide Sequence Number=SeqID_68942
atgtccttgggcttgctttgctggctctctgttttcgtctctcgtgttgcttttaatctggcgttcaagttcctccgagaggacggcaagcagaggagaggtaaccctaatcccaaattccttcgagttttcctttcacttcccaacacccggcccacactctccttcaatccctccgacgacgtcgacaacgcatccccgtggccatccttgattctcctcgccgaagaggcgttagccaagtcgtcgcggtcgcggcccgcgggccactcgagagtgttcctggtgagtagcaccaccacggtggggagcgggggaggcagcactggcgatggcagggtgcagctcgccgacaacctcgatctcgacgtctatgtgcagtccaagtgccagactatgaacgagaagctcatgggcagtaaagaaatgcatgtcctcataaatcttgaatga

SEQ ID NO: 27164 - DNA, 1071 bp, Zea mays
  Peptide Sequence Number=SeqID_68943
gcatcgtctagggtgaggcatcaggcgatgcctagacgtccaggcgcccatataattctaggccttaaggcgttggtacaactcctcaacttcccgtacgaccccgacagggtggcctcggccgacgaggccgtggcgtcggagctcgactcggtggccgcgctgcagtgcctgtgcagctcccgccgcgggatcgggccgctggtagacgaccggtggtccctggtgcagcgcctggaggccgaggccagggggagggacgccgacatcgccgcgctcgggagggagctccggaggctgcagcacgacaacgccaggctgagcaggcgggtcgtcaggagcaggaacgacgacgagcgtcgcaggacgcgtctgctgctctccgtgcccaaggagctggcgacgccggcggccctcgtgagccggttcgtggcggcgtccaggtcggtcggcgagttcgcggggctgctgcatggcgctggtacctgtgccagcagcagcgacgacgcagttgcagagcaggcgcggtcgtggaggaggtacgcgatcgaggcgcacctgtggcgagcgatgctgctcgctggcaccggcggcggcgacgccggcagcagtttccacgggatcatgaagccacgcgacgcgctcgacgccctgatgcagttcccacgctcggggctctcagcgttctgccgggcagcctacctggccgccgtgcagccggaggcggaggcggccgcgtgccggaacctggaccacagggccttcgtgtcccgcggcgggcacccgaggacgcggctctaccgcgcgttcgcggcggccgcgaggtccgtgtgggcgcttcgggtgctgatggcgggctgctcggagtcggagcagagtggtggtggtggtgatggtgtcaggatgttctacgcgagcagggggagcctgtacagggcggagttcatggagagcgtgcctgcccttggcgcggaagaagaccgccgcgtggagacgggtgaggagaagctcagcgtcgcatttaccgtgacgcccggtgtcaaggtcggcgacacggtggtgccgtgcagg

SEQ ID NO: 27165 - DNA, 261 bp, Zea mays
  Peptide Sequence Number=SeqID_68944
atggttcgtgccgatcgcacgagggacaatggacaagatttgcagagaagtaagttcgacggccccgtcgaacttaacattaagaacgtgggtaccgtcgaacttaacattaagaacgtgggtaccgtcgaacttaacattaagaacctgcgaggactacacaataagttcgacggtacccacgttcttaaccttaagaacgtgggtacccacgttcttaaccctgcgtgcgtctgcaaggactgcacaataagttcgacg

SEQ ID NO: 27166 - DNA, 252 bp, Zea mays
  Peptide Sequence Number=SeqID_68945
atgagccgttggatcccaaaccaccgggcgagattaaatcgtgcaccagatgatacagtttgttgggacacggaagaatcggtcgtaagcgttgaatcccgtatctatatgcgctcggctgagtttgttggagggaagcagatgaatccgactccctggacccacatggaagcgagggaaatcaaccagagtgtgccacctgagactgcccaaaggggcccagtcatcagcgccgtggggaaagttgagtag

SEQ ID NO: 27167 - DNA, 222 bp, Zea mays
  Peptide Sequence Number=SeqID_68946
atggcctaccagcttgagttaccagatcatttgtctgatgaacacaatgtattccacgtgtctcaactcaagaagtgcctccgtgtcctagaggaacagttatcgatggaagaactcggtgtggaaggtgatctaacttacacggagtatcctatcaagatcattgacacattgactcggattacaaggaataaagtaaacaaaatgtgcaaagtgcaatga

SEQ ID NO: 27168 - DNA, 819 bp, Zea mays
  Peptide Sequence Number=SeqID_68947
atggccctagggaaaggcagcaagggcaagcgcggtaagaaggatcagggtgagaagcaggagcgtcctccgactcctccgttggagggacttcagcaactccaagttcttggaggagcagttctccttcaagggacaggagtcaccatcgccggtttcgctctcgcgtccatcgagcgggcagggctcgaggggtcggatgactcagaggaggaggactttttggaggggggctcttcgaaggagaactccaaggaggacgactccaaggaggaggaaggtggtagtagcgaggatgggagtggctatgacggtggcaacgagggcgacagcggcggcggcaacggtggacggagcaggagtaatgacagcggcaacaatggtcacagggtgaaagggaaatgtgcgggccatttctattatgttttggtgattagatgctcaacacatattgttttgtctaaacatgagctaagagttaaagagaagcaaaaaggaaaagcaagggtcggtggccacaacagtcggcttcgccaaataaggaagggaatcgcgtactgttcactgcccggtggtgcaccggactatctagtgcgcccacagacagaaggcaaccagagccttccaaatggaacaccaacggctcctagctaccatggggctataaaagggacccctaggtgcatggagcagaagaccaagcatccattgaacatcctacaatgcctagacttcgcaagcacacgatcacctattcgtgacaacggcaacgacaagagtggcagcggcaacgctggtggcaaggcgccaccggcttaa

SEQ ID NO: 27169 - DNA, 354 bp, Zea mays
  Peptide Sequence Number=SeqID_68948
atggcgcatgggccaactaccctcaatccggcccagttctcctttgactccgtgcagcccgacccgtggagtagtgacgccgacagcctgggcccggctgccggtctctcgtgcttgaccgtccacctcgccacgaccgcgtggaccaagtccgtcgccggtgatggcaggttccctcaactaccttgccccggacgttgcgcggctggccgacctatgcggactcaccggactataaggcatggacacagactctccccttacccccctgcgttcgtagttcaccactccgcgaggaatttgccgtcgccattactaccgtgggtagacgagagggagacttcaccgggttaa

SEQ ID NO: 27170 - DNA, 465 bp, Zea mays
  Peptide Sequence Number=SeqID_68949
atggctgggaagcttgaccagggaactctacgagagagagatggagatgggctgggcaccgagcgctgcaggaaggagataagctccgtgagaaaaaatctcaaggactacgtgcgtgtacaagggaagaagaagcagctgggctgcgcgcggttcttatccagggcgtgggaggaggctaaaaatctgctggggacggcagcgcgagtccggcaagcgctggacggacgtatgaggagctggacgacgatgcccacgacgatgaggaggaggacgcctgcagccggcgccgaggttacttggctctcggcggcgagccgcaggagggcggcaattccttgctggcggcggctagggtttgcgggggttttggggagggcgcgtggtggtgggggagggcgcgtggtggtgggggcggacgcggagataagaacattcgacgtacaactttcaagtatgttttga

SEQ ID NO: 27171 - DNA, 987 bp, Zea mays
  Peptide Sequence Number=SeqID_68950
atgacgccgtacattacaacgcatgtttcgtcgtcgtcgcgcatcgcgctaggggctcctcatcagcatggtgggttcatcatcggagatgggcgttgtttccactctccactgaatgaagagtacatccaggaagaaagggcattcatctctctctaccaagtgatctgtgaccacaccttagtgggcaaagtggacaacggagttcgctgcgccgaggaggccatgatcgatcgagcttcagttaccaaggggatcccgggcttggccttgtgtgggaccacgcccctttgctccgatggcggggttctcgttggtgtagagattgttccaaagcagaagactgctcctaggcttaaggtgatcatgctcttgaaagatgcttttgggcaggacggtatcgttgatcgtgactcgatggttcgtgcggtggacctcgtcgtgtccctaccgccgttcaagggtcctggagactcccctcaaggtaaccaacctacccctgcccctattttccccttgtctgccctcggttgtgcgcgattgctcaccggagtagagttgtgccacggccaagccacctccccatggaccgccaccctgcaatgcccctgtgcggggctgtgcccatggccgcgttcgccatactcccccaaacctcccagagcccttcccgatgccccggagcccctggcgtgcccgccccctcatctccggcggagctccaccacggacatgggcgacgccaccactggcgaccagggagccctctctcaggatggtcgttcaagcctcgatgttcatctcaaatcggatggccctgatttaaatagatcaaacctaatcataaccgtccgctcggattcgtccctcacccgcaccgctgccaccaggctcggcctgtcagccccgctgaccccaggtcgttgcccgccttggctcacctatcagtcgtgcgcgtttgcccgcgtccgcgcgctcgcctgctga

SEQ ID NO: 27172 - DNA, 264 bp, Zea mays
  Peptide Sequence Number=SeqID_68951
atggcggccgccggtgagatattcttgccccgacctgtgacaccccagtgtcactcagggtttttctcaaatgccaaaccaagaaccatcattttatgtgaaccaaaaatatttaatgggcaacaagaaatgttgagaaagcttagccaaaataactccaataaacgccaaatcaagcttctcatgtggggactcattggggctcacttcagaattctgaaatcagacctagccaaagatcaggagtcgatctctaatctctga

SEQ ID NO: 27173 - DNA, 981 bp, Zea mays
  Peptide Sequence Number=SeqID_68952
atggcgaattcaatatcatccccttgtcaccaaatcaaccccaaaggtttggcggttggaggttgtgatggtggtggactagaatgggtggcggctgctgtggatgactgggtggagcgagtggagactgatgagggcatagcacaggctatcatccggtccaacatcgacttccgcagagagccttggtcaaaggtgtcggaaaatgcaaaagatcttgtgaggaagatgcttgatccaagcccctactgtcggttgactgcccagcaggttctagaacatccctggatacagaatgccagtgcagctcccaacatcccacttggagaagcagtgaggtccaggctgaagcaattcactgttatgaacaagttcaagaagaaggccctgcttgtggtggcagagtacctaccagccgaagagctggaagcaatcagggagttgtttcagttgctggacacgaacaaggatgggcatcttacaatcgaagaactcaggaagggaatgcgattgataggccacaatgtccatgacactgacgtcgatatgctcatggaagctgccgacatcgacgggaacgggaccctggactgcaaggagttcgtgacagtctccattcacctgaagaaaatccgtagcgaggatcacctgcccaaggtgttcagctacttcgacaagaacgggagcgggtacatcgagatcgaagagctgaaggaggccctctctccaagaggtgaccagaaggcgatcgaggacataatcctagacgtcgatatagacagggacgggaagataagctacgaggagtttgagctgatgatgaaagctggagtggactggaggaatacgtcgcggcagtactcgagagcggtgtacaacaccctcagccgcaagatgttcaaggacgcgtcactgaagcttggtagtaacaatggtccacttgctgctgcagccgtcaaagaacaacaagatgttgattga

SEQ ID NO: 27174 - DNA, 552 bp, Zea mays
  Peptide Sequence Number=SeqID_68953
atggctcatttaatgctgaggcgtcacatcgcctgccagtggagtggacaagtggcgcgtcttatccgcattaaatgcaggggccgcgcggcccagaggccttacatcaggctccgcccgcgggcttacgtcacgggcaataggccacgtggcagcatcgggcctccgaccgaaaggggagtgggagcgcacacggcgtggtctggacacgtgtcagcaccggacccccacctggccttgattagggcctgggtatttcttgtctcagaatcctgggacccgtcccgggggtccggtttgtgcctgtggagaaaccggttcttcgttttggggctaacaatccgaagagatgatgggacaagattagggaaggagaaggtggccgacaaacataacgagaaggagaagatccccatcgacgacgaccttaaaggcgagaactccgtcgacttaggaacgaagaaggaggacaagaagaagaagagtgttggggcagaggccgaaccagacctcgatcatcactgcataggttttcccccttatcttgactaa

SEQ ID NO: 27175 - DNA, 417 bp, Zea mays
  Peptide Sequence Number=SeqID_68954
atgaaggacagggctcatggagtcatcgaaggccacgaaggtgcctcagacaagctcgccctcaaggaggaggacacacacaacgattccagcaaaaaatggtggcgcccacatttctcctgcaccacgcgcggctctgtcaacctcgcctacgccacgctcggctccatcgaccgacccgcaccttacgtggccctcgacgagcaccaacgtggtcaccggcaattggattttccgccacaagctgacctcggatggtccctcggccgctacaaggcccatttgggtccttcggggcttcacccagcttctggagtggactacgacgagaccttcaccccatcatcaagttcgccaccgttcgagccattctcttccctttgccctctcttaggactgggcgatccatcggcttga

SEQ ID NO: 27176 - DNA, 453 bp, Zea mays
  Peptide Sequence Number=SeqID_68955
atggttaaaaattttggcagcaaaacagtgcaaatagcaatgaatgctgtggtaacttcacacctactcgtctgtttatatagtgatgcagcatttgagaacaagtccccaacaacactcaacttggtgcacaacctgctcggatggggtgcgccggcgttcaccagaagaatccgtgtcagcgcctctaccctcggcgatctcaccgtcggggagttcgtgctcttcgtctccaacctcccctacgggttggcgttgccgatctcgtctttcttcgtgctgctgctggaggagctcggcctccaaccacagcacttcatgccctgcttcatccttcaggcggccatcatcgcctacccctgcgggatgtccgtgggggcgacgcttcttcctccagcatttggaggaatgggtgttgcacaacgaccttttcggagatggaaggcgagctga

SEQ ID NO: 27177 - DNA, 888 bp, Zea mays
  Peptide Sequence Number=SeqID_68956
atgatcgcctcctcgctgcgccactgctccctcaccggcggcgctggcgggcggcgccggggaggcaccaggcgccgcggcgccgagggcggcggcgacaccgacggcgtcaccgtggagctgaactccgaggtggcactgccctaccactgggagcagtgcctcgacatccggacagcagagatgctgttggtgaagcggaaggcgtgtgcggtcatggtggagtggagtttccttctttccagccctgccccagctgccttcctgcaacctgttccccgatacctgcatagtgcctgcacacccccacccccacctctaatgccactagttcgtacggggcaagtgtactacatcaactgggagaacggcacccggacgacggtggacccgcgcacggcgtcggccttcgtctcctccccgacaccgcgctcctccacgtctcggcgcacccggcgcgcgtccacgccgtcgtcggggtacacctccgtgtcgtcgtccgtgggcgcggcggacgtcgtgaccggcgcgtggcggggcgtcagcaacgacagcgggtacgacaacgacgacgagcaggaggacggcgaggcggacgacgaggacgaggccgagagcagcagcagcaccaccaccagcagcagcagctccagcagcacgggcagcagccgggggtcggcggtctcgtcgacgctctcgtccttctcgcccaccgacgagtccggctccggcgacaacggcggcgcccgcctcggcgccggccacgtcctcgtggcggccggctgccgcgcctgcttcatgtacttcatggtgcccaagcgcgccgacgtgtgccccaagtgcggcagctccggcctcctccacctcagccgcaacggctacgcctga

SEQ ID NO: 27178 - DNA, 504 bp, Zea mays
  Peptide Sequence Number=SeqID_68957
atgcccggtgggtttgttgagaacggagctgacgaagccggcccactgatcagtggcagagaaaccaagcgcgagcgtggaagacagacaagcgggccacggtttccagcctcccagactgatgtgcgggacccacgcggaagtgacagagtggtgaagagtgcgcgcgtgagggctgacgacctggtcccacacgtcggcgctgcgctcctgagttgggctgctcacgcggagaagacttgggccgcgcagggagaaaggggagcctcgggcgcgacagggagctccaccacgcccgacctcaggcctcggcctcagcctcgacctcgggagaaggtctccgcctcgcccgaccccaggcctcggcctcagcctcggcctcgggaggagtcacatcctggcccgacctcggcctcggcctcaggagaaggctcaaggcacttctccgatagccacgttagcacacgtacagggcccaaggcacttctccgccagccacgctag

SEQ ID NO: 27179 - DNA, 141 bp, Zea mays
  Peptide Sequence Number=SeqID_68958
atggccttgctagaccttcccgagcgcctccagccccaggtggcactcaacttggcggccatcatcgcctacctctgcgggatgtccatggaggcgatgctccttcccgcttcttcctccagcattcggggggaagggtga

SEQ ID NO: 27180 - DNA, 396 bp, Zea mays
  Peptide Sequence Number=SeqID_68959
atggagccgaaggtgcaggagcagccaaagctaacatctgccataatagggactcatcgaaagggaaaaagaatggccaacgtgttgaaggttgtactgaggcttgcaaagatggcctcgcctataacgccaaaggttactgaggatgtgattaatgaactgaaagtggctgccagtgtagaggcttcttttgatataaacaaagccagatcttcaaagactgatttaataacagacgttgttatagaaaaagaacaagttaaagcttccaagattgaagaaattgaagtatgctgcgagatgatggttaaaatgggctatccgaagcttgaacttagactatctgttatgcctaaggaccatcttgcagactatttagcatataataatttgaag

SEQ ID NO: 27181 - DNA, 156 bp, Zea mays
  Peptide Sequence Number=SeqID_68960
atgggggtcggtgggcgcgagtatcattgggactttgtcatgccagtgccgccgatcgtcatgcgtcgtcgcctagaacaacttaggataaaaaatgagatagagttcacccaatgtggagacacgctatctggcattgggtatattgggacctag

SEQ ID NO: 27182 - DNA, 1512 bp, Zea mays
  Peptide Sequence Number=SeqID_68961
atgggcgcggccgccgccctcgcgtcactgccggtggcctacgcagacagcaatgagcagggagcggtcgacacagtagcgagtgccgatcccgcggttggggaggatttggcccgcaaggagaggaagaggatattggagcttgtccagagccgagggatgcagcgcgggtcatacccgaagtttgatgttgcagtgaagggccagaaggtggttgttaaattcaacatgccatctaattgcaatgtatcacaccttatcgttgatcttgtaacacatattggacttgaggcagaacaacatggtggtggctcagaggttttagtgcgtgcttgggacagtccagctgcacgtcaaatcacactgaaccctcccaagaagactagcactggagatcacaatgaagatggtctctgtgttctgatatttgaaccacttattggatcagattattctgaaattgaattcatcaagcctgggagttttagtttgaaagaacttgaggctttgataagtgctttaaaaatagcctctgaaaaggggtcatcagggaaaaacacaccaagaaaaggaaatggtcaaagatccaagcatttgccctctttggagaaagttgtatctgatttagaggctatgggtgttagagtctatggatttgatgaaacatcaagtgttccaatggatggcactgtaatctgggagaaccttgcaggatatgaacctcagaaaaggcacgtgccaccagtttgctattccttcccttttcttaaccaggaaatagaggatactgtactcttagctttacagagtcctgaagtgtatgatgatattgctcgcggcacgcgctgcaaatttgagacaaatagacctcgcgctgttctttttgagggcccacctgggacaggcaagacatcttcagctcgagttattgccaaacaagcaggaattccactactatatgtgccacttgaagttgttatgtcaaaatattatggcgaaagtgagcgtctattgggatctgttttttcacttgcaaatgatcttcctgaaggaggtattatattcctagatgaggtggattcttttgctattgctcgagacagtgaaattcatgaagctacacgaagaatcttgtcagtaattctgcgacagatcgatgggtttgagcaggatagacgggtggtagtcattgctgcaacaaatagaaaggaggaccttgatccagctctcatcagccgttttgattcaatcatctgttttggcttaccagatcagcaaactcgtgtggaaatagctgcacagtatgccaagcatttgactagatcagaattggttcaattttcattggccactcaagagatgtcaggaagagatatcagggatgtgtgccaacaagctgaaagacactgggcgtcaaagttaataagggggcaggttccaaaagatgagaagggggagccgagtcttcctccaattgacgaatacctttcctgtgctgaacagagacgataa

SEQ ID NO: 27183 - DNA, 510 bp, Zea mays
  Peptide Sequence Number=SeqID_68962
atgtggaccaatcctgccaccggacccaccagtaaggcatcaccaggccagaagccagaagccagaggctccccgcccctgaacctgaaggctggttggtcagaacgcctcgcgcgcatgggcggtgatgctcctggggtcctggtcatcgatgcgttcgtcggcacaggggatcgtcgtccttgttgcgtattgttggtgtttccggttcagcggatcgggaccatgcagcgcagcaactcgttcggcacgtcgtgggcggaccagtgggactacggcggcgacccgagcccccgcgcgcgcggccggcaggacggcggcgccggcggcaagaagcagcagggcggggtggagaagaccaaggcggccgcggccacggggctcaggaaggtcaaggagggcacggccaccgggttccagtggatcaaggacaagtgccagaagaagggcggcaagaagcagcagggcgcccatgacggctccgggatcgccggctactattgtcgctag

SEQ ID NO: 27184 - DNA, 165 bp, Zea mays
  Peptide Sequence Number=SeqID_68963
atggccgcctccaggttctggtcgaacgcgtcgctgaagggggacgacggcggcggcggcgggagtgagctcctttggtcaagactcaagggcggcaagagaggatgtggccttgtgtctgttgcgagttgctgtcgtaccacggctgcgatcggcgtgaagtga

SEQ ID NO: 27185 - DNA, 1035 bp, Zea mays
  Peptide Sequence Number=SeqID_68964
atgggtccgccaagttgcaggtgtgcgaataaaggaaactgtgtgcagctagcttcctggctccgtgaagtgtcttctcgccacggcgggcagcaacggacacggtctcctcctcagctcccaccaggacggcaagatcatggcgtggcggaccgggagcggcaggaaggacgggaccccgagcctcgtcctgcgcgccgtcctgccgacctgcgtggaccggctacggacgttcctgctcccctggagctacgtgcaggtccggcggcaccgggtggcgcacctgggtgcacccacgtggacgcggtcgccgcgctcgcggtgtccccggacggcgcgctcctgtactcggcgtcgtgggaccggagcctcagggtgtgggcggctgccggggtttccggtgcgtggagtccgtcgcgcccgcgcacgacgacgccatcaacgcgctggcggtgtcgcccgacgggccacgtgtacacgggctcggccgacaacaagatcaaggcgtggaggcggcacccggagcggaggcacaggcacaggcacaggcacgtgctcgtgctcgtgcagacgatggagcgccacaggtcggcggtcaacgcgctcgctctaggggccgacgggagggtgctctactccggcgcgtgcgaccggtctgtggtggtgtgggagcgggccgacggcgccggcggcggccgcatggaggccactggcacgctcagagggcacacgagggcgatcctgtgcctggcggcggcgggggacgtggtgtgcagcggctcggcggaccggacggtgcgggtgtggaggaggggagcggagaatacggggtacactctcctggccgtcctggaaggacacggcgcgcctgtgaagagcctagctttgctttacggacgtgaccgcggcttgttcagtggttggggcgacccagaggagggatcgtccggtggtggcggcggcacccattgtgctattgtttgcagcggcgcgttggacggcgaggtgaagatttggagcacgcttgttccttga

SEQ ID NO: 27186 - DNA, 687 bp, Zea mays
  Peptide Sequence Number=SeqID_68965
atgtgcgacttcttttggctgtcgccggccgatctaggcgaccctctcggacgtcgtccgggagagcctgcagcctccaccgccacaccaccaccgactgccggcggcccactcctgcttcctcggccatctgctcgtcgggctccccatcatctgccggaggaagaggcgttgctgctgctgcaagctcgactcaacttcggtggcgacgatcacgatgaagcgcgctcgcagctgcagtcgcagcagcagctggtgcatagcagtagcggcatggtggagctcatgctgggcagcaacggcagtggcggctgcgcttgcgatcatgcagctgcgctgtgtccacatcaccatccagaggcagaggaactgattcctcggcccacgtccgggccgcagcaacagctgtgcgcttccactcgttccagcttcgtcgagaggagggacgatgatgctcccgtgctacaggagcacgtcctggacatggccatggcccctcatcgccctcattcctcggcagtcaagagaaggaagagccagacgaagaaggtggtgtgcatccccgcgccggtggcggcgcccccgggggtgggcgggaggccgagcacgagcggcgaggtggtgccgtcggacctgtgggcgtgggaggaagttacgggcagaagccgattcaaggggtcgccgtaa

SEQ ID NO: 27187 - DNA, 144 bp, Zea mays
  Peptide Sequence Number=SeqID_68966
atgtccgcggtgctgttagagaagctgctcttcgataggaacgagggcgtccacacctacggcgtgcccccgcccttcgacctggtctccatgccccactgccacagtctgcgcccctcccccgccgtgacaaccgccccgtga

SEQ ID NO: 27188 - DNA, 807 bp, Zea mays
  Peptide Sequence Number=SeqID_68967
atgacggtgatgaagggcaatgaggcacctgcaccattcatgacatttcaatccacaggcttcccattagacattctaagggaggttctgcaagcaggattctctgcaccaactcctatccaagctcaatcatggccaattgctccaaggggtcgtgatatagtagctatggcgaagacaggttcaggaaaaatactgggctatcttctcccagggtttattcttttgaagcgcctgcagcataattcaagggaaggtgctccaaaaggccctcagctaagagagttggagcgtggtgctgacattgttgtcgcaattcctgggagattaaatgatattttggaaatgaatagagtgagcctgcaccaagtatcataccttgtccttgatgaagctgactatatgcttgatatgggatttgagccacaaataaggaaaattgtgaaacaaataccaccgaaacggcaaactcttatgtatactgccacatggccaagagaggttagaaaaatagcgtctgatttactggctaacccagttcaagttaacattggaaacactgatcagctggtcacaaataagtcaattactcagcatgtggaagttattccacatatggacaaatctagacgacttgatcagatcttgcgttcacaagatcctggatcaaaaagcataatattttgctccactaagaggatgtgtgatcagttagctcgaaacctaagaggatgttattgtgttctgatacatgagacttttattatgactatgtataagatattgtctcttattagtactagatga

SEQ ID NO: 27189 - DNA, 119 bp, Zea mays
  Peptide Sequence Number=SeqID_68968
atgcaggaccagctggagcagttcacgtatgtgatgcaacagaagttcctgtccggtgaagacatggaacatatggactactcacggatcgataacgatgagatgctggttgtcctctg

SEQ ID NO: 27190 - DNA, 381 bp, Zea mays
  Peptide Sequence Number=SeqID_68969
atgggcaagagcaagaaaggtggaagttcctcacaccattctggcgataagcggaagcgtgagcccgactcctccctcgaaggacttcggcgattttcgagtactcggaggaggactttctcctttcgagtccaaggaggtctggaccctacatccgggctgtcgagcgtgccgggcctcgagggctcggatgagtcggaggtctccttggacgaggcaaactcctcggactcgttcgaggagggcggcggtgacggtgatggcgacgacgacgacagaggcgacggcgatggcgacgacgacggcagcgaaggtgaccgcaagggcagcaaaggtgacggcaaggacgaccgcaagggcagcaacaaggccagtggctag

SEQ ID NO: 27191 - DNA, 659 bp, Zea mays
  Peptide Sequence Number=SeqID_68970
aagccgatcaaaggggtcgccgtacccgaggggggactaccgctgcagcagctccaaggcctgctccgcgcgcaagcaggtggagcgcagccgcactgacccttccatgctcgtcgtcacctacacctccgaccacaaccacccctggcgtacgcagcgcaacgcgctcgccggctcgaccaggccggcctcctcgtcctcctcgtcggccaggggccatcatggtcacaaccatcgacatcatccctccgcggctgccgttccagatacggcaccggccgcccaccgtcacgccagcaacgtcgccgtcgccgacaatgcaacgacgccaggttccatcattagcgccagtgtccatcgccagctgctcaagcaggaggtggtcgacatggataattccaagcccgcggaggacgctgctgctgaccatgacttgggcttcggcatgtttgcggacatggacggcgccctcgacgttctgtgcgcccccgatttccatccaaaaaagcagcaacagcaggccactgctcagcagttggagaagctgccggaggaagaaggcacgcagttgctgctgggtcccgatcccttcagcttcggcttcttggactgggttggcgcttcatttggagtcggagagagagcagcagatgacggtg

SEQ ID NO: 27192 - DNA, 110 bp, Zea mays
  Peptide Sequence Number=SeqID_68971
atggctcgacgtctaggacgactttacctctgcgagcagccgcgcccccatgagctccgggccgtgacgccatcgggcgtccctgctcggttctcgggtggagtccaccg

SEQ ID NO: 27193 - DNA, 663 bp, Zea mays
  Peptide Sequence Number=SeqID_68972
atgggaataaactacgcagggtatccacgctcaaataaagccggaggcggtggtggcgtcgaaggtcagcagcatgatccatcaacggccgccaatgccagtggcagcagtgcccggaagatgaagacgcccgagttcaacttcaccggtgcgcagcagggccagcagctgggcgcggccgcgggccacctctcgcggatctccgaggacggcgccttcccgggcggcatgatgggcgaccgcgcgggccgcggctctgctggcgagagcagcggtgccgccgcggcggcgcgctcgtactcggccggcgggttctccatcgttgggccgtgggaggagtccagggacatcattaccaccctcggcgcatacgaccctcagtttagcggcgccatggcgggtacggcgctagagatggcgggcatggacaggtacgtgcagctgcagcaagaccaggtgccgttcaaagtgcgcgccaagcgcgggtgcgccacgcaccccaggagcatcgccgagagggagaggaggacgaggatcagcgagaagctcaggaagctccaggacctcgtgcccaacatggacaagcaaacgagcaccgcggacatgttggaccttgcagttgagcacatcaggggcctgcagagcgagctgcaggcattataa

SEQ ID NO: 27194 - DNA, 255 bp, Zea mays
  Peptide Sequence Number=SeqID_68973
atggaggtgtacacttgggccaaaaagggaaaccttagctgccgcaaagaaggtggaggacgaaaggtggacgggcagagtccagctgccgccaagcggaggtgggcatgtgcgggcgaccagtggcgggcgcagccgtgtaggctgcaggtgaagaccgtcgctcgttgcgacatcggcggaggcctttgggcggggcggagccgtggagggcataggggcacccagccgacgagtgcaatgcagacagactag

SEQ ID NO: 27195 - DNA, 312 bp, Zea mays
  Peptide Sequence Number=SeqID_68974
atgggaacacggtggggtggcgtggtggtgctgctgctgcaagtgggcgtggtgggcttaaaagaccgggcgggggtgaggagccaggcaggcggacgacgtgattggttctcggggcgtgtggcgtggtgccgcggaggcggaggggaccgcccgcgcgccatggactgggccgggtgggagaaagggaagggaatgactgcccggctgcccccgccgacgccgccgactggatttgatgaagagattgtctcgcctgctgacgataagattgcaattattaagaaccacttgctattgagtgtagtttaa

SEQ ID NO: 27196 - DNA, 1242 bp, Zea mays
  Peptide Sequence Number=SeqID_68975
atgagcaggaactggaaggaagccataactcagtttgccgccatgcgcgaagaccttggcgctctttgtaagctactactgcctttagcaccagaagctcatatttctaacggcaagaatgaaagtccaggcagcaagagtaacagatggaagtacaatttctttggaaagaaatccagagatgatcgttctccacgcgctgaggacaacaagagtttcaggaagcaaaaatcatttggtgcaaaggatgtcatctcagaaaagtctgactttcaccatctcaatggtatgactagagagcaagtgataacctactttaagtctgagatcagcaaaatgaaaaggatgcacaaatcagctttgcaagagaagaccgaagaactgttcaggctcaaacgagagaaggggtcacattctctcaagaatgacatcgaatttgaacctttgagaaagaaaattccagagcttgtattgagaatggaccaaatcatttccaagaatataaaggtacctgcaatctgcatgacccatgatgaactcgatgaaagatgcagattgatgagcagaatcgatgctttgttctatgaaaatcagcattttcgagggttgcttgcagacaggatgaaggacattaaggcattatcatcccggctatctgaagccagtatagaactgtcaatgcagatgctgtcggaagaagagctcctgagacaaattgataaagttagagaagactgtgaggacctcagaattgaatgtgatattagagaaggaatgtaccaaactgttacaaaacatttgcttgatgactataaggacaatatggatggtgctgctctaaatcttagtgcaaaattgtcttcacttgaatctgcaatatctgaaaaggatgaggcattatgcctatataacgaagaaaatcacagtgaccaggaagttccagaagccataaaacaagatagcacagaaattgttctgcgtgacattgaggttgagccttgcatgtcaccgagaagatcaaatgcggacgattcaaggtcagaggaacttagcgatcactgcaaccacatggtcagacaagccatggtactaacaaagatagggctttggtataaacaaatgattgaagcgaggcgttctgagctccaaaaggctgaagccaagctgctagacgctttcatgaagacgtgcaagcttgttgcagatctgagaagtaaacagaacgaaggcgatgcaacatga

SEQ ID NO: 27197 - DNA, 405 bp, Zea mays
  Peptide Sequence Number=SeqID_68976
atgctgtacggatgcaccccattccggggccggagccggcgggagacgtttcaccgcgtcctcaccgcgccgccggagctgcccggcgaagcgacgccgttgtgcgacctcatcaccaggctcctcgagaaggaccccgggaagcgactaggcgcgcgcggcgtcaagcgccacgccttctttagaggcgtcgactgggaccgcgtcctcgacgtggcgcgcccgccgttcatcccgtcgcctgatgaaaacgatgctaactccggcgcggtggtggaggccgaagcgctggacgtggagaaggtcgtacatgaagtgttcggctccagtggtgccggcgagacgagccttatggatgtctgcagcgacggagggacagatgacgatttctccatattcttctga

SEQ ID NO: 27198 - DNA, 147 bp, Zea mays
  Peptide Sequence Number=SeqID_68977
atgggcccaaagcctttcacgaggtcgttgcttctaagctttgatcggtcagcttatgctttagagatcatcacttcatttttggaggttaaagattcattgggtgcactgaaggtgcacccaatgggtgtagcccccgagctttga

SEQ ID NO: 27199 - DNA, 318 bp, Zea mays
  Peptide Sequence Number=SeqID_68978
atgccgtcttcttcctcgtctgcagcaaacacaccgtcggccgattcatcgtccgaggataccctgagcaatgtggaggcggcggagctacatccgggcgatacagtggagttcagcgtgtcgaggatttcctcggtccacgtgcaggatatgcagcaactggggtattttggcagcggagttgggcgtgtctcgggggtggaggaagttcccgagcctgagggcgagttaatcgtgtttgaggcatttttcaccactggccttcgcctacctgctcatcgctttgtggcggaggtcctgcagaaattcgaggtctag

SEQ ID NO: 27200 - DNA, 675 bp, Zea mays
  Peptide Sequence Number=SeqID_68979
atgccctctcctcctccccctcatcgatcgtttcacgccgccgccaccgcaacccttgcagccccaatcccccacgacaaccatggccgacgcgtaggagtccctctcctcctctgggacctctccaccgtcctcaccacccgtcacttcgtcgaccacgagaagaacgttctctccgtcgtcttctcagtcgacaaccgccagatcgtctccgcgtcccgtgaaaagaccatcaagctctggaacactctcggcgagcgcaagtttcctgtacctcatgacctgttcaatttagcgtcagccccaactgctccttactcccaccacgttcttggtagccctgggcaaggctacgctttaccagccgatgtccagtatgtcgatgtacaatgggaggaagagaactcatctcaagatcatacccttttaagaattgcttggaagcttaagccattctcttttaacaagttctcagcaaacaactaccatgataaaggagttattcgtactatggagtcaagtactgaagttgtatctggatccttcttgtgttcagggaagaatgctttggacgaccgtcgtatacgagcttcggatgaagccaaatacataaagccttcggaggctgaggaatcaagccgaggagaaggacaaattttcaggttctatgattga

SEQ ID NO: 27201 - DNA, 810 bp, Zea mays
  Peptide Sequence Number=SeqID_68980
atggactccgcctcgcccgaccccagggctcgggctcaacctcgacctcggaagacggactccgcctcgcccgaccccagggctcggactcagcctcgacctcggaagacggactccgcctcgcccgaccccagggctcggactcagcctcgacctcggacggcggtctccgcctcgcccgacccccaggcccggactcagcctcgacctcggaggagcctctgcctcgcccgacctcgggctcggaccgaccacgtcacagggggagccatcattaccctacccttagctagctcaggctacggggaacaagaccggcgttcaatctggctcgcctcgatcgcggcccctcgcccgcaccgattcgccccgcggcgcccaccttcccgtccgttctgcttgggcgacggcgattcctgcatcgcatcgcctccttctttagcggctgcttcggctacagcggcggttcctgcgtcgcccgcctcctccagcggctgcttggcggcgtctccagctctggggaagaagcaagcggctagcggctctctcccggcgcccatggtggacatcagcgagtgctcgccggtgcccgagtccgtgccggcgcacccggaccccgcgtccgtttctccggacgcctggcggcgcttcgagaccgccgcgctcgccgtggtgaacaagatccagcccaccgccgcctccgaacacctccgcgccgccgtcgtcgactacgtccagcgcctcttctggttccaagcccggtatcagagtgccataattgctagctaccatgcttgcgatttcatctag

SEQ ID NO: 27202 - DNA, 1257 bp, Zea mays
  Peptide Sequence Number=SeqID_68981
aaggtcaccgcaggcacgccccccgacgcgttctaccgggtggacgacgacgacgcgcgcaggttcatcggccgctgcctcgtccccgccgccaaccgcccgtccgccgccgagctgctgctggaccctttcctcctccaccaccaccaccatgctgctgctgctgctggcacggtaccagtgccgtcaccattgccaactaccgctgttgccgccggcgctccgccgccctcgacgtgtagtagctccgcggccgacgatgatgtcgtctcggcgttggacgacgacgacgaggtggacgtgccgcccaggaatgacatgaccatcaccgggaagctgaacgcggaggaggacaccatcttcctgaaggtgcagatcgccgacgaggcgtcggggcacgcgcgcaacatctacttcccgttcgacatggcgagcgacacggcggcggaggtggcgcaggagatggtgaaggagctggacatcacggaccgccacgcgtcggagatcgccgccatgatccaacaggagatcggcaggctgctgccggggcgagcgcagcagcacgagtacacgtacgcgtcacgcggcggcgactacgacgacgaggagcggcctcctcccttctactacctctcctcgtcccccgcatcctcccatggttctcactgcggggtggggccatatgccttcggaggcttctctggcccatgtggcagtgcttggaccaaagatcatgactggtacgctttaagcgacaacgacgatgacatgagctccgtgcactccggtaagtactctcctgtgcactacgcgtcaggtgccggccacgaggaggcgccggccagcagcagcggctcgtccaagacaaggttcggcggcggcggctccggttccgccgcggcgctcgcgcggcagctggagcggcagtgcagcgtgtcgccgcagcacgcggggcggccgcggcggcgggaggacgacgacgaccgggccggcaggcggaggaggatgacgcggaaccggtccatggtggacatgcggagccagctgctgcaccgcacgctggtggaggagctcaaccgccgcctcttcttcaacaccgtcggcgccgtcgagaacatcggcttccgcgcgcccaccaccaccgccgcctcgtcctcctcgtctgcgcgcggcggcctcgaccgcggcaggagaccaggcggcggcggcaagcagcggcagctggacgacaaggagcagcagtatttcatgctttga

SEQ ID NO: 27203 - DNA, 273 bp, Zea mays
  Peptide Sequence Number=SeqID_68982
gaggtgctggagcggataccggactacgacttcccgtaccaggagctccccggcggtgccgccggcgacgactacgatgacgacgaccacagggagtcgtgcgccatctgcgtggcgccctacgagcccggcgaggcctgcggcgtgctgcccgggtgcggccacgtcttccacaagctctgcgtcgccgagtggctgcggcagagcaccacctgcccgctctgtagggcggctttcgacgtgactgagggcacgcgacagggcggtcgttga

SEQ ID NO: 27204 - DNA, 332 bp, Zea mays
  Peptide Sequence Number=SeqID_68983
atgatgagctacttccaaaccactacttgcaagcctcaaagcagggtcgttgtgaacaaacctataccaggtcttgggagcacaagtcagcatccgttatattcacatgctctcagattccacaggctgcaacagaaggtgtacccaaggctacttctcgttgctgctagccacaaaaggcttactcctgtatgtgtcttaagtggaaagggaaatgctggcactgctgatgatgttttgtccaagccagttgttggtagaattgtcatactccttgaggtggattacgggcctgtttggttcgtggctaactgtgccacactttttctaag

SEQ ID NO: 27205 - DNA, 191 bp, Zea mays
  Peptide Sequence Number=SeqID_68984
atggcgagggcggaggggctcctgcgaggcccaagaaacgcggcggaggctcggcggaggggcaggggaagggagggcgaggtgtctccggcaatccccggcggcgagagtacggaggagcgggctgtgagagcttccattggtggaaggaaaaagaggccgaacgggagaagtggcagcgagagcgaggg

SEQ ID NO: 27206 - DNA, 2121 bp, Zea mays
  Peptide Sequence Number=SeqID_68985
atggatcacaggggcggcggcggcggtggcggaaacaagaaccgcaccgatctcctcgctgcagggcggaagaagctgcagcagttccggaagaagaaggggaagcggggtcccggcaataaggccgacgccgatgctgacgcggaggccggggagggggcgcccaaggcggcggaggagtctgtgcccgagccgaaatcgcctgttgggttgaagctcctcgccggggagggcggcggcgggagcactccatttgaggtgaggttcgagcgcttcagtgtgatggcgtgggttttgagtgggctgctcctgctcctagctgttgttgttgctgggtgtgtaatgcatgtctgtcaatgcacgaagcggagaggtctcaggcggagcagtgcaacggtgaggggcctggtacccgcggagtccagctctgtggagagttccaatgcggtgcaagaacaggagacggtgcaagagcaggagacggatgatgtctccgatgcacatcatgtcggtcctagtgagcaggggatttcggagcatcctgaaagccagacagctggtggcagggatctatcacttcaggctaccagtggagacagcattggtgatgataatgtaggacgagctcagctgggtgatgtggatagcatggagctgaatgcttcttctgaaggtaatggagcagatggtgattgcaatcaactaggggaacaccagcaggtggaaatggatgctgttgaaaggccaacaagttccagtttcgaagaattcaccgagttgccaattcattctcaaggcattgaagccgataatatccacggtgaaggggctcaggaaatggtgatggatgtttctgggaggccattagatggagacatacagcatgacatcgagcccacagcttctgctgaaatagatgccgagactgcacttgaagagtcaactgttgcagcttcaattgtgattcctgagagtactgcaagaggtactgagtacgaaagagacactgggtatgaaaccgatggagtagacaaagaggctctcctagaagatccaagcatggtgcatgtaagtgatgaagctgtcactatagatgatttgagtgttcaggccaagccaacagcatcagcggatatgccactttgtgagcagaagggggatccagctttatctagaagtgcggtattgcaaggcattatgccacttcacttcgaggatatacaaaatcatatgttctctgcaactctgtcaagggattttctccagttgcagctagatgaggctgctggcctttattcagattttacacaacagtcttctgacaataccacacagctccgggtactgctaaaagaaactgaagaaagcaaactagcagttgacagagagcttcatcaatgtagacatgagctctccaaggtgaacatagaaaaggggcaacttgaactgaccatggcttccttgaaagaagaaatcaacactagcaacacgaggtgcacatatttggagagtgagctacattcctccaaggagagcacagaacaaatccacagtgaactagctaacagcagattgttactggaagctctgcaaaaagagaacatggagcttactgcaagccttgcttttgagaaagaagccaaaaaagaagttgaagaacagcgggaccatctatcttctgataacaggaagcttttatcggagttgtcaggtcttgagcttagcttagcttctgtgaaagaggaaatggatgctagcagtagcagatgtaatgtttttgagtgtgagctgcgttcctccaatgagaatatgaatcatactttgacagagttggcaaattgccaggctttattggaaacattacagaaagataatttggagctgtctgcaaattctgcctccgaaagagaagcaaaaatgaaactccaagaagacaatttgtatctatgtaatgaaaagggcaagctttcttcaaatttacgtgaactaaatgacaagttggaagtttcgtatgccaagcataagcagcttgagtcacatgtcaaagatacagaaacatactttggacaacttaccgagcagctaattgaggaacgaattcaagctgattcatcagaactc

SEQ ID NO: 27207 - DNA, 1368 bp, Zea mays
  Peptide Sequence Number=SeqID_68986
gacgcgcaggcattgggacctgctcttgatttgtggaggcggcatttggagtttgtggtgcgccgtctcctcgactcggagcggcagctctgtgccaaggtgtttgggcagcataaggatgtcgcgtccgcgtgctttgcagaggtggcggcacaagccggggttcttgacttcttgaggtttggccgcgcggttgctgatgccaagaaggaccccatcaagctccagcgtctgctggaggtgtttgattctctgaataagctgagactggacttcaacaggttgttcggtggcaaagcgtgcgcggagattcagagccagacaagggaccttgtcaagttgttgatagacggcgccgtcgagatctttgaggagttgattgtgcaggtggagctgcagcggcacatgcctcccccagttgatggaggcgtgccgcgcttagttacctttgtcgttgagtactgcaaccgactgcttggtgagcaatacaggcctgtgcttgggcaggcgctaactatccatcgcagctggcgcaaggaggcgttcaatgacaggatgcttgttgacgcggtgctaaacatcgtcaaggcccttgaagctaacttcgatgtttggtccaaggcatatgacaacgctacgctgtcgtatctcttcatgatgaatacccattggcatttcttcaggcatctgaaggctactaagctaggagaggtcttgggtgatgtgtggctgcgagagcatgaacaatacaaggaatactatttgtcaatgttcatcagggagagctggggagcactttcagcgctactgaaccgggagggattaatattgttctccaagggccgggccactgcaagggacctggtgaagcagcgcctcaaaacattcaattcgagctttgatgagatgcatcgcaggcaatcgtcgtgggttataccagacaaggatctgcgggagaggacatgtaatcttgtggtgcagactatcgtccctacctaccggagctacatgcagaactatgggccacttgtggagcaagagggaaatgccagcaagtatgtaaggtacactgtcgatggtttggagaagatgctcagtgccctctacatgccccggcccaggagggctgggagcttccagatcaagcactcgagcggtgacctgtgggcattaccttttaatgtaccaagaatcgagcttaatagatgcaatggattatatggggggggggaaaaaactagacccctcgagcgacaattcaaacaacaacaacaacaacaacaacaacaacaaagccttttgtcccaaacacgttgggatgaatcgaagggactaaataacttggaatcattgacgctgcactgctga

SEQ ID NO: 27208 - DNA, 345 bp, Zea mays
  Peptide Sequence Number=SeqID_68987
atgccgggggagtggtccgtggggctctgcgactgcttcggggatcttcacacctcgtgctgcatgagtggcacactgtactacctgctgtcgacgataggctggcagtggctgtacggctgcgccaagcgctcctccatgcggtcgcagtacagcctgcgagagtccccctgcatggactgctgcgtccacttctggtgcggcccctgcgcgctctgccaggagtacacggagctccagaaacgcggcttccacatggccaaaggatgggaagggagcaacaaggtggtggggtgcttccatgggatgacgacgccaccaaggaagcaatccatgtgcttttag

SEQ ID NO: 27209 - DNA, 570 bp, Zea mays
  Peptide Sequence Number=SeqID_68988
atggctgctgctaccgcagctcctccatgggcctccttaggccctgacagtctcaacatctgtttatggacaataggacattgtgatgtgaaattccgcgcagaagctcaaagcctgaaggaagagctggacaaggcaaatagtagattgttatccatggaagaggaacacaagagggaaactgagcaacttaagcacagcagtgaaatgaacatcaatgccctggagaacaagctcagccacgcccttgtacagcaagcaagagatgaagctgcaatgaagcaactgaagttggagctgagtgcccataaatctcacatcgacatgttagataaaaatgagatccaggatttgagggatgtggtttctgttgaacaagaggagaaaaaggacattcacaggaagcttcagaatgtggaaaacgagttgaggatcacgaggatgaagcaggcggagcagcaaagggattctgtctcggtccagcacgtggagacgctgaagcagaaggtcatgaggctccggaaggagaacgagtccctgaagaggaggctggcgagctctgaagtctga

SEQ ID NO: 27210 - DNA, 183 bp, Zea mays
  Peptide Sequence Number=SeqID_68989
atggctgctgggagcggctggagcaggcttgcgcagaggagggaggaagggatggacgccctggctgctggcttgctccctgctggccgccgtggggaaccagggaggaagaagctgacgcctgctgttctatcgtggtttcgagttcggttcggacatgagatatttggccgagtcgagtaa

SEQ ID NO: 27211 - DNA, 111 bp, Zea mays
  Peptide Sequence Number=SeqID_68990
atggaggtggcgtcgggggatgaggatctggaatcgctgctccagaacttccatcgcgtgtcccaggggtacaaagatgcacttatgcaggtccagataatgagcggttaa

SEQ ID NO: 27212 - DNA, 210 bp, Zea mays
  Peptide Sequence Number=SeqID_68991
atggcggcttggtggttctgtggcgccccgtgcagtctgactagagattggttaggctccggccaacgagttggtcaggtgacgacgcaaatccctgcccgtgcgtccagggggagtccatccatggctaacgaagcttcaatgccgatagacaagaaggtccacggcggcggaatcggattctcacctgtctcgctctttcttcggtaa

SEQ ID NO: 27213 - DNA, 444 bp, Zea mays
  Peptide Sequence Number=SeqID_68992
atgaccgccatcgcagcaaaatcatcccaaggacctccctacactgaccactccctactgccattgcccctttcgggtaaggtccttcaagttctgtcctgcgcacacattaacagagaacctgagggcgaaggggtacgggaggctcttatgcaattatccaaggccgaagggcagaccgtcttcttccttacgaccgaacaaggggtgcccagggatccacggtggcgccaccacgcccgacggagcaccaccgcacagacgcgcaagtacatgaacctggcttcgaccagagctacgcatgaagaaggagaaagcgaacctttggggaggggtcttgccagcgaccgcagagtagattcagctgttcacggcgccaagcaacctggcgaggtcggccatggcggcttggtggttctgtggcgccccgtgcagtctgactag

SEQ ID NO: 27214 - DNA, 656 bp, Zea mays
  Peptide Sequence Number=SeqID_68993
atggatcacggcggcgagggccgcgttgcggcggctcggcgcacgctgcgtgccggtgtggacaagtcgcgcgctctgggccactcgctggcccgcgcggggccccgtctagaggagatccaggcggcgctgctggcgctggaggccgcggtgcgcccaatccgcgcgccgcatgccgagctcgccgccgcggggccccacatcgaccgcgccgtaagccccgccgccgccgtgctcaaggtgttcgacgccgtgcacggcctcgagccgccgctcctggcgccaggcgccgcgggctcgggcgcggccggggacctgccggggtatctcgccgtcctggcgcagctcgaggaggcgcacaggttcctcgccgataactgcgggctcgccgcgcagtggctcgccgacatcgtcgagtacctcggcgaccgcgacctcgccgaccagcgcttcctcgccgacctcggggtcacgctcgacgagctcaggacaccccccgccggcgacctcgacggcgggctcctggcagccgccctcagtatgctcgaggccgagttccgccgcctcctcgccgaccactccgcgccgctcgcgatgccgcagacccggcgccgccgctggatcggccacgcccttcccgcgggcctgccgttccc

SEQ ID NO: 27215 - DNA, 297 bp, Zea mays
  Peptide Sequence Number=SeqID_68994
atggctgtggggtcgtcctcctcgtcgacggcccacacactcgtgctcctccccgtcgatcggccacgcgagctcatcctcgtcaccagcgattcgtcgcgcgagctactccacgtctccgacgatttgccgcacgtgctacttctcgtctccgacgattcgtcatctgacgaggattatgtcgttgagacgctgaagcatgaggacggtctcaccctctatataaagagagagacctgcactctcgtacttcccaagaagaacatcgccattgcagcaagtctgtatgatctgtga

SEQ ID NO: 27216 - DNA, 405 bp, Zea mays
  Peptide Sequence Number=SeqID_68995
atgggcgcaccggacagtccagtgcgccaccggacattgtctggcgtcgcgaccaagccccgcggcggcgacgcctcggccaggctacgtggtggcggctgcgtggcccgtagcggaggcgccgtgaccaagccccgcggcggtgacgcctcagccaggctccgcggtggcggctgcgtggcccgtagcggcggtgccccgtccatgcccagcggtggtgacgcccgccccgatggggactcctcgctggaagaggactcgatccatctcctcggtgcagaacgcagtggcctcgtgttggctgcaagcggcatctccatccatgacgaaacagggaagaagatggaagagatcatgaaacaggaaaaagatacgggaggagagatactagctcagggggaatag

SEQ ID NO: 27217 - DNA, 384 bp, Zea mays
  Peptide Sequence Number=SeqID_68996
atggcggcgatggaacggtggcgatttggtcacgggctcgcgcaaggaggatgggtgagagacggagggagcagcggggtgctccaatttatccatcgtggactcggaacgagctggccgaagatcgcgcaacaacaccggggttcccggtgcatctgtttgaatcttccgccgagcacgcgcgattccgcggaacttgttgccagcagagtccgcgttgaggaggaagacgacctgggaagtcggtcaacgggacccacgcgtaagagactgcgggagtgttatggctacctgggccgcgcgggtgagcgtgaatttgggccggccaacggggaattcggcccagttctccaaaaatcaaacataaccctaatggacatttaa

SEQ ID NO: 27218 - DNA, 381 bp, Zea mays
  Peptide Sequence Number=SeqID_68997
atgatgtaccccttgtggcgtggtcagcccgagcccaaggtcgggcgaggcggtgactcctccgaggtcgaggtcgaggccgagccctggggtcgggcgaggcggaggccgtcttccgaggtcgaggttgaggccgagcctcggggtcgggcgaggcggagaccgtcttccgaggccgaggttgaggccgagccctggggtcagacgaggcggagaccgtcttccgagaccgaggcgggggccgaggttgagtccgagccctggggtcgggcgaggcggagcttcctatggcgcctgaggctggactcggctgctgtcagcctcaccctggcgggtggcacagcagtcggagcagggcaggcggcgctgttttcctgttag

SEQ ID NO: 27219 - DNA, 324 bp, Zea mays
  Peptide Sequence Number=SeqID_68998
atgttgccgggatccagagtgcctgagtctgataccagattgttaacacgtgtggggaaggaagtagtagaagcagggatcggaggtagaagaaagctattgaggagacggcggcggccaaacagccagcccccaggactcgccatctgcatctctgtccactgctctgctgtcctggacgccggagctgacagtgatgcaaggcaacggtatagggtatatcaagcggaggtgtcacgcgagggtgaggtcatggataagattcacaaccaccacgtagcatgtgaaatttgcgcgaaaaatgtcatgacttgcgacgagtga

SEQ ID NO: 27220 - DNA, 225 bp, Zea mays
  Peptide Sequence Number=SeqID_68999
atggctcttacgagtggggcccactggcagcgactcaatgcatttccagccagggagcgtgcggatggggatgatgggccgcgcggctttgggtgggtcaagccacggtccggatatggcccaatgcaagcacttctgtcatttgttgtagcaccagcatttgggcggcaaccactagatcggttccagccggtggaggattcatttatgtttgctgttgcctga

SEQ ID NO: 27221 - DNA, 948 bp, Zea mays
  Peptide Sequence Number=SeqID_69000
atggccatctgggccaccatccctgccaaaggtggtgccgccttgttagaatttgatacccctatgcgtagttgccctcggatctttgaaaggatattgccagggagttttgagatgtcccatcaacaagccttagcacaagtaacagcacaagcagttcattctcagtacaatatgataaatcacacagattacagtattcctttttcgtcgacaacagcaccagctttgatcacagcacagcatgccaattcttctgccaatgtggcatcagcacaggagaaaccagctctgccgtcacatgcaggtaatagcaacattgaatcaaatgaggtttcacaaggactcaaaacttctgcacccacttttgataaacctgctgacgatggatacaactggcggaagtatggccagaaggcagttaagggtggcgagtatccaaggagttactacaaatgtacccacacgagttgtccagttaagaaaaaagtggagcgctcagcagaaggacacatcactcaaataatttatagaggtcagcacaaccaccagcgtccaccaaaaaggaggtccaaagatggtggtggtccactaaatgaagcagatgttcttcatgagaatgaagacatttcaactagatcagaacctggctctcaagaacactctggaaaacatgaagggtcaaatgatggcatattagggccttctgtgtcaagaaggggaggaggagatgagcaattgtcaggctcaagtgatagtgatgaggaacaagatgatgaacaaagggctggcgacgaagaccctggctatgcaaatgcaaacaaaagacatgtgccaactccagctcaaaggataattgtgcaaacaaacagcgaagttgatcttctggatgatggctatcggtggcgcaagtatggacagaaagtgatctactctgctgcaagttag

SEQ ID NO: 27222 - DNA, 2937 bp, Zea mays
  Peptide Sequence Number=SeqID_69001
atggagctctgctgctcaggcgtcctaagcggcgccggcgcctcgcgaccggcgccatcgaggacctcaaggcccgtgaaaatgggggctccgtccactgggctcttggtagccccgccgaagcggcggcgaggcggccgcgccggctgccgccagtcggccccgccagtgccgccccgggacgaacggcgggtcgtgggcacggacagcgtcgtccacatgctccggtcggcgcccgaccccgccgaggccctggaactcttcacggccgcggcgcggcagcccacgaaggtccacacaacggagtcgtgcaactacatgctggagctgatgcgcgcccacggtcgtgtcggggacatggcgcaggtgttcgacctaatgcagaaacaggtcgtcaagaccaacgtcggcaccttcgccaccatcttcggcggcgtcggcgtcgagggggggctccgcagcgcgccggtcgccctgcctgtgatgagggaggcggggatgtccctcaacgcctacacgtacaatggcttgatttacttcctcgttaagtccggcttcgatgcggaggccatggaggtttacaaggcgatggttgaggacggcatctcgccgagtgtgaggacctactccgtgctgatggtggcgtttgggaagaagagggatgtcgacactgttctctggttgctgaacgagatggaggcccgcggcgtcaagccaaacgtgtatagctacaccatctgcattcgggttcttgggcaggccgcaaggtttgatgaagcatatcacattcttggaaagatggaggattcagggtgcaaaccagatgtcgtcacacatactgtgattatacaggttctctgtgatgctggccgtctgagcgacgccaaggctgtcttttggaagatgaaagcgagtgatcagaaacctgatcgtgtcacttacatcactctcttagacaagtgtggtgacagtggtgactcacaatcagttgtcgaagtttggaatgccatggtagctgatggttataatgacaatattgtttcttacactgcagttgtggatgcattatgccaagttggccgggttgatgaagctttagctgtgtttgatgagatgaaggaaaagggtatgtcgcctgagcagtattcctataactccttaatatctgggtttctgaaagctgatatgtttgaccgtgctctggagctcttcaaccatatgaatgcttgtggtcctagtccaaatggctacactcatgtcctcttcatcaactactacggaaaatctggtcaatctttgaaagcaatacaaagatatgagcacatgaagagcaaagggattgttcctgatgttgctgctgctaatgctgttctgtatagtcttgctggatctggcagacttggaatggcaaaaagggtcttttatgaactaaaagcgatgggagtctctccagacactatcacgtacacaatgatgatcaaatgttgcagtaaggcatcaaaagctgatgaagctatgaattttttttctgacatggtggaaagtggatgtgttcctgatgttcttgcattgaattcattgattgatacactctacaagggaggcaagggaaacgaagcatggcaacttttccataaattgaaagaaatgaaaattgagcccactaatgattatgccacactgtgtactatcctcccaagttttgttaaaaatgggttgatgaaggaagctctgcatactgtaaaggaatatattttgaaggctggttgtaacgtggacaagtcttcattccattcactgatggaagggatactgaagaaggctggtgtggaaaaatcaatcgagtttgctgaaaacatagcatctaggggaattctgctgaatgatttctttttatgcccattgattagacacctctgcaagcacaagaaagctcttgaagcgcatcaactattcaataagtttaaaggtcttggagtttcactaaaaactggttcttataattctcttatccgtggccttgtggatgaaaacctgattgatatcgctgaagacttgttcactgaaatgaaaagactaggatgtggcccagatgaattcacttacaatttgattcttgatgccatgggaaaatcgatgcgggttgaggaaatgttaaaagtccaaaaggagatgcatcgtaagggatatgaatcaacatatgttacttataacactatcatttcgggtctcgtaaaatctaaaagattggaacaggctatagacctgtactacaatctgatgagtgaaggcttctccccaacaccatgtacatatggtcctcttcttgatggcttattaaaatctggaaagatggtggatgctgaaaatctttttaatgagatgctagagtatggatgcgaacctaattgcaccatctacaatattctactgaatggacaccgaatagctggcaacacagaaaacgtttgtcagctttttgaaaagatggttgagcagggaataaacccagatataaaatcctatacaattcttattgataccctgtgcacagctggaagattaaatgatggtttgtgttattttagacagctacatgaattaggacttgagcctgatcttatcgtttataatttgctcattgatggtcttggaaaatctgaaagaatagaggaagcagtcagtctcttcaacgagatgaagaagaaaggaattatcccaaacttatacacatacaattcactaattctccacttagggaaagcagggaaagctgctgaagctgcgcaaatgccgaggccaagctcgggcgagacggaggttcctcccgaggccttggccgagcctgcctcgaggcatgcggtcgtacagggaggaggtagcacagttgctggagtggccttctgcgggattcacggggagttgttaccaaggtag

SEQ ID NO: 27223 - DNA, 1281 bp, Zea mays
  Peptide Sequence Number=SeqID_69002
atggcgttctcatcgccggcttccgcgcgtccgcagcgctcgcctgacgaggtggaggacatcatcctccgcaagatccttctcgtctccctcacgccgctggccaaccccgggcccgccgtcgcctacctcgagctcaccgccgccgagctcctctccgagtcgcgccctctcctagctctgcgcgacgccgccgagcgcctccttatagaccgcctctcgctcccggacccgcccgccgggtctccgacccctttcgccttcctcgtctccgctttccgccgcgccgccgacgaggcgcgtaagatctccaccatccgcgacgctgctctccgggcgcgcctcgcggcctccatcgcgcacctccgggccctcattctctcctacgcccgtatcgtcgccgggaaccccgacaccttcccctcccaacccggcgcgcaacaccccgccgccgaactcctcgtattcctcctcgctgaggcagccgacccgctagaccccaccccaggccccggggcgccgccgccgcctggcttcattgatgagttcttcagcggcgctgactatgactccatcgagacggccatgggggagctgtacgagcttcttaggcagagcgtcgataaagtttcggccctcggtgacttccagcgcccactgcgggtgctcaggcggcttgtggggatccccaattgtgccaaggccctggtgaaccatcccaagtggataccaaagaatcagatcatgttcattggggaagggagagtcatggagctctacagtgtccttggagccttcttccatgttagtgctatccgagaccgtgagtttgccagcaagcctgatgtcgggcaacaatgtttctcagaagcatcttcacgtcggccagccgacttgttgtcatcatttacaacaatcaagagtgttatgaatggcttgtatgatggccttaaggatatccttctaaccctcctaaaaaatttggatactcgagaaaaggttcttgagtatatagcagaagtgataaataaaaacgcatccagatctggcatgcagacgtggcccaacccgctctgcccacacggcgacctgcaggcggggccctacaatatgggccggattgtacgcgtgccccttcttacattgagggagacaaaatcttggggtcttcgcggtctcggtcattctcgccccgaagtcttcgatggtcttcgcctcgtctcgtcggatcgaaggaagcgctggagacttcgcatgggcgatgtccacggccctggctag

SEQ ID NO: 27224 - DNA, 480 bp, Zea mays
  Peptide Sequence Number=SeqID_69003
atgaggctggtcggcctgacgggcgggatcgcgtccgggaagagcactgtctccaacctattcaaggacgccggcgtccccgtcgtcgatgcagacatcgttgctcggatgaggagtggtcgcctactcgcctgttcagccattgaacagacaacagaggaggacatgagcgcgctagaggggggggggggtctctgcagactacagccgccgcgcgatgcagggggcgcaattgctgctcgagcagagggtcgccggagcacaacagggcggcgggagaggagggcacaacgatggagaaggggcagcgacgctggagaaggggtgccggtgctggggaagggtgcccgcgagacagtgcgtatcatattggtacaggatgtagtgcagaaaggcactggaggtttggaagaagattgtaaaaagccttcgggaatgatattttgttggagggtggagaaattaacagagcttacttag

SEQ ID NO: 27225 - DNA, 99 bp, Zea mays
  Peptide Sequence Number=SeqID_69004
atggggacaactactgcatggagtagcaaggttggtccgctggtgcatggtgttcgctacacgttggtctgggcccctttgataggcataagggactag

SEQ ID NO: 27226 - DNA, 570 bp, Zea mays
  Peptide Sequence Number=SeqID_69005
atggcaagcaaccagattaagagagtaaggtctctagacaatagattccaaaagattggagaagaaaccatccagaacctcctgcatctgttcatggctggtgactgtccttccctcattctccaattgggaaataaaatttctcttgcggatgcgagcctgcaagtgaaaaaatttagtgttggcatctccttccctcaagacgaattgtcaacattacgtggcaaagttgcatttttggaggaagacctttctaaatcgcatcaagaagcaacaaattaccatgaacttagtgataggttagcaaaggaattgaaggatctcaaagatcatgaccaacaaatgagattaaagcaaatgaaaatcctgtccgatctgctgatagctgtgtcaaaagcagagaggcaagaagcgagaatgagaataaggcaggaatctttcagacttggaaatgttgctgttatgagagctgggactatcatatctgaaacttgggaagacggtcaggcaataaaagatcttaatgctcacctgatattgagtgctggactgaacatctgttgggggtga

SEQ ID NO: 27227 - DNA, 588 bp, Zea mays
  Peptide Sequence Number=SeqID_69006
atgtcgggctcgtcggccgcaggggaggacatagtgcagcacctatcgtccaattccaacccgtcttcgtcgaagctcgccaagctcgaggcacggatggccggcaaggctgtctccgcgccatcgtcaccgccgcaccatcccatgtctgcccccgtcatatcgttcatggaccaggaggagctgcctgagacttcctcttccgatgacgataactgtgaggagttcttgatacaaaagaataccctgaagcgtccgagatctccagatggtgacaacatgcttgctcttggaaattttgagggttcggtaaatgaggcagcaaagattttaggcgtcacagatacaaaaccttccttggacaattcaagtaggaaaaaacaaggccgtggaaggggtcgtgctggtacaggccgagggcgtggctcaagggctgctgatcaaacacgattgacttcaacttcctcagcagctgtaacaaatggccaactagataaattaaccaacaagggccttaaattccgagctggttttgatttgtttgtcggcaatgacagttcgtatctgtacagtgctattatcttttag

SEQ ID NO: 27228 - DNA, 510 bp, Zea mays
  Peptide Sequence Number=SeqID_69007
atgcgtggcggagaggcgctgagagcggaggggtcgaactcgaactgctgctgtgcagctatccactctccagtgctccacgctctccaattctctctcgaccgcggcatggccgccggcctctcattcccccgcgccggggccccgttcatcctcctccgcacctcctgtttctctccgtgggcagctctggtgccccgccgtcgacttctctctgggcctcccactgccggtgatcccccgcccccggcgctcccgccaacttcgaagctcgccgccccgccggttgtgggaacgccggagcccccgctgccgtttagggccgtggaggcggagatccttcgcgatattgaccccgtcgtcctgctcatcaaggatatcctccactccgatagatacggggatggcgaatgtctctgcccaagggacgaaaatgtcgtcgtggagaagctcctctcctaccatccacgcgcgcaggacaaaattgggtgtggacttgacgctataatg

SEQ ID NO: 27229 - DNA, 444 bp, Zea mays
  Peptide Sequence Number=SeqID_69008
atgggcaagaacaacaagcgcaagcgtgagccgactcctccatcagaggacttaggtgattcggagtactcagaggaggagttctcctctgagtccgaggggtctccggctcccatccctctgcgtgagtcgtctgacgattcagacgactcccaggggcttgcgacggaggtctggacttacatccgggtcgtcgagcgctccgggctcgagggctcggatgagtcggagtactcctcggacgaggaggactcgtccgagggcgatgacggcgatggcgacgacgacgacgacgacgacgacgacgacgacggaggcggtggcggcaatgacggtgacggcggcgatgacggtgacggtggcggcaggggtggcagcaaggatggcgacggcggcagcagcaggggcggcagcggcagaggcagcaacagggccagtggctag

SEQ ID NO: 27230 - DNA, 836 bp, Zea mays
  Peptide Sequence Number=SeqID_69009
atggatcagcagcgaaccaacgaggaacaggagaatgctttgtctaaggccagcatcagcatcatctcccgcacgcacgagactcccatcattgctccccacggcagtcacgacaagggactttggccggtcactcggttgccatcatggcaacgccagatgcgcctcgcgtttacaaagccggcccaggcccacgcggcggcgcatgaatctatgcgcgctagattacgcgacgcccaccggcccacggcaacgccacggccgtccccccgggatgcgctccaccccgaccgccaagcgcctgtcgccgcccgcgatgcgctcgaccccaacaaattctctcacaagatctggcgaaacccatcacctccgctctcctcctctaccctcgggatcctggtggccaacgtcgtcctcgttggcgagatgacctccaagctccaccagacctcgcgctccaccgacgactggaggcctctgccccttcgggatctccttattcacaaggcgtcgaggccgccgtcgaccacgtcatgccgctacgctaggaggaggcgtcgaccaacatcggcttcgcagtggcctaggcgtgccgtgctgatgtgctccgccgtttcgcccgcctccctccccaaagctgcttctaggccgtcgcgatggaggcaatcagcaacaccagctggcaactacggcgggtggaaggtcgtccctattggggccaacagccaggtgggattttttgatcaactttatgcagagcttgtggaacctgagaagcacatgcagatattctctcgtaggaaaaatgaggtagtgagatgttacttggagaaatg

SEQ ID NO: 27231 - DNA, 1920 bp, Zea mays
  Peptide Sequence Number=SeqID_69010
atggcgagcgtgcacaaggccaccacccttgttctcatgttctgcctgctagcgctggggagagcggagtacctcaagtacaaggacccaaagcagcccgtcgctgttcgcatcaaggacctgctgggtcggatgactctcgccgaaaagatcggccagatgacgcagatcgagagggaaaacgccacggccgacgcgctggccaaatacttcataggtgcgtcagattatactaacactgaagcagaaggtgacagacagacttgtggtagcgtgctgagcggcggaggcagcgtgcctgctcctcaggcgtctgctcaggcttgggccgccatggtgaccgagatgcagaagggcgctctttctacgcgtctgggtataccgatcatctacggtatcgatgcagtgcatgggcacaacaacgtctacaaagctactattttccctcacaacgtcgggcttggagctaccagggaccctgacctcgttaagagaattggagaagcaactgctcttgaagttagagctactggaattccttacgcctttgctccctgtatagcggtctgtagagatccaagatggggacgttgctatgagagctacagtgaggatccaaaggttgtccagtcactgacttcactcatctctggcctgcaaggtgacgctcctgcggattccgcgggaaggccgtatgttgggggaagtaagaaggttgctgcatgcgcgaagcactatgtcggtgatggtggaacgcataacggaatcaacgagaacaacacgatcatcgacacacacgggctgctgagcatccatatgcctccttactacaactctatcatccgaggtgtctccacggtcatggtctcctactccagctggaacggagtgaagatgcacgcgaaccatttcctggtcacggattttctcaagaacaagctcaagtttaggggttttgtgatttccgactgggagggcattgatcggatcactactcctcctcacgccaactactcttactcaattgaggctggtgttggtgctggaattgacatgatcatggttccattcagatacacagaattcatcgacgatctgacgacacaagttcagaacaaggtcatccccatgagcagaatcgacgacgccgtctacaggatccttcgtgtcaagttcaccatgggtctgttcgagaacccttaccccgactctagcctcgccggcgagctcgggaagcaagaacaccgggaactggcgcgcgaagccgtcaggaaatcccttgttctcctgaagaacggcaagtcctcctacgctccgttgctgcccctcccgaagaaggccggcaagatcctggtcgccggcagccacgccaacgacctgggcaaccagtgcggggggtggacgatcacgtggcaaggaagcagcggcaacaccactgccggcacgacgatcctctccgggatcgaggccaccgtggaccccagcacgcaggtggtgtactcggagagcccggacagcggcgtgctggccgacaagtacgactacgcgatcgtggtggtcggtgagccgccatacgcggagacgttcggcgacaacctgaacctgacgatcccggcgcccgggccgagcgtgatccagtcggtgtgcggggccgccaagtgcgtagtggtcctcatctccggcaggccgctggtggtggagccgtacctgggcgacatggacgcgctggtggcggcgtggctgccggggtcggaggggcagggcgtggcggacgtgctgttcggcgactacgggttcacggggaagctgccgcggacgtggttcaagtcggtggaccagctgcccatgaacgtgggcgacgcgcactacgacccgctcttcccgttcggcttcggactcaccaccaagggcacgaagtga

SEQ ID NO: 27232 - DNA, 747 bp, Zea mays
  Peptide Sequence Number=SeqID_69011
atgggcagcgaggctcgatggcgaatgatgcgacgatggacagggagagagcgtggactggggaaggactcgacgagcagcaacgtgaggagcaaagcgagcttgcagccggacgggctcggacacaaacacacgcagcgacttcatagcgtccatcacgcgagcgtcacggactcgatgtcgcatagcacgtgcaagcagctggccgagaggagcagggagggcaccatcgctgtgcggcgtccggtattgtgctcagcagcacagcatggccgagggcctgtacagggccgagcagttgaagcgatgccgacagcgagcaccccactgagcatggcgcttcggcaaggatgtgccagcccgaggcaaggcgagctgaaggccgggacgagcacagacaggtcggtggccgggccggacgaggagctcgcggccagcacctgggagatggggcgggcagaggggcaagccggggagcaggagcgccgcatagaggaagctccggtcggacctggagaagcccgagagccatgggaggaaggttggagctggggccgggcgcgcgctcgagcaggcagggcgacgggcgcgagcagggagctcagctcgcacggctatggaggagaagggggcgcgcggcgatgggagctcagcacggatcttggcaaggcgcggccgtgtgggagagagagaaaagcagggggcgtcgcgagctggaggcgaacggcggcgacctgggtgagctag

SEQ ID NO: 27233 - DNA, 380 bp, Zea mays
  Peptide Sequence Number=SeqID_69012
atgaatggctctaaaaaaacaaaactaggggccggtgtaggctccaagcccaggcgcccttatcctaaccgctcgccgcactcggtctacgaacgaccccgagatccagcgcaacggacggctctccgagcagccgcacgagaaaccgggtccagggggcagggcctggaggataacctcgccacgccagcacgccacgcggccaggcccagtgtgcgaggacgaggacgacgcgggcgcacgcagcagcaagctctgaccctgaaagctgaaaccgctccacgccctccccctccgcgcagagccagccaagccaaccagccagtcagaagaggaaccggggagcggcagctgcagcggccgagggcggagcacgcgag

SEQ ID NO: 27234 - DNA, 348 bp, Zea mays
  Peptide Sequence Number=SeqID_69013
atgaaatcgacaacattgtccggcttgcgcatatcatcgatacttgacgagcgttgcactagcgcttccctttcgtcttccggtgcgaacgcaagacgttggtgcctcggatgtggatacgactgccataccccgtgcgaggacaaagggagccaaagcgacaacggcatagcgacttcgacgctaagcacggagctcaacgatgtcgcggcgcagcagaaaaatagcgacgccatgatggctagcgtgatagtcgcgggcagcagggaggctcgacgtcgaagtggaatggacaaggcagaagagctcggccagcagcgctacacggcggtgccaggaacgagctga

SEQ ID NO: 27235 - DNA, 921 bp, Zea mays
  Peptide Sequence Number=SeqID_69014
atgaggaactatatcagctatgggatgtcgctgcttgaggaaaatggacatgatgagattagtatcaaggccatgggacgggccataaataagacagttatggttgttgaattgatcaagagaagggttggaggtcttcatcagaacactgctactgaatctgttgatatcacagacacatgggaacctttggaagaaggccttctcccagacaactcgccatgtgtcgatgatcactgtgacactgtcaaagaaccctctggatacatcatctccaggcttgcctgctcattattggttatgtttgatattgtacttagataccagccacctatcccagctgaagaggtgaaacctgcttttgactatgatcatgaagaatcgtatcccactggtcgtggaagaggacgtggtggtggcagaagaggcaggggaagaggcatgagcaatggcccccctccacctgcttatggttacaacgaagagtgggaggaggaaggagattattataacagagggcgcgggagagggcggctacgtggacgaggtgggagagggcgtggtggctactacggaggtgggaggcgtggtggctacggttatgattatggctatgcccccagaggcgggtactatgaagagcaagacgaatactatgatgagcccgaggaatatgctcctccccctggccgcggtaagacataccgacgaccttacatgtcgatgtgggttttgcatcgcattttcccatcttctcatggcttggtggggccttgctggtttaattcacaggacgtggcagagggagaaggggcggcatgccttggcgtgggcgtggaggccgcgggccaccgcgcggtggccgagggagctactactaggcgcgagaaatgcgacgtgccgaatgcgtgtgcttattag

SEQ ID NO: 27236 - DNA, 447 bp, Zea mays
  Peptide Sequence Number=SeqID_69015
atgggggcgactgggagcatgcacacagaggtcgacgatgaacgaagggagcagggacaggagctgggcacgcaggcgaagggcgaccagagcacaggagccagggagcttggaccaggggcgcacgcccgtgggagctccacgacgaggtcggccaggtcgagcgacagcagggagagaaggggcggcctggcaccatggcagagggcaagaccgagctcggcgttggggcaagtgccggccatggaagtgcaccgggcgacatccgagcgtgaggaagatgaggaagagagagaaagcagggggagcgagcagtgggtgtggccatggagagggagcagggggcacgacggcgatgggaagcaggggagggagcgccgtgagctgagggagagagaagcagaggtgagggcggccggtaaaaatcccacgaggccacaaagatga

SEQ ID NO: 27237 - DNA, 189 bp, Zea mays
  Peptide Sequence Number=SeqID_69016
atggcggtattgctcaatccagtggcacatgaagcttcacgtggtgctaaggacgctaccagtgcaaggaatcgactgaaggcttactgtggagctcggtctacgtgcgccggcggtcgattgaagtccggcgacgtcgattcggtgtctccggtagagccatccttcctcaggataaacctgagctag

SEQ ID NO: 27238 - DNA, 441 bp, Zea mays
  Peptide Sequence Number=SeqID_69017
atggaagacttgagtcaaatgaccccgaccattgtgattgggaaaattgcggcatttgagatgtcgcggaaaatgggtcgacaagaggagccaacttcttcaggaccatatgcttttccatgtgatgaaaggaaagggaaaaagaaggctcccactccaagttcctcaagtgaagaagaggaagaagaaagtgatggtgatgaagataatcaaccatcaacatcatcctctaaggacgaagaaacaatccgacgagtcagaaaggtcgaggatcttctcttcaacattgaaggaaaaagcaaagaaagagaggatgcttcacatgcggggagaagggccacttcagggacagctgtccaaatatggtcgaacccacaaaggggaggagcaaatgcaaggcgcttactgaaagggaaatgtgcccttaggacatttctataa

SEQ ID NO: 27239 - DNA, 249 bp, Zea mays
  Peptide Sequence Number=SeqID_69018
atgatgcctagagcaagtatggaggatcctagtagcagcgatccctggagagtctcacgtctcggcgaatcgccgtcgaggccaagggccatcacaggtggtatcaaagtcgtcgatccttggagggggtgcacaacagcgccgaccatgaagctatcggtgcaaacccagattcttctagaagcgatggcaggagcggagcagaagggggaggagcgttgggcacggatgatgatggtggtggagtga

SEQ ID NO: 27240 - DNA, 246 bp, Zea mays
  Peptide Sequence Number=SeqID_69019
atgaagagggtagacagccagcgcactggtggtgcaccggacagtgaacagtacctgtccggtgtgcaccgaactgtccggtgggacacccggacagtctgcgcaggcccacaatgggtgctctcgggctgtagcaccaaactgtctggtgtgcaccggacagtctggataacggtcggatccaacggtcgactgctacagaccccaacggccggcagacgtggcagggcaccggacagtgaatag

SEQ ID NO: 27241 - DNA, 312 bp, Zea mays
  Peptide Sequence Number=SeqID_69020
atgcaagcgtcaaagtcgaagtcgccactcgagtccagggcactggtgccgtggaggaggcaccgcctccccttcgcggagagttgcgcagcaacgcggtcaaggtcatttggctgcttcttcttcacgacccgcacaggccctccactgccgacacagggcgacgacctggagcagcgggatcgcgtggagcgccagggtgacaccgcatgttcatatggtcaagatctggtgcaacccaaaggcagacctacggtgagacggacagacgagggctgctgtgggaggaggaaggaagaggtagagaggtga

SEQ ID NO: 27242 - DNA, 318 bp, Zea mays
  Peptide Sequence Number=SeqID_69021
atgtggggggtggaccggtggagcagggcaaggccaagcaaatcaccaattggtggtggagcgacgacagcagatgtaggagcacgcgtcgtcaatgaagaagcagaaggggtggagcaggtatgtaaaatgcgaagatattcccaagcctttagcacgacaagtaccttgagatccaacctttcgaaatccaagaatagccaaagtttttcccccaagagattctccaacatgcttgtcgcgctaccatttatttgtgcaatattcaatgcagcaagtaagctttcacagagcagcattgaactattgatggattaa

SEQ ID NO: 27243 - DNA, 1194 bp, Zea mays
  Peptide Sequence Number=SeqID_69022
atgggcgggtctggcgctgtctccggcctcgagatgctcggcatcagcctgttcttgaagtccggtaccaccggtggcgacgagaagcctagcggcggaatttttgccggaattttggttaccctgattgcttttctctccaccgaagttttccgccacaaggcgagcaagaaaagacaaggctactttgagcagcacggaggccggacgttgttgcgaattctcgaaacagatgacaacaacatcaccttcaccttatacgacagaggagatctagcgaaggccacacgtggcttccacaaggccaacatcgtcggggaaggagcacatggcaccgtctacaaggccaacctcggcagctctgctgccgaaaatgcatccaccaccgtcgccgtgaagcgatgcaagcagatcgacaggagcaggacggatgggttcgtgcaggagctggtcgtgctctgccgcgtcagccacccaaacgtcgtcaggctcctcggctgctgcttccattttgaggcgcccatgctcgtgtacgagttcgtgcccaacgggaccctgagcgacctgctccacggaaagcctcggcgccgggtgacgctgccgacccgcctgaagaggccctggcgcacctgcactcgccaccgcacccgacgctccacggcgacgtcaagccgcagaacattctgctcggcgaaggatacgtcgccaagcgtgcaggtggtgcccaagggcacgctggcctaccttgaccctgaatttctgcaggaccaccagataaccgacaagaaagacgtctacagcttcggggtcgttctgatagagctactgacacgtaagaacccacaggccaaagaatggaagaacctgaccgtgatgtttcagagcagcacgggaaatggcacccttggtgatcttctagacgctgacatagtcgaggaggggagcatgggactgatctatgcggctgcgaagctggtgagccgatgcatcgctgttccgggtaatgcaaggccggccatgggacaggtcgctggggagcttcggcgactttcagatcaaatgccggaaagccctgaggtgcgagtggctctcgaggttgaggatggaaggtatagctacgccgccagcactgagggcgaaactacgagattttctaatcttaccaaaccgagcacagcagaactcgcccgatga

SEQ ID NO: 27244 - DNA, 147 bp, Zea mays
  Peptide Sequence Number=SeqID_69023
atggcggtggttgaacgacacatggcgctggccggtggtccccatgagtcaatctcacacggtgagatcgagcgcttcgcgggacgcgctcctgaggttggtacacggcgtggagcgaggctgagcagcagggaccacagtttctaa

SEQ ID NO: 27245 - DNA, 351 bp, Zea mays
  Peptide Sequence Number=SeqID_69024
atggcggtggttgaacggcacatggcgctggccggcggtccccacgagtcaatctcacacggtgagatcgagcgcttcgcgggacgcgctcctgagaaatggaaagatgatggaatcagcctctgtgcaaaagttgtgaatgtggctcaagtgcaagaatggtcaaagccagttgaaggatttgtatccagtgtggatcttcgccttattctttttacgagtttgtcaatgattcatgttagagcttatggttatggatatgctcaatgtgatatatccaattacatgattgcagtagcgttactgattcaggaagccgtgcaggttcctcaatttattttaccttattga

SEQ ID NO: 27246 - DNA, 258 bp, Zea mays
  Peptide Sequence Number=SeqID_69025
atgggtacagtcggcccagggaggtatcaatttttcaactgtatgcactcaaatctttttgaagaatataagttcttccccaagtatcctgataagcagcttaagatagcagctattctgtttgattatggtgcatatagcagcaagtatgcccaagaggtcaagtctgcaattctgaatggcaactctaatttcctagaaacctcagattctgaaattgataaactgtccttggggtattctgatttgctggtgtag

SEQ ID NO: 27247 - DNA, 240 bp, Zea mays
  Peptide Sequence Number=SeqID_69026
atggctgctgcgataaacaacaatgaagctcgcccgaaacgcgcggcggagcagcacggcgtgtggccggcgcgtagcggagcagcacggagcggcagcccggcgctccggccagcgcgcgggggaacaacacggcacggcggcccggccagccagaggcataactggccggcgcgcgactgcgctctgcggcgatgccccagtgcggcggatcggtcctgcacgggcgcgcccggataa

SEQ ID NO: 27248 - DNA, 543 bp, Zea mays
  Peptide Sequence Number=SeqID_69027
atggcggccacggcgggcggcggccggggcgggcggctcaggggcggggcgcggtcggggtcaggagagctggggcgggcggcggccggggcgaggcccgccgggggcggcgcggtcggaggcggcgcggccgggggcgacgcatccgtgcgtgcgattagggcgcgtgggagaggcgtgagacagatattttttgaaagagaggtttggcaaatagagacaacgcctctgacatcccaccatcacgtctgtgtcaagctcctaccccgaagtcagctacccgtctgccgtttcagggtgaacttagatcaggacggcccctactcgggggtgaatgccacccggcgccgtgtgggtcacccgaaagaggcaccaccataccttgggatgaaaacagcttctgcgtctgccgtgggagcagaagaacaacttgagctgcgtagaagtgcaagagtgagagagctctatgaaggagaagagttcgactccgaagaagaagaagagtttgatgaagatggggatgattatgtggaaccctattga

SEQ ID NO: 27249 - DNA, 282 bp, Zea mays
  Peptide Sequence Number=SeqID_69028
atggggctgggtgggacccacccgtgggctgagccagatccaattatcctgcccggtgatgtgataatttcgaaatacaacctggtagggagatttgaccaaaggacctttaatactcccaaaaatgaaaaaggtattttcccaagagtgacaactttgttctccatcaaatgtactacaactgtggttaaaggagttttacccagaaagctaccaaatggaatccaaatggagcaaggtcagtggcattggaaaggtgacatattctacttcatttcatag

SEQ ID NO: 27250 - DNA, 1311 bp, Zea mays
  Peptide Sequence Number=SeqID_69029
atggggagcaacaacgcctcttgtgccctgtctttgttgctcctcatcatcatctgcgccgcggctgcgctgcgcgcagacgcgtcccaggcggaccggctgagagagttcatcaggtctaggaggaacagtcctagcgacgacaagggctcgtttaaggtgaccaacttagcgcagagggttgctactagcagcctgctgagcacaagcagctactccgacagtgagcagagcgccatgaaggcagccgacaagatcacctcgctgccggggcagccggacggcgtcgacttcgacagtacgccggtggccaatgtgatcttcctggaatcgccggcgggtgtcggattctcctactccaacacgacctccgactacgacctcagtggagaccagaggacagctgacgacgcgtatttgtttttggttaactggctggagcgtttccccgagtacaagagccgtcccttctacatctccggggagagctacgccggacactatataccccaacttgctgccaccgtcctgatccagaattcctacaacagcaagacggccataaacctacggggaatcttggttggaaatccacttctggattggaatatgaacttcaagggagcagttgactactactggagccatgggttgatgtcagacgaggtctttgacaacataaccaggcactgcaactatgacaattcagatggtgcggcatgcaatggcgctgtggatgtgatagatcctggacagatcgatccttacaacatatacgctccaatctgtgttgacgcggccaacggagcatactaccccactggctacgtaaggcacttattaacgattctgaatctacctggatatgatccatgcagcgattactacacgtattcctacctcaacgacccagcagtgcagaacgctttccacgctaggatgacaagttggtcaggatgcgcgaacctgaactggacagatgcaccgatctccatggtgccgacactcgcatggctgattgagaagaagttaccggtctggatttttagcggcgattttgattcggtgtgcccgcttcccgccacgaggctttccatcaacgatcttaaacttcgcatcacaaccccatggcgtccgtggacagtaaacatggaggttggagggtatgtccaacaatacaagggaggattcacatttgcctccgtgagaggagccggtcatatggttccatcctcccagcccgagagagcactagtattactggattccttcttcaaaggggtgctcccaccgtacgtaccggagcagtaa

SEQ ID NO: 27251 - DNA, 270 bp, Zea mays
  Peptide Sequence Number=SeqID_69030
atggcctcgggcagacttccacctcgaccgagctcggctctgcccttgatatccacgacggaagacatccccaacgtcatcagacacagtggggctgacacacctcttaaccagcttttcctcatacctaaccctgtgtcaaccactacgggtgaagatagcaaggaaaggacttcgatggaccaggtgaaggtgaaggccaagcgacggcttatggaccgaggtaccatggataaggtgaagaagagagtacttgcactaagtcgatga

SEQ ID NO: 27252 - DNA, 201 bp, Zea mays
  Peptide Sequence Number=SeqID_69031
atggcatcctcgatctctgtcgccttgatcccccacgctctcttccaccaccttgctgctacacaacacgaccagcaactggagcagcaacagcagggtgtgtgtttttatgaagttgacacaatagttcgagaatatctgaacccaaaaatttgggcacccgaatatttgggtaacgtaatagcaacattagttctctaa

SEQ ID NO: 27253 - DNA, 246 bp, Zea mays
  Peptide Sequence Number=SeqID_69032
atgtcacattacttctttctcactggtagctggcgctgctcccgtcgatctgtcgctgtgatctgtttaccccgtacagtacgtgtgcagttatcgcgtgcatgtcgactgttaactgctgctaacatagctaggggcctagggcctagggatgggaaggcgagaccaccggaggacatgagcgtcggcgtcggcatcggcaccggcaccggcaccggcaccggcaccaggcgcacagcacattag

SEQ ID NO: 27254 - DNA, 408 bp, Zea mays
  Peptide Sequence Number=SeqID_69033
atggaggagtgggactgtgagccgctgcggagcgcacggtgcagccctgccgccaccccaagctccctgctgcaggacgagctggccgcacacgaggtgttcgtcgcggtgcccaaagagatggcaaaggctgaaactagaattcgttgcatctgtcataccaacatgaaaccagaagaaatcaaggagtacagaaagcagaagcgagcaaaggccgagaagagcctagatacgtatgtgcagatggcaaaggctgttacattcaggttgcctgtgcgaaaagaaatgaacatgccaaagtcgatgacagcgctcaagcttttcaagacagcagctccatcatgcaagatgtggtttacttgtaaaggtcatttgatatgtaccaggattccggctcccatcaagtga

SEQ ID NO: 27255 - DNA, 321 bp, Zea mays
  Peptide Sequence Number=SeqID_69034
atgcaggcggcatgcaactgcaccacgacgatgcaccctctcgacttccacgcatccagcatggaggcccaggcccacacgtcatgtaatcggcgcgccggatactacgtgcgaaaaactacaccgtcacttacgccagtcccgcgccttctcgactgcggaaccggtgccacgactcgaggcaaccctgcgcatggcccaacagtgccaaccaagcacatcggtcacagggaccgggaaaggggatactccgaaagggatccttctctacgaaggaagcgggccccaatccctcctactgatcaggggttcgaaggctga

SEQ ID NO: 27256 - DNA, 243 bp, Zea mays
  Peptide Sequence Number=SeqID_69035
atggggctcggtgtatgcggctcgctctgccaaggtggcaacgagagtgatggtcttggttttgactctggtaatgctagtccactacaaccagacatgacacttgctgagtatgttgatgtgtactcacccttgctctacacaccaaaccccccaggttgtccgcattgcagccactgctcaggagaggacgaagccgtggaaggagacttccaggagttccaggactacgacgagttctag

SEQ ID NO: 27257 - DNA, 330 bp, Zea mays
  Peptide Sequence Number=SeqID_69036
atggggaattacggcgagcgattcgtcgacaccccggacaccacgcccacggcaatcgcagctaatggattcctgatacatcgtcagatcaccagtgccggtccttgctggcacgggggctctaccggcgttgattgcctgcggcggcggtgcactggctacggaggcactggtcctaggtttcggaagtcaaggcggtcgcgctgggcgaagctttataccgggtcgaccacccccctatcctccccagttagcctagcttcgcagggtcagttggtaacagcccacgccgagatccacgggaggaagagaaacaagattgcaaactag

SEQ ID NO: 27258 - DNA, 427 bp, Zea mays
  Peptide Sequence Number=SeqID_69037
atggcgacgtccgtggcttgcgccttcttcttcgacgcggagccgctgggcgagcccgggcggcacgcgctggacgcctgcgcgctctgcgccaagccgctgagccgcaacagcgacatcttcatgtacaagggcgacaccccgttctgcagcgaggactgccgctacgagcagatgcaccacgacgcggcgtacgcaaggcaggcggccagcagccggcggaagcagcagcagtcgcagtcgcagcggagcagaggggcctcgtccgtgggcgccaaggcggaccgttacagctgcaagagatcccgttgggggggcggcgctccgctccgctcctggctggccgggcggggcgctgcgccgcacaacgagtttcgtgcgcggaacagaggcaagcggaggtggatggatctgaagaccgaagaag

SEQ ID NO: 27259 - DNA, 1095 bp, Zea mays
  Peptide Sequence Number=SeqID_69038
atgtcctcctcctcctcctcctccccgtctctacagccgcctcccgccggtgcaaccggcggcagctccccctactccgcgtcctcgtccttcctcccctcgttcatgatcatcgccgcgctgctcgcattcgtcttcctcgcctccgtctccatccacctcctgctccgcttcctctccgcccgctcttcctcctcctcctcctcctcctcctccccgccgttgtccggacatccgcgcccgcggacctaccgcgacgacgcgggctcggcggccgcatccgtggcgaggcggcctgccgccaccgcggctccagccgacgcagggaagaacgaggaggaggaggacgcgggcgacgagaagcagcggctgatcgactccctgccgctgttcaccatggcgtcggcgctcgcggcgctccccaagagctcgcccgactgcgccgtctgcctgtcgccgttcacgcccgacgccgacctgcgcctgcttcccgcgtgccgccacgcgttccacgccgcctgcgtcgacgcctggctgcgcaccacgccgtcctgcccgctctgccgcgctgccgtcgcgctcccgcacccctcgctctccggcatgctcgccgccgcgcaggcgagggccagggaccggcccggaccgggatcgagcttcctcgtcgagatgggcaccatagacgaggaggtggaaagccgtggtgtcccgcgtcgcgcgcatcgccgcccgcgagggaatccagcgccgtcaagggaggagaagccttcagccgagcagggatcggcgccagcggcagcgccagcgccgtcgccgtcttcgcaaccgccgcctcccggcgagacggtggccgaggcggcgggctcctcgcgcgggtggctgcgggagtacgtggaccggctggcgtcgtcggcctacacgctctcggagcggtggagctcgcgctggagccaggggcagagccagcagcaacggcaggaagagccgtggctgtgggacgcggaggccgcggagatgtcggcggcgccggggtccgacgacgacgaggaggagacggcgttcatggcgatgtaccgctggatcgccggggtctaa

SEQ ID NO: 27260 - DNA, 204 bp, Zea mays
  Peptide Sequence Number=SeqID_69039
atggcgggtatctccccttcgtcgcgagctcaattgtggatgcaacacgcgctagatcccggattggatagccaaaagggatttgcggggttgggtgatataccccaggaagatggagctgacagcgtggggcccggtgtcagcgacacaggtttgcccatgaacgcgcggctccagctggagagtggaggcggtctggcatag

SEQ ID NO: 27261 - DNA, 546 bp, Zea mays
  Peptide Sequence Number=SeqID_69040
atggcagcacatctcgccagcgccttcttcttcgctgccgagcccgtcggcgagcccggcgtgcacgcgctctgcgccaagccgctggcgcgcgacagcgacatcttcatgtacagagggggacacgcccttctgcagcgaggagtgccgctacgagcagatgcagctcgacgccatccgcgccaggcagccgcggccggccacgtggcgcgggagcccatcggccaggggcatctggagccacctgtcgtcatcgtagaggccgaagaacacgtggcttgccctgaacaccgcaacagacagagcctcttggaacccggaagcatagggctcccaggccctacgcagacgtcgatgttgagtggcttgaacaagtcctctcggggggtccaggccccaatgggacccccgagacacatggcgccatcggaccttgccaattgccacgtggtgcgtccgctcgccaattggttggcaagggctgttgcagaagagagtctgacgaaggcttgtgtgacaagggcctctcgtagtgactcgtggtag

SEQ ID NO: 27262 - DNA, 150 bp, Zea mays
  Peptide Sequence Number=SeqID_69041
atggcgccagctggtgtctgtggcttagtggtccgtgcacgcgggtccacccgtaccagaactacaggccaagggagcgggtcccagcgtatgagcaaaaatctcgaggcagatatcctggcgcatcgtgatcgatcagaatcgtattag

SEQ ID NO: 27263 - DNA, 837 bp, Zea mays
  Peptide Sequence Number=SeqID_69042
atggccgacaacaacggtggcaacagcaacagcggaggcacaaacgcgaacaccaccgccgaggttcagatacagatccctggaccaccgaaaaccgaagctccagcagctcaagaaggaccatcggagagttccaaagctaagaactggaaacggtggcttgtggtggcagcggatgcaatcttgctcatcgttggtcagacatcagcaacactgctggggagatactactacagtcaaggtggcaacagcaagtggctatcaacgttcgtgcagactgctggcttccctctattgttcttcggcctgttctttttcccttcgaagtccagcggaagtccggtcggaaaaactgccatgatatatgctgtcctggggcttatcataaccgcggacaacatgatgtattcccacggactgatgtttcttccagtctcgaccttttcgctcatctgcgctagtcagttggccttcaacgtctttttctcatacgtcttgaactctcagaagctcaccggtttgatcatgaactccgtggtgctgctcaccttggctgctttactccttggagccaaccatgaaactcatggacctattactggtggtgtctcaggaggaaagtaccttctgggtttcctgttgacagtaggagcatcaggcacctactcactcatcctttcccttatgcaacttacattcgagaaatgtgatcaagaaacagaccttctcggcagttttgaacatgcagatatatactgcacttgtggcaactttcgcttctcttgttggactatttgcaagtggagaatggatggatttaagagaggagatggatag

SEQ ID NO: 27264 - DNA, 477 bp, Zea mays
  Peptide Sequence Number=SeqID_69043
atgggcaagaacaacaagcgcaagcgtgaaccaactcctccatcggaggattttggtgacttggagtactcagaggaggagttctcctatgagtctgaggggtctccggctcccatccccctgcgtgagtcgtctgacgaatcagatgactcccaggggctcgcggcggaggtctggacgtacatccgggccgtcgagcgctccgggctcgagggctcggatgagtcggagtactcctcggacgaggaggactcgtccgaggaggacggcggcggcgatggcgaggacgacgacgacgacgacgaaggcggtggcggcggtgacggtgacggcggcggcaggggcggcagcaaggatggcgacgacggcagcagcaggagcggcggcggcagcagcaggggcagcaacaggggcggcagcggcagaggcagcaacaggggcggcagcggcagaggcagcaacagggccagtggctag

SEQ ID NO: 27265 - DNA, 273 bp, Zea mays
  Peptide Sequence Number=SeqID_69044
atggccaattttcatgataactgggatcgtgtgacaaggaaatacggggacacacaagcaggaggttttatcagatacgtcgtcacattgttcacctccaacgagaaggcagcagagttctcccgcttcttcgcaacccgcaagaagcctgaattcgagagaacactaaagcagagccttgagaacgtccggatcagcgcaaggtggatccagggcatcaagagcgaaccgaggctcgctcaaacggtgcaggagctgctgcgtagaccctga

SEQ ID NO: 27266 - DNA, 852 bp, Zea mays
  Peptide Sequence Number=SeqID_69045
atgacgtcgttgctggtggtgctgctgctcgtctcagtcttgccgggcgccagtggtgccgactctgggccgctcgacggcaggaagatggtgttcgccggggagaccgcaggagtacttgcccgctattccttcaacaaggacgcgaatgtcgaaacggcatcaccgccgccgccggcgttggccggttcggcggcgcagttccgtgggcaggcgcagctcccgcgcttcgccgcgccgcgccgctacgacctgcgcctgcgccccgacctcgtcacctgcacattctcgggcactgctgccgtcaccgtcgctgtctccgcgccaacccgcttcctcgtcctcaactctgctgacctctcaatcgacagcgcctccatccgtttccgggatttggcgcctaaggaggtggtgtttttcgcggacgacgagatcctggtgctcggattctccaaggacctggtgctcggtgagggcgtgctcagtatgaagttcaacggcacgctcaacgaccagatgagggggttctaccggagcaagtaccagtataagggaaagatgaagaatatggcagtgacacaatttgagtctgtggatgctcggcggtgcttcccatgctgggatgagcctgcattcaaggctaagttcaagctaacacttgaagtaaatgttgggatggtggcattgtccaatatgccaatagctaatcagacagttgctggtcctatcaggactgttcactatgtggaatcacctcttatgtctacttatttagtggctatagttattggtttgtttgaatatatagagggtgtaacaccagaaggaacattaggggtgagctcctactga

SEQ ID NO: 27267 - DNA, 1098 bp, Zea mays
  Peptide Sequence Number=SeqID_69046
atggagagcacaggctctgctctcgcttctgtgcctgtggattcaaacactgaccctatggcagatccaaagcgcagagcgaagtctaatgatcctagatggaactatggatattggatagagattgggaatcgagataaggtcacatgcaacctttgcaagaccgtgacaatgggaggaatcaagaggttaaaagaacatcttgctggtggttatgcggacacattaatgtgttctaagactacaactgagattagaaaagaagtgaaggcatatttggacaagaacaagaggactaggcctactttccttgatgatgatgatcatgatggtcaggggcagcaaggcgaagaggattccaccacatctatgcaacaacctagctcggggacaactgccaaaaggaagagagctgcatttcagtttagaacaactgcacagccacagacatcaaacaaggaaaagaaaaagggaaaattgcaaccatgcttcgaagaactactgaacaagttgtggatgagaggcgctcctcagggtcacaccaccaaaccaccatggaagcatgcactaagtctaaggctgacaaagattatgtcaacaagcaatgagctatgtagttctatgagtgtggtgtaccttttaatgccattaattctagacagtttcacattgcttgtgaggccactgctcaacatggttaaagagcctttacttgctgaatgtgtcaaagatgtgactaacttgagggtttatcatgagttagcttggaagacttatggttgcacacatatgtcaaatggatggactgacaggaggggacatcagttgatcaactttcttgtgaacaatcctgaggggacttacttcttagagtctgttgatgcttcaagtgaagcacatagtgctactatgcatggtgatttgcttgagaagaggattgataatattggcagagacaaagtggttcaagtagtgacagataatggcgccaattataaggctgcaggcaagattctcatggatcgaattccaacattgttttggagtccttgtgcagctcattgcttggatctaatgctagaagatattggaaagtag

SEQ ID NO: 27268 - DNA, 225 bp, Zea mays
  Peptide Sequence Number=SeqID_69047
atggcacgggacacagcctgtgagaattacattatgtcctataagggaattacaacaacgactcaaacatttatggactattgcaatcttgccgacagagaggacgtcctaatcccggagaaagaaggagttcgtgaaggaggaccagatcctgctctcgagcctccaactgaggatatcccttctgcacctacacctaaaggcaagccccggttttatgcataa

SEQ ID NO: 27269 - DNA, 345 bp, Zea mays
  Peptide Sequence Number=SeqID_69048
atggataaatctgatcaaaatagctcggaatcgatcgagaaaaggtttatcgttgtgatgatgtcttaccataaaacgatcataactttttattggatccgtaacctgagaattgttctcagggttgagaaaaaggaagaagttctagacaccccacttctagaggaacctgctgaagatgcaactgttgttattaagaacgcttacaaaaaagcaatggatgctaatcttgaagtgagttgccttatgcttgcttgcatggcgcccgagctacagatatactttgagacaaaccatgaggcgtacgatatgactgtggcgctcaaaaatatgttcaagacttag

SEQ ID NO: 27270 - DNA, 1023 bp, Zea mays
  Peptide Sequence Number=SeqID_69049
atggcgcgggactgccgtgcaaagaagagaaaaaggcctgttcgtggctgtggcgttcgttgccggagaaaccaccgttcattttctttcttgcaactcgtgtgtcttaacaaaagtgattgcagaaaaattggagctaaactaaaggaagtgatttggaaatcatctcttcctccattagaaaatagttatgaagtgacgaaggtgcaagaaagttttagtggcaaagaatctaatgaaaaggttacacattcaggaaatgttctggcccagattgagttggtcagtgctgcaacatctcacaagaactggaacttggatgaaggtcaagaaaaatttaaagattccactgacagtgatatggtactgaattctgcaaaggatgttcctgcattgttccattctactggtatatctagaactgaaccctcagcagacattccattggaatattccccattaaatccagtatgtgatattatggatccatccctgaactgccgaagtatcccaacaaacaactgtgaaagtagagctctggtagagaagtcagaacattgtccggatgattataatttggaaatgaagaggaaaagaaacgatggtacaaaaggtacagttgttctaaatagcggttctaaagtagagggattgttatgtcttttggaacaggccattcacagtggcagggcacttgttctgagtgaagatgagcttgctgattcagatctggtctatgaaaagtctgttgcttttacaaagtcaattccgcgaagactggtttttgagaatactcgaaggaagtccagtgccaggagaaatgtgccagacaatcatgcaagaactaaaacacatcttgtagaaaataaaatgttgagcagtcctgttgaaaataaatttatcgttaatggaggatctgcaatgcagacaattgaccatggacaagagtttctttctgatgttgttcatcaaggtctcaggtctgttgcgtcgtggcgagtcctttttaactggaaatactga

SEQ ID NO: 27271 - DNA, 435 bp, Zea mays
  Peptide Sequence Number=SeqID_69050
atggtcgtctcgtcgtcgtcctcagcctccgagctcttcatgtactccttgtccccgaacgtcgcggcgccgtggctcttgctgttgccgaggacgggccacttgaagtggctcctggagaaggagagcgagtcgtgcgtgttcctcgccgcgatggttctcatggtgcgtgactttgcttccttgtccttctacttcgagctagctcaagctttcctgaagcaagcgaaacgaagcagagaaatgctgcaatacaatgcagcacaatggaccctgtgctttgcttggctggagctggagggctgctgcgtgcttgtgctgggctgtgtgcgcgaggttatatccaaggctaagctgaactgtaggagggcaccaaagcacagtccacggcggaactggcacttgtttcttgtgaggaaattgaaagtcacctag

SEQ ID NO: 27272 - DNA, 243 bp, Zea mays
  Peptide Sequence Number=SeqID_69051
atggaggcaggatctgcccatggagatgcagaggcacggctccatggccaggagatggatttataccgcccagaccttgactccgagcggccagccgttcgcagagcagttggtgacttacgcggcgaggaagatagacctgggaacgagtctgcgcacgtaggcatcggagaccggcaccgaggccccactgaacaacgccccgagagccagcatcgattgaaaatagacatgcggatgtga

SEQ ID NO: 27273 - DNA, 270 bp, Zea mays
  Peptide Sequence Number=SeqID_69052
atggcgtcaccgcatccctcgcgctcagctgcctccctcggttgtggggaagacgtgtgggagccattggatgcacccccaacggtcacgattgagacagtaggcgtaccgcttcgagtaactgatcagagctgtggatctctgatccctcggctcggattagattgcattgaggacacgtgtcacccgaagatcatcctggtacctggaatctcaagtcccagacaagttgtgcccttgatcacttctttttacccagtcatgttctaa

SEQ ID NO: 27274 - DNA, 366 bp, Zea mays
  Peptide Sequence Number=SeqID_69053
atggaggacaccggcgagggaggcagaggggagtacaccaaggacggctccgtcgacctccacggcaaccccgtcctccgctccaagcgcggcggctggaccgcctgcaccttcatcgtcgtgtacgagctcttcgagcgaatggcgtactacggcgtggcggcgaacctggtggtgtacctgacggagcggctgcaccagggcaccgtccaggccgccaacaacgtcaccaactggtcgggcaccgtcttcctcacgccgctcctcggggccttcgtcgccgacgcctaccttggccgctactggaccttcgtcgccggctctgccgtctacctaatggtacggatggatgtaggttatcgctaa

SEQ ID NO: 27275 - DNA, 3950 bp, Zea mays
  Peptide Sequence Number=SeqID_69054
gttcccactcctcgtcatccttggccctcgcgaccctcgccgccaatgctgcgacgccagcgtcgccggccgacgcgctgttggcgtggaagtcgagcttgaacaacccggcggcgctgtccacgtggacgaacgccacccaggtctccatctgcaccacctggcgaggggtcgcatgcgacgccgccggccgcgtcgtgtcgctccgtctgcgcgggcttggcctcacgggtggcctggacgcgttcgacccgggcgcgttcccgagcctcacctccctcgacctcaaggacaacaacctggtcggcgccatcccggcgtcgctctcgcagctgcgcgctctggccacgctcgacctgggcagcaacgggctcaacggcaccatcccgccgcagctcggcgacctctcgggcctcgtcgaactccgcctctacaacaacaacctcgccggcgtgatcccgcaccagctgagtgaactgccaaagatcgtccagctcgacctggggtccaactacctgactagcgtcccgttctcaccgatgcccacggtggagttcctctcgctctccctcaactacctcgacggcagcttcccggagttcgtgctcaggagcggcaacgtcacctacctcgacctgtcgcagaacgccttctccggtacgatcccggacgcgctgccggagcggctgccgaacctgcggtggcttaacctgtcagccaacgcgttctccggccggatcccagcatcgctcgcgaggctgacgagactcagggacatgcaccttggcggcaacaaccttactggcggcgtcccggaattcctcgggtccttgtcgcagctgagagtccttgagctcggcagcaacccgctcggcggaccgctcccgccggttcttggccggctcaagatgctgcagcgtctcgacgtgaagaacgccagtctggtctccaccctgccgccggagctcggcagcctcagcaacctcgatttcctggacctctcaattaaccagctctctgggaacttgccgtcgtcgttcgctgggatgcagaagatgcgggagttcggcatatcatccaacaatctcaccggcgagatcccagggcggctattcacgagctggccggagctcatatctttccaagtgcagaacaactcgcttcagggcagaatcccaccggagctcggcaaggcgacgaagctgctaatcttatacctcttcagcaacaatctcaccggcgagatcccgccagagctcggcgagttggcgaacctgacccaactggatttgtcggcgaacctacttaggggatcgataccaaactcactcggcaacctgaagcagctcacgcggctggagctcttcttcaacgagctcaccggccagttgccgccggagatcggcaacatgacggcgctgcaaatcttggacgtcaacaccaacaatctggaaggcgagctgcctcccaccgtctcgttgctgaggaacctccggtacctgtcagtgttcgacaacaacatgagtggcaccgtaccgccggacctcggcgcagggctggcgttgaccgatgtgagcttcgcgaacaacagcttctccggcgagctgccgcagggcctctgcgacggcttcgcgctgcacaacttcacggcgaaccacaataacttcagcggcaggctgccgccgtgcttgaagaactgctccgagctgtaccgggtgcggctggaggggaaccgcttcaccggcgacatctcggaggcgttcggggtccaccccagcatggactacctggacatctccgggaacaagctgaccggccggctctcggatgactggggacgatgcaccaggaccacgcgcctgaagatggatggcaacagcatatcaggcgccatcccggcggcgttcgggaacatgacgagcttgcaggacctcagcttggccgcgaacaacttggtaggagccgttccacccgagctgggtaatctcagcttcttgttcagcctcaacctgagccacaactccttctccgggccgattccgacaagcttgggccgaaattccaaactgcagaaagttgatctgtcagggaacatgcttagtggagccataccagtgggcatcgacaatcttggctcgctaacctatcttgacctgagcaagaacagactgtcagggcagataccaagtgagctcggcgacctattccagctgcagaccctgcttgatctgagcagcaactcgctgtccggtccgatcccttcgaatctcgtgaagctggcgaacctacagaaactgaatctgtcacacaacgagctcaacggttcaatcccagtcagcttctctcgcatgtcgagcctggagactgtcgatttctcttacaaccagctcaccggcgagataccgtcaggcgacgcatttcagagctcatcgcctgaggcttacatcgggaacctagggctctgcggcgacgtgcaaggcgttccttcctgcgacggcagctccaccaccacgtcagggcatcacaagagaacggccattgcaatagctctctcggtagctggggcagtagtgttgctggcaggcattgccgcctgcgtcgtcatcctcgcatgcagaaggagacccagggaacagagagtgctggaggcaagcgacccttacgagtccgtgatctgggagaaggaagcgaagttcacgttcctcgacatcgtgagcgccacggacagcttcagcgagttcttctgcataggcaaaggcgggttcgggagcgtgtacagggcggagctccccggcgggcaggtcgtggccgtgaagcgcttccacgtggccgagacgggagagatatcggaggccggcaggaagagcttcgagaacgagatcagggcgctgacggaggtccgccaccggaacatcgtcaggctccacggcttctgctgcaccagcggaggctacatgtacctggtgtacgagtacctggagaggggcagcctggggaagacgctgtacggggaggagggcagggggaagctgggctggggcaccagggtgaaggtggtccagggggtcgctcacgccctggcctacctgcaccacgactgcagccagcccatcgtccaccgtgacatcaccgtcaacaacgtcctgctcgagtccgagttcgagccgcggctgtctgatttcggcacggccaagctgctcggctccgcttccacaaactggacttctttagcaggatcctatggctatatggctccagagttggcgtacacgatgaacgtcacagagaaatgcgacgtgtacagcttcggagtggtcgccctggaggtgatgatggggaagcatcccggcgacctcttgacctcgctgccggcgatctcctcttccggagaagaagacctgttgctccaggacatactggaccagcggctggaacctccgacgggtgaccttgcggaggaaatcgtgttcgtggtgcgaatcgcgctcgcttgcgcacgggcaaaccctgagtcgcggccgtccatgcggtcagtcgctcaggagatatcggcccgtactcaggcttatctttcggaaccgttcagacagatcacgaaggaccctctacttatggcgcccgactggatgccggaagccagtagcaggcctctcgagcctcacattagatgcgaacgagaaaaaggaacaagacaacgtccgacactgggaaagccccattggggaaatattctcacctcgagggcttgggggctactgttggagatacgatccgcgatccttggggcccatcagtcaacaagcccactagggaaaggcctctggcaactagggcccgctggtcagtcggaggagataggtaacgtctatcctagaagaatccgccctaagacaaaccccacggcatcgaacccggggttggccgtggcagaaccgaacaaggggaactag

SEQ ID NO: 27276 - DNA, 1821 bp, Zea mays
  Peptide Sequence Number=SeqID_69055
atggcggagaggctggaggcggccgcttccgacgagtacacgcaggacggcacggtggacctccacggaaacccggtgctccggtccaggcggggcgggtggagagcctgcggcttcgtcgtagtgtacgaggtgttcgagcggatggcgtactacggcatctcctccaacctggtcctgtacctgaccaagaagatgcaccagggcgtggtgccgtcggcgaacaacgtcaccaactgggtcggcaccatctggatgacgcccatcatcggcgcctatgtcgccgacgcgcacctcggccgctaccggaccttcatggtcgcctccgtcatctacctcagcggcatgatcctgctgacgctggcggtgtcgctgccggcgctgcggccgcccaagtgcggcgcgggaacggcggacccggactgcgtgcacaaggcgacgagcgagcagctgggcgtcttcttcctggccctgtacatcctcgccgtgggcacgggcggcaccaagcccaacatctccaccatcggcgccgaccagttcgacgacgcgcacccgcgggagcgcgcccacaagctctccttcttcaactggtggatgttcagcatcttcttcggcacgctcttcgccaacaccgtgctcgtctacatccaggacaccgtcggctgggccgtgggctacgcgctgcccacgctgggcctcgccgtctccatcgccgtcttcaccgccggcacgccattctaccgccacaagcccacctccgccgaaagccccttcgccaagatggccagggtcatcgtggcggccgccaggaagctggacgtccccgtgcccgtggacccgcgcgacctgcacgagctcgacgccgagcactacgccaagaggaacgtggccccgctcccgcacacgcccaacctcagcgtactcagcaaggcggcggtcaagaccggcgcggccacgtcgcggtggtcgctcagcaccgtcacgcaggtggaggagaccaagcagatgctcaagatgctccccgtgctggccatcacgttcgtgcccagcgccatgatggcgcagatcaacacgctgttcgtcaagcagggcaccacgctggaccgccacgtcggccgccacttcgagatcccgccggcgagcctccagggcttcgtcaccatctccatgctgctcgccgtcgtgctctacgaccgcgccttcatgccgttcgcgcgccgcgtcacggccaacccgcgcggcatctcgctgctgcagcgcatgagcgtcggcctcgtcatccacatcctcatcatggccatcgcgtcgctcacggagcgccaccgcctggcggtggcgcgcgaccacggcctctacgacagcaagggcaccacggtcccgctcaccatattcgtcctgctcccgcagttcgtgctcatgggcgtggccgacgccttccttgaggtggccaagatcgagttcttctacgaccaggcgcccgagggcatgaagagcctcggcacctcgtacgccatgaccagcctcggcatcggcaacttcctcagcagcgcgctgctctcagctgtgtcgcacatcaccaggcgccacggccggaccggctggatcctcaataacctcaacgcatcgcgcctggacaagtactacgccttcttcgccattctcaactgcgccaacctcgtcgccttcttcttcgtgtgccgcttctacgtgtacaacgccgaggtatcccacgtcgtcgacgccgggagcagtaagcagaagcgggaagtgcccatggcgatgcagccgccggccgtgggcgcagtggacgccaccctatag

SEQ ID NO: 27277 - DNA, 2481 bp, Zea mays
  Peptide Sequence Number=SeqID_69056
atgccgttcggtttgaggaatgcgggtgcgacataccaacggtgcatgaaccatgtgtttggcgaacacattggccgaacgattgaggcttacgtcgatgacatcgtagtcaagacgaggaaagcctccgacctcctttccgaccttgaagtgacattccgatgcctcaaggcgaaagacgtgaagctcaatcccgaaaagtgtgtcttcggggttccccgaggcatgctcttggggttcatcgtctccgagcgaggcatcgaggccaacccagagaagatcgcggccatcaccagcatggggcccatcaaggacttgaaaggcgtacagagagtcatgggatgccttgcggctctgagccgcttcatctcgcgcctcggcgaaagaggcctacctctgtaccgcctcttaaggaaggccgagtgcttcacttggacccctgaggccgaggaagcccttgggaacctgaaggcgctcctcacgaacgcgcccatcttggtgtcccccgctgccggagaagccctcttgatctacgtcgccgcgaccactcaggtggttagcgccgcgattgtggttgagagacgagaagaggggcatgcattgcccgtccagaggccagtctacttcatcagtgaggtactgtccgagaccaagatctgctacccacaaattcagaagctgctgtacgcggtgatcctaacgcggcggaaactgcgacactacttcgagtctcatccgataactgtggtgtcatccttccccctgggggagatcatccagtgccgagaggcctcgggtagaattgcaaagtgggcggtggaaatcatgggcgagacgatctcgttcgcccctcggaaggccatcaagtcccaggtcttggcgaacttcgtggctgaatgggtcgacacccagctcccaacagctccgatccaaccggaactctggaccatgttcttcgacgggtcgctgatgaagacaggagcaggcgcaggcctgctcttcatctcgccccttgggaagcacctacgctacgtgctacgcctccacttcccggcgtccaacaatgtggctgagtacgaggctttggtcaacgggttgcgcatcgccatcgagctaggggtccgacgcctcgacgctcgcagtgactcgcagcccgtcatcgaccaagtcatgaagaactcccactgccgcgatccgaagatggaagcatactgcgatgaggttcgacgcctggaagacaagttctacgggctcgagctcaaccacgtcgcctggcgctacaacgagactgcggacgagctggctaaaatagcctcggggcggacaatggttcccccggacgtcttctcccgagacctgcatcaaccctccgtcaagaccgacgacacgctcaagcccgaggaggcctcggctcagtccgaggcaccctcggctcggcccgaggcaccctcggcctccgaggcacctcgagcccttgttggaaacgccttccaacaaggtttctactggccgacggtggtggccgacgccactagaattgtccgcacctgcgaagggtgtcagttctacgcaaggcagacccacctacctgctcaggccctgcaaaccatacccatcacctggccgtttgctgtgtggggtctggacctagtcggccccttgcagaaggcacccgggggctacacgcacctgttggtcgccatcgacaaattctccaagtggatcgaggtccgacccctaaacagcatcaggtccgaacaggcggtggcgttcttcaccaacatcatccatcgctttggggtcccgaactccatcatcaccgacaacggcatccagttcaccgacagaaagttcctggacttctgcgaggatcaccacatccgggtagactgggccgccgtggctcaccccatcacgaatgggcaagtagagcgtgccaacggcatgattctacaaggactcaagcctcggatctacaacgacctcaacaagttcggcaagcggtggatgaaggaactcccctcgatggtctggagtctgaggacgacgtcgtgccgggccacgggcttcacaccgttctttctagtctatggggccgaggccatcttgcccacagacttagaatacggttccccgaggacgagggcctacgccgaccaaagcaatcaagctaatcgagaagactcactggaccagctggaagaggctcgggacatggccttactacactcggtgtggtaccagcagtccctgcgacgctaccacgtccgaggggttcggtcccgagacctccaggtgggcgacctggtgcttcggctgcgacaagacgcccgagggcggcacaagctcacgcctccctgggaagggccgttcgtcgttgccaaggttctgaagcccggaacgtacaagctggccaacagtcaaggcgaggtctacaacaacgcttggaacatccaacagctacgtcgcttctacccttaa

SEQ ID NO: 27278 - DNA, 159 bp, Zea mays
  Peptide Sequence Number=SeqID_69057
atgtcacaggaggcgccatcattaccctaccccaagctgactcaggctacggggaacaagaccggcgtcccatctggctcgctccgccaaacaaggattggagtatgtctagaatcgagcacgacctccatcatacacaagaatcctgaagaatactaa

SEQ ID NO: 27279 - DNA, 141 bp, Zea mays
  Peptide Sequence Number=SeqID_69058
atggagacgactttatatacatggacctcacgcgctcgtgtcaaagaggaggccatggccttccgcaagaagatggcatgcttgttacggctcaaggtgcagacaaggaggctgtcaacgcacacactcgcgcccaagtag

SEQ ID NO: 27280 - DNA, 120 bp, Zea mays
  Peptide Sequence Number=SeqID_69059
atggaggctatgaggcggttggaggcgctggcttctcaggggcgtgtagccatgatggaggccgaggcactgaaggacgaggaggctagggacttcgaggactccgtcactacccaatag

SEQ ID NO: 27281 - DNA, 333 bp, Zea mays
  Peptide Sequence Number=SeqID_69060
atgccgccatcggtgaagcctgccgtcacgattgaggcgtcgcagccgtcgatgaaggttgtccaggccgaggcagcgaagggggcgatagatgttggcggggtggttgtcgagttgttgttggtcgactacctgatcaagttgccagtgaaggccttaacaagtgtcactaaggcggtgaagtatgttgttgagcaaatgtgttatgttggtgccttcgctaaccaagtggcgtcgatcgccttcgtcgactccgtcacctcgcaattgcggaccgagaagggggaactggaggctagggtggagtgcttgttggttgaggtgaagagttga

SEQ ID NO: 27282 - DNA, 3087 bp, Zea mays
  Peptide Sequence Number=SeqID_69061
atgcccggcataccgagggatgtcgccgagcactcgctggatattcgggccggagcccgacctgtcaggcagcctctacgccgattcgacgaggagaagcgcagagtgataggcgaggagatccacaagctaatggcagcagggttcatcaaagaggtattccatcccgaatggcttgccaaccctgtgcttgtgagaaagaaaggggggaaatggcggatgtgtgtagactacactggtctcaacaaagcatgtccgaaggttccctaccctctacctcgcatcgatcaaatcatggattccactgctgggtgcgaaaccctatccttcctcgatgcctactcagggtatcaccaaatccggatgaaagagtccgaccagctcgcgacttctttcatcacgccattcggcatgtactgctatgtcaccatgccgttcggtttgaggaatgcgggcgcgacgtaccagcggtgcatgaaccatgtgttcggcgaacacatcggtcgcacagtcgaggcctacgtcgatgacatcgtagtcaagacaaggaaggcttccgacctcctctccgaccttgaagtgacattccgatgtctcaaagcgaaaggcgtcaagctcaatcccgagaagtgtgtcttcggggtgccccggggcatgctcttggggttcatcgtctccgagcgacgcatcgaagccaacccggagaagatcgcagctatcaccagcatggggcccatcaaggacttaaaaggcgtacagagggtcatgggatgtctcgcggccctgagccgcttcatctcacgcctcggcgaaagaggtctgcctctgtaccgcctcttaaggaagaccgagtgcttcgcttggacccctgaggctgaggaagctctcgggaacctgaaggcgctcctcaccaaggcgcctatcttggtgcccccagctgatggagaagccctcttggtctacgtcgccgcgaccactcaggtggttagcgccgcgattgtggtcgagaggcaagaagaggggcatgcattgcccgttcagaggccagtctacttcgtcagcgaggtactctccgagaccaagattcgctacccacaagtccagaagctgctgtatgcagtgatcctgacgaggcggaagttacgacactacttcgaatctcatccggtaactgtggtgacatccttccccctgggggagatcatccagtgccgagaggcctcgggcaggatcgcaaagtgggcggtggaaatcatgggcgagacaatctcgttcgcccctcggaaggccatcaagtcccaggtgttggcggacttcgtagccgaatgggtcgacacccagctgccgacggctccgatccaaccggagctctggaccatgtttttcgacgggtcgctgatgaagacgggagccggcgcgggcctgctcttcatctcgcccctcggaaaacacctaagctacgtgctacgcctccatttcccggcgtccaacaatgtggctgagtacgaggctctggtcaacgggttgcggatcgccatcgagctaggggtcagacgcctcgacgcccgcggtgactcgcagctcgtcatcgaccaagtcatgaagaactcccactgccgcgacccgaagatggaggcctactgcgatgaggttcggcgcctggaagacaagttctacgggctcgagcttaaccacatcgctcggcgctacaacgagactgcggacgagctggcaaaaatagcctcggggcgaacgacggttcctccggacgtcttctcccaggatctgcatcaaccctccgtcaagatcaacgacacgcccgagctcgaggcaccctcggtccagcccgaggtaccctcggctcagcccgaggcgtcctcggttcagcccaaggtaccctcggcccccgagggcgaggcactgcacgtcgaggaggagcagaacgaggccacgcctgatcgaaattggcagaccccttacttgcaatatctccgccaaggagagctacccctcgaccaagccgaggctcggcgggtagcgcgacgtgccaagtcgttcgtcttgctgggcgatgaggaggagctctaccaccgcagcccctcgggcatcctccagcgatgcatctccatcgctgaaggtcaggaactcctgcgagaaatacactcgggggcttgtggccatcatgcagcgcctcgagcccttgtcgggaatgctttccggcaaggcttctactggccaacggcggtggctgacgccactagaattgtccgcacctgcgaagggtgccaattctatgcgaagcagacccacctgcccgctcaggctctgcagacgatacccatcacctggccctttgctgtgtggggtctggacctcgtcggtcccttgcagaaggcgcccgggggctacacgcacctgctggtcgccatcgacaaattctccaagtggatcgaggtccgacccctgaacagcatcaggtccgagcaggcggtggcgttcttcaccaacatcatccatcgcttcagggtcccaaactccatcatcaccgacaacggtacccagttcaccagcaaaaaattcttggatttttgcgaggatcaccacatccgagtggattgggccgccgtggctcatcccatgacgaatgggcaagtagagcgtgccaacggcatgattctacaagggctcaagcctcggatttacaacgacctcaacaagttcggcaagcgatggatgaaggaactcccctcggtggtctggagcctgaggacaacgccgagccgagccacgggtttcacgccgttcttcctggtctacggggccgaggccgtcttgcccactgacctggagtacggctccccgaggacgagggcctacaacgatcaaagcaaccaagctagccgagaatactcgctggaccagctggaagaggctcgggacaaggccttactacactcggcgcggtaccagcagtccctgcgacgctaccacgcccgaggggtccggccccgagacctccaggtgggcgacctggtgcttcggctgcggcaagacgcccgagggaggcacaagctcacgcccccctag

SEQ ID NO: 27283 - DNA, 489 bp, Zea mays
  Peptide Sequence Number=SeqID_69062
atggtgtccgtggtcgcgaccgtgagtgggtaccacggcgacgagcggcacaggctcgtgaacctcatcgcggagaccggcgccagctacgtaggatccatgagccggtccatcacccacctggtgtgctggaggctcgaggggaaaaagtacgacatcgcgaggaggctggggacgctcgtcgtgagccattggtggtttacggagtgccttagggaggggaggcgcctcccagtggactcttacttgatggtaagtgacagtgacagggataacgacaagaaaggcaagaggagagaaaaaaagaggtaccacaagaagaggggcggcgatgcccacgtgtgccgggagtgggactccgacgagagctccaccgagtcctcctccgacgaggacgccgccaacatcgccgtcaccaagggactcctcttccccaacgtcggccacaaagtgcctcatggcaaaggacggcaaaagaaagaaggttaa

SEQ ID NO: 27284 - DNA, 195 bp, Zea mays
  Peptide Sequence Number=SeqID_69063
atggcggcagccggggtcagtgaagcattgtatgccaaggtggtgggccctgttctgttgccagggaatcgatggagacggttgatgtactccttggatgatttggttgctggtgtgacttggccttcatccctgccattgggaaggatggtcgagagggttactgcttctgcaagagaggaccaggaggagtag

SEQ ID NO: 27285 - DNA, 600 bp, Zea mays
  Peptide Sequence Number=SeqID_69064
atgggcgatgggtctgctcacactagtgatgcttgttgcatctgctccaccgtagccccaccctgcaccgtcaacactcgtgctgcttaccgtagccctagctctagcgctgtctaccgcgacgtcgagtcttgtgccacctcatgcggcctagacttgcaacctcgctcggggcatctgtcggtgttaatgacccgactacgcaccaagggaatttgtgggtatctcacggatcaggtttttcagaataaccaggccgtacacataatgggtgcgcccaatcgacatcaccgacaagctccactgcctagatccgtggccagaccagctccgggcaccaatgacgccgactcatacctcaacgtgaccgccagaggctccccatccttgctcgacccttcgccggaaccctaccaacgccgcatcttatgcatcatattaatagattgcaaccttgctgatggagagtacgtgctcatccccgagcaaggagaccaagaggaagctcaggagctagctacaaaggctgctactgaggacctccctgctgccccagcaattgaaggcaagccccgtgtcacacccggatttaagggataa

SEQ ID NO: 27286 - DNA, 165 bp, Zea mays
  Peptide Sequence Number=SeqID_69065
atggcgagagtagagtgtaccctccgtggcaagaggctggacggtggtgtatcagtgctcttgatccccagctgggtattaatcgattcagatcgccgttacttctcggacatgaagacttggtcactgccctacatgcagcaatccagtaaagtgaagggttga

SEQ ID NO: 27287 - DNA, 384 bp, Zea mays
  Peptide Sequence Number=SeqID_69066
gatcaagttgccacgcctgcagaaattgcaaaagcttatatgggtttaaaatcttccaagggttcccctctacgccttagattgcacgatccctcctctatgcctatcacatctatggaagttagtatgtcacaaaaagctaagcctcccacaatcccacttgcccaaggctcaagattgcatacttccaaaacttctgattgtcttgaaagcaactacacaacaccgaatggagtaatctgcaaaatgtcatcatctccttatttcaagagtggtgtgtcttcaaaggagctatttggttctgtatcttcacattaccagacctcaaatagtgttcatacttttggcagacaggattactatgacagtgagttgcaaatctaa

SEQ ID NO: 27288 - DNA, 261 bp, Zea mays
  Peptide Sequence Number=SeqID_69067
atggcagtcgggggcctgttggggggcgctttctgggcgacgcgggcgctggaggtggtcaagcggaacgattccccgggcctgctgtggaagcgcatcaagctcacgaccacccgcaagaacaacgccaagaagcgccttaagcggctctggcaggttgactaccttcctcctcctctattacgttcccgctccgtgcatgcgcatgcctatgatttgagagggaagggttttttggcttctatgaggggacgacgatga

SEQ ID NO: 27289 - DNA, 198 bp, Zea mays
  Peptide Sequence Number=SeqID_69068
atggagtcccagcgatacaactacggcagcggcgccggcaccggcggcaaaatccgccgctaccctccctctcgcgccgtggctgcgtcaccatatgctcgaccggccaccgccccgacccacgctcctggaaccgccacggcggcgtggatgatcgtccagaatgtgaagaaaacggtggagtggctgccaatgtaa

SEQ ID NO: 27290 - DNA, 420 bp, Zea mays
  Peptide Sequence Number=SeqID_69069
atggcaactacatcctcttccaccgcgtcgaaaccgaagagagctaaggttctgactcgtaggacgaaactacactctttagagaagaccgctgcagtgcctgccacagagaagatagaaattgtcgaacatgccgaagccatccccttagcttcggagataattcctgctgcgactgttgaagctaatgtcggttcggtagaagaaacggaagcaaagagctcaaagacagaggagcatctgaaactgctgagtcccccaaccacgacagggttgccgaagttaacaaccgctgcagtaataactcctaggaaagggaggagaatgtccagtgttttggatgccgttttgaaaccttcaaaggtgctaactcctgtttccactaaagcttccgaagacgatattgaaaaattagggtag

SEQ ID NO: 27291 - DNA, 405 bp, Zea mays
  Peptide Sequence Number=SeqID_69070
atgcaggtggcgtgcaactgcaccacggggacacaccccttcgacttcgacgcatccagcatggaggcccaggcccatacaacatgtaaccggcgtgccgattactacgtgcgaaagactgcaccgccacttgcgccaatgccgcgccttgtcgactgcggaaccggtgccgcgactcgaggcaaccctgtgcatggcccaacagtgccaaccgagcacatcggtcatgggccagtcaaccgcgggagaagggaccgggaaaggggataccccaaaagggatccttctccgcgaaggaagcgggccccgagccctcctactgatcaggggttcgaaggctggtccctcggaagggttcgacagccgcgcccagagcactcgggcttcaggctcattactgattag

SEQ ID NO: 27292 - DNA, 1518 bp, Zea mays
  Peptide Sequence Number=SeqID_69071
atggttttgaagaggaagagtactgtcagcaatgagtttgtatctgctggtccgatacgcagaattcatcaaagatacaacagaacatcaccactgttggaaacacagctgggttatcgtagataccctgtgggctatggaagcaaactcgaaggttctgagcaattggcacggactcaaaaacgccggtgtctggataaagttggtgatgccagtctcggtagcgtagaggacaaaactaatgtgaactatcctggtcaggtgccagagaagtcagctgagatggcaactaagatactgaagcagcttgacacattagtaccttcacagaaggaaaacacatcagaaacaaagcagaaacatgagagtgccatatatttcgaggaagatgtttctcgacaaaagaaagtacaagcagagagagatcttttggaaccttctccatcagaagtacctgatggtattgcatcgaacaaatcaatctcacaaattaccttgaacaaggaaaagcctccagccttttcttccagaggtaatgctcccaatctggtattatctgatgaaattggacgaagcaaaatgtccactccaggaaatggcttcaccttccctgccccgactgtcaacaatgcctactcacagggccctccaacacctacattgacatctcctatactaacagttgaaaagcagccttcagtattctgcagtgcttcagtcacttctgcacaaagtgaccctaggatttcaaaatcagttttgggaggaccagttacacagaaattagaaagcaagttaaatggagataatcaacgagtgccttccaagaattctggacaagttgcatctttcacaagtaatcctgtatttaaggttgatggccctgggcatgcgtcaaactctgttctctcagctgtacaatcttataatacatcaactggctcagtttcatttcaaagtgctggctcttctaccatctccactaacttaacttcaaacattacacagagctgttcaactggaggcagtttcactttctccaatactcgttttggtagtttatcggcaacctcaaatatgtttgcagcaaaatctttagcgttgtcttgtacagcaagccccggtgcttctttgggtttccctccagttcatactgcaagttctccagctgctcaccgcaaatctgaagcagcaaatagcagtatcagttttagttccatgcagcagtttggcattgcaggttcttccacagtgcaggacaaatccaaggcagtagacagcagtaccccttttggctttccccagaagtttgacaccattcaccagttggttcagcaacaatgtgctctagcccttcgaattcaaactctctgttttcttgggctgctggctcaggtgcaagaactgctccaccatcttcccctgctacaagctcatcttttgcttttagttccagtccagcattttcagcatattccttttcgccagcaaattgactacacctgcttcacttcataa

SEQ ID NO: 27293 - DNA, 195 bp, Zea mays
  Peptide Sequence Number=SeqID_69072
atgggcatggatttgagggattttggaatccacaatgctcctgtcatcggtgttggaaaggtgtttttagaacatgcagatactaaagcaaatacgaggatgcatggacggaaattcagcaggaaccaggtggtggtcgttcgacgcccgcacatgcaagccctgcgaccgcggccgccaacgccaacccgctaa

SEQ ID NO: 27294 - DNA, 294 bp, Zea mays
  Peptide Sequence Number=SeqID_69073
atggcagctaggtggggaagagctcctgctcctgcggcaatggacagagggaggaagaagggcgccgctgggcttcctgctgccggagaacagagggaggacgagccagggaagagccgagtgagggagggaggcaaggaatcctgctggacaaccgacgctggagggagctgggcggccatgggaggagaggaggagccgagatccctactcctggcgtgtgtgaaggagcctggcggttgggaaaatggcagagaggaagagaagggatgttggcggctggggggtagatga

SEQ ID NO: 27295 - DNA, 285 bp, Zea mays
  Peptide Sequence Number=SeqID_69074
atggcgaggcctcggcgcgacggcgcagccgacctgctgccaggcgcagcggccagggcagagcccctgcgcgccgtcccagtgtgcctatccggctcggcccccttgccggcgagccgtcggcagcctgttccggccatcttcttcgacctcggcgagctgcccgcgtcgctcctcgcccgcatgttgtgcaccagtgcgccttggaatctgtcgaagtgtgaacgacaggtgcatgcaggcatgcagtcaaagtgtgaacggctctccacattcgatggatag

SEQ ID NO: 27296 - DNA, 333 bp, Zea mays
  Peptide Sequence Number=SeqID_69075
atgagcctcacggcggccttcccgtgccaccaaaatcccgcgcgctcttcctccaaagtgcggctgcggcaacataatggtgagttaaaaggtggtgcaaaagcttcctctgccggcaggccttggaatctcgcatgccttgttgaaggatttgccaacagaagtgaagcctgtgagtttgaatcgaaatggaagatcgtctcccgaaaaattgcacggaaaagaactgagcttagcatgaagtcagtgttgcaacatcgagaagcagctttgagcagagtggaaacattcatggattgtagccacctaaaaatcaaatggcagtcaagttga

SEQ ID NO: 27297 - DNA, 300 bp, Zea mays
  Peptide Sequence Number=SeqID_69076
atgtcctcaaagcttgactcgttctgtttgcttgtgtacaacctcactctcagggcgtcgtacttgagcccgttcaacctgccccttcgcacgggggtgagccacggtggtccaatctacacatatgtgctggggcaagatttcttcggtgcctgcaccctttctcttgcggttgtttatgctatcgctgctgctgattgtggggttcctgcgttcgccactgtgactgtcactttgctggtgctgttcctggttgcatctgcttttcagtatgtggggcttgagcttgttcatgtctga

SEQ ID NO: 27298 - DNA, 480 bp, Zea mays
  Peptide Sequence Number=SeqID_69077
atgggaccagcgcaccccgtatcttgggaccaggtatccaagacgggagcgactccttacgatagggcgctccgcgagcgccacaattcccaatgccgcgatcgtcgccacacccatgagcatgagcgggaacgagtggagcgtgatgccatgcatcgatgcaagaacacgtcgtctgttgtactcaagcaactccagacgggatgtgcatacgacagaacacggtctctccctcgggagggaactccgcctcgcctaaagctcgaccatggcctcgggaggacttccatctcacccgagcgtggcttcaaccttgatagcatcgacaaaaggacactcgacgtcaccagaagtacagagctgacgtcaggatactttacggactgccaagagctttttgccattcttatcactgtttcaaccactatgactaggacaacacgttcaccagacaagctcgggtatgcgaccgagccctag

SEQ ID NO: 27299 - DNA, 405 bp, Zea mays
  Peptide Sequence Number=SeqID_69078
atgacatcaaacgttacggtgtctgtttcggcgttggcgtgccttgcgctgtggtgctcctcccccggtacagtggacccatcattggatatgggcgtgtcatccactcttccttgcataaagaggatatccgggaagaaagagctcgggggcgcgtcccgtgctccggcaatctcccttgcgggtggagcggctggtctggtgggacgagcctgcctccatggtcaatgccctcggagaaggcctcttctcagaagggtccatgatgcagtgcaggacgcattctcgatccgcgatgaaggagagagatccaaagcagaaaacctccctgcattgaagatgctcggagtgttcaagatgatagccacagagtcatcaggaatcaacgtcgcaccccatacctag

SEQ ID NO: 27300 - DNA, 369 bp, Zea mays
  Peptide Sequence Number=SeqID_69079
atggcgcctctggtagccctccatgaggctataaatagaggagcccagggcttcattcgggagaggagaacacttcacggaaatgtcatggactggtatgattcaggagcgttcaagaattttgaggacgcgaaggaaaggttcagggcaaaatattatggtgaaccttttgaggatcctgtgcttggccctaatatgtacattgatgaggtcgaccacctctgcaaagttgacccagaattggtagctgagctggataagatacatggcctagatttcatagtcgacatgggttggggagaaccgtttgccaatctgatacccatgggttatggaggaccagttgctaatctagtgcccacaggctag

SEQ ID NO: 27301 - DNA, 708 bp, Zea mays
  Peptide Sequence Number=SeqID_69080
atggcgccgccatctgtgcaggagcaggagctggtgctgctcgtcccggcactgtaccagtgcgcagcgcacgtaagcgaggggtccttggagaaggcgaacttcagcctgagcgagataaagcggctctcctcgatagccgacggcccgctgcagcgcctgcccgacgccctggctcgccggcttctcctcccctgcgagggcctggcgggcgccctcatccacccgtccgactacttcgagcgctccggcggcgtccggtccgctcgccgtaccttcgctggcctcagccccttcctccacgccgccttcgctgccaccaaccgcgccatcctcgaagcgatggaggacgaaaaggttgtgcgcatcgtcgacctgtcctgctgctcagctgcctcccacccctgccagtggctcgacctcctccacggcttcgtccacggccgccggccacccccggaagtacgcctgacagtcgtccacgacgacgacgacttcgtggccggcatgagggcggcgctagctaaggaggctcacaggctcaatatcccgttccagttcaaccacgtgctagtagtgcgcggcggcgggctggagaccatggacttgcgcggcgacttccgcgacgtcctaggggtcaaatacggcgaggcggtcgccgtcagctgttgcctgcagatgcaccgcctgctcgcgcctcgcggctga

SEQ ID NO: 27302 - DNA, 777 bp, Zea mays
  Peptide Sequence Number=SeqID_69081
atggcccgagaaaagataaaaagaaaactcgtctcccccagagaaatagcatctccggcgggcacagtaactctgctgcgtgcacacatcaagggaactgtagacaaggactgtagcgtggcgctggcgctggccgctggcgatggcgacgccggccccacccacgaactgagccaggtctttagtctttactacctctctggcatcgcatcgcatcgcatcgacggggcgacgacgtacggcacggcacatgagatcatgagctcggaggactcgctcaagtccctctcgctggactacctcaacctgctcatcaacgggcaggccttcagcgacgtggcgttcagcgtggagggccgcctggtgcacgcgcaccgctgcgtgctcgcggcgcgcagcctcttcttccgcaagctcttctgcggcctcgaccccaaccacccgccgccgccgcccggcgcccgcgcggccgcggccgcggcgccggagctcgtcatccccgtcagctccatccgctacgaggtgctcgtccttgtgctccagttcctctacagcgggcaggcctccgtggccgcgcccaagagcgggcccctccccgggtgcggcgcccgcgggtgctggcacacccgatgcggcgccgccgtcgacctcgccctcgacacccttgccgccgcccgctccttcggcgtcgagcagctcgcgctcctggtcccaggtgggtgggagtgggatgggctagctggggcctgggggcagactggatcgacgaatctctag

SEQ ID NO: 27303 - DNA, 1680 bp, Zea mays
  Peptide Sequence Number=SeqID_69082
atggcggcggccaacaatgctgctagcggtggcggcgacgaagcgaggtacccgctgaacgcagagtcctaccgcctgctgtgcaagatcgggagcggcgtgagcgcggtggtgtacaaggccgtgtgcctgcctctgggctcgtcggcggtggtggccatcaaggcgatcgacctggagcggtcgcgcgccgatctggacggcgtgcagcgggaggccaaggccatggcgctgctgtcccacggcaacgtgctccgagcgcactgctccttcaccgtggggagccacctgtgggtggtgatgcccttcatgggcgccggctcgctgcactccatcctgcgccacgggttccccggcggcctgccggagccgtgcgtggccgtcgtgctcggggagacgctccgcgcgctgtgctacctccacggacaggggcgcatccaccgcgacatcaaggccggaaacatcctggtggactcggacggcgccgtcaagctggccgacttcggcgtctcggcgtccatctacgagaccatccggcaacacgcgtctgcgtcggcctcgacggcggcggcagtggggaccggctcgtcggcgtcgtgctgcttcaacgacgtggcggggacgccgtactggatggcgcccgaggtgatccactcccacgtcggctacggcatcaaggccgacatctggtcgttcggcatcacggcgctggagctcgcgcacggccgcccgccgctctcgcacctgccgccgtccaagtcgatgctgatgagaatcaccagccgcgtccgcttcgaggagagcgtcggcacgggcaaccgcagggacaagaacaacaagttctccagggcgttcaaggacatggtgtccgcctgcctctgccaggagccggcaaagcggccggactttctcgtccgcaacgtcctcgccgccgtcccaagcatcgaggagcggtgtcgcaaggacgacgaagcgggtaatgatctctgcgggtgtgtcggcggcggcgcacgctgcgtgtcgccgtgcccccgtcacgccgacaacgtcgtcgtcgccaagaaccgacggatcagcggctggaacttcaatgaggacaacctagagtttgatccgacgaccgaggagcggccggtggaggcggagaagaggtgccttccattcgattttgatgaaggggatgaccaggtggagctacacgacagcaactccgctggagacggagatggagatagaggacggccgccggcgcagccgcagcatggagatggcgacgatcacgttcacgggaaggcggcggaggcggtagggcttaagcagcagcagcaagtggtgactcagcagctgatgaccgtcctgcagagcctggagatgcaaagggacatggtgacgcacgtgttgcaacgcaccgccggccgcttggatgacggcggcggcaatggtgatgtgagcgtgaccgctccaagggaggagagggaagagatgctgctggggtacgtccggcagctggagcatagggtggaagacctgaggaaggaggtcgaggaggagatggcttggaacgcccggttggagaagatgctgcaagagagagttatcattagcgacgatgacaagaagatgaactcatctaagacgtcgtcatcagctgagctgagagcagttgatgaaaacatatga

SEQ ID NO: 27304 - DNA, 405 bp, Zea mays
  Peptide Sequence Number=SeqID_69083
atggatctggctgcgtcgtcgtgctcggataggaagggggtaattggagctcagtgccgtggttgtgctcccttggcctccattgccgcgctggggggagagaaatccgtgtgccgctacttgctcgtgaagccacttggcctcggctggtggctcgagggaaactcaccggcgtgcgctggcatcagttcgggagacagtggtgaccggtgtcgcagatttcggatctcgccagaatggagttgctgggcgttggcgtcgggtggctgtgcggcatggatgaagcgcatttgggatccaagtaatgggtatggggttcgaatttgggggtgtccggcgatgctccgccgtggtggccaggcggcgccgtcgggagtccgcacacatggagaagaacagttctga

SEQ ID NO: 27305 - DNA, 204 bp, Zea mays
  Peptide Sequence Number=SeqID_69084
atggagaaccacccgagaaaacagtgctaccacaatggtgaatgctctagtggcctggtggaaaaatggccccaacaaccgaatctctcgcggcaggacgagctcgagcggagatgcctcttagagcaggatgaccctgggcagtatggtcttggcgccatgtgcacccatacttgggaagatcatctcgtatcgggcagttag

SEQ ID NO: 27306 - DNA, 1386 bp, Zea mays
  Peptide Sequence Number=SeqID_69085
atggtggcctacgcccgcagcctcggatgcactgacgtcgagttcagccccgaggacgccggcaggtcaaatagagagttcttgtatcatattctaggggaagtcataaaagctggagctacgactctcaatatcccggacactgtcggatacaatcttccttatgaatttggaaagttgattgctgatataaaggcaaacactcctggaattgaaaaggctatcatttccactcattgtcagaatgaccttggtcttgcgactgccaacacactagcgggcgctcgtgcaggagcacggcagttagaggttactattaatggtattggtgaaagggctggaaatgcttctttggaggaggttgtcatggcaattaaatgccgcagagaactgttagatggtctctatactggaatcgattcccgacatatcactttgacgagcaaaatggtgcaagagcatagtggacttcacgtgcagccacataaagctattgttggtgccaatgcgttcgctcatgaaagtggaattcatcagagtggaatagttcttcatgctcacttttcatctttttgtaggatgggatgcttaaatataaaggaacatacgaaattatatcgcctgatgatttttggtctaacacgtgcaaatgaatttggtattgttcttgggaaactcagcggaaggcatgctgtgagatctaagctagtagagcttggatatgaaatcggtgacaaggaatttgaggacttctttaaacgctacaaagaggttgcagagaagaaaaagcgcgtaactgatgaagacttagaagcgttattgtcagatgagatattccagcctaaggttatttggtcccttgctgatgtacaggcaacatgtggtacacttgctttatctacggcaacagtgaaattggtagcaccagatggagaggagaaaatagcatgttcagtcggaacaggtccagtcgatgcagcttacaaggctgttgacaaaataatccagattccaacggttctccgagaatacagtatgacatcagtcacagaaggcattgacgcaatcgcgacaactcgggttgttgtcactggagatgtgagcaacaacgccaaacatgccctgactggccagtccttcaaccgctccttcaggttatatagcagttgtttgaaatctgtttcaatttctgctattctgttcttctttctcactgtgtcttcgtgtttgtcgtatggcttcagcgggagcggggcatccatggacattgtggtgtccagtgtcagagcttacctgagcgccctgaacaagatctgcagtttcgctggcgccgtgaaagccagcagcgatgtagctgagaccgcaagcgtcccgagcacagaatga

SEQ ID NO: 27307 - DNA, 141 bp, Zea mays
  Peptide Sequence Number=SeqID_69086
atggaggaggacgtgggaagtattggctgtggcttcaggtatcgaccaggtggccgcgtgatggcgcttggagccgtggacttgggccacacaaggggaaatggtgaggtgggtcgagggtacaggaaaatagtattttga

SEQ ID NO: 27308 - DNA, 908 bp, Zea mays
  Peptide Sequence Number=SeqID_69087
gagaggtcgaggctcgcctcgtcgtgctggcgataagtggaaacatgccccaagtcctccctcggaggacttcggcgattcagattactcggaggaagtttcctctgggtctgagggatcgccgtctcccgcttctccccccggcgttgtccgatgattcggacgactcccaggggttgtctgctgcagtctggacctacatccgtgccatcgagcgcgccgggctcgaaggatcggatgagtcggaggtctcctcggatgaagagaactcctccggctcgtctgaggagcggagcaatgatgatagtgatgatgagggcgacggtagcggcgacgacagcggtggaggtgatggcggcgaaggcagcgacgacgacagctgcggtggaggcgacgatggcaattgtaacaccccagccgagctcctcaccctggccgatacatggtgctcgtctctagctcatgtcttgcaaccggccgagcccctccccagcgcccttggagccgacgtcctctgccctcatctccttccccgacgtcgccctctccccatcggtgctctgcaagtcggtgtcttctccctgcccgacgtttctggcgccatggctgccgcgcctcgggttgcctgctccactgcgccgatccgcccatctccctactgccgctctcccatggcgcgtccctgcatcttgcttcagctcgctctgccatctcccttggcgccctatccccaacgccgagctccctacctgactgtgcccctagtggttgagctcgtcgagcttccttttctatcgctcgtcctcgcccattcggcgccctcatctcaagccagtccagcctctctactcgccactctcccctatccccttgctgttagcacatggcgagctaaccccaagtgctag

SEQ ID NO: 27309 - DNA, 957 bp, Zea mays
  Peptide Sequence Number=SeqID_69088
atggtgaaggaggcgtcggtggacgacgtgatgaaggtgctgatggcgtcgcgcaagttcgagatgcaggagctgtgggccacctgctcccacctggtggcgcgctcgggcctctccgccgacctgctcgccaagcacctccccatcgacgtggtggccaagatcgaggagatccgcgccaagtcccccgtccccgccggcgcgccgcgctcgccgttcctcacccaccactacctccccatcaacgcggcgtcgtcggccgccgaccgcgaccacaagatccggcgcatgcggcgcgcgctcgacgccgccgacatcgagctcgtcaagctcatggtcatgggcgaggggctggacctcgacgacgcgctcgccgtgcactacgctgtccagcactgcggccgcgacgtcgtcaaggcgctgctggagctcggcgccgccgacgtcaactcccgcgccggccccacggggaagaccgcgctgcacctggccgccgagatggtctcccccgatatggtgtccgtgctgcttgaccaccacgccgaccccagcgccaggacgctcgacggcgtcaccccgctcgacgtgctccgaggcctcacatcagagttcctgttcaagggcgccgtgccggggctcacgcacatcgagcccaacaagctcaggctctgccttgagctcgtgcagtccgcggtgatggtgaccacgcgcgacgtcgacgccgccggcgacgacgccgggggaagcgacggcggcggcggcggcaacttccccaggagcgacgccgacgacagcttggtgagcctgacgatgaactccacgctcatgtaccagggccaggagatggcggctgccgcggtggccgccggtgaggcgaggaaagggaacggcggcggcggcggcggcggccgagggagcccgtccaacttgtacttccccaatggcggcttcccataa

SEQ ID NO: 27310 - DNA, 747 bp, Zea mays
  Peptide Sequence Number=SeqID_69089
ggctcggactcgggcttagccccggaagacgacgaactccgctccgctcgacccagggcttggactcgggctcagccccggaagacggcaaactccgctccgcccgacccagggcttggactcgggctcagccccggaagacggcgaactccgctctgcccgacccagggctcggacatgggctcagccccggaagacgacgaactctgcctcgcccgacccagggctcggactcagccctggcctcagccgacggtctccgcctcgcccgaccagggctcggacataggctcaaccccgaaagacgacgaactccgccttgcccgaccccagggctcggactcaacgctggcctcagccgacggtctccgcctcgcccgacccaggggctcggactcgaccacggccacggaagacagactcgacctcggaggagcctccacatcgcccaacctagggcgcggaccgaccacgtcgacaggaggcgctaaaagggaaatccaaagtctgctcggtctgggtgcactggacagtgtctggtggtgcaccggacaatgtccggtggtgcaccggacagtgtccggtgcgccaggctggctctggcgaactcgtcgctctcgggagatgattaacggcgtacggctaaaattcaccggtctgtccggtggtgcaccggactgtccggtgagtcaacgtgtccggtgcgccaacggctctcagactccaacggtcggcttcgccaaataa

SEQ ID NO: 27311 - DNA, 735 bp, Zea mays
  Peptide Sequence Number=SeqID_69090
cttgattcgttagacattgctgatcgcattatccaacaagtggacaaaaagttctacgtagataatgtcttcgtccaactgatctgcacaatccagtaccgtgttgtcaaggaaaatgcagatgatgctttctatgagttgcagaatccccagcagcaaatccaggcctacgtctttgatggggattggctcgatatcattggttctgcttgtaactgcagtgacacatctggtcattctcttggtgataatttcaagtacttgaccattgcgcctgtgatggcagattatggttacagcattgagcacattctcatggttgatatcatccctgacgctgctgttcgtaaggcaatgaacgacataaatgcagcccaaaggcttcaactggcaagtgtttacaagggagaagcagagaagatccttatggtgaagaaagcggaggcagaagcagaggcgaaatatctttctggtgtcggtatcgctaaacagcggcaggcgataaccgacggccttagagagaacatcctgaacttctcacactcggtgtcgggcaccagcgcgaaggaggtcatggacctgatcatggtcacgcagtacttcgacaccatcaaggagctcggggacggctccaagaacaccacgatcttcataccccacggaccaggccacgtgaaggacatcagcgagcagatccgcgacggcatgatgcaggcctcaagcagcaacgtgtaa

SEQ ID NO: 27312 - DNA, 153 bp, Zea mays
  Peptide Sequence Number=SeqID_69091
atgcctcagctacaagaaaatctttgtggcctgctatatcttgcccgacaggattatctgtaccagttcaacacagaatcaggtattgcatatggatcattttctccactgctaattgtcatccgactgacaataaacgatcgccggaaataa

SEQ ID NO: 27313 - DNA, 1293 bp, Zea mays
  Peptide Sequence Number=SeqID_69092
atggccacagatggttggacattagtcatggagattgtcccaggattttccctctatcggggcctatatgaacttggtcagtatgcattctcgggaagcagtataggaactactggtatgacctggagaagtctgaaagatcccctcaatggaatgcgtgatgttatgatcgtaatgagtgtagaatgggcagtgctgctcatattagcattctatttagatcaaacctctttgctaggcggtggtgtcaggaaaaatccttttttctgcttcagatgtttacagaagaaatgtgcaacatcattgcatgaacctagctttgtccaacaggattccaaagtcattctcgatatggagaaatctgatgttgctctagaaagaaaagtagttgagcaatttttgatagatcccaatgcaaaccaagctatcatctgtgataacctcaggaaggtttatcatggaagggatggaaaccctgacaagctggctgttagaggtttatctcttgtccttcaaaagggccagtgctttggaatgcttggtccaaatggagccgggaaaacatctttcattaatatggtatgcttgctttgggaaacactgactggaaaagaacatcttttcttttatggtaagttgaagaatcttaaaggttctgcattaatgaaggctgttgaccactctctgaagagtgtaaatctatctcatggtaatgttggtgataagcaagtgaagaaatacagcggaggcatgaaaagaaggctcagcgtggcaatctcattgattggggaccctaaagttgtcttcatggatgagccaagcacaggaatggacccagcatcaagaaataacctatggaatgttgtgaaggaggccaagaaaaaccgtgcaattattcttactactcactcaatggaagaggcagaggtattgtgtgaccggcttggcatctttgttgatggcgatttccaatgccttggaaaccctaaagagctaaaggctagatatggggggacatacatattcacagtgacaacacccccagaccaagagatggaggttgaacatctagtgcgtcagttctcgcccagcgcaaacaagatctaccatctatctggaactcagaaattcgagctgccgaagcaagaggtgaaaatagcccatgtttttgacatggtcgagaaggcgaagcgccggctctcaatacatgcctggggactggtcgacacgaccttagaggacgtcttcatcaaggtcgccagaggagcacaagtgttcaacgagtttgcgtag

SEQ ID NO: 27314 - DNA, 105 bp, Zea mays
  Peptide Sequence Number=SeqID_69093
atggcgacgacagtgcgtgttcttctctgcggggttgggtgcccctggatccggtcagagccgggtcaccttaacattgactcacggattcgcttattgaggtga

SEQ ID NO: 27315 - DNA, 336 bp, Zea mays
  Peptide Sequence Number=SeqID_69094
atggccgccgcacccttctcccgcctagatccaagcgcaaacaacgtcaacaggcaaagagacccatccgccaccatcctagggcccgcacgttcttcggcagcccactctggtgactgcgaggggaagggtggttctactgcctctgcatcatcatcatatttgtggccagcacgatgggagaggagagtagggatagcaatggctttaaaacccgcgggtagagggtttcaaaccagtatctgcgggtttaatattaaacctgcacccattactcgtgatgagtataatatgctacccatacccacaaccagcgaggtccctaagagcacctag

SEQ ID NO: 27316 - DNA, 222 bp, Zea mays
  Peptide Sequence Number=SeqID_69095
atggtcactggggaaaatcccggatcttcgagaaagaagaatgaagaaaggactccgtcgaaggaggccggtgacaagcacaaggaggaatccgtcagctccatcaagtcacataagaagggtgacaagaagaaaaaggaggagtacaacaaggtgcaagggttgaagagtgccaaagaaatttgggacgtcctcaagacaacgcatgaagggatgaggtga

SEQ ID NO: 27317 - DNA, 138 bp, Zea mays
  Peptide Sequence Number=SeqID_69096
atgaaggctctagggaaaaagacacgtccaggtcaccagcccactatgggggcttcccgaaggacccatctgtcagtgggaacgcctccaaaattcaaccctgaaaatcttccatttttcctgttccaaattcataag

SEQ ID NO: 27318 - DNA, 2023 bp, Zea mays
  Peptide Sequence Number=SeqID_69097
ccgcgcccctcagctctcctctctggtctccaacgcccagcgccgcgcctgctccagccatggttgccgcgctcccagctcagaattcccctgtcgtgcagctcgcggaagggtattcagttaaccatatggtatcacctcagagggctgaagaaagcacactgagaggttactccaatctttctacattagaaacaagacagcaaaaggttattcaacctgctgatgttcagagcattgcaggcaatgaaaatcctaagcgtgaggatggactagatggtgcatgtgctcagaaaaggttctttctcaaagcttctttcacaaaatctgaatgctcaaagcttctttctccaattaggtggatactgaagagagagtacttgacctcgtgcattgaggccggcaagttcgtggacgaagaaccgtttgaatggttcggcacaggcttcaacgatggacgaacaatcagtttcgacgctcccaggaaatggcgaaacataaggcagcagatgggccatggcgccttctacggaatgcagatcgttgcctacggacagttcatattaccaactctggacacagtaaagcgtgcagtaaaggccggcaatggcgccgttttagcaacatcgccgccatacacccggaattcatcagccacggcccacggcattccctgtgtcagcgccgattacctggtcgagtacgtgtgcaagccgggccagcccctggaccggcacgttctcttcgagacgaactgcgtggccagcatgtccctggagaaactcacgaagaagcagctagagatggcaacggcggagaagtcggaaccgtcggaagacgacgatccagaggacctgagctgctcggcgtgcggccgcagggaccggggagacgtgatgctgatctgcggcgacgaggccggcggcgggatcggcatgcacatcgactgctgcgaccctcccctggacgccgtccccgacgacgactggatgtgccccaggggctcaagggagctcaagggcgcagagccgaaccaggggcgagctcaagacgagtgcgccagacggcgtctgcgtaggcgaacgcggcatagcgtccccacagtcccaaggaatcggtggaatccaacaagtccaaccgccgtctcatctctctgcttcccggaacctgagtccgagaagagcccgttcgacatggacacggagccgctgctgccggcgcacctcctccactcgctgccggagcactcggagcccgctgccggggaccaggctcccgcgccgccccgagcgcccctccatcgtgctggcacaccttcctctttcctgctcgcctacctcgccctcggcgtgaccttctacgccgccgcgcccgccaatttcagctcctccgcgggacccacgcaccccgtcgccgacgcgctctacttctgcatcgtcacgctctgtaccatcggatacggtgacatcacgcccgccacccccgccgccaagctcttctccatctccttcgtcctcatcggcttcggcttcgttgacatcctcctctccgggatggtctcctatgtgctcgacctacaggagcatctcctcatcaccgcgctcaagaacccaacctctgcgcgcaagcaccgccacaactacatctttgacgtcaagaagggcaggatgcgcatccgtatgaaggtggcgctcgcgctgggcgtcgtggctgtttgcgtgggtgtcggggctgcagttctcaggagggtggagagcctggggtggctcgacgccgtctatcttgccgtgatgtcggtgaccacagttggttatggggaccaggcgttccggacactggctgggcgcctttttgcatccgcttggctgctcgtgtccaccctggctgtggcaagggcattcctctacttggcagagatgaggattgacaagaggcaccgagccatggccaactgggtgctgtccagagacatgaccgtgtctgaatttcttgctgcagacattgacaacaatggatatgtcac

SEQ ID NO: 27319 - DNA, 600 bp, Zea mays
  Peptide Sequence Number=SeqID_69098
atgctcaggcctcggctctcctccctcctcgcgaccgtgcaatccccgcttgatgctttccatggagagcagattgtcggccttccgaaatctccgcccaggaccccgccttctgctcccccacgccagatccacaaggtagcatcggatggctccatagggaatggaagcatggatgtaggcgttgacgggggtggcgaggatgaaggcgactatgatgaggaggacatcagaccactgctcagcttcgatgagatgttgcacctccacgcggcgtgcggcgtggtgcttccaggcgacatgatggaggcaagccgatgccgaggatcccacagccgtggacattgccgggacacagctgatgccgaaggaggaggcgctccagctttgcaccggttgtatccacttctagacttccttgcctcgcctatcacctccaggaaggaagaatttggggatgaggatcccacgtcgcaacgttccatagtgcccctacccacaccgatgtccacggccgtcacgcccgggcatggcagtccgctcccacgcgatgcaatttcatccccaccgtcgcagctgtcgaggacccccctttcgtag

SEQ ID NO: 27320 - DNA, 543 bp, Zea mays
  Peptide Sequence Number=SeqID_69099
atgccggcatgcatgcctgtggcagagggccgacggtgcttcagggcaatgattgaacatggagtagtaccagagatagatcactactcatgtatggtggatctttttggccgtgcagagctgcttgatgaagcatggaatctgatccagacgatgcccatgcctccaaatggtgttgtatggagctcccttctagcttcctgtagggtgcatggaagcacttggatcggcatacaagctgcagagcaccgtctaaagctggaaccaagttgtgctgcaattcatgttcagctagcgaatttgtatgggagcattgggtgctgggatgatgtggcaagagtgaggaaggtgatgaaggagagagggctgaaaacaaacatcgggtgcagttggatagaagttggcaataaagtttatacatttacagcagaaaacagatcaaagaaccagtcacatatggatcacgagtatgatatactactgatcgagggtctggattgggattatcctgagcatatcaagttaagtttaaacactatataa

SEQ ID NO: 27321 - DNA, 492 bp, Zea mays
  Peptide Sequence Number=SeqID_69100
atggctccatatttgttgaaggcggcctgtggaagggcggtgatggctcgggcgcagttggccgcgtgtggggatgggtgtggaggcgggcgtagatgggaggtggccgtcgactgcggcgaggatttggggcgaggatggctctcggcctgcgtcgcgcgtggggacgacgttgaaggcgacctggggaagggcactgatagctcggcctgcgccgcacgtggggacgggtgtggaggcgacgtagatgggaggtggccgtcgactgcggcgaggatgactccatctgcgttgaaggcggcctggggaatggcgctgatggctcggcctacgccgcgcgtgaggacgggtgtggaggcgggcgtagatgggaggcgtggtgttgatgggaggcgcggcacagggattggggaaggggatgaaatggtggtgggggctcgggtgtatttggtggcgcagggctcgacgcagtttggaggtgtcccacgatag

SEQ ID NO: 27322 - DNA, 740 bp, Zea mays
  Peptide Sequence Number=SeqID_69101
attcaaagacgttgaaggaagaacaaagagaggagctatttgaaagtttaaaggccaatagctctattgggtgggaagtggatgtcatatgcccaaaggatctatctgctaaaatgttaaaaaggtcgaaagttaatctgaatgaaatatcacataactctgccatgggtcttgttagaaaagttcttgacatgggagttctactggcagaagtatatgtagatacagtgggagatcctgaaaagtacagaaccaagctgacagaaaagtttccaggggtcaaatttgtggttgccaaaaaagctgatagcctttaccctgttgttagtggagcaagtatagctgcaaaggtcactagggacagagcgttgcgaaactgggtgtttgatgaaacagctctgagtctgcacatgagaactggatcaggatatccaggagaccctgatactaagcaatggttagaagatcacaagcatccggtatttggcttcccaactttggttcgtttcagttggggaacttgtaagcccttcttcaaggacgcagttgatgttacatgggagtctgatgaagttgatgaagaagggactgacaatggaggtgccaagcgacaagtcaagctttcaagcctaggcttcactggtttcaaaaggaaaaccgaggatatcgaatcaagcggaaaaggtcgttgcaaattcttccaggctcgcaaacttgagttggtcaggaagtttcagtga

SEQ ID NO: 27323 - DNA, 213 bp, Zea mays
  Peptide Sequence Number=SeqID_69102
atggcggcactggtgccggagtgggctaccaaggagccctgcctcatggggatcgatgaggctggccgtggccctgtcctcggtcctatggtgtatggatgtgtgtactgcgcgtgctcttacaataacactcttgcgactctcaaattcgcaggccaatactctcagagtagttttagttctacagagtacaggcatgtacatgtaatttag

SEQ ID NO: 27324 - DNA, 414 bp, Zea mays
  Peptide Sequence Number=SeqID_69103
atgtcgcggccgcttgtcgggctcggccgctcaggtgtggccgggagcagagggcgatgggcggtgggcgcggctgcggcagacgggcagtcgggcggtgggcgcggccgcggcagatgggcagtcgggaggcggcggcgtggcgaggcggcgcgatctgtgcggacgcggaggccgggagccgaatcgcctggaggcagatgcggcgcggacgggtgcggagtcccgagcagaccgcggaagcctcgtcggccgtcgcctaggttcggggtcactcagaggctcagagcagacctgggccaatgggctgccgaagggctccgccactggccatttccacaggagaaatttgtgaaaatggatcggtcttccgctacagttcaacgccgctcgtcccacccacagaacttctaa

SEQ ID NO: 27325 - DNA, 477 bp, Zea mays
  Peptide Sequence Number=SeqID_69104
atggaccgcatcatgatgtcccgcccaccccttcccgccccgacccatgccgctgcgggcgccgacggtgacttcctcgagctcgacgtgctctggcccgcctccccttccgcggatgagggcaagaagaagaagcgcgccgcggccggggtcggggtcggggtcggggtcggagcccccgcccgatccgccgcgcgccccgtcccggagaccgtcgcagcgtccgcgatggcgaggtcggcgccggtgcggataccgtcggatcccgcgcggagggggaggtgggcccacgccggggcgggagctggcggcagcgcggaggacgccggggaggccttggtccccccgcacgagatcgtcgcgcgccgcgccgccgcgcacagctcggtgctggagggcgccgggaggacgctcaagggccgcgacctccgccgcgtccgcaatgccgtcctgcgccgcaccggcttcctcgactga

SEQ ID NO: 27326 - DNA, 372 bp, Zea mays
  Peptide Sequence Number=SeqID_69105
atggtaatagaagatgagaaggatttggaagagattcctatagatttaaatgagacagcaagcacatctactgtgcaagaagctaatgcatgcgctgaacgtaggaggtcgctcaacgtggttggtggaaccgtccgctcctccaccgacccccacgggttcccagagattctttggcggcggaggcggcacggtgccccgccatcagcgacgaggcagcgggcgccgcaaaaactagaggacgccacggcgctctgcgaaaatcttgtgcagccggcggagcggagggccgtcgtgctcctcgtccatccaaacgccatccgcgtcctgttgccgagttgtgtcagcgtccacgtcacgacgaatctctag

SEQ ID NO: 27327 - DNA, 369 bp, Zea mays
  Peptide Sequence Number=SeqID_69106
atggagtccttcatggaatggtggctgcaggttgtgtcggaggcagataaggctttgaagaaggggttaaactctctcgtcatattagggacatggatcttgtggaaacacaggaatgacattgttttcaacggagcaacccctcgtctctctactgctctctctccattgttgcagaggaagtatggtgctggagcaaggccggtgctaaaggcatccagctccagttggcacagaagaaggatgaggaaggtctttttccttagagttgtcaggtcgctggttgaaagggctggcttcttagccggctctttgaagttcaaccttgttagtgtgtgtctaaacctttggcggggtggttgtgtctag

SEQ ID NO: 27328 - DNA, 3045 bp, Zea mays
  Peptide Sequence Number=SeqID_69107
atggagcgcgcacgccgccacgccagccgcgtgctgctgcgccgcctgctcgcggcggccgtggcctcgcccgccgcgtccccggccacgtcgtcccgcggcatctccaccctgtcgccgccgccgccagccgcggggaagcagcagcgccgctgctgccctccaccccgcggcgcgcaccagcacgcgcaggcgcgggcggtgtcggtgtcggcgctgcagccgagcgacaccttcccgcggcggcacaactccgcgacgcccgccgagcaggaggccatggcgtccgcgttcgacgccgggttcaccgagtcgcagatgctggaccacatgcggcgcctggcgtccatgaacagggacttcaagtccttcatcgggatgggctactacggcacccacgtccccgcggtggtgctgcgcaacctcatggagaacccggcctggtacacccagtacaccccgtaccaggccgagatcgcgcagggccgcctcgagtcgctgctcaactaccagaccatggtcgccgacctcaccggcctccccatgtccaacgcctccctcctcgacgaggccaccgccgccgccgaggccatggccatgtgcagcgccatcctcaggggcaagaagaggactttcctcatcgcctccaactgccacccgcagaccatcgacgtgtgccgcacccgctccgacggcttcggcatccgggtcgtcgtcgccgacgccaaggacctggactacggcggcggcgacgtctgcggcgtgctcgtgcagtaccccggcacggagggcgaggtgctcgactacgccgagttcgtccgggacgcgcacgcccacggcgtcaaggtcgtcatggccaccgacctgctcgcgctcaccgcgctgcgcccgcccggcgagatcggcgccgacatcgccgtcggctccgcgcagcgcttcggcgtgcccatgggatacggcggcccgcacgccgcgttcctcgccacgtcgcaggagtacaagcgcctcatgcccggccgtatcatcggagttagcgtcgactccaccggcaggcccgcgctccgcatggcgatgcagacccgggaacagcacatccgtcgcgacaaggccaccagcaacatctgcactgcccaggccttgctcgccaacatggctgccatgtacgctgtctaccatggcccagcggggctgaaggcgatcgctgaccgggttcatggcctggctggcaccttcgcccacggcctcaagaagctcgggacagtgacggtgcaggacctgcccttcttcgacacggtcagggtcacgtgctccgatgcacgtgcaatcgccaaggaagctgtcaagaacgagatgaaccttcgggtcgtcgatgccaacacgatcactgtagcatttgatgagacctccaccctggaggatgttgacaagctgttcaaggtgttcaacaacggcaaatcagccagtttcacagccgaatccatcgcaccagaggtctcaagctcaattcctagcagccttgctcgcgagagcccctacctaacgcatccagtcttcaacatgtaccacacagagcatgagcttcttcgttacctgcataagttgcagtccaaggatctctcgctatgccacagtatgatccctctgggttcttgcacaatgaagctaaacgctactgttgagatgatacctgttacatttcccaactttgcgaacctgcacccatttgcccccactgatcaggctgcagggtaccatgaaatgtttgacgacttgggcaacctgttatgcacgatcacaggttttgattctttctctttgcaaccaaatgctggtgctgcaggagagtatgctggattgatggttatccgtgcttaccacaactcaagaggagaccaccaccgcgatgtctgcatcattcctgtctcagcacacggcacgaaccctgcaagtgctgctatggttggaatgaagattgttgctgttggaactgatgccaagggtaacataaacatcgaggaattgaggaaagctgcagaagcaaacaaggacaacttggctgctctgatggttacctacccttcaactcacggagtctatgaagaaggcattgatgagatctgcaagatcattcatgaaaatggcggacaggtctacatggacggggctaacatgaatgctcaggttgggttaacaagccctggttttattggagctgatgtttgtcaccttaaccttcacaagacattttgcattccacatggtggaggcggtcccggcatgggtcctattggggttaagaagcatttggcaccatttttaccatctcacccagtgattcccactggtggctttcctctccctgagaaaacggaccctcttggcaccatttctgctgctccatggggatctgctttgattctgccaatttcctacacatatatagccatgatgggctcacaggggctcactgatgcttcgaagatcgcgatcttgaatgcaaactacatggcaaaacgtctagagaaacactacccagttctgttccgtggagtcaacggaactgttgcccatgaattcatcattgatctaagggcatttaagacgactgctggtatagagccggaggatgtggcaaagcgcttgatggactacgggttccacgcaccgaccatgtcatggcctgttcctggcacacttatgattgaaccaactgaaagtgagagcaaggccgaactggacaggttctgcgacgctcttatctccatcagggaagagattgcagagatagaaagcggcaaagcagatgtgcttaacaatgtcctgaagggcgctcctcacccaccgcaactcttgatgggtgacacatggagcaagccgtattccagggagtacgctgcgttccccgcggcatggctccggggcgccaagttctggccaacaactggtcgtgtggacaacgtctacggggaccgcaacctcatctgcacgctgcagcaggcgacccaggtggccgaggaagccgcggccgcaactgcaactgcgtaa

SEQ ID NO: 27329 - DNA, 365 bp, Zea mays
  Peptide Sequence Number=SeqID_69108
tcttggacagagggtactcaaagccccgactggcaatggatcttctctctgctgcgtacggcggtacctccgacgacgaggatgctgctgacccacccttctccacgtcggttgccactgggtccgccttctttgctccacctcccctgaagcggccatggtgggaatctcacagatacctccctccaacccattgcttaccgcaacagcccctgctcaagacagcggcaccgctggcatctccatccagcggcaggtacgtttccaagagggagcgtgctctcctgccttcatcgcaggcacatgtagaatccggatcaccgctgcctccgctgacgggagtggagtttgattgcacaggctga

SEQ ID NO: 27330 - DNA, 1875 bp, Zea mays
  Peptide Sequence Number=SeqID_69109
atggccgagcggtggtgcgcgctcgcccaactccacgccgtcgtcgtcaaggtcgatctcaccgtgcacctcgcctacgcccgccaggtgttcgacagggtgcccacccgttcgacgttgtctggtacagcaccctgctccgcggctacgcatggtggagctgatactggacccggtgctagagacgttgccgcgaaggtggacgacgacttgctgaactcctctttcttggcctcggtcagcgatgggcccgcgacgacggcggacatgtcgtgggggaaggccgcgacgctcggcaccaggaaggccttctcttcctcggcttcatctccgtcgccggacctagccgcttgcaccgtccctacaatggatcgatggaaccataccttatccccgtccccgcccatcctcatctcgcgagcaagagttgtgtgggagtggcagcagcagatctacggggtggtcgcggatccgtcctcctcctcgttatcatcatcgatatcgagcgaggacgcggtgatgtatgttgcagcggcatcggcggatgcctccgagacggaggcgcgtgccgcccatgtggaccccgaaggcgcgccgaggagggcgggagacggcgactccgaggatgggggcgagctggcggcgctgaggatggaggcacggtcacgacctcttcgaagacgggggcgagggcgagggggtgcgctgaggcgggagcggggcatgggcacgggaccagggcaccgcacatcacgcgagacggggaagggcgcgacggggcgggggcaagccggtggtccactcgcccatttcagccgcgcgggagctagatccagcgtgctggtgctggtgctcgcctggcaacgtctaaagtacactgcagcccagccaaaggccatgcccactgggttacctttccaggcccagaacccagccgaaccatgtggcattgtcgcggtgccgcagcccactccgctcccctccccccggaagcggctctgcggcacgaggaggcaactccttgggccgctgacacgtgggcgcgcaccaccgcaagagcccgagcgccccatgtcttgtccggcgtcctccttgtcggtccggtccctaggcggtgtgggccgccagcccgcccgcctgcgcctgcgcctgcagcgctgctccctgcacgaggaggcagcgaggcaccccacgtgtcctgtacccgccctgcggtgcccgcgacgtggcggcgcggcacgggccagccagacgccgcgcgcggcccccggggataggaaggactataggattaggatctcgtcgaacctcatgtccggcggcagcggcgacgacgggcagcagaggcaatgccggcggggcgtcgcggtcgcggccgacgtcgagctcggcgcggcgctggcgctggccgacatggctgcaggcagtggcgcgagcgccgtggtggcggcgcagaaccacgcggccgaggagatgaccgacgacgaggagacggcggcgagcacgaggctgagcctccggctcggccgcgtcggggtgggggtggtgcagtcgccgtcctgctccagcagctccggcgctgctgctgcccatccccggcacatcatgctcaccgaggccgagaaggaggcgaagcggctgcggcgggtgctcgccaaccgggagtcggcgcggcagaccatcctccggcgtcaggcggttcgagatgaactggcgaggaaagtcgcagacctgtcgtcacagaacgcgaccatgaaaaaggagaaggacgtggtgatgaaggagtatctctcgctgaaagagacgaacgagcaactgaaagcggcggagcaggcacaccaccaccaccacctccggctctcgtcgttattctaa

SEQ ID NO: 27331 - DNA, 348 bp, Zea mays
  Peptide Sequence Number=SeqID_69110
atggcaccaatggcatttttcacatggtgcattaccagagaggagggtcgtgagttgctcatggagatccttgggggagagtgcggaagtcattcttcatcccgcatgctggtcgggacccctttattattgagaggggttcgaaccgttagggaccgggactggggaaaggtccgactcttcagcatccatagggtcgcatcggaagtgagcaacaacgatcttcatcggccggacgtgccagtcgctaaggcattggcgctctacttcgagtgcgtcccacaccaagcatcagcgacccacaccatgacatgggggccgagtttgccagtcatgtgtagtgggtga

SEQ ID NO: 27332 - DNA, 432 bp, Zea mays
  Peptide Sequence Number=SeqID_69111
atggcgactgaaaccgacatgaagaggtgccctaggggataccccttcagtcggtacgatgccgaagaatggggtatccgactgaatgaggtgaccagttgggatgcccgaggcctgtataatattcataaaaactcggccaagagcccgaccccctgctccggcaccagcgccgccaccgccatggatatggaagtgtacgagcgcctcaccgccgaaaccagtcactaccgtggcacgcgtttcgatgcgctgatcgggctcgacgaggtggagcctagtgacgaggaagaggatgaggaggaagaagagcgagcggcgggtgccggggctggagacgagctgctctgcccgttctgcagcgaggagctggacgcggtggggctgtggtgccatatggacgacgagcaccgtgctgaggtcaatgccggg

SEQ ID NO: 27333 - DNA, 363 bp, Zea mays
  Peptide Sequence Number=SeqID_69112
atggatgcttcaccaagttgccctaagaagggcaagaaggaggctagcccacgtgaccatcactctggtcggcgcaagggcaagcgagagcacacctttggcaaacacaagtctagggagagcgatgaggatgtcaagaggcgcattgaggacaagctcaacagcatgtgcttccttgccgacaccgtaggcagcctttgcaccatggccctcggcaatgatgtggtgggcggcgacggccaggacatcggcgacgactctgcttctaaggatggaggcctagagaacatatggctcatggattccaactattcacgccacatgatcggaagcaaaaatggttctccagccttgaccccgtga

SEQ ID NO: 27334 - DNA, 552 bp, Zea mays
  Peptide Sequence Number=SeqID_69113
atgggcattttatactattctcattttgtgcagtttaatctatgtacagccctacaactagcttttcagttttgtgctgttcatgtgtgtccaatttgcacagataaggttgatatgaacttgattgtccacatcagctcacagcatcgaggtttcttgaagatcaagctttcatatttgacccctgagattcatgtccaggataagtggagaaatcagcaaggttcatctggggtgcgttattcaacacttgccttattgaagaaagatctacatgagaggataagtggatcatctcgtgctgccccagtcagcacggtgcctgatcctctactgtcctcttttgttggtagcttttatgaagtcgatttgccaaaggatgctaaaaaagagtccttggttgagacagaagtgagaagtgataacatagagcagagagcagcggagagctttgatgagcctttgctccctgaggtgaaggaggagaaaaccaggaggagccaatttgtgcaggggcttgtcttgtccctgatgtttgatgacatcttatga

SEQ ID NO: 27335 - DNA, 240 bp, Zea mays
  Peptide Sequence Number=SeqID_69114
atggcgtttgattgtaccaaaaacaatagacaaacagacctaacttcctgtgaaaaatcagagtcggaaccactaggaagcaggagcgacagtgtcgtaggtcagtctggcagaccgagggctgacactatcgcgcacactggcgacaatgccaggcaaagaaaactacccagaacagtctcaaactttccagatagtttgcgcgaggggaaaatatccactattcaagtaacaacctaa

SEQ ID NO: 27336 - DNA, 3678 bp, Zea mays
  Peptide Sequence Number=SeqID_69115
atgtcgcgccggctgtcgctgccggcggggtcgcaagtcacggtgactgtgtcgccgacgaggggcaaggctgagagccccggggacggggtgatcaagaggagcggcggcaggatcgggctcaccagccctgcgccgaggcactcgctcggtggggcggggtcctccaccatccccactgtgcagctctcgcccgtgcgccggagcggtggcagccggtacgcgtcgctggacggcggtgcaggcgcggatgacagcgccgagttcgtgcactacaccgtgcacatcccgcccacacccgagcggacggtggcggcgtccgctgactccgtcgatgcgccagcgccgacggcgtacgacgaggacggcggcgcggcgggggtgcgggcgcagaggagctacatctccggtaccatcttcacgggcggactcaaccaggccacgcgcggccacgttctcaacacctccgccaacagcgccgcggtcgcggcctccgccaacatgtcgtgcaagatgcgcggctgcgacatgccggcgttcctgtcctctggcgccggcggcgggccgtgcgattgcggcttcatgatctgccgcgagtgctacgcggactgcgtcgcggccgcggggaactgccccgggtgcaaggagccctactctgcggggagcgacaccgacgacgatggcgaggacgatgaggccgtctcctcgtccgaggagcgggaccagctgccgctcacgtcaatggcgaagcgcttctccctcatacactccatgaagatgcccagcaacaacggtggcggcggaggaaagccggccgagttcgaccacgcgcgctggctcttcgagaccaagggcacctatggctacggcaacgcgctctggcccaaggacggacacggcggcggtggcggtggcggcggcttctctggattcgaggagccgcccaacttcggctcccgctgccgccggccgctcaccaggaagaccagcatatctcaggccatcctcagtccttacagatttaactctgctctccggtacaggctgctgatcgcaatccgtctcgtagcgctggggttcttcctgacatggcgtattcggcacccgaacccagaggcggtgtggttgtgggcgctttcggtgacgtgcgaggtctggttcgccttctcctggcttctcgacagcctccccaagctctgccccatccaccgggccgccgacctggatgtccttgccgagcgcttcgagctgcccaccgcccgcaatcccaagggccactccgacctgcccggcatcgacgtcttcgtctccaccgccgacccggagaaggagccgccgctcgtcacagccaacaccatcctctccatcctcgcggccgactacccggtcgagaagctcgcctgctacctctccgacgacggcggcgcgctgctcaccttcgaagcgctcgccgagacagcaagcttcgctcgcacctgggtgccgttctgccgcaagcacggcgttgagccgcgctgcccggaggcctacttcggccagaagagggacttcctcaggaacaaggtgcgtgtggatttcgtccgggagcggcggaaggtgaagcgggagtacgacgagttcaaggtcagggtgaactcgctgcccgaggccatccgccggcgctccgacgcctacaacgccggcgaggagctgcgcgccaggagaaggcagcaggaggaggccatggcggccggcaccattcttggagcgttgcctgaggcagcaggggccgtgaaggcgacatggatgtccgacggctcgcagtggcctggcacttggctcacctctgcaccagaccactcccgtggtgatcacgctggcatcattcaggcaatgcttgcgcctccgacatcagagcccgtgctgggcgcggagccggcggagtccggcgggctgatcgacacaacgggcgtggacatccggctgccgatgctggtgtacgtgtcccgcgagaagcgcccggggtacgaccacaacaagaaggccggcgccatgaacgcgctggtgcgcacgagcgccatcatgtcgaacgggcccttcatcctcaacctcgactgcgaccactacgtgcacaactcggcggcgctccgtgaggggatgtgcttcatgctcgatcgcggcggcgaccgcgtctgctatgtccagttcccgcagcggttcgagggcatcgaccccaacgaccggtacgccaaccacaacctcgtcttcttcgacgtcgccatgcgcgccatggacgggctgcagggacctatgtacgtcggcaccggctgcgtcttccgccgcaccgcgctgtacgggttcagcccgccgcgcgccacggagcaccacggttggctcgggaggaggaagatcaagctgttgctgaggaagcccaccatgggaaagaagacggacagggagaacaacagcgataaggagatgatgctgccgccgatcgaggacgacgccttccagcagctcgacgacatcgagtcgtccgcgctgctcccgcggcggttcggcagctcggcaacgttcgtggcgtccatccccgtggcagagtaccaggggcggctcctgcaggacacgcccggcgcgcaccagggccgccccgccggagccctggccgtgcctcgcgagccgcttgacgcggacaccgtcgcggaggccatcagcgtcatctcgtgcttctacgaggacaagacggagtgggggcggcgcatcgggtggatctacgggtcggtgacggaggacgtggtgacggggtaccggatgcacaaccgcgggtggcggtccgtgtactgcgtgacgcggcgcgacgcgttccgcggcacggcgcccatcaacctcaccgaccggttgcaccaggtgctccggtgggcgacggggtccgtggagatcttcttctcccgcaacaacgccctgttcgcgtccccgcggatgaagttcctccagcgcgtggcctacttcaacgtgggcatgtacccgttcacctccatcttcctcctcgtctactgcgtgctcccggccgtctccctcttctccggcaagttcatcgtgcagtcgctcaacgccaccttcctggcgctgctgctcgtcatcaccattacgctctgcctgctggccctgctggagatcaagtggtccgggatcacgctgcacgagtggtggcgcaacgagcagttctgggtgatcggcgggactagcgcgcacccggcggccgtgctgcagggcctcctcaaggtgattgccggcgtggacatctccttcacgctgacgtcgaagccgggcaccggcgacgacggcgaggaggacgcgttcgcggagctgtacgaggtgcggtggagcttcttgatggtgccgcccgtgacgatcatgatggtgaacgcggtggcggtagccgtggcgtcggcacgcacgctgtacagcgagttcccgcagtggagcaagctgcttggcggcgccttcttcagcttctgggtgctctgccacctctacccgttcgccaagggcctcctgggccgccgcggccgtgtgccgaccatcgtgttcgtctggtcggggctcatctccatgaccatctcgctgctgtgggtctacatcagccctcctgcgggtgccagggagctcatcggtggtggcggattcagcttcccgtag

SEQ ID NO: 27337 - DNA, 162 bp, Zea mays
  Peptide Sequence Number=SeqID_69116
atgaggtgtgaggtcgtgttcctcaaggacgagatgagcagcatgaacgcgctgctggagaggctagccagctcggatgcgcttgatccgcagaccaaggagtggagggaccagaaggtgaaggatctcgttacctgtcacgaggacgccgagcagatttag

SEQ ID NO: 27338 - DNA, 204 bp, Zea mays
  Peptide Sequence Number=SeqID_69117
atggcgccgatgtggcttcctagctcggtgcccacaaaatcttggcgccaagctaggaagtcctataaatcggtcgttctgctgattgagagttgcgcccacctcttttctcaactatctctccaattccaatcttcttcaaaaacgacccagattcaagttggaaaactctgtatacccaaggtgaccgttggcgcgaagtag

SEQ ID NO: 27339 - DNA, 456 bp, Zea mays
  Peptide Sequence Number=SeqID_69118
atgcaggcggcatgcaaccacaccaagggggcgcaccctttcgacttcgacgcgtccagcatggaggcccaggcccacacgtcatgtaaccggcgcgccggttgctacgtgcaagaaactgcaccgccactcgcgccactaccgtgccttctcgactgcggaaccagtaccgcgactcgaggcaaccctgcgcatgacccaacagtgccaaccaggcacatcggtcacggggaccgggaaaggggataccccgaaagggattcttctccgcgaaggaaacaggccccgagcccccctactgatcagaggttcgaaggctggcccctcggaagggttcaacagccgcctcagagcactcaggctccgcacccactactggtcagaggttcgaaggccgacccctcgaaagggttcaacggccgcctcaggccactcgggctccgcgcccactactga

SEQ ID NO: 27340 - DNA, 375 bp, Zea mays
  Peptide Sequence Number=SeqID_69119
atgcaccaaaacacagggacacagttcttgcaggtggcggcgcacttggtgagagcggagaggaccgagatcgagggcgacagattggggcagcgagagcagaggataggagatagggaaggaagagagcagatcctcaccggggagaaggcagcggggagggtcgtcgtcggggctgtgcgccgccgtcgcgccggtcgcgtcgaagccgccgtcgcgccggttgcgtcgagccgccgccgcgtcggtcgcgtgtgtccaggcttcgatccggagggtaccacacaagggttggttccgggccctgaggcccattcgttccacccggaacaaggcctggaatgggctgatcctctgaaaacgaacgaggcctaa

SEQ ID NO: 27341 - DNA, 501 bp, Zea mays
  Peptide Sequence Number=SeqID_69120
atggagcagagccagggacagggagggaggaggcggcagatcccggcgttcgggaggtggaaccagcacagcgtcggcgacgaggtgcccatcacgcagtacttcgagtcggcagtacaggccagcctcctcgccaggcccggccactgctaccacgacgccggcgccggcgaggtgctgctgttccggtcgtccgcctcgccgcctccgcacaagccgcccaagaaggtgcggagcacgacggagtgtcacggtcaccaccagcaggttcaggttgaggaggtggggagcaggaggaggcagcagcagcggcggcggcaggagccgttgccgccgttcgtgtccggcgacgtgtcccgcgcggcgaggccgagggtcgttagggcggcggtggacgaggacctgtacaaggtcccttccgatatgctacgcaagaagaaagggaggaagcatgtgaggagcgtgtggatgggctgcgtgggcctcacctgcgtcgcctga

SEQ ID NO: 27342 - DNA, 324 bp, Zea mays
  Peptide Sequence Number=SeqID_69121
atgggtccgacacaggcacttgtcagggtcttgttaggcgtgcctccgctccccgcactggcggggacccggagctgccgcgtggcctatggccccatgacgtcagcctcgtcgtcctctcgcaagcgcgcgctgcgcgtatcaccgcctgcactgacaccgggacccaactggtcactccctcactgcgcgctcgcgtctgcttacgaccggggaccaccagtcagtcccacgataccgcctcccctcgcgctagtcacttccgtgtggggcgcctctgccagggcttctcccccaacgaaccgagcggacatcggcgcgtaa

SEQ ID NO: 27343 - DNA, 324 bp, Zea mays
  Peptide Sequence Number=SeqID_69122
atggcggggcaagctccgggctcggttcccgatcttcacgcacttgatctcccgtactggctcaggggaaactcgccggagtacgctggcatatggacttcagttcgggaactgggggtggccagtgtggcggaatcggagctcacgagatgtggagttcgcggcatggccaccattgccgctgggcatagaaattggacctcgccactgcacaatcaccgggagttgaatcctggattccggcgaacccgccgcagtggggtgtgcgcgttcgagcttggctgttgggaggttggtggtgatctcctggccgttggtttggat

SEQ ID NO: 27344 - DNA, 377 bp, Zea mays
  Peptide Sequence Number=SeqID_69123
atgaaacagacagtgcagtgttacgcagggcagcgatcatgttcagttagtgcagttcagcaggaacctaccgttgttgcggaagacggaaccattgtccctcgcactttggtttatcccatttcggtgaaggctattcctcctggcgattccccggaagtgagcatgtctgagtttttgcctccagttgtcgatgacgaggatgattcggatcagtcccagcagaggcggaggcttattggacatcattcggtttcttcggcccgttcctcggtgctttcgaggcttgggccgcgggtctcttcttcggcggctgctggatcggttgatgtcgcaacacttcagatggtgtcggctgttgagttggttgtgactgg

SEQ ID NO: 27345 - DNA, 258 bp, Zea mays
  Peptide Sequence Number=SeqID_69124
atgcaggagcatacatctttgccttgtacacagacggacacagtatcagctggctctgatcctaaacagaagaggctcccattcttgccacatgacatgacacctgcgcagaagcagcttgccttgcctgccgctctcaccaacatgactaggatgaatcaggaggttgatcagaatggatctcatgaggcatttttcagagcagaagaatcttgctacctggaatttccacttataacaataggaggaatcaattaa

SEQ ID NO: 27346 - DNA, 267 bp, Zea mays
  Peptide Sequence Number=SeqID_69125
atggcccgcacggagtccggcatcccaggtctgcgcacccatgtcgtccgatcggatggtggatgcttctctccaactggacacaagaaaccaaagccacacgaacaccatgaccagcacggtggcctctgcgccggttgggacgagccccatgactatgcactcataagcgatcacacactcaccggcgtcggcaacaagctagtcctcgccggcagtggtacggtgcatgggtgcgggagtgaacggaggaggcagcacgcatga

SEQ ID NO: 27347 - DNA, 177 bp, Zea mays
  Peptide Sequence Number=SeqID_69126
atggccaccattgccgctgggcatagaaattggacctcgccactgcacaatcaccgggagttgaatcctggattccggcgaacccgccgcaatggggtgtgcgcgttcgagcttggctgctgggaggttggtggtgatctcctggccgttggttcggatgtgatcgaccgagattaa

SEQ ID NO: 27348 - DNA, 966 bp, Zea mays
  Peptide Sequence Number=SeqID_69127
atgaaaagtttaaaatttgctagaagcatgctctatagtgggagacgccctggcatcaaggatggcattggcttccaaaagggagacaatgtcaaacttaatgcccctcctaaaagattgtctaattttgtaaagggcaaggctcccatgcctcaggataacgagggttacattttgtaccctgccggttatcccgagagcaaaattaggagaattcactctaggaagtctcactctagccctaatcatgcttttatgtataagggtgagacatctagttctaggcaatcaacccatgcaaaattgcctaagaataaaactcctaaggcatcaaatgattctaacatttcatttaagacatttgatgcttcttatgttttaactaacaaatccggcaaggtttatgcatctgggggctcaagctggatcatcgatagcaggtgcacaaaccatatgacaggggagaagaagatgttctcctcctatgagaaaaaccaagatccccaacgagctatcacatttggggatggaaatcaaggtgtcactgtctttagaagaagtgatgattcaatagcatttaagggagtgttacagggtcagctatacttggtagattttgatagagctgaactcgacacttgcttaattgctaagactaacatgggttggctctggcaccgccaactagcccatgttgggatgaagaatcttcataagcttctaaagggagaacacattttaggattaacaaatgttcattttgagaaagacaggatttgtagcgcatgtcaggcagggaagcaagttggtgttcatcatccacacaagaacatcatgacgactgacaggccactggagctcctacacatggacctattcggcccgatagcttacataagcatcagcgggagaaaaatctcatacccaagagaccttaaaagggttcttgagacgggctcaaaatga

SEQ ID NO: 27349 - DNA, 870 bp, Zea mays
  Peptide Sequence Number=SeqID_69128
atggccacctatttcacgctcaacaccggggctcgcatcccctcggtagggctcggcacctacaaggccggacccggcgtcgtcgccgacgcgatcaccgccgccgtcaaggccgggtaccggcacatcgactgcgcgccgctatacaagaacgagaaggagtctcgtaacaacctgagcgtcaagctacacaggtgcagcgatctcgcacctgaagacgtgccgttggcgatcgacatcaccctgaatgatctgcagctagattatcttgacctgtacctgatacactggcccttccagataaagagaggcagcgagctcagtccagagaacttcgtccacctcgacatgcccaagacctggcaggcaatggagaggctgtacggctcaggcaaggctcgcgcggtaggcgtcagcaatttctcgaccaggaagctggccgatctgcttgccgtagcccgtgtcactccagccgttgatcaggtggagtgtcaccccggctggcagcaggcgaggctcagagcgttctgctgctccagcggggttcatttctctgcgtacgcgccgctaggcaggatgaaagccgtcgccagtgacccggtggtcgcatccgtagccgagagcttggggaaaactccggcacaggttgctctgcgatggggtatccagcagggccagagcgtgcttcccaaaagcgccaatgagtcgaggttgaaggagaacattgacctgtttggttggtccattcctgatgagctgtgcgccaagttttctgaaattgaacaggttaagcaaatcagaaatgacgcgtttgtgcacccccagagtatttacaaaacaatcgacgaactctgggatggtgagatctaa

SEQ ID NO: 27350 - DNA, 714 bp, Zea mays
  Peptide Sequence Number=SeqID_69129
atgagcatcggccctgacttcggcccctgcagcgagccccctttcggaggggacccctacatcgccagcctccggtccctccccgacgcgaccatcgctgcctatccacgccgcggttcccctccgggcttccccgcccttgcagcccatacatggtccgacgtcgtcgcttccctgccggcttcctcggcgctggttacggccatcgccaccatccaggcggctgtttctgcttctcgcgaccacaagcgcgtcgcgacactcgtcctggagtcagagcatgccatgagcgccgctgctctgaccgcccggatggccaccacgcagcacctcatcctcgggcatcctccagtcgttcatgaggctcatccgcccactgctaagggccccctcacctctgaactcgacgctgaccacgtcgctactcttcacgctcaggccaccagcttgatgaccatcacaaccatgcccccaccggcggcatcgacgaaccacccgtcttccggtgtgcggacatcctcatcagcttctgcgagcgcagatgcacgccgcctgaggctatctaaaggccggcaaatgtcgatgcttgctcatcgtttcgtaacgtttccggaacaaagagctctcaaagctagctttatgatcggctatgtgctgaatcctgaattaatggaagctttggctaggccaggatatgacttctcggttatttaa

SEQ ID NO: 27351 - DNA, 165 bp, Zea mays
  Peptide Sequence Number=SeqID_69130
atgtgtccagaaaaggtaatatgctccaaggcatcaacagtggtccggacccccacgaagagtgccggacccccggatatacagttcggacccccagggttggtcccggaccctcggatattcagtctggacccccaaggagaaatcgaattggaaaagacttag

SEQ ID NO: 27352 - DNA, 1500 bp, Zea mays
  Peptide Sequence Number=SeqID_69131
atggaccatgtgccggctctagttcttgccgggtgctgcttcctggccctgctgcctggctgggcctgtggccttggctccatgtcgtccattgcggtgtcctatggggaggatggtccggtgttctgtggcctcaactccgacggctcccacctcgtcgcctgcttcggtgctgatgcatctgtcctgtacggcgcaccacccaacatccctttccttggcctcacggcaggggatgggttcgtgtgtggcctcctgctcgacaccaggcagccatactgctggggtagcaactcctatgtcaagagcggggtgccacagccgatggttgagggcgcaaggtactctgagctcagtgcgggggacaaccacctctgcgcactgagagctgctcaagatgggggtcgtggttccagtgctgctacatcgctgattgactgctggggatacaatatgaccgccacacatgctgttgatgaagccgtgtcgactgtttcagctggttcggtgttcaattgtggcttgtttgctcggaacaggacggtgttctgctggggcgacgagacggtgagtggtgtcgttgggctggcaccgagggatctgcactttcagtctataggcgcgggcggttaccatgtctgtggggtgttggagaatgcacaggtgttctgctggggcaggagcttggagatgcagcaggtggtgccatccagtgctatcggtgatggtgatgtgaacatagtgccgatggatgcaatgagcactgtggttggcgggcggttccatgcttgtggcatcaggagccttgaccaccaagtggcttgctggggcttcactcttcataacagtacatcgccaccaaaagggctgaagatgtatgctcttgtggctggggattacttcacttgtggagtgcctgctgagacttcgctgatgccgaggtgctggggcaacagtgggccattggcattacccatggccgtacctcctgggatttgtgtacctactgcatgcagccatgggtactatgaatatgtgaaccatggtgaagttggcagcatcaaggtgtgtaagcctgcaaactctagactctgcttgccctgtagtacaggttgcccggaaggcttgtatgagtcatctccttgcaatgcaacagctgaccgtgtttgccagtttgattgcttgaagtgtgtcacagatgagtgcctgtcattctgcttatcacagaagcggaccaagagccgcaagttgatggcttttcagatgcgcatctttgttgcagagattgtctttgctgtcgtcttggtactcagcgtgtcagtaaccacttgcctcctaaccgctagaagtgatgttgggagatcacgccaagaaggagatggagaccagcgacaagcccactacaagccacgggaaggcttcatcggaagagtcccgcaacaaagggaaggggaaggcgtcggaatcctcttcccacaagtcgcatcggagtggggataa

SEQ ID NO: 27353 - DNA, 2304 bp, Zea mays
  Peptide Sequence Number=SeqID_69132
atgaaggagtccgaccagctcgcgacctctttcatcacgcccttcggcatgtactgctatgtcaccatgtcgttcggcttgaggaatgcggacgcgatgtaccagcgctgcatgaaccatgtgttcggccaacacattggccggacggtcgaggcctacgtcgatgacatcgtagtcaagacgaggaaagcctccgacctcctttccgaccttgaagtgacattccgatgtctcaaggcgaaaggcgtgaagctcaatcccgaaaagtgtgtcttcggggtgccccgaggcatgctcttggggttcatcgtctccgagcggggcatcgaagccaacccggagaagatcgcagccatcaccagcatggggcccatcaaggacttaaaaggcatacagagagtcatgggatgtcttgcggctctgagccgtttcatctcacgcctcggcgaaagaggcctgcctctgtaccgcctcttaaggaaggccgagtgcttcacttggacccctgaggccgaggaagccctcggaaacctgaaggcgctcctcacgaacgcgcccatcttggtgccccccgctgccggagaagccctcttgatctacgtcgccgcgaccactcaggtggttagcgtcgtgattgtggttgagagacgagaagaggggcatacattgcccgtccagaggccagtctacttcatcagcgaggtactgtccgagaccaagatccgctacccacaagttcaaaagttgttgtacgcggtgatcctgatgcgacggaagttgcgacactacttcgagtctcatccggtaactatggtgtcatccttccccctgggggagatcatccagtgccgagaggcctcgggtagaatcgcaaagtgggcggtggaaatcatgggtgaaacaatcgcgttcgcccctcggaaggccatcaagtcccaggtcttggcggacttcgtggctgaatgggtcgacacccagctcccaacagctccgatccaaccggagctctggaccatgttcttcgacgggtcgctgatgaagacaggagccagcgcaggcctactcttcatctcgcccctcgggaagcacctacgctacgtgctgcgcctccatttccgggcatccaacaatgtggctaagtacgaggctctggtcaacgggttgcagatcaccatcgagctaggggtccgacgcctcgacgctcgcggtgactcgcagctcgtcatcgaccaagtcatgaagaactcccactgccgcgacccgaagatggaggcctactatgatgaggttcggcgcctggaagacaagttctacgggctcgagctcaaccacatcgcccggcgctacaacgagactgcggacgagctggctaaaatagcctcggggcgaacaacggttcccccggacgtcttctcccgagacctgcatcaaccctccgtcaagatcgacgacacgcccgagcccgaggcaccctcggcccagcccgagaaggcacccgggggctacacgcacctgttggtcgccatcgacaaattctccaagtggatcgaggtccgacccctaaacagcatcaggtccgagcaggcggtggcgttcttcaccaacatcatacatcgtttcggggtcccgaactccatcatcaccgacaatggcacccagttcaccggcagaaagttcctggacttctgcgaggatcaccacatccgggtggactgggccgccgtggctcaccccatgacgaatgggcaagtagagcgtgccaacggcatgattctacaaggactcaagccttggatctacaacgacctcaacatgttcgacaagcgatggatgaaggaactcccctcggtggtctggagcctgaggacaacgccgagccgagccacgggcttcacaccgttctttctagtctatggggccgaagccatcttgcccatagacttagaatacggttccccgaggacgagggcctatgctgaccaaagcaaccaagctaatcgagaagactcgctggaccagctggaagaagctcgggacaaggccttactacactcggcgcggtaccagcagtccatgcgacgctaccacgcccggggggtccggtcccgagacctccaggtgggcgacctggtgcttcggctgcgacaggacgcccgagggcggcacaagctcacgcctccctgggaagggccgttcgtcatcgccaaagttctgaagcccggcacgtacaagctgaccaacagccaaggcgaggtctacagcaacgcttggaacatccaacaactacgtcgcttctacccttaa

SEQ ID NO: 27354 - DNA, 285 bp, Zea mays
  Peptide Sequence Number=SeqID_69133
atggggctagccaccggtgggcaggcgcgcatgggcatggggctcgtccgtgcggacgtggtgccgcatgcgaactggtggatgcgtccactgctgcatgcaaagagatggtttactgctagcgacaaaaatgcaatctctgaccaccgctacatgcaggaactgcataaaaggagaaaatactcagaaaataaatatgacaatttaccgaagacttctacagggtgtattaacatgtttcaaacaccatttgcacttagaaacactatgcaacgacatgaatga

SEQ ID NO: 27355 - DNA, 390 bp, Zea mays
  Peptide Sequence Number=SeqID_69134
atggcggacgacgaagcggggcgacgatgcacggaaagatacggatgcagacagctatcgcgggcgctctgcaggcagctgacgagcaggctgccatggctgctcgaacgccatggccgcgcagaagccgagccggggccgccgcgggcaagctgcgaaggccgccacgcgcgctgtgctccgcgaaatgcgccaggccgtcgcgccgctgcgggcgagtcgtcgtgttgccgcgcaggtgagccacgccagccgcgcgcaggggccgtgcacgccgagggaaagctagagggaggagcaagggatttagacgagcagccgtggaggaaacaggccggaggaggtcgacaacctccatgggagagggcctccctgcacctgctaccgtag

SEQ ID NO: 27356 - DNA, 711 bp, Zea mays
  Peptide Sequence Number=SeqID_69135
atggcccttcttgcgacgtggtcgcgagtcctaggtcgggcgaggtggatgctcctccgaggtcgaggtcgagtctgtcttccgaggtcgaggtcgagtccgagccccgagtcgggcgaggcggagactgtcgtccgaggccaaggccgagtccgagccctggggtcgggcgaggcggagttcgtcgtcttccggggccgagcccgagtccgagccctggggtcgggcgaggcggagttcgttgtcttccggggccgagcccgagtccgagtcctggggtcgggcgaggcggagttcgtcgtcttccgaggccgagcccgagtccgagccctggggtcgggcgaggcggagttcgtcgtcttccggggccgagcccgagtccgagccctggggtcgggtgaggcggagttttctatggcgccggaggccggacttggttgctgtcagcctcactctgtcgagtggcacagcagtcggagcaacgcaggcggcgctgtcttcttgtcaggccgccgcaatcgactcgacccggcccgaccgagctccccgtgcccaacaaaccctcacaattaccagttccccatcgccgacgccgggaagggaggctcccaacgcatccccgccgacctcaacgccgacggtcctttcctaacccgcagccgccggccgcagtctctctcttctggtccagtgggggctgctatcttccag

SEQ ID NO: 27357 - DNA, 3740 bp, Zea mays
  Peptide Sequence Number=SeqID_69136
atgtcgttgccgtcgaacaaccggaggacgtgctcccggagcagctctgcgcggtccaagcacagcgcgcgggtggtggcacagacgcccgtggacgcgcagctgcacgccgagttcgagggctcccagcgccacttcgactactcctcgtcggtgggcgccgccaaccgcccgtcggcaagcaccagcaccgtctccacctacctccagaacatgcagcggggccgctacatccagcccttcggctgcctgctcgccgtccacccggacaccttcgcgctgctcgcctacagcgagaacgcgcccgagatgctcgacctcacgccacacgccgtccccaccatcgaccagcgggatgcgctcggcatcggcgtcgatgtgcgcacgctcttccgctcgcagagctccgtcgcgcttcacaaggccgccgccttcggggaggtcaacctactcaaccccatcctcgtgcacgccaggacgtcggggaagcccttctacgccatattgcaccggatcgacgtcggccttgtcatcgaccttgagccggtcaatccagccgacgtgccagtcaccgccgcgggcgcgctcaagtcgtacaagctcgctgccaaggccatctccaggctgcagtcgctgcccagcgggaacctgtcgttgctgtgcgatgtgcttgtccgtgaggtgagcgaactcacgggctatgaccgggtcatggcctacaagttctatgaggatgagcatggcgaggtcatttccgaatgcaggaggtccgatctggagccgtatcttggactgcactacccagccaccgacatcccgcaggcgtccaggttcctgtttatgaagaacaaagtgcggatgatatgtgattgctgtgccactccagtgaaggtcattcaggatgatagcctagcacaacctctcagcctctgtggttccacactcagggcttcccatggttgccatgcacagtacatggcaaacatgggttctgttgcatcacttgcgatgtcagtcactataaacgaggatgaggaggaagatggggataccgggagtgaccaacaaccgaaaggcaggaagctgtgggggcttgtcgtctgccatcatacaagcccgaggttcgtccctttcccactaaggtatgcttgtgagtttctcttgcaagtatttggcatacagctcaacaaggaggtggaattggctgctcaggcaaaggagaggcacatcctcagaacgcaaacccttctttgtgatatgctcctgcgggatgctcctgttgggatatttactcggtcacctaatgtgatggatctagtaaagtgcgatggagctgcattgtattaccagaaccagcttttggtgcttggatcaacaccctctgagtcagagataaagagcattgcaacatggctgcaggataatcatgatggttcaactgggctgagtactgacagcttagtggaagcgggttatcctggtgctgttgcacttcgtgaagttgtgtgtggcatggcggccataaagatctcttccaaagattttatcttctggttccgatcgcacacaacaaaggagatcaagtggggtggggctaagcatgaaccggttgatgcagatgacgatggcaggaggatgcatccacgatcttcattcaaggccttcttggaggtggttaaatggagaagtgttccctgggaagatgttgaaatggatgctatccattctttgcagttaatattacgtggctccctgccagatgaagatgccaacagaaacaatgtaaggtccattgtaaaagctccatctgatgatatgaagaagatacaggggctacttgaactgagaacagttacaaatgagatggtccgcttaattgagacagcaactgcccctgtcttggctgtcgacattgccggtaacataaatggatggaacaataaagctgcagaactaacaggtttacctgtaatggaagccatagggaggcccctgatagatcttgttgttactgattctatagaagtggttaagcagattttggactcagctttacaaggaattgaagagcaaaatatggaaatcaagcttaaaacattccatgaacatgaatgcaatggtccagtaatcttgaaggttaactcctgctgtagtcgggacctttcagagaaagtcattggagtttgctttgtagcacaagatttgaccaggcagaagatgattatggataagtatactaggatacaaggagactatgttgccatagtaaagaaccccactgagctcatccctcccatatttatgatcaatgatcttggttcctgcttagagtggaataaagctatgcagaagattaccggtataaagagggaagatgcgataaacaaattgttaattggggaggtcttcacgcttcatgattatggctgtagggtgaaagatcatgcaactctaacgaaacttagcatactgatgaatgcagtgatttctggtcaggatcctgagaagctcttttttggtttcttcgacacagatgggaagtatattgaatccttgctgacagtgaacaagaggacagatgctgagggtaagatcactggtgctctttgctttctgcatgtggccagtccagagcttcagcatgctctccaggtgcagaaaatgtcggaacaagctgcgacaaacagctttaaggaattaacttacattcgtcaagaattaaggaacccactcaatggtatgcaatttacttgtaacttattgaagccttctgaattgacagaggaacagcggcaacttctttcatctaatgttctctgtcaggaccagctgaaaaagattttacatgacactgatcttgaaagcattgaacagtgctatatggagatgaacacagtagagttcaaccttgagcaagctctgaatacggttctgatgcaaggcattcctttgggcaaggaaaaacagatttcaattgaacgtaattggcctgtggaagtatcatgcatgtacctttatggggacaatttaaggcttcagcagatcctagcagactatctagcatgcgcccttcaattcacacaaactgctgaaggacctatcgtgctccaggtcatgtctaagaaggaaaacattggatctggcatgcagattgctcatttggagttcaggattgtccatccagctccaggcgttccagaggccctgatacaggagatgttccagcacaacccaggggtgtccagggagggcctcggcctgtacataagccagaagctggtgaaaacgatgagcggcacggtacagtaccttcgagaagccgacacctcgtcgttcatcatcctgatggagttcccggtcgcccagctcagcagcaagcggtccaagccttcgacgattggggaagcaagcagcagcgacgccggcggccgctcctcgccgcagctggacgtgaatacagtgtccccggtagaatgcagaaaccacacatgccccacaagcgtgagtgaggcagaagagtacggcgcaaagtccagaggcaggcaggcccacgaccacgagcgcgagagcgggaacaaagcgagcgagcgcccaccgggagttgcagccagcaactgcagccggacgccaagccaaagttcggcgtcggcgcttggagttggagggaggtccccgcagctgtcgcgcctccgcggagccatcccgtgcgtccacgtcgccgtgtcggtcgcgcgcgctac

SEQ ID NO: 27358 - DNA, 309 bp, Zea mays
  Peptide Sequence Number=SeqID_69137
atgggcgtccgcgtccccaggccggcagcccgctccctccgcaacaagcgaattcgctcacacgcgcagtccatgtccatccagggtaccgcgttgcacggacgcgtgcatctgttgggcgtccgtcccgtccgcgaacccaacatttcacgaggcggcctgcggtgtcggtggtcgtcgctctgctactcaccactgcagatcggtatcggcacgcaccggcgcacgtggacggcagcgtgggggagtggagaaccggagatcaaccctgtgtttgtggcgccgaaagtggtgctgccatttgagtga

SEQ ID NO: 27359 - DNA, 1155 bp, Zea mays
  Peptide Sequence Number=SeqID_69138
atgagaggcagacagctgctggagatagaaaggcacgcgtaccgcacgtcggcgtctatattctcggcccacctcgagttgacaagctcacaaaaggccacgcggacacaggagaggggagagcccgagagcttcccttgccggcgagatccagtccggctcacgcgatctgactttcccggaggtggacaacgctataatagttcatcatgcttcattgctgctgttcaatttgggttcatgcagatccaggttaagcagatggctgacaacagcattgagcaagcattgatagagaatcctcctaatgtgctgaaatggaagccatcagaaagagctaaacggtttcgacgatgcaggtcaactccctcagatcccaccgatcaaaaacctgcagaaaacggatctgtgcttaaagccaaagagttattcaaggagaaaaggccgagcttcatgcttgtaggcctcctccttttcgcctacctactagtgggtgtcatcatcttttacctattcatggatcaattatctgggaagacaactaatagagtgcttgacgccttgtacttcgttattgtcacaatgacctcggttggctatggggatcttttcccaaacagtgacacaacaaagctgcttgcttgcgcttttgtattcacaggaatggcgatcattgctctcttcatcagtaaagcggcagattaccttgttgagaaacaggaggtgttgttcttcaaagcactgcacatgaatatgaagggcagcgaggccaaaatgctaggagcaatggaaacaaataggataaagtacaaattctacactgtcgctctgcttcttgcaatggttattgttgctgggactgtatttctgtggaaggttgagaagctcagccttgttgattccttctactgtgtctgtgccacgatcactaccctgggttatggggataaaagcttctcgtccaaactggggcgtgtttttgcagtgttttggataaccacaagtactctcatcatggctcagttcttcatgtaccttgctgagctctacactgagcgccggcagaaaatcctgaccaaatgggtgatcaacaggaggataaccaccatggatcttgaggcagctgatatagatgacgaccgacaagttgggtaa

SEQ ID NO: 27360 - DNA, 390 bp, Zea mays
  Peptide Sequence Number=SeqID_69139
atgaacgccctacacagtcatgttcctctggtgacgggcgatctgcctgcccccgccctcatggctggtggccaagggcagcacagagtcacccgtgcaccccatgtagccgaccatgggcacgccagaggcagccacgacatccctacgacacgcatggcggcctgggtcgagctgcagcaccttcagttgccaccggcatggctgcttccgttcccaccgatgcggctcatccggttgctgaaactagcgccgcctcttcattttgtctcccagcgcgtagccacacgcccacaccccattgctggtcggacatggtttctccacgcctatgcacaaccaagcgatggccgaacatggccacggacactggccagggagactatttag

SEQ ID NO: 27361 - DNA, 564 bp, Zea mays
  Peptide Sequence Number=SeqID_69140
atggaggcgatcagcaacaccaggttagccctcgggatcctggtggtcgacatcgtggtcctcgtcggcgagaaggtgacctccaagctcttcttgatctcacgctccgctgacgtccggaggccttcgcccctttgggatctccttcttattcacaaggtgggacaagcaccatggcgtgatgagaggccggacttggagcagtgcgtgggggaacgacagatgggaggccgagctaggcgagatccgagcgaccatggggaagtgacggtcgaacctgaccttgtcgaggcgagaagggaggggacaaggcgccgacacggaaggaagagcagggacgaccgacgagcttccgtggaccgtaggcggccagggagaggcacagtggaggagagaggatccatgaatggagaaaatgggaggatgaagcattcagggataatcatgaatcattttctcgtttgctttattgcacaatttggtcagtctattgttcgagcagactatcttatcctccgcaagggttttataatggtatgccagttctttgctcttcaattctga

SEQ ID NO: 27362 - DNA, 177 bp, Zea mays
  Peptide Sequence Number=SeqID_69141
atggatgattatgacagcgtggacccaccaacaagtgaccgagtaaggttttgggaggctggcgagcgggccacacgggttggcagcaacaacgcggtggacttctgggccgcgccaaatagaaaatggggtgggctcggcagtagatttggcccaacgcagatgtttgaagtatga

SEQ ID NO: 27363 - DNA, 255 bp, Zea mays
  Peptide Sequence Number=SeqID_69142
atgatgcttcctccacacaaatcttatggaggtcattgctctttggcagagcttgagggaaagctatgcttgttgattgtcgatggtgcattggaagtgttgaaggaaaatacttttctagtttgggtcatattcggggataaattggctaagaagcttgaaaaagatatttctgaaccacaaactccacaagaagtagaaagtcttcttactttgtttgcacagatatctggaacctttctgttcttgttatga

SEQ ID NO: 27364 - DNA, 243 bp, Zea mays
  Peptide Sequence Number=SeqID_69143
atgaagatgataaataatgggcgcggcgggtactgggtggtgctgagcactggcgtcgcggctgatgaggcggccgccgcgcacactgttgccgtcagggtctcccgcgacggcaacgtgacgaaggcactcaacgggttcaacttcgtgtccgtcagcgaggtggcccagcgcggcggcgcgctctgggtcggctctgtggacacgccgtacgccggccagctcaagcggcgtgccagctag

SEQ ID NO: 27365 - DNA, 510 bp, Zea mays
  Peptide Sequence Number=SeqID_69144
atggcagctgctgccactcgttcattgcactccttcctcgcgcttcttctcctgttggcagctgcggccgcggctgcggcgctgtcgtacgaaaccaagtccatagatcctggactcgtcgtgatgacgctgccggagccggtgtccgggccggagagtctcgccttcgacgggcgtggcggcgggccctactccggcgtctccgacggccgcgtcctccggtggcaaggtcccctccggggatggaccgagttcgcctacaactccaagcacagggttgccgcgcgcggcgggctggcgcaggtcgtggcgacggaggccgccggggggccgttcaacttcctcaacgggctcgacgtcgaccagcggaccggcgacgtctacttcaccgatagcagcgccacgtacaggaggaggtacgggctaataattaacggtcttgcatacgcagagacagagcctgtcgtgcatatactccactgcccaaagtatacgcagttccgattttaa

SEQ ID NO: 27366 - DNA, 498 bp, Zea mays
  Peptide Sequence Number=SeqID_69145
atgccctcaccgaggtattccgcaggctgcctgcccgtgcgctcgcggccctgcagactggtgtgcaagtcatggatgtccgtgctcacagatccacacttcatccatgagcacctgagccgtggccagcagaagctgctgctctttgcgactgacaggggaaacgacaggtcgctcgccatggtgctcgcggacaacaacgcatccatgtaccagctgtcaaggcccgcggcgtctcggagcgtcttcgtgcacaattcttgcaatggcctgctctgcctaggtgacagcacaggagctgtcgaggtgctgaacccaacgactggagctcacaatgacccgttcaaggtacactgtgagatatacacgattggagtcggtgtctggagacaagttgggagctgtcatggtgctccgactgtcagaggggtgcatgtgaatgggatggtatactatggtctcgtccgctacattgcttcatcgcgtatcaactgctga

SEQ ID NO: 27367 - DNA, 2262 bp, Zea mays
  Peptide Sequence Number=SeqID_69146
atgcaggccaggctcgacgagggagcaggaacacttgagccgttccggcggaacatcgggcaggaatgggcagaccaagctccggccggagaagcgcgtcatctacaccagggcatccagcaccgcattgccgacgacgtcagggcaaggccgccaccggtttccagtggggtcggccagaacctggctgccgcagcaatactactccgcgcgatgcccgaaccatcaaccaccgaagggcggcgtatccagggagagctcaagaatctcctggaggatgccgcagtccgacgggccgaaagctctgcctcccgaaggcaggggtacccctcggagcatcgcgccgcgacttcccgatttatgcgggaagcctcggtccacaccgggcgcacgcgcaacacggcgcctgcggccccgggtcgcctcggcaacgagcaccaccaccgcaaccgtcgagcccacctcgacgagagggtgcaccgaggctaccaccccaggcgtgggggacgctacgacagcggggaggatcgaagcccctcgcccaaaccacccggtccgcaggctttcagctgggccatacgacgggcgccgttcccgacccgattccgaaccctgactaccatcacaaagtactcgggggagacgaggccggaactgtggctcgcggactaccggctggcctgccaattgggtggaacggacgatgacaacctcatcatccgcaacctccccctgttcctctccgacaccgctcgagcctggctggaacatctgcctccggggcagatctccaactgggacgacctggtccaagccttcgccggcaacttccagggcacgtacgtgcgccctgggaactcctgggatctccgaagctgccgccagcagccgggagagtctctccgggactacatccggcgattctcgaagcagcacaccgagctgcccaacgtcaccgactcggatgtcctcggcgccttcctcgccggcaccacctgccgcgacctggtgagcaagctgggttgcaagacccccaccagggagagcgagctgatggacatcgccaccaagttcgcctctggccaggaggtggttgaggccatcttccggaaggacaagcagccccagggccgccagccggaagacgtccccgaggcgtgcactcagcgcggcgccaagaagaagggcaagaagaagtcgcaagcgaaacgcgacgccaccgacgcggaccttgtcgtcgctgctgagtacaagaaccctcggaaatctcccggaggcgccaatctcttcgacaagatgttcaaggagccgtgcccctatcatcaggggcccgtcaagcacacccttgaggagtgcgtcatgcttcggcaccactttcacaaggccgggccacctgcggaaggtggcagggcccaaaacaacgacaagaaggaggatcacaaggcagaggagttccccgaggtccacgactgcttcatgatctacggtgggccagcggcgaatgcctcggcttggcaccgcaagcaagagcgtcgggaggtctgctcggtaagggtggcggcaccagtctacctagactggtccgacaagcccatcaccttcgaccagggcgaccaccccgaccacgtgccgagcccagggaaatatcccctcgttgtcgaccccgtcatcggcaacgtcaggctcaccaaggtcctcatggacgggggcagcagcctcaacatcatctacgccgagaccctcgggctcctgcagatcgatctgtcctcgatccgggcaggcgcgacgccttttcacgggatcatccctggaaaacgcgtccaacccctcggacaactcgatctgcctgtctgcttcgggactccctccaacttccgaagggaaaccctcacgtttgaggtggtcgggttccgaggaacctaccacgcagtactggggaggccatgctacgccaagttcatgaccgtccccaactacacctacctcaagctcaagatgccgggccccaatggagtcatcaccgtcggccccacgtaccgacacacgtacgaatgcgacgtggagtgcgtggagtacaccgaggccctcgccgaatccgaggccctcattgccgacctggagagcctctccaaggaggcgccagacgggaagcgccacaccggcaactttgagccagcagagacggttaagtccgtccctctcgaccctagcaacgacgcctccaagcagatccggatcggctccgagctcgaccccaaatag

SEQ ID NO: 27368 - DNA, 578 bp, Zea mays
  Peptide Sequence Number=SeqID_69147
atggaggctccctccaccttgctccagctctccctctcctcctcctcgtctctgggtcttcttctgctgctgctgctgcttgtgcagttgccgtccatggccagctgccacgaggagatgaagtccatctacgtgggccagagggttctccccgtgcgcctcggccggccggcgttcgggcccgagagcctcgccttcgaccaccgcggcgacgggcccttcaccggcgtctccaacggccgcatcctccggtggcgcggcgcccagcgcgggtggaccgagttcgcccacaaccacaagcacgagacggtggccatgtgcgcggcgaagaagaggctggtggtgccggagagcgcgtgcgggcggccgctgggcctgcagttccaccgcgcgtccggcgacctctactacggcgacgcgtacctggggctgatgcgcgtggggcgccgcggcggcctggcggaggcggtggccacggaggccggcggcgcgccgctcaacttcgtcaacgccgtcgaggtcgaccaggagaccggcctcgtctacttcaccgacagcagcgccacgtaccagcggag

SEQ ID NO: 27369 - DNA, 555 bp, Zea mays
  Peptide Sequence Number=SeqID_69148
ctgatccggccaccacagttccagggcactcttgaggcctcacgcctccactttggctcctatcgtccagcccctaaggacccagtgccagttcctgatccaatgacagacactcaggcaaaggatacgacattccatcagttcgagactcagggcatagtcgttcctgatgatgatgatgattttgggattccgcctctgcctccgcctcctatgccttcatgctcacatgatcatgaggccgggggttccagtgctgctcctgctggccctcctgccattgatcctgctttggctatgatactccagtctcttactcaatacataccggtgttcagcttcctcctgttcagtctgcaccccctccagctcttcaagccgctgttctccgtcagtgctcagtcgttagtgccaccagctcctgctgttaccactactgctgtggcggtgtctatgacctcttcagctcctgcagcgcagcctcagtccgagtcaataccagctccagcttctatggtagatcctggatccgacactgactctgacccccagctg

SEQ ID NO: 27370 - DNA, 465 bp, Zea mays
  Peptide Sequence Number=SeqID_69149
atgggtgtgcccaagggttgtctgccccgtgaaaggtgtttatcacattgtcctgaagtagcatactggcgatccatcgagcgcatcaggctcggtgggttggacgactcagaggagaccgaggagtggagcggcggcgagggcgacagaggtgaggacgacgacagtggcggcgatgagggggtggactcctctgactccgaggagtggagcggcggcgagggcgatggaggtgaggacgacggcagcggcgacgacgacgacggcaagggcggtgacgacggcgaagatggcaacgacgagggcgatgtcgacggtgacagcaggggcgacatcgaaggcaacgacgatggcagcggcaaaggggacgacaagggtgatggcgacgacaatggtgatgacaacggcaagggcgacaatagcaaggtcgatggcaaggccggtagcataatgctgctggcttaa

SEQ ID NO: 27371 - DNA, 351 bp, Zea mays
  Peptide Sequence Number=SeqID_69150
atggtaacaccggaggtgttacatgacccagcccccaagggtggtgtcgaggatgacccagccccgaagggtgccgagcttggttcctcttcggctgcctccatggatgttcacgtcggatcaccactggttcaatctgaggagcccatggtgacgaatttaccttctgctctcgtcggtccggtcaccttacaggctagtgacccagatgctgggaacctgctgcctgttgttggagctgaggtctctccgattgatgctgtcaacattgtccctgtcaatgccccatcgacaggcagtgccacgatgcttccagctctgggacttcctttatttctttctaacctctag

SEQ ID NO: 27372 - DNA, 283 bp, Zea mays
  Peptide Sequence Number=SeqID_69151
ggaggtcggggagattacggcggtcacgtcgaagtacgggtcggcgtcagagctagtcggagtcggccggtccacaggcagtacacggaaggaattggaaactggcgcagagacttacccggtcacgttcgccggtgagcggaagaagtcctgcaaggtgattcgggtcctccggtgcggcatgggcgagggcacggtgtcgggtgccctgggcgtgctatggtgcatcagcaagggtcgaacacgtggacgtttgcttctgctcttgttcaaacgccgatag

SEQ ID NO: 27373 - DNA, 7917 bp, Zea mays
  Peptide Sequence Number=SeqID_69152
atgaatgctttgctctcagaatttggcgatgccagcagggaggtcctggaagatgttgggcaagttcaccgggaagtgctttggaaaatttcgctttttgaaaaaaacaagattgtcgctgaaaccagttcatcttcttccacatctgaagctcagcagcctgacatgtctgccagcgacattggtgatagcagatacacttctttcaggcaatatcttgatccaattttaaggcgaaggggttctgggtggaacatagagtctcaagtgtctgacctcattaatatgtatcgagacattggccgtgcagctagtgactcgcagagggttggttctgatagatattctagtctaggtttgccctcaagttcccaggaccagttttccagttcatctgatgcaaatgccagcacaagcacctcaactttgaaggtcattcgatatcttggaaaggtggttgaatttgttgatgggatgttattagaccggccagaatcatgtaattcgattatggtgaattcattttattgccgtggtgtcattcaggccatcctgaccacatttcaggccaccagtgagttgctcttcacaatgagcaggccaccgtcttcacctatggagacggatagtaaaaccggaaaggatggaaaggagatggattcttcatggatctatggtcccctcaccagttatggggcaattatggatcatcttgtgacctcatcttttattctctcttcatcaactagacaattacttgagcaacctatttttaatggatctgtaaggttccctcaagatgctgagacgttcatgaagttacttcagtcaaaggtgttgaagacagttcttcccatctgggcccatccccagttcccagaatgcaacatcgagctgattagttcagtcatgtccatcatgaggcatgtttgctctggggtggaagtgaaagacactgttggcaatggtggtgctcgtttggctggtccacctcctgatgagagtgcaatttcacttattgtagagatgggtttttctcgtgccagggctgaagaagcattaagacaagttggaacaaacagtgttgaaatagcaactgattggttattcgcacacccagaggaaccacaagaggaggatgatgaacttgctcgggcgcttgcaatgtctcttgggaattctgttacccctgcacaagagggagatagtaggtccaatgatcttgagctggaagaagcaacagttcagccgcctcctatagatgaaatgttacgttcatgtcttcagctacttcagagaaaggaagcattagctttctctgtcagggatatgcttgttactatcagctcacagaatgatggccaaaaccgagtaaaggtgcttacatatttgattgataatctgaaacaatgtgtggtggcatctgagccttcaaatgatactgcattgtctgctcttttacatgttcttgctttgattcttcatggagatactgctgcccgtgaagttgcctcaaaggcaggacttgtgaaggttgctttggatctgctgtgcagctgggaggtgcaaattagggaaagtagcatgattgaggttcctaattgggtaatttcctgtttcctttctgttgatcagatgctccagttggaaccaaagttgccagatgttacagagctacatgtcctgaaaagggataactcaaatataaaaacatcacttgtgattgatgacagcaagagaaaagattcagaatccttgccaaatgttgggttactagacatggaggaccagtttcaacttttgaagatctgttgtaagtgcataggaaaacagttaccttcggcttccatgcatgctattctccagctctctgcaacactgacaaaagtccatgcagctgctatttgtttccttgaatctggtggtttgaatgcattactatcactgccgacaagtagtttgttttctgggttcaacaatatggcttctacaataattcgtcacattttggaggaccctcacacccttcagcaagcaatggaattagagatacgtcacagtcttgttacagctgctaatcgacatgcaaatcccagggttacaccacgcaattttatccagaatttggcttttgtcgtgtatagggacccagtgatatttatgaaagctgcccagtctgtgtgccagattgagatggttggagataggccatatgttgttctgttaaaggatcgtgagaaggaaaggatcaaggagaaagataaggacaagtcagttgataaggataaagcaacagtcgcagtcactaaggtagtttctggggacacagctgcaggatctcctgcaaattctcatggaaaacagtctgatttgaattcaagaaacgtgaaatctcaccgcaagccaccacaaagttttgtcactgttatagagcatctcttagatctgctgatgtcctttgttccgccaccccgtccagaggatcaagttgatgtctctggtactgccttatcttcagacatggatattgactgcagttctgcaaaagggaaagggaaagctgtgtctgtcccacctgaagagagcaagcatgctatccaagagtctactgcatcccttgccaaaactgcatttttccttaagttgctgacagatgtattgttaacttacgcatcatccattcatgttgttcttcgtcatgatgctgagctgagtaacatgcacggtccaaatcgaacaagtgccagactaactagtggtggaatctttaaccatatcctgcagcatttccttcctcatgctacaaggcaaaagaaagagagaaaaaatgatggagattggatgtataaattggcaacaagggctaatcagttcttggtggcttcatctattcgttctgcagaggcccgaaaaaggattttctctgaaatctgcagtatatttcttgatttcactgactcgtctgcagggtacaatgccccagtaccaaggatgaatgtgtatgtcgatttactgaatgatattctgtcagcccgatcaccaactggctcctcgctgtcagcagaatctgcagttatatttgttgaagctggtcttgttcattcattatcgacaatgcttcaagttcttgatttggatcaccctgattctgcaaagattgttactgctgttgttaaggccttggaactcgtcagtaaggaacatattcattcagcagataatgcgaaaggagtgaactcgtcaaagattgcttctgacagcaacaacgtgaattcatcatctaatagattccaggctcttgacatgacttctcagcccacagagatggttactgatcacagggaaacgtttaatgctgtccgaacttcacaaatatcagattcagtggcagatgagatggatcatgatcgtgatatggatggcggctttgctcgtgatggtgaagatgattttatgcatgagatggctgaagatggaactggtgatggatctacaatggaaattagaattgaaattccacgcaatagagaggatgatatggcccctgctgctgatgacactgatgaagatatatctgccgaggatggtgaagatgatgaagacgaagatgaggagaacaacaatctggaggaagatgatgcccatcggatgtctcatcctgacacagatcaggaagaccgtgaaatggatgaagaggaatttgatgaggatctgctagaagaagacgatgaagatgaggatgaggaaggagtcatccttcgcctggaggaggggattaatggcattaatgtgttggaccatgttgaagtatttggtgggagcaacaatttgtctggggatacgctgcgtgtgatgcctctagacatttttggtacaagaaggcaaggccgaagtacctccatatacaatcttcttggtagggctagtgatcatggtgttcttgatcatccacttctcgaagagccttcttcaacaacgaatttttcagaccaagggcatccagagaatcttgttgagatggctttctctgatcgaaaccatgaaagtagctcctctcgtttggatgctatattccgcagcttgcgaagtggacgtaatggacaccgctttaatatgtggctagatgacggtccacaacgtaatggatctgctgcccctgcagtacctgaaggcattgaagaattgctgatctctcatctgagacggcccactcctcaacctgatggccagagaacacctgttggtggtgctcaagaaaatgaccagcccaaccatggatcagatgctgaggcaagggaagtagcaccagctcagcaaaatgagaacagtgaaagtacactgaatcctctagatctgtcagaatgtgctggccctgcacctcctgatagtgatgcacttcaaagagatgtgtccaatgcaagtgagcttgctacagagatgcagtatgaacgtagtgatgctataacacgtgacgttgaagcagtgagccaagcaagcagtggcagtggtgctactttaggggagagcctcagaagtttagaggttgaaataggaagtgttgaagggcatgatgatggtgaccggcatggaacttcaggcacctcagaacgtttacctttgggtgatattcaagcagctgctcgatcacggaggccatctggaaatgctgtgccagtaagcagtagagatatgtctctggagagtgttagtgaggttcctcaaaatccagaccaagaacctgatcagaatgctagtgaggggaatcaggagcctaccagagcggcaggtgctgactcaattgatcctacatttttggaggctcttcctgaggacttgcgagctgaagttctttcttcacgtcaaaatcaagtaactcagacttctaatgaccaacctcaggatgatggtgatattgatcctgaattccttgctgcacttccccctgatataagagaggaggtgctagctcagcaacgtactcaaaggatgcaacaacaatcacaagaattagaaggacaacctgttgaaatggatgctgtttcaattattgcaacattcccttcagaaatccgggaagaggtgcttttgacatctcctgacacactactagccacactcacgcctgcactagttgctgaggccaacatgttaagggagagatttgctcatcggtatcacagtagctccctttttggtatgaactccaggaacaggagaggtgagtcctcccgacgtgacataatggcagcaggacttgatagaaacacaggtgatccctccagatcaactagcaagccaattgagactgaaggtgctcctcttgtcgatgaagatggccttaaagctcttattcggttacttcgagttgttcaggggttttcaaagaaatcaatagatgcacctgagccaccatttaggttgtatggttgccatgcaaatatcgcatattcacgccctcaatcttcggatggtcttcctccattagtctcacgtcgtgtgctcgaaacgctcacgaacttggcaagaagccatccaaatgttgctaaactcttgctctttcttgaattcccttgcccatcaagatgtttccccgaagcacatgatcataggcatggcaaggctgttctcctagatgatggtgaagaacagaaaacctttgcacttgttcttctgttaaatctgttggatcagccactttatatgagaagtgtagctcatcttgaacagttactaaaccttcttgacgttgtcatgcacaatgctgagaatgaaattaagcaagctaagctagaagcatcatctgagaagccatctgcacctgataatgcagtgcaagatggtaaaaataactccgacatttctgtatcatatggatcagagttgaatcctgaggatggcagcaaagcccctgctgttgacaacagaagtaacttgcaagctgttttgcgaagtcttcctcaaccagagcttagattgctatgttcattgcttgcgcatgatggattgtcggacagcgcttatctccttgtaggtgaagtgttgaaaaagattgtggctcttgcccctttcttctgttgccatttcataaatgagcttgcacgttcaatgcaaaacttgacacttcgtgcaatgaaggagcttcatttgtacgagaattctgaaaaggctcttcttagctcttcatcagccaatggtactgcagttcttagagtagtgcaggctttgagctctcttgtcaatactcttcaagagagaaaggatccagaacagcctgctgaaaaggaccattcggacgcagtttcccagatttctgaaattaacacagcattggattctctgtggttggaattgagcaactgcataagcaagatagaaagctcttcagagtatgcatcaaatctaagtcctgcttctgcaagtgcagctatgttaacaacaggagtagcacctccattgcctgcaggaactcaaaacttattaccatatatagaatcattttttgtgacatgtgagaagttgcgtcctgggcaacctgatgctgtacaagatgcttcaacttctgatatggaagatgcttcgacatctagtggtgggcagagatcatctgcttgtcaagctagtcttgatgaaaagcaaaatgcttttgtgaaattctcagagaagcacagaagattgctgaatgcattcatccgtcaaaactctggattgctggaaaagtcattctcgctgatgttgaaaattcctcgcctgattgattttgacaataaacgtgcatattttcggtctaaaatcaagcatcagtatgatcatcatcatcatagccctgttagaatttctgtgcgtcgtccatatattcttgaggactcctacaatcagcttaggatgcgatctcctcaggatttgaagggtaggctcactgtccaatttcaaggagaagaaggaattgatgctggtgggctgacaagggaatggtaccagtcgatatcacgagtcattgttgacaagagtgcccttctgtttacgacagtcgggaatgatttgacgtttcaaccgaatcctaattctgtgtatcaaactgagcacctctcatacttcaaatttgttggacgagtggttggcaaagctctcttcgatggtcagcttttagatgcccacttcactagatctttctacaaacacatacttggtgtcaaggttacataccatgacattgaagccatcgatccttcgtactacaaaaacttgaaatggatgcttgagaatgacataagtgatgttttggatctcacctttagcatggatgcagacgaagagaaactgatattgtacgagaaggcagaggtcactgattgtgagttgattcctggagggcgtaacatcagggttactgaggagaataagcatgaatatgtcgaccgggtagcagagcatagattgaccactgccatcaggcctcagattaatgccttcctggaagggtttaatgaactcattccacgggagctgatatctatcttcaacgacaaagagcttgagcttctgattagtggtcttccagatattgacttggacgatttgaaaacaaatacagaatattctggctacagcatagcctctccagtcgtccagtggttctgggaaatcgttcaggggttcagcaaggaagacaaagctcggttcctccagttcgtcactggcacttcaaaggtaccgttggaaggttttagtgaacttcaagggatctctgggccacaaaggtttcagatacacaaggcatacggcagcacgaaccatctgccttcagctcatacttgctttaaccaactagacttgcctgagtacacgtccaaagagcagctccaggagaggttactgttggcaatccacgaagcaaatgaaggtttcggatttggctaa

SEQ ID NO: 27374 - DNA, 240 bp, Zea mays
  Peptide Sequence Number=SeqID_69153
atgaaggagctactgttgggggccttcttctccgccgaaggtcctctaagcaaaaacaccttcggcaagataacaaggaagcaggtagaatttcctgaggtgctaaatattccccgagtttcctacttgggttccatccatctagctatgctttcaaatgttaacctgggtgctccaaagatcaaatctgctggcaacactgcttggttgggttcgcaggctccagattacatatggtag

SEQ ID NO: 27375 - DNA, 282 bp, Zea mays
  Peptide Sequence Number=SeqID_69154
atgccatcacattcagtcgagctgaccagtggctcaactttgatcaccctagcaagccctggggatccttggctgtcgacttcatttagtatgataccacattctttggcatcgtaccgactgaaggaggctcggttcgactacgggtgcaatgccatcatggccaagttcatggccatcccgcactacccgtacatgatactcaacttggaccttacggcatcatcaccgtctgagctgacttccagggagctgtggaatgctttcaggggggctatctag

SEQ ID NO: 27376 - DNA, 795 bp, Zea mays
  Peptide Sequence Number=SeqID_69155
atgcctgcggcttcggcccacgcccactccccaagcctctcgagcctcctgttatacggccaggagagccatggcgaagcagcgcctgcaaacgcaaatgcaaatgcggcagcagcaacggtggaggacgccgcctcacttgagacctcttctgcagtggttgacagtgcatctccaatggagaggaagaggaaggctacagcagaagacagtgctgcaatcagctctcctcaaccaaaggactgcaagcaggagagcaagagcaggagggggaagaggccccgaaaggagaccgaggagaagagcagcactgatgaagacgaggcctccaaggggtacatccatgtgagggcgaggaggggccaggcgacagacagccacagcctcgcagagagggtgaggagagagaggatcagcgagaggatgaggatgctgcaggcactggtccctggctgcgacaaggttactggaaaggccatggttttggacgagatcatcaattacgtgcagtccctgcagaaccaggtcgagttcctttccatgaggattgcctccatgagcccagtgctgtacgggttcggaacgaacagtgaaggccttcatgatcatcacgcaccaaagatgggaggcgtgtcgttccaggaagccgccattgcagtgccagcaggtccagcggcagcggaaaacggcggcacttattacctggtgcagcaagcggtgggggagcaggcaacgaggcaggaggagctgctgctgagccagttggtgttcagcaacatgtgctcgttccagtag

SEQ ID NO: 27377 - DNA, 159 bp, Zea mays
  Peptide Sequence Number=SeqID_69156
atgtccaccacggtggctttggatgctaatgagaacggtgagcccgtggaccagaaggactacaagaaaattgttggctccacttttgcacatttgtgtggggagttgggtcttttactattggctagtggtgttgagcccctttctgcctcttcttaa

SEQ ID NO: 27378 - DNA, 321 bp, Zea mays
  Peptide Sequence Number=SeqID_69157
atgagcaacgcccaacgcgagcgcctcctgccagtggtgtttgttcggggtttccaaggcactttcactgtgtatagtttaggtgacactacctccagtcggtgttgtgctgggcatgctgagttcgatgttcattacggccttattcagaggtgggctgtgaggaagcattgcatcagagtatttgccagccggttgaagcgtgcctgccttcttgtcgcctatgtatccgctgttggctggatcaccttgcagtacagcaaatttatcgggttgaaagaactcttgtcggattctgaagtcatggagaggttcttttag

SEQ ID NO: 27379 - DNA, 536 bp, Zea mays
  Peptide Sequence Number=SeqID_69158
atggagcagtcagcactcggcagtggtggtggtctctccggtgtacggacgaacggtcccggcgttggaccatatgcaagcctaaaatctagcccggcccacaaacggcgcatcaccgccgccgcgggggtgacagacttcccggtggggccgtgggggagacgccaccggcagagtctcgcaggcgcctcccgcaactcccacgagatccgagtatccgactcggacgaaactctcctggctggccaccgtcgcggcgtcgcggcaaccggctgcgcacagggaggccgcacagtggtttacgagggcgcggttgtcggctcgtcgctggtggggctgggctgtggttctggggtgaggagggagcgggcgtggctcggcgattcacttccccatgccttcatcggagaagggtttgttgacggtgcaaacttgttggtcagtaggattggggtgattggagtgagtgtcatggctgttctttctggttttggtgccgtcaatatgccatacagttatctgtcgctcttcataag

SEQ ID NO: 27380 - DNA, 411 bp, Zea mays
  Peptide Sequence Number=SeqID_69159
atggcgatgccctttgcctccctgtctccggcagccgaccaccgcccctcctccctcctcccctactgccgcgccgcccctctctccgcggtgggagaggacgccgccgcgcaggcgcaacagcagcagcagcacgctatgagcggcaggtgggcagcgaggccgccggcgctcttcaccgcggcgcagtacgaggagctggagcaccaggcgcttatatacaagtacctcgtcgccggcgtgcccgtcccgccggacctcctcctccccctacgccgaggcttcgtctaccaccaacccgcccataggatgctagccaggcttgtctccggccaaaagcggcggtttagtttattgatgattgcttctttccttgggggatttattcctgtctggttgttgggagcctaa

SEQ ID NO: 27381 - DNA, 231 bp, Zea mays
  Peptide Sequence Number=SeqID_69160
atggcgcaccggacagtccggtgcgccaccggtgcgccaacggtgcgccaccggtgcgccaacggtcgtttccaacggctagttctgacagagagccgttggactcatggcgcaccggacagtgaacagtccactgtccggtgcacaccggacagtccggtgcggtgtccggtacaaacgggatatgactgtattcgtattgcccggcgagattttactaacatcctctag

SEQ ID NO: 27382 - DNA, 123 bp, Zea mays
  Peptide Sequence Number=SeqID_69161
atgctggcatgcattgcgtgctcctccaaggaaggcgcagaggacggctcccgtgccgcggccactacgacgacgcctcacggcaaagaagccgtcaagtctctcacctcacaggctcgctag

SEQ ID NO: 27383 - DNA, 294 bp, Zea mays
  Peptide Sequence Number=SeqID_69162
atggacatcgtcgttgggcccacgtggggtgcaggcccgtggcctatgggcgctgggccgccggccggctggcctccacccggcgccgcttcggccggagcggaagcttgcctcctcccggtccatcacctgtaccagctgtcctacgatgcccaaccagcggcgaacgccttctacacgcgcccggcgccccacatggtcgcggaggcgggatacacgcagggggaggggcccgtcccccgtcgcgtacagggcccgtgccaggtccagctagcagtagtagtactggggtag

SEQ ID NO: 27384 - DNA, 216 bp, Zea mays
  Peptide Sequence Number=SeqID_69163
atggattgggaacttggggtgagtttggggagggtagtgcaagcaaagtttggtgcaaaggaatattcacaggcgatgtgtgacttgatgaatctctatcagaaggagtcggtggaagattatctcaaggaatttgaaggtgcccactatgccacttcagtgcacaacctgggattggatgagactattgtgtggctcatttcatcaaggggctaa

SEQ ID NO: 27385 - DNA, 492 bp, Zea mays
  Peptide Sequence Number=SeqID_69164
atggccgtggatgtagatgtggaggtgcacggtgtcttttgggtggacgttggcgatcgcgtggagggaaacaatcggtgcgtcgagcacctcctcgacagccaccccaacacctatgttgttggtgacctcattgtccaggtgctggaagggtcgccgcggtgtggtgtggtggtggacgggcgtcacagtgagggtggcgaatggggcttccaaacacgctgtcctcccataccccaacagtccgtaagggaacccgggcggcatggtggaggcgaaggtgacgaatgttgtccctcttgggttgtccagcgggcggagagggctgccagctgctgcatgaggtctatcaggggcctcagggccttggcggtggcgtttgttggcggtgctggtggcaccggcggctgcttattgccgtcgtcggaacccgccatatctgatactagattggaagagccttgggccccgcgaagactccaaaatgcatag

SEQ ID NO: 27386 - DNA, 426 bp, Zea mays
  Peptide Sequence Number=SeqID_69165
atggacaatccagttggaaattacagccgggttaacaagatttttaatgtggattctcaaccaatcaagagaagctttggaagagctggttctatggggttaataggattggagaatctcgaaaatacttgctttatgaacaattcaattcataaaggcgaaatgattctagcagatgatacatgtagaatcttggaaatactagcatatgagtactggagcaaccatctagctcaaaatgattctgttatagtcgatacatgccatttctttcgtgcttgtaacctcatcaggtgtaataaaataaaaggtattaaggcacctaggatcatgcctaaatcatcatcagttgttatctcagatgtgaaatgcgacaacccaaaagaggagggcaaggtgcagcaaactaaaagatgtaaaatgtga

SEQ ID NO: 27387 - DNA, 501 bp, Zea mays
  Peptide Sequence Number=SeqID_69166
atggcgaagagatgggaggtaggtaagtcttcagtcagatccaatggtgtaaaagcaaggctcgtgcgacactcgtcagacgctcgacaaaagcctaattcaggagtggctactctgtcttcttcgtcgtatgagaatcgtcgtgctgacacgccaataccgtcgatcatcatcccctgttcgatctcgttgtcaagcttcgcctcagccttggtcgtcgtctttcacccagcagctcgtcatgagaccgggtgtcgagctcctttcctaacaaatgtcggacctgcccctgctcctgcgttcgccatcaaccttagctcatcggtcacactcgctagatgttcgattgaggactacaacgaaaggccgcgtcgttcaggcaactaccaaatcgaattgagacgtggtacgttaattaatcacgtgaagcggaagacgagccaagtcgaccccaagcgcgggctactccacatggcgatgctgatggacgaacctgcctga

SEQ ID NO: 27388 - DNA, 321 bp, Zea mays
  Peptide Sequence Number=SeqID_69167
atggagctcggccatggcgctaggctggttccatggatgccaggaaggggcaccaagcataggcggcggctgggaggcactggagggaaaggaacgctcggccctgggagctggacggcgcggggaagaatggttctgcgcacagaggcgaccgagcaggagatggggcgctggctgggagagggcagaggaggtcgtggccaaagggagagcagggtgtcggcatgctcccaaggagctcctgctcctgcgcgcacgaagcagagggaggaggagatgccgccatgcctggaggggggtgcgctggagaagaagagctag

SEQ ID NO: 27389 - DNA, 378 bp, Zea mays
  Peptide Sequence Number=SeqID_69168
atgagggtggttgcctttggtgcaatctatgctcagggctacaagttttgctacaaaccgattaagcaggttgtcatgcaaaaattcaagaacaatgcctctaaagatcctctgtcagaccaactgaatgacctcacgatggtacagtgcactgaaatatcccagggtttagtccccctcaccgtcggtgatccgcgcgtccggatttgcgcccgttgccgtgattcatgccaggcacgctgtggatatccacgaggagtgtcctttggttcccctgatgctcctcaacccattcaattgagctatactgccctagatcaccgggaacacttatgttcctccgttgtctgcgctgtctccgtggactggacgatttag

SEQ ID NO: 27390 - DNA, 515 bp, Zea mays
  Peptide Sequence Number=SeqID_69169
tgctacagggagctggttatacgacacctccccagtattatgtgcagttattagaggagcaccgggggcagactgcttacctaacggtgcggtgcatgaatgccctgtatcgtctgcaagccgtgcgagctgaggcaatgtcccaactgatgggcttggtggagtctaccaagatcaccctggataaccgggaggaccttgtggtagacctatccactgagctggtggaaaaggacctccaggtggagcagatggccactcagatccaagagcttgaggatcaagtagtagctagggagaacaccatcgaggttctcgaggaacaacttgaggaagccaaccagcacctggatatgcaccatcaggaaatccaaggcatggaggccgaaggggccaacgaggatgttgacatcgatggaggagaggagccggagcctgcatccagcttggacactgctggctcagggagaccaccttcccccgagtctagcgttgccttgatggatgatctctaa

SEQ ID NO: 27391 - DNA, 510 bp, Zea mays
  Peptide Sequence Number=SeqID_69170
aatcagctcacgagctcgattcctcaggagatagggttcttggcgaatctaagcgcactgcttgcagattccaaccagctaggaggccccattcccgcgagcattgggaacctcactagtctaacataccttcagctgaccaacaaccagctcgtgggctcgatccccggtgagatcggtcgcctggtgaacctgcaggtcatggctctgtctgaaaatcagatttcaggatcagttcctgcatccgttgggaacctgacgaacctcatagagttcaacatgttcagcaacaggctgtcgggttctctgcctcgagaatttcgcaatcttacactgttagtcgacgtcattttgggcaacaactctctctcgggggagctgccctctgacatttgcagagggggcaacctttttgagttcacccttgcaatgaacatgttcaccggtccaatccctgaaagcctaaaaacatgtgcgagcctcgggtatcttaacattggttctaactag

SEQ ID NO: 27392 - DNA, 273 bp, Zea mays
  Peptide Sequence Number=SeqID_69171
atggcgtctaacgtgacggcgaaccatgcaatagattcacgcctgctgattctatgtagaatgccgaggctgaggggttgtctgtacaccagagcccccgagggagaggcctcccatgtcatagtggttgtaaacaacgtcgagaagtcttcccgaggcgctggccgagccatgcgctacaatcgagcggagtgggttgtctgtgggattcgcggcacagtcggtggccgaggccgagctcggggtgagacggagaacttgcccaaggactga

SEQ ID NO: 27393 - DNA, 710 bp, Zea mays
  Peptide Sequence Number=SeqID_69172
agattcgtcagcacagttcgccttccccggcattactggaggacgcctcctccgcaaagctggtggatggttgccaccacaagaagctggaagaagaggtggccagccggcccgcgcgggaggtagagccctggctcgccttgctctccgccccagcaaggatgatgaacgtccttgaagctgagggcaggaccaagaccacagcccggcttgcctctccccatccaggggctggagaccagcgggcgaaagggcgggtagccatgcaggcagcatgcaactgcgccaagtgggcgcacttctccgacttccaacacgcccagcatggaggcccaggcccacgcgtcatgcaaccggcgcgccggatgctgcgcgcaagcgactgcaccgccacccgcgccactgccacgcctcctcgactgcggaaccagtaccgcgacttgaggcaaccctacgcacgacccagtagcgccagcctggcgcgacggggaagcgagcgacgcttcgccttcgccataatgaccgcgtcaaaaaaggctccgagcctccctactgatcagaggttcgaaggctggcccctcggaggggttcaacagccgcctcagagcgcgtgggctccacacccactactggtcagaggttcgaaggccggcccctcggaagggttcaacgaccgcctcaggccactcgggctccgcgcccactactga

SEQ ID NO: 27394 - DNA, 492 bp, Zea mays
  Peptide Sequence Number=SeqID_69173
atgtcgtggagagccgcagtgttgttgctcgcgtgcctcgtcgccgtgacagcggcgctggtggacggcgcgctgctcccccgaactcgcctctgcgcctggctcctgctcgtcgaatctccagccgcgccatcgcagctccagctcgatccttttctgcgcgcgcacgctcctgccgagctccgtgcacgcgcgccccatccctcctgcgctcggaccgcgccctcgctgccggtgctcgccgaccgcggctgtcctactccctgctgcgctcgccctgctcgctctagacataatcccgtcatcgttccgtgcatcgtcatgaaatcccaagcgtggggtgaagacgaagctagcagcatggtattcaccaagtgctcgaacaagtcatcgagtatcatcctcgtctacgccaagcccccaagccgtgaagacactctggtgttggtcacgcgtcaccagctcgacaaaataaatcccatgggtgtctga

SEQ ID NO: 27395 - DNA, 405 bp, Zea mays
  Peptide Sequence Number=SeqID_69174
atggggcgcgcgtgcacggagctcgggaggagcgtgcgcgcgcagaaaaggatcgagctggagctgcgacggcacggctggagattcgacgagcaggagccaggcgcagaggcgagttcggggagcagcgcgccgtccaccagcgccgctgtcacggcgacgaggcacgcgagcaacaacactgcggctctccacgacatcgtcacggacctgtgcctacctggagcttcgataatcacggaagcagggaagctcgcggccgagcagatggacagggacgcgactgggtacgccatggattgggcgcctggcgagcggacagagggaggaagcgagggcgcttgggggaggaaagagagaagcaagggagagaaggacccgcgccattggcgttcgcgagcttga

SEQ ID NO: 27396 - DNA, 534 bp, Zea mays
  Peptide Sequence Number=SeqID_69175
atggccgtcgcgcccctgttccagctcgctcggccatcctccctgccttcagccatggcaccggccgtccctattccatccggcagctcgcctcatcacgctcggctccctggtggctggagctcgccatgggtgctggccgctgctgctttctctgttgctcgtccggcccctactcggatccgttgcgagctcctctggtgctcgcccggccgcgaccttgccgagctccgtccctgctcctgtcgccactggatcaccatcgctgcgcgcgtggttttgaatctctgcgcagactcggccgcgcctgctcgtcgtcattgcagcgcgctcgcttctcgttcttcgggcttcgacgtgttcgtgtttgccgtcgaatcccaccctccccagctcggcactccttacacagtcgtcgtcgctcatattcctccctgcatgtgcaagctccactgtttgatctttgatccgtcgtcgttctccacctccttgcagcgctcggctgttcgtcgtcgtcacccgatcgcgcgatga

SEQ ID NO: 27397 - DNA, 231 bp, Zea mays
  Peptide Sequence Number=SeqID_69176
atggagacagtgcagatgatcggatgggcaaacgtgttccgaacaaccgacaacatggatgacaaaattgaagcctggggaagcttcacggtttcaccagaggttatgtacacgcttgaatttggactaggccgatggccgaagtttgatgaggttcacggcggtgtaaccgcgctggcgagcttacccacgcggtatcgccacggcgatggtccggtgaccgccgactaa

SEQ ID NO: 27398 - DNA, 147 bp, Zea mays
  Peptide Sequence Number=SeqID_69177
atggcggccaaggacaattggagcattgtacgccaaggcggtgcactgcaagacatggttgatggtgtcacttggccatccaccttgctaccgggttggacagtcgagtgggatgccgcctcagcaggagaggaccaggaggagtag

SEQ ID NO: 27399 - DNA, 132 bp, Zea mays
  Peptide Sequence Number=SeqID_69178
atgagctcttccacccccgtgcgtggccagagcgactccgaccacctccaaccgctatccgaccatcgacgggttcgccaggacctccccgacctccgagaccccttcgctggagctagaccaccgctgtag

SEQ ID NO: 27400 - DNA, 510 bp, Zea mays
  Peptide Sequence Number=SeqID_69179
atggcgaaattggatctccggcatcgaagtccccttggtgagaaattgtgcagccaccggttcacaatcccaccaggcgaggccgtgatagacatcctggtggacccagccatccccacggcctgcccccgagggatcgacatcggcgagccggagttttcccccatggcggacatgattctctcacttcctcccatgatggtcgggtatggaggactagaagtcaggaaatggttagcccaatttccctttcacctgtcgaccccaacagttgcacgcctaagctccgtgttgcctcaactaggcatatccaccgggtatctgatacccagcggggtactcggtgggtgcgggtatggatatatattcttgcctgattggcttagtggatatggatatttgtataaggttgggctgcacacatccaaccaacgaagccccaatgtgatgttcgagcaagtgggaggcggtatcatatgcgtgtggcaatggcattcaagcggaacctag

SEQ ID NO: 27401 - DNA, 378 bp, Zea mays
  Peptide Sequence Number=SeqID_69180
atgcgggtcaacctggatcctatagggggattgagggacgccgtaaagaattggaagggattggaaaggatggaaatcctttctattcgctgcagatttccgtggggggcagagcgcgctaggcggccggtgagcgcgcgtgtgggtgaactggactttgggtggcgttggggactcgttgcctcgttgggttggggacggggaggtgatccaagggaggcggagggaggcggagtgcgatggagaggaatctggtttggtttgcaattgcaacggacagttgacttcgatgaccagtgggaccatgtaaccgaggctcagctgtcagtgatgcgggtgtcctatactcctatgggacttctagttctagccttctag

SEQ ID NO: 27402 - DNA, 243 bp, Zea mays
  Peptide Sequence Number=SeqID_69181
atgtctggagaacgcgccaagagggagatcatgacgggcgacaagcctgcaagctcagggaggactctctcaagggagtccggcaacaagtataaggaggaatcctcttcctccatcaagtcaaattggaagggtgacaagaagaagaagaagaagatgaagaaagtggtctactacgagaccgacttttcgtcaccctccacatccggctccgagtcatcgactacttataagcgtcattga

SEQ ID NO: 27403 - DNA, 546 bp, Zea mays
  Peptide Sequence Number=SeqID_69182
atgagcccccccaaaagcgctgcgaggcccccggcatccctgacgagcccgaagaccggcgctaacaaacggcagcggaaggcggcgtcggcggtgccgctgggcgacatcaccaacctcctagtcctcgctgagtccccgaccccgagcaagcccaggaggacagcacgccgggccctccccgctacctctgacgtctccgcggtctcctccacctgctcctcctccgcctccgtcacgcccgcgcccaagccttcctccgccgctgtcttcgaggaggagcacagcgtggtcaaatcgccaaccatctccacagttcaccgcaggaccactggggctcaagagaggtgtaggaggaaccccgcctccgccaacaacaagggcaaggaaccggtcgctgccacggcgagctgccccccgcttgggaaatctgcaaggacccacagcagcctcatcagtgttggtgtctctcgctgtgaggctgtacagttgattgtgattgggaacttgtcacagttgattgtgattgggaacttgttagcttag

SEQ ID NO: 27404 - DNA, 204 bp, Zea mays
  Peptide Sequence Number=SeqID_69183
atggggacgtattcttggctaaggaaaaaggatactcggcccatctccgcatcagttccctgtcatgaaggtagaaagaagcggcccattgcaagcacacccaacttactagaggaccttttggagaagcagagagcatactttgcagatatcgatgcctttgagctggtagaggaagaggtgtcggaatccgagctggagtaa

SEQ ID NO: 27405 - DNA, 1500 bp, Zea mays
  Peptide Sequence Number=SeqID_69184
atggagtcacacgagacatcaagcaaacaaatccaacgccatggcaaggccaggaaggagaggttcctggacttccttagggcggcgccttccaaggacctatggctgcagcgcttcggcgtcaccgtgaccgccccacacgccttcctccgccgcgtcgccaccgtcggctacgtgccggcagcctacgcccgcttcttccccctccgcgcgccggcggcgttcgtgcgcggcgtggactggcgcgccctgcgcgcccggtgcaaggcctgggcgaggcggcccacgaacgcggcgctgctcgtctggctggccttcgtcgccgcgggcgtcgcgttcgtcttcctgcttatgacgggggcgctcgactccgccgtgcccgacgcggcccggcggcggcgctggacggaggtcgccaaccaggtgctcaacgcgctcttcaccgtcatgtgcgtgtaccagcacccgcggctctgccaccacctcgcgctcctgctccgctggtggcgcgacgacgccgccgccgccgagctccgcgccgtctactgcaagaacgccgccggcacgaggcgggagcgcctccacgtcgccgtcgtgctgctgctgctccacgccacgtgcttcgcgcagtacgcctactgcgcgctcttctgggcgttcagcagcgacacgcgccccgactgggccgtcaacttctgcatggcgttcgggctcgccgcccccgtcgccgccgcgctctacatggtctacggaccgctcggcagaaggatcgtgcagctcccggcggcggcggcggcggacaccggagacgacgaggccgtcgcggtgatggccgccgatgaggcgcggtacaccggtggcagagtggcggtcgccaggccggagtgggccggcgggctgttcgacctcgccgacgacccgacggtagcggcgctgtccctgacgtgcacgttctgcatgttcgggtggaacatggagcgcatgggcatgggcaatatgtacgtgcacgtcttcacgttcgcactcctctgcgccgcgcccgtgctggtgttcgcggtcgccgcgcttaacatccacgacgccacgctggggttcctcgtcggcgccacgggcgcgctgctctccgtgctgggcctcacgtacgggggcttctggcgcgcgcagatgcgcaggcgcttcagcctgccggccgaccggtccatgtgcggcggccggccagccgcggcggactacgccaagtggctgctctgcgcgccgtgcgcgctggcgcaggaggtcaggacgggcaacctatacgacgtggaggatggcagcttgtaccacgtgaggggcagcgacgaggacgcgttggaggaggagaagcctggaatggcgcctctagagagggaggggtgcgtcgcgccagcgccattgacggccgacaagacacgcgctggtcgtgttgagtgtgtagttaccgttaaacctccggcgccgctgaggataatgagaggtgaataa

SEQ ID NO: 27406 - DNA, 444 bp, Zea mays
  Peptide Sequence Number=SeqID_69185
atggcattgggagatctcatggcgtccaggctcgtccactcctcgtcctccaggggactgtcgtcctcgccgacgccgccgttgcccaatcaacaccaccaccagaaccacaaccataccggggatggcctcctggctgccagcgggccggagcccaggaacgggctggaggccgacgaggtggataagtcggcgcccgtgccgtacctgccccagctggtcgtgctgtgcgagcagcgccacgagcctgaggggatcgatgaggctgcggccgcagccgcagggccctccaccagtggcctcgtctccaagtggcgccccaaggatcgggtaatggatgtgatgcagattgcagatgccgtttcttctgatgttatactccgctattcactgaattcggcaacgcctgttctcgggggcatctttgggatagcacttagctga

SEQ ID NO: 27407 - DNA, 414 bp, Zea mays
  Peptide Sequence Number=SeqID_69186
attgtaagcgcatctcaagctggagacattcagtttcttgatgttagaaggtcagcagaaccctacctgactattgaggcacacaggggttcacttacagcattggcggttcaccggcatgccccagttgttgctagtggctcagccaagcagatgattaaagtgtttagtcttgaaggagagcagttgacaataattcgctaccagccatcttttatgggccaaagaataggcactgtgaactgcctttcttttcacccatacaaatcactcctatctgctggtgctggtgataatgctcttgtctctatctacgccgaggaaaattacaacagcgtcactgtcaaaggggtgggtgggagcgcgcgctgcgcgagggtggtcatgggagggaatggacccaagacgatttaa

SEQ ID NO: 27408 - DNA, 141 bp, Zea mays
  Peptide Sequence Number=SeqID_69187
atggcgaccccaaggcggctgatgttgcgcgacggtgagccgtttaccgcgcaaccagatactttactgccggcacagcgtcttttccttgtaacagggggtacccctgttttaagaaactttgtcattgccatcctctaa

SEQ ID NO: 27409 - DNA, 321 bp, Zea mays
  Peptide Sequence Number=SeqID_69188
atgcagtggtcagccgatcaccctggttcccatgctagtgtcgtggcaccttggcgtatatatgggccaaaaataaacagggcgtacttggggtccctgggccacgataagggtcacggccctaggctcagtctgcatctcaggtctgctctggacattttgctgctggttttgctgctggttctgtcaggatatatgacatacgctctcctgatagggttggtctataccggccaggcccacacgcacccaaaaacagaaaaaggttgtaagctaaggtttcaacctgggtttaatccttacaaggaacatcttgcataa

SEQ ID NO: 27410 - DNA, 1761 bp, Zea mays
  Peptide Sequence Number=SeqID_69189
atggctgctgagatttgcctttccaagcttcctcagttaattgctgatccaaatgcagagtttcagccaagtccgttttttacggaacaactgacggctttcgaagtgtggcttgatcatggctccgaggacaagaaacctcctgaacagttacccatagttcttcaggtcctgcttagtcaatcacacagatttagagcacttgttctgctcggaagatttcttgacatggggccgtgggcagttgatttgttttcacctatgcatttcattgtcgtaggccctgtctgtcggaatatttccttatgtactcaaactgcttcaaacaagtgcaatggagttgcgtcaattcttgtgtttatatggacaaaaattctctctcttgataagtcgtgccaggttgatttggttaaagatggaggacacacatattttgttaggtttcttgacagtttggatgcttacccagaacagcgtgcaatggctgcttttgttttagcagtcattgtggatgggcataggacaggccaagaggcttgtatgaatgcagggcttatagatgtttgcttgagacacctgcaacctgagaatcctcatgattcacagacagaacctttacttctacagtggctttgtttatgccttgggaaactctgggaagatttccctgatgttcagctgcttactttacaaacaaatacgccagaaattgtactatgcttattgtcggagcctcaacctgaggtcagagctgctgctgtttttgcacttgggactctcctggatactacatcatcaaatggcgctgatgatgattctgactatgatgaaaaggtgaaagctgaaataaatgtagttcgaagccttctgcagatatcttcagatgccagtccccttgttcgatctgaggttgctatagcgcttactcgctttgcattgggtcataacaaacatctcaaatctgttgcggctgagtattggaaacctcaatccaattcattgctgaagtcactgccatcattggcaaatataaataacccaaacaatgtttacagtcccaacaatattctacaaggcagcattggtcctgtgctgagggttggcagtgatagcagtgctgctggtcgtgatggaagaatgtctacaagtagcccaattgcaacaagtagcatcatgcatggctctccccagtcagacgattcttcccaactctctgattctggcttattactgagagagaatgctagtaatggtggtcccggctacactaggtccaggcctgttgataatgtcatttattctcaatttatatcaactatgtgttcttttgctaaagatccttacccaagaattgcaactattggtcggagagcactgtcccttataggtgttgaacaagtagtcatgaaaaatactagatttaatagtggaggtgcacatcggggagagacatctgcttcaaactttggaatggcacgctcttcatcctggcttgatatgaattctggaaacaacttgataaaatttaggacccctcctgttagccctcctcagcatgattttcttccaggattacgccgagtgtgttctatggagtttggacaacatcctataagttcacctgatggcttagctgttccccttttaagctccgctgcagctaccagtaatgctgaactaagtatactccctcaatcaccaatttataactggagttgtggtcacttctctaggcctcttttaatgaacgaatcaagctga

SEQ ID NO: 27411 - DNA, 1782 bp, Zea mays
  Peptide Sequence Number=SeqID_69190
atgccgttcggcttgaggaatgtgggcgtgatgtaccagcggtgcatgaaccatgtgttcggcgaacacattggccgcacggtcgaggcctacgtcgatgacatcgtagtcaagacgaggaaagcctccgacctcctttccgaccttgaagcgacattccgatgtcacaaggcgaaaggcgtcaagctcaatcccgaaaagtgtgttttcggagtaccccgaggcatgctcttggggttcatcgtctccgagcggggcatcaaagccaacccggagaagatcgcagctatcaccagcatggggcccatcaaggacttgaaaggcgtacagagggtcatgggatgcctcgtggctctgagccgcttcatctcacgcctcggcgaaagaggtctacctttgtaccgcctcttaaggaaggccgagtgcttcacttggacccctgaggccgaggaagccctcgggaacctgaaggcgctcctcacaaaggcacctatcttggttcccccagctgccggagaagccctcctggtctacatcgccgcgaccactcaggtggttagcgccgcgattgtggtcgagaggcaagaagaggggcatgcgttgcccgttcagaggccagtctacttcgtcagcgaggtactgtccgaaaccaagatccgctacccacaagttcagaagctgctgtacgcggtgatcctgacgcggcggaagctgcgacactacttcgagtctcatccggtaactgtggtgtcatccttccccctgggggagatcatccagtgccgagaggcctcgggtaggattgcaaagtgggcggtggaaatcatgggcgagacgatctcgttctctcctcggaaggccatcaagtcccaggtcttggcggacttcgtagctgaatgggtcgacacccagctaccgacggctccgatccaaccggagctctggaccatgttcttcgacgggttgctgatgaagacaggagccggcgcaggcctactcttcatctcgcccctcgggaagcacctacgctacgtgctacgcctccattttccggcatccaacaatgtggctgagtatgaagctctggtcaacgggttgcggatcgccatcgagctaggggtccgacgcctcgacgctcgcggtgactcgcagctcgtcatcgaccaaatggaggcctactgcgatgaggttcggtgcctggaagacaagttctacgggctcgagctcaaccacatcgctcggcgctacaacgagactgcggacgagctggctaaaatagcctcggggcgaacaacagttcccccggacgtcttctcccgggatctgcatcaaccctccgtcaagatcgacgacacgcccgagcccgaggcaccctcggcccagcccgagaaggcacccaggggctacacgcacctgttggtcgccatcgacaaattctccaagtggatcgaggtccgacccctaaacagcatcaggtccgagcaggcggtggcgttcttcaccaacatcatccatcgcttcggggtcccgaactccatcatcaccgacaacggcacccagttcaccggcagaaagttcctggacttctgcgaggatcatcacatccgggtgtactgggccgtcgtggctcaccccatgtcaaatgggcaagtagagcgtgccaacggcatgattctacaagggctcaagcctcggatctgcaacgacctcaacaagttcggcaagcgatggatgaaggaactcccctcagtggtctggagtctgaggataacaccaagctga

SEQ ID NO: 27412 - DNA, 309 bp, Zea mays
  Peptide Sequence Number=SeqID_69191
atgggggggctctgcgctgctcgaatcacgagcgttggggtgtcggggcattgcttcgccggccgtggccgccaccacggtggacacgcgccgccgtgtttggtagctggaaggaagaagatgggtggaccgttgactcagctatggatggatgagatcgcgccatcgcgtacccccttcatgtgtcaaagtccgaccgttggatctgatcggatgtacgggatcctctctcggctatttaaatcctgggcgttggtcactgatcgaacgacacgcaatgtgtaccgattcgtcgtagcgggcttttaa

SEQ ID NO: 27413 - DNA, 624 bp, Zea mays
  Peptide Sequence Number=SeqID_69192
atgtccgtgcgtgagtccttcgtcgcggagggcgaggccgattacggcggaaggtgcgacttctacagggtgttcgacggcaacggctgctcgcacgtggtcgtggcgtgccgggaccggatgcatgacctgctcgctggtcatccctgccctagcttggatctcgcccttgctcgtcggtcggccgctcgtccgctgcatcctctcggtcaggaaatgccatgcatccccatcccactctggtgctcgtcggcctcaccattgttgtcgtggccgcgagtcctgttgtcccccagcgtcgtcgtcgggatgtcctggctgcagcaccaacaccctcgacctcgtccaaagctctatgttgggttcgtcagcgtgctactcgtccgcactcctcgcgtccgcgacattgttgtctgtctactcgctggccttatccgtgatcccgttagcctttggtcacctctactcattccatggcacgctaatcacccagcagctcgtcacgagaccaggtgtcgagctcctttcccagcaaacgccagacctgcccctgctcctgcattcgccatcagccttagctcgttagtcacgctcgccagatgttcgatcgaggacttcaactga

SEQ ID NO: 27414 - DNA, 459 bp, Zea mays
  Peptide Sequence Number=SeqID_69193
atggagaagtgcaaaccaatcaagacacccatgcctactaatggacatctcgacctagatgagggaggcacgcgtggatctgccactatgcagccctatccggtggtccaccagacagtgactgtgcactgtccggtgtgcataggacagccactgtacactgtccgcagtcaatttaggatagtgaggacgaagaatgtcacaccgtgtgggggaggagatgacgaggaccttcctcgccccttcagacaggccaccctcgaggcctctagactgcagttcggcttctgccgcctagcacttgaggacacagctctaactccagcaccagatatcagggttgaggatgaggccatcagacagtttgagaatcagggtgcagttgctgatacttcttccgatgatgaggaggatcagggggattccgccacaacctctcgtgccaccttgttctcatga

SEQ ID NO: 27415 - DNA, 309 bp, Zea mays
  Peptide Sequence Number=SeqID_69194
atgatgatgttgatgctagaggtggaagatcctaccctggggatgatgctaatgatgatgatttggactcgaaacgcagatgttgccatggctagaccttctgacattaggacagtgctggcatcctatcaaggtcatgatgttgctgctaagtttattgagcgttcaaaggaacaccagcgggttaagaacgtgggtacccacgttcttaacgttaagaacgtgggtaccgtcgaacttaatggacagccctcgccgacccacgtaggacccataagttcgacggccatctggccccgtcgaacttaa

SEQ ID NO: 27416 - DNA, 270 bp, Zea mays
  Peptide Sequence Number=SeqID_69195
atgaagaaagtggtctactacgagaccgactcttcgtcaccctccacctccggctccgaatcggcgtccgtcacttctaagcaacatgagcgcaagaagtatagcaaaccaccattttttgatggtgaggattattgtatgtggagtgataagatgaggcatcacctaacctcactccacaaaagcatatgggatattgttgagtatggaacgcaggtatcttcggattcggatcatgagcatacagagcacggtcaggacgaagcctaa

SEQ ID NO: 27417 - DNA, 402 bp, Zea mays
  Peptide Sequence Number=SeqID_69196
atggcgtcgctcgccgtgtccggcgcgaggctcggggtggtcgtgcgggccggcggctcggcgggatcgggcggggagcgcaggagtggggtggccttgccgtcggtgctcttcaggaggaaggacgccttctctcgtgtcgttctgggctgtgatggtgctcctggaaaagagctgctgatggccggatgtggcagtgatcacttgctttcatccacagagcctgtcgtggatgctctgcagcggtctgaaggattacagtttgtaattattcggtctgattccacccaatacagagccaaacaacagaattcaggaaagatgattctaattctcaatttggtgctccaatatctacatctgctggagaccaaaaagagcagcacggatagtccgcggtga

SEQ ID NO: 27418 - DNA, 231 bp, Zea mays
  Peptide Sequence Number=SeqID_69197
atggctagtgcagacaaggctaccgggtgtcagcgcaacggagctgtcaggtcatcgattgagacacccattgtgccaccgtcactcgccacgcttgcgaggcctgaagtcgagaggacacaaggagggcttgctgccaccatccttgcaaaccgctcaaaacttctgtttgcttactctagtggcggcaagatagaaaaggaaggaggaagggacggcaatgacatctag

SEQ ID NO: 27419 - DNA, 471 bp, Zea mays
  Peptide Sequence Number=SeqID_69198
atggcgaacgtggcgtgggcacaacacctgcataggggtgatgaagggtggcttgggtcgacgacgtcggcacggaggaggactggtgagagtgggcagagagaaatagagggggagggggcaaaccgaggggtgtcctgggtcgtggacattgaggcgaagctcaccgaggcaacgaacacggcgaggactcgacggcgactgcgaaacaagcttgagaccgaggcagacaacagtggcttcttctccggcgtgcgcacagcgtggggcgaggacgagagctctgcgggtgtgcgagtgagggaggggagtgagtggggcatgacttcaaaaggggtcgggcgcgtggggagaggtggcctagagacgcgcgatgtgagcgcgtccacggtggggcatacgggcgggaggttagaggaaaggagggagctgacaagcgtggtccgcgggtcagcgggagagggcgcatag

SEQ ID NO: 27420 - DNA, 318 bp, Zea mays
  Peptide Sequence Number=SeqID_69199
atggacagtggtttacaggttcgggctgctttgaaatgcgtaacaccctacgtcctggcgagagtctggacctacatccgggccgtcgagcgctccgggctcgagggctcggatgagtcgaagtactcctcggacgaggaggactcctcggactcatccgaggaggacagcggcggcgatggtggtgatggcggcgacgacggaggcgacggcgatggcggcggcgacagcggcaggggcggtgacggcggccgcaagggcgaccatggcagcggcagcaagggcagcagcaagggtggcaacaagaccagtggctag

SEQ ID NO: 27421 - DNA, 291 bp, Zea mays
  Peptide Sequence Number=SeqID_69200
atgccaccgctgcaccacctctgtccctgtgcagcaacagccatgctgcctctgccctccgcagcagcagggattataataatccgtatcttccaatccattattctgccatggatgcttgctgttggagctgacggaaggaaaggggaggctcaaggcaatgttcttcttgcatcaattgagaatatgcaatatgatgttactgtagatgttcttcatactgtgttctcatcatttggttcagtcaaaaaattgttattttttagaagaatggggggacacaagctttga

SEQ ID NO: 27422 - DNA, 1725 bp, Zea mays
  Peptide Sequence Number=SeqID_69201
atggcggtcggccgtcgtccatgtccatgtctgccggcgcacggaccgcaacatcagtgggcaccagctctaaggccttggttcggtgacctcctggggcgtctgtcgtccacgatggacggagcgtccagggccctcaaggatgcgccgcagaggtttctcgatgcgctggttgacgcaaccttcagattcaccgatcaagctctgaattccgccgagagcaatttcgcaccggtcgatgagactggtgaagccatagagatacaccagagccagatccaaggggcgataccggacggtttccccgagggggtgtacatcagaaacggtgacggattcagtcattttcctcttcttgctctgtcagtctccatgagcgagagagagagagaatctgaacggcccgtgaacattgttctaggttccaacccgctctttggcgccctccattccacgtcctcggtcctgggacagtccagggagatctgggtcgagggggagggcatgctccacgccgtctacttcaccaaaagcagcgcgggtcatctatggtcagtctcctacgccagccgctacgtgcagtccgagacgctggagctggaaacggcgcggcacaaaccttgcttcctccctgccgtcgagggcgactctgcagccatcgtcgccgcctacgttttcaactatcttaggtttggcaaggtgagcaaggacatcagcaacaccaacgtgttcgagcattccggcagggtgttcgccgtcgccgagaactctctgccctacgagatctgcgtaggtagcctcgacaccagagacgcctgggacgttggtggggaatgggatcgccccttcacggctcatccaaaggtagctcctggatcaggggagctcgtcatctttggaacggacgcgaagaagccattcctagtagttggagttgtctcagctgatggaaccaaactaaagcacagagctgacctcaagctggacaggtgcacactttgtcatgatataggagtcactccaaagcacaatgtaatcatggacataccacttaccatggacgtcggtagaatcgtcaaaggcggacagctgattcagttcgagaaggaaagctatgcgagaatcggggtgatgccccgctatggcgacgcagattcagctgtctggtttgatgtagaaccgttctgcatgttccatcttgtgaactgcttcgaagaaggcgacgaggtcgtggtacaggcactccgttcgccggactccataataccaggctcaacaattgccctcgacaagctcgactctgaaatgcctgaggttgcaggagatgacaagcccgcgaaacggccaactgccgaggagtttttctttcggttgtaccagtggagattgaacttgagaacaaggagtgtctcaggggagtatctatctgggacagactattcgctggagtttccgatcatcagtagccagtacacgggcttgcagcacagatacgcctatgcgcaagtggtggactcctgtggcaattgtgggaaagtaaacccaaagtatggaggatttgcaaaattctaccttgacgagagaagcaacgcagaggtgcacatagttgatgcgaagagattcgaggatgctcctgtcgcgaaaataacgtttccacgaagagtgccttatggctttcatggaactttcgtcagaaaccaaatgtactacataaataactcatga

SEQ ID NO: 27423 - DNA, 417 bp, Zea mays
  Peptide Sequence Number=SeqID_69202
atggaacagtcccgaccgttttcacggcagtcacgatctggtgatctcggtgggtggttcgctgtccgcgcgcatcatgacacgatgagtttgtgtttgttccagcgtgcggtagggagcgggggatctggttgtcagacgtgcgacctggccgcgcacacgtacgtggatgccgcggaaaccaagaaaacgggcgcgggggcaggtgccagcggccagtgcccgggtggccgtggtggtcccgtgactacgtggcccatggctagagtcctgatccctccgcctggcacattgggacctacgccttgggaacgttgtgtacagatacggaatacggatacaggaccagtggaggcttttctaacttgtggcgcagtgtacttcggtactgttagacctcttttggagagccattga

SEQ ID NO: 27424 - DNA, 231 bp, Zea mays
  Peptide Sequence Number=SeqID_69203
atgtccagctgctgtcgcagggccccctgcctttcccctcgcggctgtagcctcgacgatgtcgtcgaaccttccttgctgcgccttgcaccgtcgatgttccttgggcgttcgataaaatgcctaaccgagcagcttgtcttgggcagcccgttcgcgatgtcgtcgaccccgctagccgtcaatgccatccgtcgcgcacgcgtgttcgaggcaagaccggtcgggtga

SEQ ID NO: 27425 - DNA, 483 bp, Zea mays
  Peptide Sequence Number=SeqID_69204
atgcacctgcccgctcaggccctgcagacaatacccatcacttggttgtttgccgtttggggtctggacctcgttggtcccttgcagaaggcacccgagggcttcaagcacctgctggttgccatcgacaaattctccaagtggatcgaggtccgacccttaaccagcatcaagtccgagcaggcagtggtgttcctcacaaatatcatccatcgctttggggtcccaaactcaatcatcaccgacaatggcacacagttcaccaggaaaaagttcctggacttctgcgaggaccaccatatccgtgtggactgggccgctgtagctcacccgatgacaaatgggcaggtggagcgcaccaacgggtttggccccgagacttccaagtgggggacttggtacttcggctgcgacaagacgcccgagggcgccacaagcttactcctccctgggaggggccgttcatcttcgccaaagttctga

SEQ ID NO: 27426 - DNA, 303 bp, Zea mays
  Peptide Sequence Number=SeqID_69205
atggaggactcggcgccatcgtccgccgcacctgaccctcccctttcccctccaccttccacgcccccgcacccgcacccgcacccgcccgaggaggaggggggctgctgggtgctcgttccggcccagcgaggtcgaggggggcccacgcgcccaaggtcatccactgggacgacctgcagcaggagctcgcgcgcctctggagcctctccgccgcgctccagcccggccaagggaccgcaaggcgcacctcaccgcgcgcctcgagtccgctctacagaatatcccggattcgtaacctaa

SEQ ID NO: 27427 - DNA, 2334 bp, Zea mays
  Peptide Sequence Number=SeqID_69206
atggttgaacttgaactcagggatgatgtccacgatgcagacgcggtgatctatatggaggagcacgacaaactagaggatgcccttgtcaacaacaacctagctgaacaccaagacggcaaagacgaccactacccagtcatgatcaccgtgtccggagaaagcggcatcggcaagacaactctcgtgagagacatctacaaaaagatggagaaccagaaagtgttcgaggtgcaagccatggaaagcttcgcgccttacctgaccgctcccaacatcctccagcagatcacccagcagctgacgcaggacgacaccaactgccctaaagagatggcgcaggagatgctgcagagcaggctgagaggcaagaagtacctgctcgtgatcgacggcgaggtcagcggcactgagtggaagcacttcttgaccagcatcccggtgggcgccaggggcagcagggtggtgcacatcacgcagggcaagccggaagagccgcctagcagctaccaccacgtcaccatcgagctaaagaagctcacggaagacgccgccatggcgttgttccggcagaggctgcccaaggagctgcaggacaagaacctcagcaagtaccggaagagcgttttcaagatcacccaggggctgcctctggcggtggttctcttgtcgggcctcgtgcagaccaaggtgttcccgggcgagtgggtgaaggtcttccactacctcaagtccaagccgtcgacggcgaacctcgagagcatgctgtcggtctgcttcgacgacctcccgcacgagctcaagtgctgcttcctctacttcgccgcgctgccgaccaacaccacggtcgaggcgcgcagcctggtgttcatgtgggtcgcggaggggttcctttcctccaagggcgggaagacgatggagaagatcggcttcgtctacctgtccgagctgatcagccggaacctcgtcaaccgggccaaaatgaacgacgattccagcttcgggagcatgctggtcacgatccaaaccaaagtccacgacttcctgcagatagaagcgcatgaggcgagcttcgtggaggtccacagcaacgacgacatccccacgctgaccagcgctcgccgcctctctctgcagaactacaccgacaagtacgccgtcctggcgcacccgctgccgaagctacggtccatcttctcccagtacgagcaggagcctaacaagggtgaccgggggcaccaccacaggtccaaagggagccgggcgtacatgttccggttgtcccagcaaagggcgatctcgaagatgaagagagacatcaggtctcacatcaaggacctgttccatgggtccgagttcctccgcgtcatcaacctgcagggcatcgagatcggcgagactctgacgagcgccatcggcgaccttgtgcacctgcagtacctcggcatcacgtcgtgctcgctgagacacgtcccgtggtccatcggaggactcaccagcctccagacactggacgtgagggagaccaacgtccgagagctcccgaggtcgttctggatgatcaagaccctgcggcatgtgcttggcttcgtcctcaagctgcccaagcagatcggcaacctgaagcagctgcatacgctcgactccatagacctcgagcaagtttcagaggagacggatttggtggagacactaggagagatgatccacctcgagttcctctccatctggcacgtctcgcatgccaacgtgaaggctctctccgctgccatggagaagctcgagagcctcaggaccctcatcttggaaggaaagatcatcccttcaaacgtcttcaccaccgcctccctccgccgcgtcaagttcatgttcctgagcggggacctgctgcgttcatctgatctagacgacggtggtgaatccttcatcctccctaacctcgccatgctctctctggagaagacgtacgtgacgcaggagttcatcagcaagctgtctgagctgccgtctctcaccacccttgcgctgtaccctggctcgtacagggacaagaaactcgtgttcgcttcggccaagttcccgcgcctcaagaggatcaagacggtcgacgtggaggtgctggagagcgtcgaggttgaggtgagcaaggtccctgagctcaaagagctggagatccactcctacttcacaggtggttatcatcacattgacctgggtagtgaaaggaggaagcgttctcgaaagacgaggatcgtggttgatttgaagaaagtgaatggtgctgttcatgaagaaaatgctgacacttctggatggtggatgatattctcgtga

SEQ ID NO: 27428 - DNA, 534 bp, Zea mays
  Peptide Sequence Number=SeqID_69207
atggccgacaagctggcatctctgtcagcgccggtgcaggtcctgagctccatcttctcatctttcgtcgccacacacggcgcttcgctatcttccatgaacagcggatctcctcccagagaccaactctccggggcaccgccgggcttccaggtcgaaaagaggcccaggcttgagagaaccgtgctggccagcgacatgggcgcgcctccattctccatgcaagcaccacggctgcagcagccggttggatcgatgcccacacaagcagcgacacagatgaaccaagcgccaggcctattcgcaccaccgcctccaccaccgttgccgcctcttctgccaccgctcctgcaacagttcggtcaaagcgctggaggaatgatggggatgggaccgttcgggatgatggctggctccatgccgcctcctccgccgatgtccagcatcatgccagcagtagttagactttgcattgatcccctgaggcgcaagaaagtggtgctggaattgttgcttaatagagctgccctctga

SEQ ID NO: 27429 - DNA, 240 bp, Zea mays
  Peptide Sequence Number=SeqID_69208
atgggacagcgccagacccctagatatgcagtccggacctccaaggttagtcctggaccgccatgtgtgcaagccggacccctggaacgggatccggaccccccccccgcagcacacgcctgcacagacatcctaagctccgtcaggggttgctcctggggtgttgtctgcgggcagggagatgctacgcaaccctccaagttccacggcctcgccgggagccatgaaacagtggcatga

SEQ ID NO: 27430 - DNA, 547 bp, Zea mays
  Peptide Sequence Number=SeqID_69209
atgccatatgttagcgggtttcccatcgggtggcggataggaatttgggatgaccgcaaagtttttggaacccgtattgaaagtctgaaagacggcatttttggtgacaaccctcctatattcgatcacagtgggaataataataattcaaatcctagctctaaccccttaaattccaaagttggaaggaaagattccagtacagtactaaaaaaactggctgttggtggtatgcctgaaaagattgtgactgcataccaatctgtgtttgatcagcattttgatgaagacacagctttaaacaagtgtaagagtactgttagtgttctggaaaatctaaagaaggatatagaccttgctagtaccgaaggtgatccgcctgcctcaacaatgatttctgacctacaagaacaggaaacaatcctgaaacactgcattgcacaacttggaagtgtagatgcagcgaggatatcactgataaaccaattaaaagaagctctcaccgaacaggagtcaaagtcagaggttcttcgcagccagtttgcaa

SEQ ID NO: 27431 - DNA, 258 bp, Zea mays
  Peptide Sequence Number=SeqID_69210
atggatgaaggttggaagaagagaggaactttatctagtgagtgggttgtcaagatcgatgaatttatcgatcgtggttttggtaggaaccaccttgttagaatgtatcagaagttcaggcagatgaagagggggactacgatagaatggaagagatgcttaaggatgtatgacatgagcttctacatgacgattctaaggattaacctccatccaagtggcaaactcaagattaatgtagcaaaacttggtctataa

SEQ ID NO: 27432 - DNA, 576 bp, Zea mays
  Peptide Sequence Number=SeqID_69211
atgtcgattcgccgtcgtcatcttatcggcgtccacgtcgtaacattgtcgctgttgatcactcttgctcctggaactccggcctccgacatgatatataccggcggcaaactcatcgacggcaacaccctagtctcggcaggaggctcattcacgctggggttcttctccccaccgggggagccgaccaagcggtacctggggacatggttctccttctccgccccaaccccggacgccacggccatctactgggtggccaaccgtgaccgccctctcgccggcacctccagcgcgctggtgctcaccacctccggcacccttctcctgctggacggcaccaccaacgacacgaacctgtggaacggcgacgagtggtacctgtccctcgtgggcgctcccccaccgaccccggcccgggaagcttccgcttacatcaccgagctcggcggcggcacgccggagaacgtgatgcgggacagcggcagcgccaagaggtaccggacggggccgtggaacggcgagcggttagatggcgtcccggagatggcgtcgtactcgagttacttcacctag

SEQ ID NO: 27433 - DNA, 240 bp, Zea mays
  Peptide Sequence Number=SeqID_69212
atgtcggtcagcttgcggacgtgggggacgcgcacgcagtacgatactcacggcggtttggtggttgagcttcaaaaccaccctgcactacagatggcgggttttgctgagtttgggcctcataactcggcgacagctgttctgaagggaactagtggcagcacgtggcgtcataaggaagagtgtgtcaaggtgaagcaccttcatgtggagcatgtggcagctggattgaaaacctag

SEQ ID NO: 27434 - DNA, 493 bp, Zea mays
  Peptide Sequence Number=SeqID_69213
cgcctcgtgtgggacgccggcagccggcagtggaactccttcctcaaggagcccagggacgactgcgacgactacgcccactgcggcgcgttcggcctgtgcgaccgcaacgccgcgtccacgtcgctctgcacatgcttcaagggcttcgtcccggcggttcctaaggagtggtccctgagggagtactccgacgggtgccgccggaacgtctcgctcgactgcggcggcagcaaccggagccggagcagcacggacgggttccaggtggtgccgttggtgaagctccccgacacacagaacgcgacggtcgacatggccatcagccttgacgagtgcgggctcaggtgcctcgccaactgctcgtgtgtggcgtatgctgccgccgacgcaaccggaggtggctgcatcatctggaccgactcttttactgatctgcgctttgtagagaagggccaggatttctacctccggctgcccaagtcactactag

SEQ ID NO: 27435 - DNA, 447 bp, Zea mays
  Peptide Sequence Number=SeqID_69214
atgggcaagaacaacaagcgccatcgtgagccgactcctccatccaaggacttcggtgactcggagtactcagaggaggagttctcctctgagtccgaggtgtccccggctcccattcctctgcgtgagtcgtctgatgattcagacgactcccgggggcttgcggcggaggtctggacatacatccgggccgtcgagcgctccgggcttgagggctcgaatgagtcggagtactcctcggacgaggaggactcgtccgaggaggacggcggcggcgatggtgaggacgacgacgacgacaacgacgaaggtggtggcggcggtgacggtgacggtgacggcggcggcaggggcgacagcagcggcgacaaggatggcgacggcggcagcagcaggagcgacagcggcggcggcagcggcagaggcagcaacagggccagtggctag

SEQ ID NO: 27436 - DNA, 333 bp, Zea mays
  Peptide Sequence Number=SeqID_69215
atggctaggaagcttccctggtgcactagcaatccttatgccccccgatctagtagaacgaatgcggagcactccccaaggtacgatagggaaagaacctcaccaagtctgggagcgccgatccactcgcccgcagtgaaggaaaggacgcggatgcgaggtcacggacgccggaacgaaggggagcttcacccgacgaggccctgggcagcccccaagagacacagggatgacccctggccagcagccgagggcccaacggcaacgcaacaaaactccagcatgatgcaccttttattgagggtttcctttagaacacaaattccaatttaa

SEQ ID NO: 27437 - DNA, 455 bp, Zea mays
  Peptide Sequence Number=SeqID_69216
atgcaccaccaggagatccaggaccaggaggccaacgaggacgtcgacatcgagggaggagatgagcctgcctccagtgttgacatccgtcgcaacaatcgtgcccacgtcgtccaaatcccaggaaaaaacggcttcccctctctcccctgctcatcccaacgcttctctctcgcacaacgtcgcacaggaagaaaccgtgttgccggcttggagctcgcgcggagctcaacggcgcccgtcgaggtgaaccctccttctccttcccttccccgccctcccttcttcttcgttgcgatgcgcgtctgggcgtccgtcgtagtccgcggctcgcccatggcggccaacacgaccagcgcggtccgtggctcacccatggcggcccggcgtgcccgagccttggcgcggcctcgccctggtcttggcctcccccgcgcggtgcgctgcgcgcagtg

SEQ ID NO: 27438 - DNA, 252 bp, Zea mays
  Peptide Sequence Number=SeqID_69217
atgaagggttgggctggtggtcttcattttctggtttcgggcttctctcagagagagcgcctcttggttaatgtccagcggctgaagggcacccctggcgctattgccttcttcggcggcatgatgaaggtggttgctcgagctgttgccgaaagtggtcgtttgagttcaccagaggtgggcgccaatgttggtcacttgttctcaaatgttgtaaatcaagaacaaggcaacacaattgtaaaagattaa

SEQ ID NO: 27439 - DNA, 591 bp, Zea mays
  Peptide Sequence Number=SeqID_69218
atggagactgcgcctggggagggccgggctcgcctgcgcgccacaaatggcctcctggccgcaccttggggctcgtcggggggggctcagccatggggatgtggtggtcactcgccggcgaggctcaccagagcgcgcaccgcgcgggggaggccaagaccagggcgaggccgcgccaaggctcgggcacgccgggccgccatgggtgagccacggaccgcactggtcatgctggccgccatgggcgagccgcggaccgcgacggacgcccagacgcgcatcgcaacgaagaagaagggagggcggggaagggaaggagaaggagggttcacctcgacgggcgccgttgagctccgcgcgagctccaagccggcaacacggtttcttcctgcgcgacgtcgtgcgagagagaagcgttgggatgagcaggggagagaggggaagccgttttttcctgggatttggacgacgtgggcacgattgttgcggcggttggacgaacagcgcgggcgagcgcctctgctcgcgcgccgacatgcaggttggcggctgggctgggacacccacgcagctagggtttgggggcgctag

SEQ ID NO: 27440 - DNA, 525 bp, Zea mays
  Peptide Sequence Number=SeqID_69219
atggtcgataggagcagggccgtgctcatcggggtcaccgccggcgtcgcaggccgcgctggtcgcgacggcgggcgtgcttctggccgtctggctctaccgccggcgggccagcgtcgccgcacggacgcgctccccggagtcgccctcggcgacgctgcgggccggcggcgccggtcgcgccagcctcgactccagcgtctccgtctcggtggtctccgagagcgccgccgactggggccacccgccaccgcacaaacgcgccgcgttctgggcctggagaggcggcgccggccacaacggcagggagccgccaccgctgtccgtctccgggatcccaaaataccattacaaatcatcagggatctgcagaaggctaccagcaactttaccacaattcttgggcaaggatcgttcggccctgtgtacaaagctgtaatggccactggtgaagtggtagctgtaaaggtgctcgcgagtgattcaaggcaaggggaaagagagttccagactgaggtattgtaa

SEQ ID NO: 27441 - DNA, 864 bp, Zea mays
  Peptide Sequence Number=SeqID_69220
atgggacatgctttgcctgaaaaaaatgaaacattaaaggaaaaacaaacaaaggtagcattgcttagcaggttgcatcataggaatcttgttaatttggttgggtattgtgtagaaaaaggtcagcgcattctgatttatgagtacatgagcaatgggagtttggcaagacttttatatggcgacaataaacgaagtttgagctggcaagaaaggctgcaaattgctcacgatgtttctcatgggattgagtacctgcatgaaggggctgttccttctgttattcacagggacctaaagtctgataatatacttttggaccattcaatgagagccaaggttgcagactttggtctatcaaaggaggaagtgtatgatggaaggaagtctggccttaagggcacctatggctatatggatcctgattacatgtccacaaataagctaacaaagaagagcgacgtgtatagctttggcataatactttttgaactgataactgccataaatccacaacaaggtctgatggagtacattaatctggcagcgattggaggggaggggagggttgattgggacgagatactggacaaggacctcctagtagggaacatccctgaagaggttcggatgcttgctgatgttgcctaccgatgcgttaacaagaatccgaggaagcgcccctggatatcagaggtcacacaggccatctcaagactcagacagcaccagctgataaagcatgatgcgataactctgccgaggagtgagaccaggaccgtccttaggaggatagactaccagcacgtggagcttagtgacctcactagcatcaaagaacttacgccgataagggcatcatga

SEQ ID NO: 27442 - DNA, 204 bp, Zea mays
  Peptide Sequence Number=SeqID_69221
atgaaggagtgcaacattcaggattttgacttggagaaggcccagcttgacctaaggcatggctacaacagggctgagatgaagttcaatgtgaatcgtgttgataacatgcccctcaaatcaactttggaacccaaatggtcaagcctttggacggagcaaaggtggctgagggacccaggagttgtggggcgtcacagataa

SEQ ID NO: 27443 - DNA, 906 bp, Zea mays
  Peptide Sequence Number=SeqID_69222
atgtccccctttgttctcacattggggaagatatcaagagaattgtctggaaatgaagctgggaggatatcaagagaagtgtttaagattatcctggatgtcccatctgtgggaggaagattaatgcttgtggacatggctggatctgaaaacatagaagctgcaggacaaacaggatttgaagccaaaatgcagacagcaaaaatcaatcaagggaacactgctttgaagcgagtggttgagtctattgctaatggtgattcccatgttccattcagggacagcaaactcacaatgctactacaggattcattcgaggatgacaaatcaaaaatcctgatgattctgtgtgctagtcctgacgcaaaggaactgcacaagacagtttctactttggaatatggtgctaaggcaaagtgtattgtccgtgttgctcatgccgcaacacctagggacaaaatgagctccgaggagtcatctgtagaggagaactggctgaaagtaacatctaaagcgattgttggaactctttggagtagcgttctaacaagcgagtcggagcagatcgcccgcacacaccgtcgcatggcgcgtttcgagcgttcaggcagacaaggaaggttaatgcgagagctaatcaacctatccgtctcgtggtcgtggtctgtgggagagcgagacgcggcactgcgccaccggataagccacagggcgatgcgtcagtgtcccacacgaggcacagcgtcgtcaacttggggacaggcccgccgcgcgtgcagcagcgcacatcaccttcgggtttcttctgtcggtggtctgcttggctcccaagtcccacacagtcgaggttgctctccgtggggtcgaatccggcaaacccatcgcccattcgccccgggcccctga

SEQ ID NO: 27444 - DNA, 1311 bp, Zea mays
  Peptide Sequence Number=SeqID_69223
atgcctcgcaacttggaatgcccagtgcagacccagatggcagtctcagccttggaccgaactcttagcagtgagtatcctactaaaagcaaaagcgagaccaaggttggtggatggaaacgtgtttttgtccaaaccgatgttggttgtgtcctggctattcaattgaattgtggtgacaatgcacatacggtcaaaagaaagctgcaggtggccctaaattttcccactgatgagagtgttctgaaaaatgatctcagcaccattagaaatgatttccctttgcttctcaccaagactttcatgcatcgaagttcctccacaccatgcttgtctcctagtggcaaggatctccaacagcaaaaagataggggctgtccaattgaactgttagtatgcccgagccgctgttctcgaacaaggcagctcgtgaaggatgttgctagggcaatcaagaaaggtgtggatccagtacctatcaaaagtgggcttggtggtgcttactatttcaggaacagcaaaggtgagaatgcagcaattgtgaagccaaatgatgaagagccttttgctcccaacaacccaaaaggttttatagggaaatcccttgggcagccaggcctcaaaagatcagttcgaattggcgagacctgttttagagaggttgcggcgtaccttctggactatgataactctgctaatgttcctccgacgttacttgttaagatttctcatcctgtgtttcatatgaatgaagacatcaattttgctaacaaaaatattgctgatggtagcattcaagctgttagcaagactgcatcatttcagcagtttattcctcacgattttgatgccagtgatcatggcacctcaagctttcctgtttctgctgtccataggatcggtattcttgacatcaggatcttcaacactgatagacatgctggcaatcttctggtaaggaagcaaaccggagcaggaaaatttgggaatcatactgaacttattcctattgatcatggtctctgccttccagagtgtttagaggatccttattttgaatggatccactggcctcaggcatcagtcccattctctgaggatgagctcgagtacatagcaaatcttgatccagtaaaagatgctgacatgctgcggatggagttgcctatgatccgtgaagcatgcctgagagtactaatactctcaaccatatttctgaaagaagccacagcatttggtatgtgccttgcagagattggggagatgatgagcagggttttactgggatggaagatcagccaagtgagctag

SEQ ID NO: 27445 - DNA, 486 bp, Zea mays
  Peptide Sequence Number=SeqID_69224
atggccgttactcacgcccgactcacatctctccctagccatgtacagacaccaggaacggttgaacaagcgtgggtgggagctgggaagcaggggcggccagtgggggcaccgggaggtggagccgttgtgccaaccgagagttggtggcgcggcgccggccgccgggcagggactggtggtgctgccttctcggagtgtggcagcggcggcggcggagcagtgccagatctgcgactccgacggcgcaatccaccattccctggccagtgggggcaccgggaggtggagccgttgttccagcaaccgagagttggtggcgcggcgccggccgccgggcagggattggtggtgctgccttctcggagtgcggcggcggcggagcagtgccagatctgcgaccccgacggcgcaatccaccattccctggcctccgcattgcatcaggatctaacaatcaacaagcaagcttgtccagtctcataa

SEQ ID NO: 27446 - DNA, 309 bp, Zea mays
  Peptide Sequence Number=SeqID_69225
atggagcttgagcccgagggctggtttgtgctcctgtcgtattacatgtcatgtcaggggctatcaggtggcgtgcacatgcataatcatggtggtgaatatttcgacaagaccactgtctcatcatcactgtatgcctacagccctacgtggggtgtggttgacttcatcggttacctggtcatagcctgggagcgagaggagcccccgagcgtctacatcatattgccggagccttcaatacgtctgtcacagcacaggtgcaagggcagcccccgagcctctgcacgggccgagaggatggtctag

SEQ ID NO: 27447 - DNA, 1629 bp, Zea mays
  Peptide Sequence Number=SeqID_69226
atggctgtcccgaactacacctatctaaagttgaagatgcttgaaccatcatgcgtcatcaccgtcggccccacataccaccatgcctacgagtgcgacgtcgagtgtgttgagtacgccaagccactcatagagtccgaggcgctcatcgctgacttggagaaactcgccggagaggttcccgaccccaagaagcatgctggtagctttgagccggtgaaagccatgaagaccgtccccctcgaccccagcggctctgtagtcctggctcggcgaaagctacgacactacttcgagtcccacccggtgacagtggtgtcgtccttccctctgtgggagattgttcagaacagggaggcctcaggcagggtagccaaatggatggtcgaacacatgggagaaactctctcgttcgcccccaggaaggctatcaaatccgagatcttggctgacttcctagttgaatggaacgacactcagctgccgacaactccaatacaggtcaagctatggaccatgtacttcgatggatcattgatgaaaatgggaatgggcgtgggtttgctcttcatctcgcccctcagagtacacctgcgctacgtcatatggctccaatttgttgcatccaacaatatggctgagtacgaggctctggtcagtggcctgcacatcaccattgagttaggggtcaggcggctcgacatccggggagactcccaactcgtcatcgaccaggtcatgaagaattcaaactgccatgatgaaagaatggaagcctattgcaaagaggacagggccactccagtatcagaccggcgaaccccgtacctagagtttctcctccgaggagaactccctctcggcgaggctgaggcctggtgcctggctcggtgggtgaagactttcatattgcttgagaagaaaggagttgtatcgatgcagcccttcaggaactctccagcggtgcatccccatcagctggggatagaaactattaggcgaaatccactcgggtgcttgcggacaccatgctacgcttcggaccctcgttggaaatgccttcaggcaaagtttctactggccaactacggtcgtcgacgccaccagaattgtgcgatcctgctgaggatgccagttctacacgaggcaaatgcacttgctagcttaggccctgcagacaatccccatcacttgggcctttgccatgtggggttagacctcgtcggtcctctacagaatgcacccgggggcttcacgcacctattggttgccatcgacaaattctccaaatgggtcaaggttcgacctctcgccaacatcagatccaagcaagtggtagcattcttcacagacatcattcatcgcttcagggtccccaactccattatcacggacaacgacacgcagttcacagggaagaagttcctaagtttctgcgtcgaccaccacattcgtgtggactggtcagtcggggctcatctgaggacaaacaggcaggtagagcgtgccaacggcatgatcctacagggcctaaagccaagaatcttcaacaaactgaataagttcgacataagatggcttatcgagctcgcctcggtgatttggagtttaaggacaaccttgagctag

SEQ ID NO: 27448 - DNA, 675 bp, Zea mays
  Peptide Sequence Number=SeqID_69227
atgccccgccgcccccaaacagttccgcgctctgctttctccgccgcacgcacccaagcgctcaggacacgccgcacgccatccgctcctcaaccgctgccccaaacagctcccgcactccgtcttctccgccgcccgcccgcccattgcctcacacgccgcacgcactgcgataagaaggctcgtgctcctcgcctcctcctatttctgtggctccacgacgccatgcgaaggcgacttcttttgctggtggcagtccatcataggaatctgcgccgacgagtttgttcgtgcatccttcgacttttcctctccgtgctcgtcgcactcgcccccttccactacctcgctccgccatgggccgcctcctcacatttccccccttcccatctcacccatcgcgctgggctagaggaagaggacgaggaggacacagctccggcttttcctggggtggaagcagaggcggaggctaatgcgttgcacagattggatttctttgttcttatggtgttttgtcacgttacaattagccaaatgatgcagtacgcgtgcaagcgctacttcgtgctcgaggacaccacgctccgctggttcaagtttgcgccatcctccaagcgtgagtgtcgaggtgagatccgcaatcctcctgccagtatattcttccttaattga

SEQ ID NO: 27449 - DNA, 258 bp, Zea mays
  Peptide Sequence Number=SeqID_69228
atggaaacggacgcgattcacagacggagaggattgcgccaggagagagcagggaagcggacgcggttcgtggatgaaaaggattgcaccaggaggaagcggacacgattcgtggatggagagagcagggaatgggcgcagaagcggacgcggtttctcgtggctgggattgcggagactccgtatacgtgctttgtgggggagggcaagagcggagccgtggtgaagccggtggacgccctcggtatcaacatatag

SEQ ID NO: 27450 - DNA, 366 bp, Zea mays
  Peptide Sequence Number=SeqID_69229
atgggcgggcgggcggcggagaagacggagtgcgggagctgtttggggcagcggttgaggagcggatggcgtgcggcgtgtcctgagcgcttggacgaggagtacgacggcctcgtcattcgcgccaagcggacgaggatgggcggggacggggataaggtatggttccatcgatccattgcagggacattgcaagcggctggatccggcgacggagacaaagccgaggaagagaaggccttcttggtgacgagcgccgcggccttcccccacggcatgtccgtcgccgccgcgggccagtcgatggctgtggccaagaaagaggagttcagcaagtcgccgtccaactcgtcggcaaaattttga

SEQ ID NO: 27451 - DNA, 108 bp, Zea mays
  Peptide Sequence Number=SeqID_69230
atggcttttcaagtggttttggttatttggtccaaaataggaattcacaggatgcgaagagaattggaccaaggcaatgaggatgcaacacctcgaaagaagacataa

SEQ ID NO: 27452 - DNA, 372 bp, Zea mays
  Peptide Sequence Number=SeqID_69231
atgaaggaggcgtgggaggcggtgaaagtgatgaagatgggtgtcgatagggcacactacgctataattcactggactgaccggtgtgccaccggactgtctggtgagtcagcgggcaacgactatctgcgcgcaacggtcgactgcaaaagtactgatgaagtgaacagtgcagtggcagaagtcagatccacgaagtcagagggcaccgaactatccggtgtggcaccggactatccgacgccgcaaggagacaaagctccagcggtcgacttcgctccgaaccctaacggttgggtgacgtggcagcgcaccggactgtctggtgcgcccatcgccagaagcctccccaacggctactttggtggttga

SEQ ID NO: 27453 - DNA, 282 bp, Zea mays
  Peptide Sequence Number=SeqID_69232
atggtttcacggcagcgatcactccccgaggatgactcctttatcaaccaagactgcaaccttcaatggcgaggtcgcgaacacggctggcgtgcccacctcggtgacccgcaacaactgcccggtgagagaacactcacagttgccctcgatccctcaccggccgcgctcagatttctacttgggctctttagctggggcgacactcaggacctcggatccaaactagatttaaatttctcttttgaactccagaattgcaaatatcacacaaacttctaa

SEQ ID NO: 27454 - DNA, 417 bp, Zea mays
  Peptide Sequence Number=SeqID_69233
atgaagcgatcgccgcagcatccaatccaaacgcacatccggaatcgatcgcagccagacgatggcgccgacgacgacgctcatcgtcaccgtgaacctggaatgctgccgctgcagcagcaagatccagaagatcctctgcggcattcagcaaggcacctcaggctccagactgtgaggttcttctgctcgatcgatcgatggacttgttcatatgcatgccatgacaatatgacatgttgtactacaacagaaggagagttcaccatcgagaagatcgtgtacgagaaggacaaggtgttggtcacaggcccattcgacgccgacaagctgtcctgcaagctgtggtgcaaggcgggaaggatcatcaaggacatccaggtcgccaaaccaaaagacgaaaagacgaatctctag

SEQ ID NO: 27455 - DNA, 582 bp, Zea mays
  Peptide Sequence Number=SeqID_69234
atggccaagcctcacttgaaggttagactttttattcataaggattcggaatacataacagcttggaaatctaaggcacctcccgacttgtgggatggggagctggtgaagctggtctctcccgacccgcaaggggaggtggtgaagctggcctctcccgacccattgggggagctggtgaagctgggagttggtgaagccggtgttggggcaacatacactgatgtcgatgcttcggccatgaagctaacgcgcaacaggtccctctcaaggggtacaagctggccggaagcaagagtggatcccaagtccctggtggtgattgaggcaagtgccaatatcagtcgtggagctatcccgttgtcagcagccttcacggaggagttggtggcgtcctttggtgatgttatctatgccgaggccaagctcgagcgagacggagttggccgaagtcgagctcgggcgaggcggagtttcctcccgacgctgaggccgacttcggacgaggcagagtttcctcccgagggtgagaccatgctcagacgcgcgcacaccacatccgaagttgttcgagcacaatag

SEQ ID NO: 27456 - DNA, 183 bp, Zea mays
  Peptide Sequence Number=SeqID_69235
atgggggtcctcttcggccttctcttcaacaccaaatatgggtacaccgagtctgctagggaggtgctggaggcgtgccaggatatggatataacttgttcatctggtacacgcttatcgtttggctggaggtggggttcgaacctataccctgatggaagaagggcgggagacactggatga

SEQ ID NO: 27457 - DNA, 132 bp, Zea mays
  Peptide Sequence Number=SeqID_69236
atgaactacgaccgaactgaattcaggcattcacctacactgtcgcaggagcacatggtcactggcgtcgggcaggagcaagatgcagcggcattagcgagcaatacggaggatcggtgggagcgaaattga

SEQ ID NO: 27458 - DNA, 264 bp, Zea mays
  Peptide Sequence Number=SeqID_69237
atggccagttcaaaggataactctgatgtctcccctaataacatcatcaagccaactacgaatgacctatcagttaaagaatatcaaaggctagaagatgctaggaaaatgatgctggcagaactcgatgatctgtttttggctgatttcaaggtcgaccgaaaccagaagctcatccgactgagggaatacaacctggtgagtctttgtcctactacaatcagacccgctgtaagtaaaccctacgacatccaagttctttga

SEQ ID NO: 27459 - DNA, 249 bp, Zea mays
  Peptide Sequence Number=SeqID_69238
atgggcctggatctgggtctggacctcgggctattcgtcgtgcggagcgccggagggatggcggccgccaagggtgcgccggcggagatcgagtcctgcatcaggagcctcgaggaggagcgccagaagatcgaggtgtttaggcgcgagctccagctctgcgtgcgtctcctcgtcgatggatggaccaaagagagaggatgggctaagttgtttattatgtggaaaaaaggagagaggatggactaa

SEQ ID NO: 27460 - DNA, 753 bp, Zea mays
  Peptide Sequence Number=SeqID_69239
atgggatatgaaaggaacagagaggaagactcgccggaggacgcttctcacctatgcgaacttgagtgcatgaggccgcgaactgttacaaatccgagcgcgatgcgctggcttctcaccttggcaagcttgagcgcaggagccgtggacgagcttgagcgcaggagccgcagacggttaccgatccgagcgcatgagctggcttctcaccttggcgaacttgagcgcaggaggccgcgcagaacagcaggagcgagcgtaggacggttacgatccgagcgcggcgtggcgaacttgagtttaggaggccgcgcagaacggcaggaacttgagcgtagcctgcgcaggacagttacgatccgagaacgggggaggagtttgggttgggcctcgggagagaacgtgtacccagattctgtaagggagaagagctcgtctaattggctaatcaaccttcacctgatgcatgaaggcacaacagtgattgcactctccacgacacttgcctggttccataggcaggttctgacattgggcactggacctgaaacaattgacattgtcactggctggggcaggagaagcagggtaactacatcttcactggttaggcaatcgattcaaaagcttctaaacctctttgaatccccattcttcaccacccgtagaaatactggctgctttgtcggctgtggggagccactcaacaagtggttgcagaatccttatgttgggcgcatacatttattgtaa

SEQ ID NO: 27461 - DNA, 1500 bp, Zea mays
  Peptide Sequence Number=SeqID_69240
atggctccggacgcggtgcccatggcggcccctagcgcagctcctagggcggccctggatcccctaggcaaggctccggtggtgcggggaattccgggcaagaaacggagcggcgccgatagcgtcgtggtgacgggtcccttgtgggggacctgccagctgcaaaacgccaaggatcagagacacgaccgcgcaactccctgttccagcgccgaggtccgcgccatcgtcaacaacgtagcagctgcagactccaccaccatcgctatcgcagcagcagcaggctccaccgctgcggatattgcagcagcaaccggttccacccccgccaccttctcagccacgagaggctacgccacctccgccgccgcagccacaggagcccattccgtcatcgccgccgccgcaagggcagccgcagcagcaggcacggtcccggacccaagcgaccagctttcgggggcggtgggcggcttctcccgccagtacctccgcggtgcccaccgttcccagctcggccagtgggtccggcctgacgcccgatgcatctggagctctacctgcgagcccatcggcaggggcctcgacagatgcgcccccatggagcacccggggcctgcagcggcggagccagaggccgagggcccaacggaggacgctccggccagcgcgacgacggagccgatggtggaggactccacgacggctgccttggctagtgtagctacgggaagtctggccatcactgccgccatgagctctacggctacgagaccagcggtgactggggtcccagcagcaggcgccggagctgctgccaaacgggccccggagcctgaggagatagaggccccggagcctgaagaggcgaaggcggtagagatggtgtttggccaccgggagctaccggcagccacatcagaggaggtcccagagagggaaaaatcgatcatcgagagggaggagctgatggcccaaaggctagaaactgtcgatcagtacaaggcctccctcgtgaagaaggaccggatgctggacgggcagctggcccagcagctcgagatggccaaggccttggacgaggcaaccgcaaggctaaaggagagggaaattcaagtggcccaggccaagggagagcttgtggaggagagggcggacctcgcccaccgggaagctgacgttgccaatatggagggcgtcttgaagaagcgggacgccaagatgctggatcgagagaacaaactgaaagcagaaggaagatgccctcgaccagcagaagaggcggacaccacactggtgccacttggggtgagcccaatccgggcagggcctgtcgaatcactttccaacgccctgcccgtactggacactgccttcgaatggcttaggcatctggaccagggcacagcatccggagcggagagcgcgtccgaagcaaccgtccaagatgttgtcgaggttgttgccgcccgcttcaagcgcgaccccgaggacgtttag

SEQ ID NO: 27462 - DNA, 456 bp, Zea mays
  Peptide Sequence Number=SeqID_69241
atggcggcagtgatggccagacttcccgtagctacactagccaaggcagccgtcgtggagtcctccaccatcggctccgtcgtcgcgctggccggagcgtcctccgttgggccctcggcctctggctccgccgctgcaggccccgggtgctccatgggggctgcggcagcttctgtcgggtcctctaccgacggctctgacgtggtggtaccccttgctaccgcatctgtcgaggcccctgccgatgggctcgcaggtagagctccagatgcatcgggcgtcaggccggacccactggccgagctgggaacggtgggcaccgcggaggtactggcgggagaagccgccctaggagaggagagcaagctggcaggtcccccacaagggacccgtcaccacgacgctatcggcgccgctccgtttcttgcccggaattccccgcaccaccggagctag

SEQ ID NO: 27463 - DNA, 246 bp, Zea mays
  Peptide Sequence Number=SeqID_69242
cgatggaatcgtgggggcttacctggtcctggtgaactcacggatcaaattgggaggcaggtgaaagtcgcgcgcgtggggcgcatcccacgcttgttcctccccggcggcgcgttcggcaacgccgacgctggcggcagcccgcagggcagcatcggtgggcatctcatggcggcagatggggcaggagttgcggagcgcgagcttgagcaatatgaaggcggcgtggtagatgtgggcgcatag

SEQ ID NO: 27464 - DNA, 735 bp, Zea mays
  Peptide Sequence Number=SeqID_69243
atggcaccatatgttggttgtgatgtgatccctagaggccttgaaggtcacaggaagatcagcctgggccttcaaatgggttactccatctgcgggtgctgggctgctatcagcttccccaccctttactatgtcactatcccttcactttgcttcctcaatggcatctcattgttccctgagataaccaatccctggtttgtaccgtttgcatatgttgttgtggctgcatactcctgcagcttggtggaatccttgcaatgtggcgacactgctgtcgagtggtggaacacgcaaaggatgtggcttttcagaagaatcacctcatacctcttggcagccatcgacacaatctgcagaatgcttggcgtcaccgagtcgggattcaccctgacggcgaaggtgaccgattcgcagtccctagagaggtacaagaaggggattatgttgtttgggtccctctccacgatgtttgtgatcattacaactgttgcactgcttaacctggcgtgcatgatgctcggggtggcaaaggttttgttgtgtaaaggagcggtgagtctgggagctatgtttgtgcagaccgttctatgtgctctgatagtagcgatcaatttcccagtgtatgaagcaatgtttgtccgcaaggacagtggcagattaccagcttctgtcagtgtaggttcactatacacaaacagatcaacaaatacagtacttgcaatcatgttgtag

SEQ ID NO: 27465 - DNA, 612 bp, Zea mays
  Peptide Sequence Number=SeqID_69244
atgggccggacgaagaggagcttttgcagtgttaaccatgagagggattggcctggcactggttcattctacgggaacctcgacttcggtggagaatgtggtgtccctgtccaaactgtgttctacactccaactgaaaaccgtgcaaagttctggtacgcaacagattacgacatgtttagccttctgcattgctcacatggaagaggacttgagacccgggaccgagcagtacagattcatcgagcaatgccacattggcctcatgaagtttcacaatcacagtggtttttacaaggatttcagttcatgggttgggcagaggctttaccttttgcgtcagacagtgctctcctatgcacagaactatcaaaagcaagcaaagatgctctagagtacctgaggaaggattgccaggaaagtgccagatttggcagagaacttcatgggcctggatgcatcattgttaaaggagaaacaccatgggtccttatatctgcaattcagctatgcacagaactatgcaaagcaagcaaagatgctctagagtacctgaggaagaactgtattgaaggtttggcccgctgtaacaccataaaagccatcaattaa

SEQ ID NO: 27466 - DNA, 726 bp, Zea mays
  Peptide Sequence Number=SeqID_69245
atgagtgatgacaacctcatcattcgtaaccaacccctgtttctatccaatttcactcgagcatggcttgagcacctttcacttgcccaaatccaagactgggatgatctgattagggttttgggggaatttccagggcacatacgtgcacataccggtagaagcaggatgagactctgtcgcaccgagctccccaacgtcactaactcagacgtcattgggtctaacctcaccggcaccacctgtcaagacttagttagcaagttgggtcgcaagacccccaccaaagaggccatcgaggcctttttccacaaagacaaggacaacgggaagcgaaaggaggatgcccctgaggcgaccacccaacgcaaccccaagaagaacaaaaaaaggcgtcgcaggggaagcacgagcccctcgaggcagatcttgtcgccacaacagaacgaaggaaccctcgaggcccccacggaggtcttctccatcgaagcagcaacactaatctatttggactggatcgacagatccatcacctttgaccgagacaaccactcggactacgtcccaaacccagggaagtacccacttgtcgttgacccagtcatcggcaataccaggctctccaaggttatcatggatggaggtagcagcctcaacatcatctatgctgagacccagtcatcggtaataccaggctctacaaacttcactgcccaatgcatgtag

SEQ ID NO: 27467 - DNA, 510 bp, Zea mays
  Peptide Sequence Number=SeqID_69246
atgcccggcgccccgcccagccgtggaccagtcctcgctcgtggtcagcagaaatcacgctggagcagcggcgaaatcggtcggtcgttgaggttgcgaagaaggaagccctggcagagggccccacacggcagcgaaggccaggcgcgcacggataaatcatatactagagtcagtctaattataactcctcaaagagagcaaagatttccaactttctcaaaatgtatttttagggtttacagcagtggatcctcgtcttccatgccagcagaagcagcggcgcctagcatccatgccacgacgacgcgcgatgaggcgagcgagcaggggagggcgctaggcgaggtcgagggcgcgaacaccagagcgagagggcgtgggtgctgccgcgagaaccagagccggaggccacaggcacagccatgggaaccaaagcgagagagtgcggggggaagcaggagggcaggagagcgcgtcgactgggagatggcgagtcctgagagctag

SEQ ID NO: 27468 - DNA, 270 bp, Zea mays
  Peptide Sequence Number=SeqID_69247
atggcgacagggttctctgcgcaaaatgggcatgagggcgtaggtcgcgcggacgacgcgtgtgatcctactagtcttgggtcggatcagactagagatgacaatgggtacccgcgacctaatacccgatggatatttacttcattagggtatatatgtgggctaaatattctacctgttggtctattcttgaacaaaaatcttcatccaatgggtaaatgggtattagaacattcaccttcatccatacccattaacccatgggtataa

SEQ ID NO: 27469 - DNA, 684 bp, Zea mays
  Peptide Sequence Number=SeqID_69248
atggctacaggaaactgcgggaacgacatcaagtctgctttacaccatacggggaagattaccatgcgcttttcaccatacttatcactgtttcaacaactacgactcggactacacctccatctgaccaatgctcaccctcgtgacgacggcggagggccggatgagctcgcggcgaagcatgaggacgtgttgcacgcacgacacgaagcgacggcaaggctgtcgctatgccacgtagattacgccggggctgctgcgggcatggacgacgatggcaatgacgacacgccgaggttacacaggatggttgcgaggttgtgtcggggacacgcgagcgagtcgcgggcacgccaaccacacgcaggccgcgccgagggcacacatgcgggctgcgccgaacgcgagcgcgaagccgcaccgggggcagaagcacgggccacgccggggcaggcgtgcaggggagggctcggcagcgggctgggagccgggctgcgcgcgccgcgctggctagccatcgagccgtcgcgccaggtagaggccgcgctagcaggggaacgttgggttggccgcactgactgtgccgagctgccggacttgccgcgccctgccttgccgcgacctggggctcgcctggagacactgccgtgcttgggtgcacgggcgtgctgccgtgttggctag

SEQ ID NO: 27470 - DNA, 2818 bp, Zea mays
  Peptide Sequence Number=SeqID_69249
tgagttggatgaacttcgtgccaagtacacagtaaggggtgcaggtgctgatcttgctgcgagcatcggcattgacccccgtgtcatcaatatgcacaagaaagagtcggatctcgttggcatccaggagtcaagggacaaagtcatcaggatgctgtctttagggaccaaatatgatgatgcgcatgcgtctcatcaggatctaaagatagtctctatagtcggggttggaggattaggtaagactactctagccaaaacagtgcacgatatgcttaagaagcaattcagcccttctgcttttatttctgttggtagaactcctaatctgaatagaacattcgagaagattctagtggaacttgatgccaagtataagcaagttgacatgaccagatgggatctagaacaatttggaaaagaactgcatgaattcttacagaacaagaggtacttgatcgttgttgatgacatatgggatgttggatcatgggaagcgatcagatatggcttgaagaacaataattgtggaagtagaataatcatgactactcggaattttgagcttgtcacgaaagtagaagaggtttatagattaaaacctctttctaatgaaaactctaagaaactattttacaaaagaatacaaagtcaggaaggagaaagtcttgatgatgaactgtccactgaaatcatagataaatgtggcggcataccattggctatcattgcaatagctagtttgttggttgaaagaccatgtgaggagtggtcaaaagtgtatcactcaatcagtcttgggaatggagacaatacaacaaagatattgtcctacagctactatgatcttccttcttatctcaagccatgtctactgcaactaagcatatttcctgaagactatcagtttgatacaaatgctgcaatatggatgtggataggtgagggtctagtccatcttgagaaagaggagggtagcctatttgtggttggagaaagatatttcaaggagcttgtgaatagaagcatgatccagccgatagaggacaaatatgatcggttggtagaagtattccgtattcacgacattgtatttgatcttatccgtaagttgttgaaagatgaagacttcattacccttttggacagcggtgggcaacattcacctcaagctagtttaagaagagagaagaaaacatgtgtgcctcgctctgactgcaagctacgtcggctggctgtccgaaatcaccatgtgcagcgcttccctgaagacatcatggacataccagaggcgttgaggtcacttaacattatatattgtaatattgcgattatgaccccacttcatagtttcagagtctgtcgtgtgctatgtatagaatacagctatgtaccgatcagcctaaagcatctagggaagttgttgcatctcaagtacctagagctatatggcacgcctgttgatgagctccctaaggaaattgggcatctgaggtctcttcagacactgttattagtcaatactggactagacgagctgccaccggctgtttgctcgcttacacggctgatgtgcctgatggctgaggggttcaaaaggttgccagctgacaagatggggaacctaacgtccctggaggagctacggctagagagcatagttggtcagagtgccacccaagccctagtggcagagcttggcaagctgacgaggttgagggtggtcaacatcaccttttcagaggagcttgaggagagcttgcaagaagcattggtgcaatctctgttcaatctgtggggacttcaggagctagcactttcttctaaatggtcgcagcagggaagcgctatgtggggagactgggagccaccaaggcagctcaggcgcctgattattaaaggtatcatcttctcacgacagcctcgatggatcaaccgctcttgcatggcacacctctgcttcttatctctggcggtgcacgctgttgaagcacaggacctagataacctagcgaggttgccagagctccggtacctcaagctagatggtgtcagctggcctccaaggtatgatactggcccggacgacttcaggaatctgaggttctgcgatgtgggtacaatgctcgtgtttcatatgggcgccatgccaaggcttgaagagctggtgtttggagtttgtgcaggatactggagttgggaacacaatggtgtgctgttggagcagtgcccaacaatggatgtgattgaagatcttgacttgggcctggataacctcctttcacttgagcaagtcacggtcgtagtcgactgttcaggcgctactgctgcaaaagtgcaggaggtggaggccgtggtcatgcgtgccatggaaaatcatgccaaccgtccaaccataaaaatggaacgagtatgtgaaaacttcatcttatctgacaaagagcaggaggatctgcttcagcgacgcattgaaaaggaaggccgcttgctcgagttcaaggataaatctgatgctttcttcatcacattcctgcggttgcttcgacatcctctaaaatccgttatttcccacgactgtgcgggtgccagcatgtgcgaggtgcagaaagtggaaccagcttggagacatgcagccgaggttcatcctaaccatccaagtattgaactgatcagaaaaaacaacgacgaaattgcctcctcatctgaccatcccaacacagagatcaaaggctttcacccagatttattagaaacattactgaatgccaatgatccgaggctgggataccagcttacaaagaagcatattcagaactaa

SEQ ID NO: 27471 - DNA, 267 bp, Zea mays
  Peptide Sequence Number=SeqID_69250
atggagctcgccttgggggccatggccagcttggcccccaagctgggcgacctgctcatggaggagtatgtcgtgcacaagggcctcaagcccgacatcgagtccctctccgatgagcttgtgatgatgaacgccgccctccttgacgcgtcccggattccacctgaccagctcactgcggtggaaaagctctgggcacgcaaggtccgggacctgtcgtatgacatggaggacgccattgacgatttcatcctgggttgtggcctg

SEQ ID NO: 27472 - DNA, 360 bp, Zea mays
  Peptide Sequence Number=SeqID_69251
atgccccaaccctcgccgccactaccctgctccctctcccaagccgccgccactccttctcccaggcggccgacgcccgacggcgtcctcctcccaggcacctatgcaaaacttgtcggatataaatctggaaccaggaagctacacaatatgagtagcataaatctaggactcagtgaaatcagctttgtcaaatataaattagggactagcaagttatgcaataagagtagcataatttggaattttgtgaaatttgcttacatggatcatgattccttgttgccaaaaggaactgtccacattgatctgttcttgagtcctgatgtaattgtgagttcaaatgttgatgagttttga

SEQ ID NO: 27473 - DNA, 420 bp, Zea mays
  Peptide Sequence Number=SeqID_69252
atgtggggctgcagtggccccaacggcgtttgcggtggtgtgtgtgccaacggatctggtgcgttgcagcgactgctgccagggttgaccgacgggaggtgcggcggtgcgacgcgtggtgctgccgctgctcgaccgggaccatgggcccagccggaggtggtggcggtggaggcttgcaccgtgaagtcgaagctgctacgtcaggggatgtggcttggcaatgatgacatggggcgaaccccgcttcttcgtgggcttgtttgcttcgaagatgaggcatttggcggaggcgaggcggtggatcaaggttttggaagtgtcgctggtgaagaatcagagctgtctcgagtggggtatctcgtggcttggcaacgacggcgcgccacagtcttccttctcttctgccggtgtttgtag

SEQ ID NO: 27474 - DNA, 489 bp, Zea mays
  Peptide Sequence Number=SeqID_69253
atggaggtcaggagcccaaatagttggtccgtacgtccagaacagaaaagagcaaaatctgtggtatacaacccaaaggcaaaagggaaggaaagaagacaaggacggctttcacgagccgcgcatgagatgatgtaccaagcagggagggagggcatcatcatctttgaagaagcacataatggcttggcactggcaattgaaggtttcagctggaccaggtgggaactccgggatgtgctgcagagttgtgccacgcggcactttcagcaagggactcggactctgcaacctgcactaaacatcatacaggcacatcaggctgcattcagtaccctggacaagctgcatctcagatgtagtgactgctcaacgttagattggatcttcaatgatgtcctcaacgttagacagtacaatggaatgattcagggacacagaaaaatcatcttggcgtgctgttccatacagcgtgctgccaacagttga

SEQ ID NO: 27475 - DNA, 911 bp, Zea mays
  Peptide Sequence Number=SeqID_69254
atggcgcagggagccttgtttgtgtggaagagggccctcggtggctatccagagttgatgggtcttctggtccggctcgagggcgaggccaagaacgcaattcgcgacaaagctaaggagctagttgtggaggcaggagttggcgtccgcgaatcatccagatgtgccattgttgtgctgccgacgtgcggggagaggaagaagaccgaccaatgggtgttagggcttttcaactcaagggtgatcgacatgtgggacttgacaggaatggtggcatacaacgagatgttgaacgctggcacgggatctgatttagaggaggcgttggttgtcgattccatcattgctaggggtggagaggacatgtcttactgcactgttacagggtgcaaaacaattgacaacaaggacaaaccattagtgctgaaggaactaaaaagggtttggaataaggatgagccagacctcccatgggggcagggagagttttcaccttcaaatacattactggtggatgattcgccctacaaggctctgtgcaacccgccaaacactgcaatcttccccgaaccctacaattacatgaaccagagggatgattattccttggacaatgttcaaaattttgttcgggataacccatttggtcagaagtccatcacagagagtgatccaaactggaatttctatgtgaaaatagtcgataagatggagaagcaaatagttgatcaagtggaaacgaaaatagttgatgaagtggagaggttgcagagtccgagtcccttgctgaaagtgccgcgtggcacaactctgcagcacatcccggagttcccacctggtccagctgaaaccttcaattgccagtgccaagccattatgtgcttctggtaccgaaaagagaaacgctgcaa

SEQ ID NO: 27476 - DNA, 498 bp, Zea mays
  Peptide Sequence Number=SeqID_69255
atgacccccaagggggaatattctggggaggagcaggacacgcataacgagacactattgttccttgcccattgttttgttgagcacctgagcattcctgcttcccattgtttgggcctactcgaccacgtgtcagtcggttccaacatttggcagccaccgttcatgcttcaacaaaccaatcatgtgatggctcccaagaaagcgacttcgaaggccaccacctccctggatgacacgacgaagacagccctcgccgaaaagaaagacaaggcggcccttgtcggcgagatccctcaagaggcactcgaggatggagcagtcaacagcaagcgacctcgcacagagaacccacccttgaaagcatcgttcgcacccaagagccagcgcatcaacatgcaagcttgggtcaggcagatgatcttaaatgaggagcataaagccagagagctggaacaacatattgtagaaatgcagggcgaggacccccttcgctaa

SEQ ID NO: 27477 - DNA, 585 bp, Zea mays
  Peptide Sequence Number=SeqID_69256
atggccaagtcattcatcaaagccctcaaaggtccaactctcacatggagttatatcagctatttgaatagtatgtccgatcagaagagctccaccagaggaaaatcgagtctcagcggaaacccaaggagactccacaatccagtagaacgtggatcaggccttcgcaaccagactcagctcggcaagaccgcgcccagtcccaagtgcacaatatcgcaaatcagcagcaaacaggagataacccccctcgtcgtcaagattaccccctgcagcaaggtcacggtggcaaagcgaccaggggtagaggcagaggccgaggacctcaacaacaatgaagattctattgtctcttccacgacgaagactcatcacacccaaccaggtacttcccagagactaaagcaacaaaggaccgaatggtcaggaccctaccaactgacaaccaaagagtcaccgctcacacttaccaaccccatcaatacaaccaacatcaatttcaaaacgaacaccactattacccccagcagcaaaaccacaacctatttcctcaacaacagtgcctgcaacaccaagaaatcctag

SEQ ID NO: 27478 - DNA, 1416 bp, Zea mays
  Peptide Sequence Number=SeqID_69257
atgagcgaagtcttgaagagccccgctttaagcaacaagtcccttcgcttccaagccttcgtcagttctccgaccgaggctttgccttcggtacgggttgaagggatgtcaaatctcgattccgcgacgccggcggctgcagtggcggagatagggacggcggagcgggactctaccaccgcttctgtttcagctttaaatgggacacatagatgcaagaagaagaagataaagaagaatacgactcgggagcagcaagagttacaacttgatttggattcaacattgacagcagaggcggagggacaagtagaggcaaagggaaacgaggtggaggagcaggatgccactgatgctgttgcttctgtgatggaggggacagcaaaatattatgaggaggactccaaggtgaaggtcagtctgatgcccgagaaggaagccaacaccactgttgtttcagctgataaatctgaaaatggttgcacagatgtggtaggggcatcaggacatgctgatatcaatatggatcccataaatggtgatgatctaagtagtgctcagtcaaaggcaaatgatgctgatgttttactgaagaataaggatggaaacaagggggataagaattgcgctgagaacagcgtcttgttgcaggagagctctgcaagaagaaaaagacggaggggaaaaagaaagtggggttcagccggtggaggaccaggcttctcttctgataatggaggcgtggttgctgagcatagcctgcattcttcagcaaaccatggtcttagctgcatatgtgctccatgtttagttgaggcacatgaaaagaagatccaaaatatctactcaccaagaggatcactggtaaggtttcaaaggaagaaactcctgatcttggaccttaatggtctgctagcagatataaatcaagattaccataatgcacacttggcacatgcaaaggttcgaaccaaattagttttcagaagaccatactgtgacgattttctgagattctgcttccagaattttgagctaggaatatggtcatcaaggaaaagaataccaatttgttctgggcttctggcttccctgaggaagccagagtttgtgagatcagcccctgtgcgcggcccagcctgggtcacgacggcgcccccgcgccgccgcccttcccgcgcccaagctccaccttacaacctgcgcgatcttcccggtaggatccgtagtcctaccaatctggcatcagaggactcgacgatcatgagttcttctgccacctccaagccgccgtcgccaggacagcagccgccgccatccatgagcccgtccgcggcgccgatcacctccctgaccgcgacccctgcaccgtcggaggccatggcgctcggccctccaagcgcggtcgtcaactag

SEQ ID NO: 27479 - DNA, 228 bp, Zea mays
  Peptide Sequence Number=SeqID_69258
atgaacaatatggagttttatatactggaccccagtccaggttttaaatccacccctgcaagggtggaggacacatatgtcagtgtttgtgacccgattgcgcaccacagggttacccacgtgatgcttttggttaggacgacgtcgttgactgcgactcgatggttatatgaattacaaatgagttgcgatggtgctcagaggtcgtggatgatggctagtgtgtga

SEQ ID NO: 27480 - DNA, 1644 bp, Zea mays
  Peptide Sequence Number=SeqID_69259
atgggctacaattgcttgtttacaaatgttgatgtatctgtctttagaaggagtgatggttcattagtgtttaagggtgtactagatggcaaactctacttaattgatttttcgaaagaggaggccgatctagatgcatgcttaatcgctaagactagtatgggctggctgtggcatcgccgtctagcacatgtagggatgaagaaccttcacaaacttctaaagggagagcatgtgttaggactaaccaatgtatgcttcgaaaaagatagaccttgtgcagcttgtcaagcagggaaacaggtgggaagcactcatcacaacaagaatgtgatgaatacatcaagaccattggagcttctcgacatggacctctttggacccgtcgcctaccttagcatcgggggaagtaagtatggtcttgttattgttgatgatttttcccgcttcacttgggtattctttttgcatgataaatcagaaacccaagggaccctcaaacactttctaaggagggctcaaaacgagtttgagctcaaggtgaaaaagattagaagcgacaacgggtccgagttcaagaacttacaagtggaggagtaccttgaggaggaagggatcaagcacgagttctctgctccctacacaccacaacaaaatggtgtggtagagaggaagaacatgatgcttatcgacatggcgaggacgatgcttggagaattcaagacgcccgagcggttttggtcggaagctgtgaacacagcttgccatgccataaaccggctctacctccatcgcctcctcaagaagacctcgtatgaacttctaaccggtaacaaacccaacgtttcatactttcatgtatttgggagtaaatgttacattctagtgaagaagggtagaaattctaaatttgctcccaaagctgtagaagggtttttgctaggttatgactcaaatacaaaggcgtatagagtcttcaacaaatcatcgggtttagttgaagtctctagcgacgttgtatttgatgatactaatggctctccaagagagcaagttgatcttgatgatatagatgaagatgatgtgcgaccacaggagcaacaggagcaagatcaactgtcttcctcaacgatggtgcatcccccatcacaagatgatgaacaagttcctcaagaggaggcgtgtgatcaagggggagcacaagaagaccaagttgtggaggaagaagcaccacgggcccctccaaactcaagttcgagcgatgattcaaaggaatcatcccgtcgaccagattttggggtagaagaggccttgctagatccagactgggtgttggccatgcaggaagagacctgcccaatatgcaagaaaaaggaacatatcaagcaagcaatctcagtaggaaattttgctctttcgttgtcgaagcacactgcattcctggtacgccaaatggcccagcaaacaacagctagccccactgattgcactgattaccctgaggaaaaatattgccaccccaaacccatactgatcaaggcttcctggtcaacaatccctcgcctattatctgctcatcatgtctacagagcacaaaagctccctaagtcgtctattaaaatcagtattaagaacacttcttga

SEQ ID NO: 27481 - DNA, 432 bp, Zea mays
  Peptide Sequence Number=SeqID_69260
atggctagaaagtttggggtgtggtggatctgctcggtaggatggaacagaggagcgctaggagggacgggtcgtgaggaagaggcaagggacgagggcggggtggtggccctgagtacgggcaaggaagacgtcggggaagagcgccgtagacagggagcagacatagagggcagggatgatgacgctgcggaggtcgcgacggtcatggagcgaggctccgaggacgaggaggaccgggccgcacgatgtctatcacgatgggggaagaaggtagaggcaacacgaggtgggggcgggggcgctgggaggggtgtcgcggggatggcggggcgcgtgcgatggcttcgcgagtcacaggcggtgatggtgcggggttggagggggctggagcgggcgcatccttccccgactcgtgcggcatcactgtga

SEQ ID NO: 27482 - DNA, 1188 bp, Zea mays
  Peptide Sequence Number=SeqID_69261
atggcgggatctggcttgagcgacggaggcagtaccggagggggaggattgggcagcagtggaggaggcagacgcggccgtggctgtggaggagcaggccgattcggtggtgcaggaggagccgaacgtggtggaggaggcggactcggtgctggggtaggaggcggacacggcggtggaggtgatgcaggcggacgcggcggcgactactggccagctgtgcctgcacgtgcgagagtcgtcgcagatccgttagcgtcgaccatgttcagctgcagggacgagttgccttcatcgttcggccaaggggaagatgtagttccagggaatggatacttttcaaacatgatgatggatgactacgttgaaggagaatttgataataatagcaatacatgtcctgatattcagccacaatcaatgcaagttggaccaatagtccccacatcgaggccaaaccataagagatcaaaaaatttcagtgatcaagaagatgaaattttggtttcagcgtggttgaatatcagtatggatcctgtggtaggtaaagatcaaaaagtaggaaggattcagttaagacgacagagtggtactacaatgcaagacatggttgcacaggcatgtgcgttgtacaagtccgaagatgaacatgaaaaaggatttcaattcatgcactgctggaataagctcagattacaacccaaatggcttggtaaagtagatgatttggctgctcctaaaccttcaaacaagaaacaaaagaccactcgtgaaggggatgccaatagaacattaccatatgaaaccaaagaatctcaagttcaagtcgtagagaattaccaattgacccggcctcccgggaagaaaacagctaaagcagcactagtacaagagaagaggaaaagtgtgactgtagcaatagaaaatttgtgggctgcaaagaaagaaagtgatgccgagaaagagcagaagaaagaggagagattcaataaagcatttgcacttgaagttgatcgagttaacacaaaaaaggcacttctcgaggtgaggaaagaggagattgaattacagaagcgaagagatgaagagaggataataaatatggatcttagtgggttgacagaagagcaacagagttactacacgaagttgcgagctaagattttggaccaactttctgatgcttag

SEQ ID NO: 27483 - DNA, 276 bp, Zea mays
  Peptide Sequence Number=SeqID_69262
atgatggaatggatgaagggtggcgacgcgtgcgggggcggccgagtttatgcgcggctggagttgcgtgcagttggggcggcgccgaggcatggggccgcggcgggccccgcgcagcagcgtgtccggccggaggacaggttgtcggtggtgccgtgtggcctggtggttgggcaccactcgcgggtcgcgctcagcatcgctggaaatggaatgcccgcttcgcactcgcaccggatcttttgcttcggggcggagctccgaaccgcattctga

SEQ ID NO: 27484 - DNA, 453 bp, Zea mays
  Peptide Sequence Number=SeqID_69263
atgacgacaatccgtcggttctgctgcgacgacctcctccgcttcgcctccgtcaacctggaccacctcaccgagacgttcaacatgtcgttctacatgacgtacctggcgcgctggcccgactacttccacgccgccgtcagccctggcggccgcgtcatgggttacagtatgtctctcaagttagccaaaaaacttatgaacttactggaggaaatcagtgataagatggataaggcctacttcgtggatctctttgtaagggcatctaacatgccagcgataaggatgtatgaaaagcttggttatgtggtttatcgaagggtgctccggtactactcaggggaagaagatggcctcgatatgagaaaagcattatcacaagatgttgagaagaagtccatcataccactcaagaggccaattacgcctgatgaacttgaatatgattga

SEQ ID NO: 27485 - DNA, 1068 bp, Zea mays
  Peptide Sequence Number=SeqID_69264
atgtgccttataattgatgaagctgatcggatacttgagcaaaatttcgaggaggacatgaaacaaatatttaaacccctccctcaggacagacaaagtgttcttttttctgccacgcagactaaaaaggttcaagatttcgcgaacttcacgtttgggaaaaatgaagaacgacaacggaaacttgtttatgttggagttgacgattctgaattaaagctctggcagcctaccgttgagggcttgcagcagggctactgtgtcattccaagcgagaaaaggtttcttgttctgtacactttcctaagattgaaagcgcgcgaggcgcagacggcgaaggccgccctaagaggggaagtgggtgaggagcagaagaaggtgaagatcatggtgttcttctcgtcatgtagctcagtcaaattccacgcagaactcctaaacttcctcgggatcgagtgttacgagatccatgggcaactgaagcagcagaaacgaaccagtacattcttccgatttctgaaggaaaaaagtggcatcttgttgtgcactaacgtggcagcacgtggccttgatattcctgaagtcgactatattgtgcagtacgatcctccagatgacccaaaggattacattcacagggttggtcgtaccgcacgaggtgataaaggcagaggaagcgcattactgttcttgctaccggaggaattaaagctgctcattcacctgcaggcagccagaatttctctgactgaatatgtgttcaccgaaaagcatgtcccaaagtcactatcacagctctctgccaaggaagcctataggtcctaccttttggcatacaactcacactctatgaaagatatttttgatatccatcagcttgatctcaagaaagtagcggcgtcattctgttttaaggagcctccgaaagtgaatctagacctggagagcagcgcatcaagacatcgaaagatgaggaaagtgttcggcgggcagagccatggaattggcgcttcaaacccctatggaaggagaggcgtatatgatcgcagcaaatttgcaagattctga

SEQ ID NO: 27486 - DNA, 543 bp, Zea mays
  Peptide Sequence Number=SeqID_69265
atggcgccgcctccgtcgtacccggcctcctccacgatctccgcctccgtggccgcgtcggtcgaggaagaggacgacctctatggccgcctcaagtcgctccagcgccacatggagttcgtcgagatccaggaggagtacgttaaagacgaacagaagaacctcaagcgcgaactcctccgtgcgcaggaggaggtcaagcggatccagtccgtaccgctcgtcatcggccagtttatggagatggtcgacggcaacaacggcatcgtgggttctactacgggcagcaactactatgtgcggatcctcagcaccatcaaccgcgagctgctcaagccgtcagcatctgtcgcgttgcatcgtcactccaacgctttagtcgacgtgctgccgcccgaggccgactccagcatctccttgctgggatcgtcggagaagcccaacgtcacctacaacggttctgcttcttcatttggcaggctcccatatctgtcgatgttattgattgcactgaacgtcttccttattatggtatacaaatag

SEQ ID NO: 27487 - DNA, 405 bp, Zea mays
  Peptide Sequence Number=SeqID_69266
atggttggcatcgaaacaaatgttcagttaattgtatctattgctgtttcagaatattttcatttttttccggcattatgggaaaatagcagtttgtattctgttcacgacagattggagcatattctattcatcggagaaaggatacctagctcagatggaggtgaatcactggtgttcaccatgagggactgggcgacaactataggtggacctccgctgtgggcgcatgtggggagtttgtgttgtagtggtcgagcatctcgcgtgaacacttcctcaagagcggcggcctcggtgacacagaaacctcgacgacgcggcactctggctcctcgtgagcaatggccgccgcatggtgacgaggaggacccgttcggcgactgggcgctagcgcgaagttga

SEQ ID NO: 27488 - DNA, 420 bp, Zea mays
  Peptide Sequence Number=SeqID_69267
atggcggcccacggcgaccaccaattcgacctctctctcaccctctgcttctacgcggaagtaatggaactacggtctggcgaaggttgggcgaggattgcggtggctgggctcttttatggccgaggtaacgctccagcggaggagggggaggtgactcggagtctgttgcaacggaactccgagatccccggctgcatcatccccaccgcgtcgctgggaggaggaggaccgacatcccggtcccacgagtcaatgggtgatcaaggcacgcgatcggtcatgggaagggcaaagaggactggccaccaggacccacatgtaagcgccataactaaaggaaaggggaggggaaggagatgggctgtgtggcgtggagaaatggaggagtgggctgaattccccgagcggcccagttag

SEQ ID NO: 27489 - DNA, 270 bp, Zea mays
  Peptide Sequence Number=SeqID_69268
atggtgaggtcactccgcgcgatgctttgtaccgatttggggaaagtttcaaattggcgagctctggtggacgatttgaggcacgagttgatggattgggtgcttgactacttagcggagccgacaacatgctcaatttataggatccctgagcggtggcctgtgaatttgagatggcgcggtggcggccggagagggaaggagctactggcgcaagcaattcgtggatgttaccgtggcaaggccaccggcgatggcctggctaactaa

SEQ ID NO: 27490 - DNA, 657 bp, Zea mays
  Peptide Sequence Number=SeqID_69269
atggggcttgctgctgtggaccggcaccgctgcgcagatcggttgacgctgtcgcggacagcgcacaagagcacatggacagaggtccggccatggcagagagggcgcaaagaggtggagctgcaggggaaaaatagcagtggagccgctagggaaggggatgacgcagataggagatcggggcgccatggggctatgctcctgctgtgcctgctgggaccccaagctgccggcaggtgggaaaacgagcagggagctgcacggctgggaaacaggggcgccatgggaggagctggaaaaattctaggcatcatccatgggaagtggagctcgcgcccatggattggaggacagggagcagatgtgtcgcgccctggggaggatggtcaataccaggaagggggaggaattgatgtacccgccaatccacacaaccggagggtacttagacaacaacaacaacaagcagatatgaatcctccaaatcctccaccggccggaactgctccagtgattgcagcccagatgcagatgatgcaacaaatggctgatactatggcagatatgcatgtgcagatacgacaggaatgccaagagatgttccaggaaaggcaagatacgcggaaggagatgggccaggagaggatggggcgatag

SEQ ID NO: 27491 - DNA, 144 bp, Zea mays
  Peptide Sequence Number=SeqID_69270
atggcgttcaggcgaggggtcctgcattggaggtgtatggtagttgcgatcctttggcagatgggtaatgatacacccagcccaggtgaagagcaagtggtcgaagaggagccgccctataatgaagcatatgagttgatctag

SEQ ID NO: 27492 - DNA, 279 bp, Zea mays
  Peptide Sequence Number=SeqID_69271
atggctgtgatgggttcaacatcagaaaagatgtacatctgtcaggaaccaaactttgggattgtaaatgataaagacgagaccggccttaccttgactccctcaggccggcatatccttgagagtctttttattttgtcgggattgtccgaggtccttaggacaaggacaactgggtgtgagacagtaaggttgagctcacatacgttcatagctcaacaagctgtggggaataatgtgcatgaactcgccaaaggtgggagctcatgtgaagtgtaa

SEQ ID NO: 27493 - DNA, 303 bp, Zea mays
  Peptide Sequence Number=SeqID_69272
atgggcatcacactggcgcgggagcaccagagggcgctgcacacggcgaggcggactaatggcagcgcggatcaactccggcgagcaatcacgcgggcaaaaagggcaataacggccgaattaagggcgcaggcagagcgagagagcgaggggcctcggctgagggcgcaaatgcgcaaggggaggtgggcgagcagggcgcggggctcaaaaggggcgcaggcgcgaggacgtggccgagaatgcacggacgtgggcgcgtccacggtgggggatcgtgggcgggaggttggggatgactga

SEQ ID NO: 27494 - DNA, 456 bp, Zea mays
  Peptide Sequence Number=SeqID_69273
atggagcaccggagcactggagcagggaggagggagcaccggagtactagagcagggatgaggggcaccgcaccactggagcaaggaggagggaacaccggagcactggagcatggagcaccggagttcgccgtgcgctgcatcgcgactccgagaggacccagagagcactggagcagggagcacccgagtttgtcgtgcgccgcgccgggaggagggagcagggagcactggagttcgctatgcgccgcgcatggagaggcaggagccagggatggagggaccccaagactgagagagcagggagcacaggagttgaacatgcgatgcgccgagaggagggagctgtcacacccggttttggaagacaaaccgaatgtgaaccgtgtacgtgccaggatcagaactcatgtacacagcgattacataattggacatcatcacacaaatgcttaa

SEQ ID NO: 27495 - DNA, 309 bp, Zea mays
  Peptide Sequence Number=SeqID_69274
atgtcgacgaccggatatggagggagctcgaggatgcacggacagtggccatggcaaggcgagtgttggatgagctcgacgaccggcgacgagaggagcacgaacgtgcgtctagcggtcgagcaggagtacgggaacatagggacaatggtcggcttggtgaagctcgagcacggtagacgcgaccaccaagtttggcgcgagcatcggcagggggcgaacgtgccaggaacgaagggagcaggcgagatggcctggttcctgagcgagacggggtggggaagaagaccggctgatggcgccctgtag

SEQ ID NO: 27496 - DNA, 465 bp, Zea mays
  Peptide Sequence Number=SeqID_69275
atggacgtctggctcctcgtctcgctccacctattcgctattgtgccccacccagtggatagcaacactcgccactctagacatcaatatcatgttcgtcgagctcgcctctactcaccccatggcgtgctggtcacccagcagctcgtccctagaccgggtgtggagctccctttcacctcgccgacgtgccacgccgagcccctcctcagccgcgtcgggtctccaagccgatccctcagggtgcttgtcgttgttctgtcgcctcgcctcgatgtcggcccctacgtgacatctctgacttgtgttcgcgctggcaaaaaggatcccaagagattgtggtggagcaacctcccgatcgacgcccaccaagtgctcggcgaaaggcctgaacaaggatcatcgtcgtttgggtggattgctagtcaatatggtaaccatactctgattcgctattctagctaa

SEQ ID NO: 27497 - DNA, 354 bp, Zea mays
  Peptide Sequence Number=SeqID_69276
atgaggctggggtcgaagcgtagggtggcggagggcggcacggagcccgaggaggagtcctcggaggagtacgaggtggaggaagtgtgcgaccacatcgcctcctcccgtggcagccgcctcgcgctcttcggctccgacctccgcctcggccgcttccgcccgcgccggcgcaggcgccgcccgctcgccggggaaggcgccgcggagggcttcctccacgacctcgtcatccaccccgacaacagatcactatgcgacattcagctgacggtgaacagactgtgcgtcagcatcccagccgcaaatttctcgctacttgatgatgagcccgccagatacgcaagctactag

SEQ ID NO: 27498 - DNA, 294 bp, Zea mays
  Peptide Sequence Number=SeqID_69277
atgtccaaggtcaagaaccattcaggtcataaacccctacgacaggggccacgagggctcatcttcgccactgcccctactcccaccttctggttcattgagattagattacaattacgtattattcctggcccgattaaggaggtctctaactgtgtctatgagaacgagcatgtcctgctcggtgctgttccattccctagcgatgttctccggctaaagacgcttggagtttgtggtgtggtgacacttaatgaatcatacgagaggcttgttcccacatccctatacgag

SEQ ID NO: 27499 - DNA, 2532 bp, Zea mays
  Peptide Sequence Number=SeqID_69278
atgccgttcggtttgaggaatgcgggcgcgacgtaccagcggtgcatgaaccatgtgttcggcgaacacatcggtcgcacagtcgaggcctacgtcgatgacatcgtagtcaagacaaggaaggcttccgacctcctctccgaccttgaagtgacattccgatgtctcaaggcgaaaggagtcaagctcaatcccgagaagtgtgtcttcggggtgccccggggcatgctcctggggttcattgtctccgagcgaggcatcgaagccaacccagagaagatcgcagccatcaccagcatggggcctatcaaggacttaaaaggcgtacagagggtcatgggatgtcttgcggccctgagccgcttcatctcacgcctcggcgaaagaggtctgcctctgtaccgcctcttaaggaaggccgagagtttcgcttggacccctgaggccgaggaagctctcgggaacctgaaggcgctccttacaaaggcgcctatcttggtgcccccagctgatggagaagccctcttggtctacgtcgctgcgaccactcaggtggttagcgccgcgattgtggtcgagaggcaaaaagaagggcatgcattgcccgttcagaggccagtctacttcgtcagtgaggtattgtccgagaccaagatccgctacccacaagttcagaagctgctgtatgctgtgatcctgacgaggcggaagttacgacattacttcgagtctcatccggtaactgtggtgtcatccttccccctgggggagatcatccagtgccgagaggcctcgggcaggatcgcaaagtgggtggtggaaatcatgggtgaaacaatctcgttcgcccctcggaaggccatcaagtcccaggtgttggcggacttcgtagccgaatgggtcgacacccagctaccgacggctccgatccaaccagagctctggaccatgtttttcgacgggtcgctgatgaagacgggagccggcgcgagcctgctcttcatctcgcccctcgggaagcacctacgctacgtgctacgcctccatttcctggcgtccaacaatgtggccgagtacgaggctctggtcaacaggttgcggattgccatcgagctaggggtcagacgcctcgacgcccgcagtgactcgcagctcgtcatcgaccaagtcatgaagaactcccactgccacgacccgaagatggaggcctactgcgatgaagttcggcgcctggaagacaagttcttcgggctcgagcttaaccacatcgctcggcgctacaacgagactgcggacgagctggctaaaaatagcctcggggcgaacgacggtccccccggacgtcttctcccgggatttgcatcaaccctccgtcaagatcgacgacacgcccgagcccgaggcaccctcggctcagcccgaggcgccctcggctcagcccgaggcgccctcggttcggcccgagcgcctcgagcccttgtcgggaatgccttccggcaaggcttctactggccaacggcggtggctgacgccactagaattgtccgcacctgcgaagggtgccaattctatgcgaagcagacccacctgcccgctcaggctctgcagacgatacccatcacctggccctttgctgtatggggtctggacctcgtcggtcccttgcagaaggcgcccgggggctacacgcacctgctggtcgccatcgacaaattctccaagtggatcgaggtccgacccctaaacagcatcaggtccgagcaggcggtggcgttcttcaccaacatcatccatcgcttcggggtcccaaactccatcatcaccgacaacggtacccagttcaccggcaaaaaattcttggatttttgcgaggatcaccacatccgggtggactgggccgccatggcccatcccatgtcgaatgggcaagtggagcgtgccaacggcatgattctgcaagggctcaagccccggatctacaacggcctcaacaagttcggcaagcgatggatgaaggaactcccctcggtggtctggagcctgaggacgacgccaagccgagccacgggtttcacgccgttcttcctggtctacggggccgaggccatcttgccaactgacctggaatatggctccccgagtacgagggcctacaacgatcaaagcaaccaagctagccgagaagaatcgctggaccagctgggagaggctcgggacaaggccttactacactcggcgcggtaccagcagtccctgcgacgctaccacgcccgaggggtccggccccgagacctccaggtgggcgacctggtgcttcggctgcggcaagacgcccgagggaggcacaaactcacgccccccctgggaggggccattcgtcatcgccaaagttctgaagcccggaacatacaagctggccaacaatcaaggcgagatctacggcaacgcttggaacatcaaacagctacgtcgcttctacccttaagatgttttcaagttgttcatacacctcgcgcccacgcaaaagtttag

SEQ ID NO: 27500 - DNA, 207 bp, Zea mays
  Peptide Sequence Number=SeqID_69279
atgacgtgggcggggcaggccacagcggacggtgccaggggcggggcgttgaccgagctgcagcatgccacggtggtggcgacccccgccacgagctccccttccaagtgcgacgccgagtcctcgcccttggtagcgtcccccgcattgttggatgggcggcgacatttgcttcggatgggcggcgacagtggtaagaaaccctag

SEQ ID NO: 27501 - DNA, 318 bp, Zea mays
  Peptide Sequence Number=SeqID_69280
atgggcggaggagggccgcacagtgtagaactatcagctcaatcacgtcgtcagggagcttcggaagtacagtcgcttgaaacacaccatggagatagatcggtcacacatcgttttctgctttacagctatcactttctaagattatcggattggattgctacactgggagcaatatatgatggtccaggaatccaggattactccaatgccaatgatatgcagcttgcacttgcacatagaagttgctcttttttgtatggtaaaggtagggtttcaatagagtggggcagtgggcctgattggtatggacaataa

SEQ ID NO: 27502 - DNA, 141 bp, Zea mays
  Peptide Sequence Number=SeqID_69281
atggccgacgatggagcgacgtgtggcaacgtgtgtgacgctaggcccgcacgaggtggcgcaggcagagtcggcggggccacgcctggcgcaggcagagtcgacagggccgagtatggcgcaagcgaaggcgatggggcc

SEQ ID NO: 27503 - DNA, 282 bp, Zea mays
  Peptide Sequence Number=SeqID_69282
atgtcgtgctcgctgacaggcagggcccgtagatcagcgggagggggcgtgcgagcgagtggggcggtgctaacaggtagggccgggctggcagagggagatggggcaacgggcgtgggtgagggaatcaacaccgacagaagctccatgaaaaatcaaaaaacaattttggtggcgagggaggaaaaccctacccgtagcgatatgcaaaagccactccacgcgcagctgctgttcttctggatacagaaacgctacagaacggaattttattcggtgtag

SEQ ID NO: 27504 - DNA, 171 bp, Zea mays
  Peptide Sequence Number=SeqID_69283
atggcggatgtttggccttatcacacgatgtgtccctgttcacagcgcccagctccaacttcggttatggatggagggtcatcgggtgcggcagtccttatagtgcccagggacgagtggaccccgcatgttggcgcttaccaacagctgtgcgcaggagcgtgggcttag

SEQ ID NO: 27505 - DNA, 411 bp, Zea mays
  Peptide Sequence Number=SeqID_69284
atgcctaggatcagacgaccagctaaggtcagcttccctggccaccagcggcggcgccgcttgtgcccacggtggggacccgccggagacgatggtgcgggtgcgctgggggccccaaggcgccatgaagggctcagggaggtcagggagagtgtggtgagcatgagcattgacacgacattagtacggaggcaccagagggtagcagtccacgacggggtggctcggcggcggcgcaatttcactccggtgaacaatcgcgcgcaaccaagagcggggaagggaaatacagggtgggggaggttggttacctcgagggaagtcttttgggcccttgaactatggcaaagacgtggcgaggggtcgagatggaggcggtggcgctgcgactgcacggaggaggaacagtga

SEQ ID NO: 27506 - DNA, 99 bp, Zea mays
  Peptide Sequence Number=SeqID_69285
atggcgtactcctcctgtttgaatcggagtttgaaaccaaacaaacttctcctcaggaggatagatggggcaattcagggaccaggagattggatctag

SEQ ID NO: 27507 - DNA, 246 bp, Zea mays
  Peptide Sequence Number=SeqID_69286
atgccaactccgacgccatcacctgggaagaattcagagatagcttccgtcagtaccatgttccagcagcacctgatcgatagagcgatcatgacggagaggaagcgcaaagagatggaggatcgcaagtgcaagatcagtgggcctcagcctaggagcagcaatcgccctcgtttctcgggcaacccacctcagcagttcagacagaactataacacccctggtgttactgttactaaaacttga

SEQ ID NO: 27508 - DNA, 1128 bp, Zea mays
  Peptide Sequence Number=SeqID_69287
atggcgacgcccacggccccatcccacttacccctcgccaccgcctccgcgtccacctccttccccgaccgcttcctccgcacgccgtgcgcgctgcggccccgctcttggccccgcctgcgggcgggctccgtcaaggagtggcgcgagttcgaggacgacgcgggcgccgtcaaggagtggcgggagttcgaggacgccgtcaggaggaaggacctcccccgcgcgctccaattcctgcagtccgtggagcccgcggcggtgcaggtcgcggtccccgtgccgccggggcgggactgggaggtgctcgacgcctgcgtcgacgccgacgacatgcgcctcgtcggccgggcgtaccagttcctcgtcgaccgcggggtcctcgccagcttcggcaagtgcaagaacatcgttctggaatggccaagagaagtgacaccaacggttttgaaggagatgaccggtttggaagctgaaaaacttgcgccgaagaaatggggtctgtcgggaagttcaccgtatgttctcattggatttcttggaggcgtatcctttctactaacacaaggggtcgatctacggcctaaactgagtgctgtattgggattagcagcagccgatgcaatgttgctcggtgcttatctaatgggctgcccgatacgaggagtcattttggatccatttgtggcattgcgaatgggcatccagggccaggcagggactcaattctgggatgaaaagatggaaaaagaactagctgagggccatctatcaagcacagcgtttgacagttcttggacctcatttgacctgcgaaatttggagacggacggcaggtactgcatgattatgttcgccggaattgctgctgaggcacttgtttacggggaggcagaaggtggagaaaacgacgagaacttattcaggagtctgtgcattctactgaacccaccccctgctgttgcacagatggcgaaccgagctcgatggtccgtcatgcagtcttacaacctcctgaagtggcacaagaaagctcatagagccgcagtcaaggcgctggaagacgggcacagtctcagcgttgtgatcagaaggatagaagaagccatcgcttctgacagcaaataa

SEQ ID NO: 27509 - DNA, 363 bp, Zea mays
  Peptide Sequence Number=SeqID_69288
atgggaaatagggagaaaagaattggaaaaagacttggctcggtgcagccaaaactcagctcagtctggcacaccggactatccagtggtgcaccagacagtgtccggtgcgccaggctggtctccggtgaaaaggctgctctcgggaaaagatcagcggcatacgacaataattcatcggactgtacgtcgaccattggcacggttgactgttgctcttttggctcactggacagtccggtgaattatagcggagcgattcccaaagaatcccgagaatggccagttcgcgagtgccttggcctgggcacccgcgaacacaaggttgacttgtcccttgtggtttgggttgatgatgagtga

SEQ ID NO: 27510 - DNA, 1182 bp, Zea mays
  Peptide Sequence Number=SeqID_69289
atggagtgggcgtcggcggcgtacacggctgcggcgctggtgtgcgccgcggcggcgagcgtggtcgcgctcgcgcacatctaccgccacctcctccactacgccgagcccatctaccagcggttcatcgtccgcatcatattcatggtcccggtaacgctctccgcccgccgctcacacccacaacaaaccctcgccgccaagggcgccctcgcgccagatctgtcgcccgccttcgcgggagcttttccgtatcgggctgcgactgcgatggaattgaagtacaagtactcggtggaaagctttgctggtgcatatgattctgatcagaaggtatatgctgtgatgtcattcctttcccttatcctccctgacaacgcgatatattttaattctattcgagagatatatgatgcttgggtcatctacaattttctctcactctgcttggcatgggtgggaggtcctggtgctgtggtggtaagcttgagtggccgaaccctgaaaccgtcgtggattctgatgacttgctgttatccagctattcctctagatggagatctacttcggccatataatcctgtcccaaaattcatcatgataaaatcagtggtgtttctcacatattggcagggtgtcctggttttccttgctgcaaaatctcgatttatcaagaatgctgataaggctgctgatcttcagaactttgtgttgtgtgttgagatgctaatagcagccattggtcacttatttgccttcccctacaaggaatatgcaggtccgaatgcccgcccttcaggtggtttcagagaaagccttcttcatgctttgaaattcaatgatttctaccatgacactgttcaccagtttgctcctacatacaatgaatatgtgctctacaatcacaatgagggagacaatgcagaaacgaaatttccctcagggagcactgccacaagtgggcagggtgtggagttggctggcattaccgttgtggcttcaaacagtccagtgacatcaagtgtatcatgcaaccaggcagatcaggaagagacaatgacaaccccaatcaaggacaaagtcgatcctggagggctttatgatctcacagaattgcttgatgtggatttgtctagctacccagacaaggttcctgcaatcaccgatgtaagaaaacaatga

SEQ ID NO: 27511 - DNA, 930 bp, Zea mays
  Peptide Sequence Number=SeqID_69290
atgaagttcgggaaggatttccggaaccacctggaggagacgctgccggcgtggagggacaagtacctcgcctacaaggccctcaagaagctcatcaagaacctggtgccacgcgagcccgcagcggcccctcctctccctcctcctgcccccgccgccgccgacgccgaggggccgggggctcctgccgccgcgcacgggaacgtcaacctggccaactggttcgccagcatcctcgacgcggagctgcacaagctcaacgagttctacatcgagagggaggagtggtacgtcatccgcctccaggtgctcaaggagaggattgagcgcgtcaaagctaagaagaatgacgcttttacatccaggagtgaatttaccgaagaaatgttagagatacgactagtgaagatactgaagaagtatgacaagagaacaggtggcgtgcttagcctgcctttcactcagcgtgttcgtcaccagccatttttcacaaccgaacctttaacaaggcttgtccgagaatgcgaggctaacctcgaactacttttcccggtcgaagcagaggttcttgagcctagttcatcctcgaatctagaaccgcacgatgtggctaggtgtgacccgacatcgtcccgcgatgtggaaaccgtcgatgtttaccgaagcacactcgcagctatgaaggcgatacagggccttcggagagccagctctacttacaaccccctgtctctgtctaggttcttccacggcgaggatggcgaaccctgctcgggtgccatcacttctgagagctcactgtcagattcctcaacggactcccagattcaggatgctgggaaggatgataaggaggtgcaatcaaattcgagggaccagaatgctgcccaaggggaacagaatgcacaaggcgagccgactgatgaataa

SEQ ID NO: 27512 - DNA, 870 bp, Zea mays
  Peptide Sequence Number=SeqID_69291
atggataccgccgtcttctcccccgccgatctcttccacggagtcgacgacagcgacgacgaccgaggttgctcactgcgtgctcctaacggccggtgctgtcttttctgcgggattgaagatgagatgcaaatctgctccgatggggagaagccggtggcgttggagtatcaggagagagtccacgacttccctgacatgaaactgagtgtaagggagttctcatgtcatgagcttaacgccaacctgttgtggccggggacattttcatttgctacttggctggttaagaaccggtcaattttggatggacgacgagtcctggaattaggaagtgggacaggagcgcttgcgatctttcttaggaaggcatttgaggtgaacattacaacctctgattatgatgacggcgaaattgaaaagaatatatcttacaattgcagagcgaatgccttagatgtgttacctcatattagacacacgtggggagatccatttccagtttgcacaccaaattgggacattgtcattgcaagtgatatcctactctatgtcaaacagtatgacaacttggtcaagacagtgtcctttcttttgaatgagtacaagcagaaggatcacaaatctggctgcataaccatcactgacaaatcagggacacaaatatctgcaaaaccaccggtgtttctaatgagctggcgcagaagaatcggcaagggtcatcaatcactcttcttcgacgggtgtgagaagacgggcctgcaagtgcagcacctgggtgatcttgtgtaccttattagcaataaacaagaggcggattttgtggaaacgaagtcagacggtggcagtagtgaggggatgattttttga

SEQ ID NO: 27513 - DNA, 360 bp, Zea mays
  Peptide Sequence Number=SeqID_69292
atggctgagctcgcccatggggaagagatggggaccgcgcaccacagaggagcagaggtagggtgccatgagggaggcgagccacagtggaggagctcggccatggagatccagaccgaccatagctggctgatcgatctccaactgaccaggcaaagaaactcaccgctgatgaaggtggagcagtgggagggaggcgaccaaccgtgcctcctcgcgggcgtcgaggccgttctgcgcacgcggaacaaaagagcaaccgcagaaagcgagggcgggtgggcggtgggcgggggccgtgtgtcaggacgcgccgctctctgtcgggagcgggcggtcgggaggcgaggggtgttaccg

SEQ ID NO: 27514 - DNA, 102 bp, Zea mays
  Peptide Sequence Number=SeqID_69293
atggagggttcccgtgtcagtgagatgtactcctgtccagcaacactgggcagccccacagctagtgggtcggctcagtccaagcccatcgtcatgccctaa

SEQ ID NO: 27515 - DNA, 1152 bp, Zea mays
  Peptide Sequence Number=SeqID_69294
atggcaacgaccgcagccgcgcagctgaagcatatggcgtgcagcagccgcagcccggcctccatcctgaactatccgcggacaccgtccccgcagtgccagtgccaggtacccaggccgctggcgagcttcctcggcgccgtccaccacaggctcaaaccaagcatcgttgtcgtgatggagcaggacgccaaccacaacgccccgccgttctccgcccgcttcgctgaggcgctcggctactacgcagcgctcttcgacagcctcgacgccgtggcggctgccagtgccgccggcgaccgggcgcaggtggagaggatggtcctgggggaggagatcaagaacgtactgctctgcgaaggagccagccgcctcgagcggcacgagaggctcagccagtgggcgatgtacatggacgcgtcagggtttcgccgcgtcccgctcagcttccgcgccattagggagagtgagctcaagctcgcgagcttcgggatgagtgcatgccgctaccaggtggaaagcgacggccttctgctggggtggggctccacgcgtctctactctgtatcggcgtggaggccaaacaagtctgggaccagagagtgcgcccagcggcgagcagccatctcccaggcgcgcgccaccttcgtctcccacgcccgcaccgccaggctggccggcctccacggcgacgcctgcctcgccaagctctgcggcgtcatcgcggccgacgagaggcgccacgaggccgcctacacgagggcgtccgacagggccttcgaggaagacccggacggcatggtgcgggcgctcgccgccgtcatgcgcgccaaggtcaccatgcccggcgagctcatggccgacggccgcgacgatcgcctcttcgatcacttctccgcggttgcgcggcgctcaggggtgtacacggcggcagactacgccgacatggtggagcatttcgtgcgcaggtggaaggtggcggagctcgacgctggcctgtccggcgaggggcggcgcgcgcaggactacgtgtgtggcctgccgcgcaagatacgcaggatggaggagctggctcaagaccgtgcggctcaaatggaggcccagtcggtatgcttcagttgggtgttcgataggcccgtccgcatccactga

SEQ ID NO: 27516 - DNA, 174 bp, Zea mays
  Peptide Sequence Number=SeqID_69295
atgatgacaacagcggaaaatagcgacgcattccaactgcgcccggaaccgtcagtggtaggggccaatagcaataattatttgtacatgtggataactaagaaccgcaatggaaagcgattttcgctgtcagttgggctaagaaaaccgtcagtggaaatcgatttttactag

SEQ ID NO: 27517 - DNA, 480 bp, Zea mays
  Peptide Sequence Number=SeqID_69296
atggacctctccgtgttggcatcacgaaatactgttggaatcacactgtctagaagaacgcactgcggagtccatatcaatgctgattgccggtacaaaggcatatacaagtcaaatagtagcaatggtgatgatggcgttggctatcggatccgaccaataatatatctactcgagctagaaggaaaattatcatcagtggacttaacaacctttcaacaagcagcagtcggtgatccagcagctcctctcgcgcaaggggacgccgccgatagtgatgtgctcgaggggggacgccaccgcgctgctgtatgccccagtggatcctgcagagtcattgaagttccggaggttgcatgttgtctccagccagtgattaacataatcccattacagttgctcgcgtacaatctgactgttctccagggattcgatgtggaccaaccacggaatctggagaagagcgtgaccacgcagtag

SEQ ID NO: 27518 - DNA, 414 bp, Zea mays
  Peptide Sequence Number=SeqID_69297
atggagaaggcatcaagggcagggagaacagttcctgcgaaggtgaaattccacgaaatgactgaaagtggtatcacaatggacaaatggacatacaacataggtcttagtgaacattttaaaaacagatgctctgttgaagcaatcttgctttttgaagaattacgtgcaatgaatgtaaagatcaatatcaaaactctcaataccatgatagctggaatgtttcaaaccaggagagttgaagaagctaaggatctgtttgcttctatctcgagaagtgggctggtgccttctgttgtgacttacagtataatgatgacaaatcttataaaaggattggtggaggaggcagatgatatgttttcatccatggagaatgctggccgtgagcctgattctcgattgtgtggttag

SEQ ID NO: 27519 - DNA, 1095 bp, Zea mays
  Peptide Sequence Number=SeqID_69298
atgagggactgcatactctggagatggacggcagatggaacatactccgctcgctcatcatatcgtatccagtttagaggctccttcgggctgttccggtccaacctaatctggagagtacatgccaaaaacaagtgcaaggttttcgcatggacaatgacaatggaaaaagttctcaccgcggccaatttacaaaaaaggatctggcctcaccaagatcactgcgctctatgtaataggccactggaaacttgtatccatttggcattgctttgccctttcgccaaatctgtttggagattcaccttggcttgggggcatttcgatgaaaatctagtcattccgtcagaggagcctaccaagctgacccggtggtgggaggtatcccaagccaagattccgataggtgaaagaaggcgattcaacggagtagtgatttacactatttggaacatctggaaagaacggaacagaaggttcttcaccggtgcttttgaaacggcagtgcaagttgcctctagagcaaagcaggacatcgagcaacaaagaagggccttaacttggaagatggttttttctgctcttgctttgtctcaccgcgaggtgatttggtacttccaacatgtggggattgcatcatcaaaatctactcggttgaaaactgttgacattgatgcgacagacccaactattggtttcttactagatggaataggcaaactttgttgcctggttcgtaaatacatagcagcaataaaaggttatgccttatcatatttgttatccagtgctggaagaatacggttcttacttggtactccaggaatggttgctcttgacctagatgcgacactgaaaggcctttttcagcaagtcctccattgtctggagaacattccaaaacctcagggggaaagtgttcctgacattaccgctgacttggctgatttgcgtaagcactggctgtcaatcttgatgatagtcacatcttcacgatcctcgataaacattaagcacttggagaaggctactgtgtctactgggaaggagggtttggtgtcagaaggcaatgctgcatataattggtcaaggtga

SEQ ID NO: 27520 - DNA, 550 bp, Zea mays
  Peptide Sequence Number=SeqID_69299
atgggcaccggcgacgacgacaccaagcccgctgccatggaggtgacctccacctcctcgccgccgtcgctcccctccccggcggcgccaccgccgtcgctgctgcgctccgtgctgctgtcgtacgcgtacgtggggatctggatgagcctgagcttctcggtgatcgtgtacaacaagtacatcctagacccgaagctgtacaactggccgttcccgatctcgctcaccatgatccacatgggccttctgcgcgctcctggccacaacgcttcgtccgcgtcctcccgcgtcgtcgacgtcccgtccctccttccgcttcctcaccagaagaaaaaggccatgacggccgcggccctctacgcctccctcccgggctcccccattgggggcgctctttccgcgttctcggttttgggtttccaaactccgcaaaaatttacctctcccgtctcctttatcaaaaagcctcaggggcttgaagccccgttgcggtttaattcctctgcggggggggttccgacagaagctttccgccggcgcccttttg

SEQ ID NO: 27521 - DNA, 1233 bp, Zea mays
  Peptide Sequence Number=SeqID_69300
atggggggctggaaccggtcgctgtacgtgacgggccaccgtgaccgctccgccggcgcttcgcgtactcctctgcctccgccttcgcctgattacgatgatttggacactgatggaagcttagaatcagagttattatctgttcctgtaggcttcctttctaatgtgtacggactgttctttgcactgcgcaatgaaatgtcagaattgggagctgaaaaatgctatatttgcgtgactatcacatctcttggattggaggtacgttttagccttaagggatatggttttggttttaagtctgcaataatttccgtgttacatgccgctaccatggattcttatactcattttttcatatgcgcaggagacaagcaccagcaagtcccattatgggagagggaattctgccgccacgttggcgacatcacttgggagcagttctgtgaaaacaagcagtatgttggacaattccataaactcgagccttgggatgattcagcggcatttgattgtttccagaacgcaaaggcaaggttctgggcgagctaccatggccagccttctgacattcctttgctggacgacccggatctgtacatcgacaaggtcgaccaccaatgcgaagtcgacccggagttggtagctgatctggatagcgtagggctaccgttcgagtcggatgataatcctgcctcagccaaagggtggaccaatgctggggccgacaacaagtgcacccagaacgggtctggaaactgggacgccttcgtagaaaagccagctgaagtcagtaagtgggactccgaggccaatctcgcatccaacacgacttggggcggccaggccaatgtagcaacacctgaggcggtttggagaggccaatctttcagtaaatggggcaatgatagcaacaccagccggggtgttcctctggagaagccaagctggcgtggctgtaacaagaaccgctacacacccaacagctggagcagcaactttcatagcagaccatccgacaataggtaccagcagctggaggatccgagctacacttctgggactggaaggaaatggaacggcggcgacggtggcgggtacgtcaagcagaggagctttaagcacaggaaccaggaccaggggcagcaccagcagccgaggagtggcagctggcagcaggaccaaagaggaaggagcaggcagtggcgtccggtgcacagcagggctccctaa

SEQ ID NO: 27522 - DNA, 1194 bp, Zea mays
  Peptide Sequence Number=SeqID_69301
atgtcgccttgtgcccatgcagagcagcaagagcctgacgctccgcctctccacaacgaccaccatcgccaccaaacttacgtggagctgtaccaccacggccttcaccacgtgaagtcgtcggcgctgctgtgcgcggttggactaggcatccccggcgccatccaccgccgcggcggcgcagcaacggtctccgacctcgtcagcggcacgggtgtccacccggccaagcgcgcgcagctccgtcggctcatgcgcatgcttgcctgcttcggcatctttggtgccgccggcggcgacgagggtgagagcgagaccgtctacacgctgacccccgtgtccagcgtcctcgtcggtgacaaggacaaggaggcatcagcgacctcgtcagcgtcctcgcctgacatgtcggcactgctccggctcctggcgcgcccgagcacgtccgtgtccaccttcttcgacatggaggagtggttcagagacggcgggaccacgacgctcttcgagacggcactcggcgtgcccccatggagcttgacgaagagcgacgccgcgtacaacagagccatgaacgaagcctgcgtcgcggacaccagcctgtccatggacatcatgctgaaagacaccagcggaggcgccagcagtgtcttcggcggcggccggctcacctcgctggtcgatgttggagggggccatggcgccgccgctattgccatcgctaacgcctttccgcacatcaaatgcactgtgctagacctcaaacaagtgatcgacaacaaggtgccaccagcggccgccgccggtactgatcgtatcatcaatagcacggtgcagttcgtcgccggtgacatgtttgagtctattccacctgcagacgctgttctcctaaggcatgttttggactgctgggatgacgaacactgtgtgaagatactgggacagtgcaagcgagcaattcccggcagagaagctggaggcaaggtgatcatcataaacgtggtggtcggctatggatcaccggacaagcttgtgaaggagacgcaggtgctgtttgatatgtacatgatgcggtacgatgggtccgagcgggaggagcacgaatggagagaaatattttcgagagctgggttcagtgactacaagatcacgcccacgataggtttccattctatcattgaggttttcccatga

SEQ ID NO: 27523 - DNA, 1710 bp, Zea mays
  Peptide Sequence Number=SeqID_69302
atggcggccggccggccgtccctcgggcctcaccaccgtctcgcgcggcatctactgtctctgtacgctgctgctgctgctgctgccgtccatccacgtccctcgcgcacgctcgctgtctttcgacctcagcttctccaagcccccagagccctcggcctctcccagctggtcaactgcaccggcgacgcgtacatcaccccggacacgctcgagctgacgaggaaccggcgtgaccagagcagcacgtacagcctcggccgggccacgtacatgcacccggtgccgctgtgggacgcccgcaccggcgagacggccagcttcaccaccaccttctccttcctcatcagccgggacccgagcacgttccccggcgacggcatggcgttcttcctcggccacttcgggtcgagcatccccaccaacagcagcggcggcatgcttggcctcatgccggccttcaccaacggcacgggcgacggcaccgtcgtcgccgtcgagttcgacaccttcctcaaccacgccaacgacgacatcagcggcagccacgtgggcatcgacgtcaactccctcaactccacggcggccacggacaccagcagcaccaggaacctcacgtccggctacgagatggtggccaccgtgtcgtacgagaatgtcaccaggttcctggccgtccagctcaccatctacgacacgtcgtacaacgtcaacgcgaccgtcgatctcaaaagctacctgccggagcgcgtcgcggttggcttctccgccgcgactggaaaaggcggcgagcagcaccaggtgctgtcgtggtcattcacgtccactctgcaggaagcaccagcaccggcaccggcaccgccgccgcgtgctctgacacctggcagcagcacccagcagcccaagaagacatcttcagaaggaaacactgcggcagccgtgctggtctggtggaaacgcaggagaaggagaagatcgtcgggaggaattggaaccagcgacgacgacgacgacgacaacggtcaccgagaccaggacggcagcagggcggagctcgagaggggagtggctgccagcgggccccgccggtacgcgtaccgcgacctggccgccgccaccaactacttcgccgaggacggcaagctcggccgcgggggcttcgggagcgtctacaagggcaacctcgtcgtcgccggcgaagcgcgtccggtggcgatcaaggtgttctcgtctgagtcgtcggcgcaggggaggaaggagttcgaggcggaggtgcggatcatcagccgcctcaagcaccgcaacctggtgcagctcctgggctggtgcgacagccgccacggcctgctgctcgtgtacgagctggtggcccagggcagcctggaccggcacctccacagcagcagcggcgacagcggcagcgagagcccctttttggcgtggccggagaggtaccggatcatcctcggcctgggctccgcgctgcggtacctccaccaggagtgggagcagcgcgtggtgcacggcgacatcaagcccagcaacatcatgctggacgacgcgctcagcgccaagctcggcgacttcggcctggcccggctcggcgaccacggcgggcggtggcacaccaccaacgccgtgctgggcaccgcgggctacatcgacccggagttcgtcaacacgcggcacccgagcacgacgaatctctag

SEQ ID NO: 27524 - DNA, 207 bp, Zea mays
  Peptide Sequence Number=SeqID_69303
atggaggcagggcctccctacgagcctgcgccgaaggtggcagatggcagggactggtcggagctatcgctggacgcactggtgctggtcttcagcaggcttggtcccgtggagatgctcatgggctcgggcctcggttttgttcacaaaggtcggccttgtagttttaccatctcctatgtcgatctcctccaaaggatcagctga

SEQ ID NO: 27525 - DNA, 222 bp, Zea mays
  Peptide Sequence Number=SeqID_69304
atggggaggttcgcggcgcagtggatctataggcaggaggggttgcggcggcccacgaggtgggaggaggagttcttgggcgatggaggcagaggttgcttggatgcggcagctggcggaggtcgaatggcggatgattcgccgcgggcgggagcttgggtgatggaggcagaggttgcacggatgcggcagctggcggagccgacacaacaattcgggtag

SEQ ID NO: 27526 - DNA, 291 bp, Zea mays
  Peptide Sequence Number=SeqID_69305
atgacacaggcacgtcacgccggcctgctaaaaaatggtgcaggaggtggggttcaaactcataccctgatggaagaagggcaggagacaccagatgatactgttgattttatggatcataacttggaatatgttcataacgtgaaattactccataacatgaaattactcctgaccgctttccacaaatgtcagggagttaatctcactaaagataacttagctaaacgtggttggaaaggttctttttatggaaacatacttgctcagattctaaagattattgcataa

SEQ ID NO: 27527 - DNA, 165 bp, Zea mays
  Peptide Sequence Number=SeqID_69306
atggaggaccagatcccttcgctcgctgagcttattaagttcggcagtttgttggatttccaacaacaatgctcagaaagatacaggtcaaacttctttttgctggggagtggcagctttgcgaccaagtttttgaatgttgtcaaatctggctactctacttag

SEQ ID NO: 27528 - DNA, 537 bp, Zea mays
  Peptide Sequence Number=SeqID_69307
atgagaatcccttgggaaaatggagttgccaaattagccctaagggtaaaacaatatcctcatctgtcccctggccaaagcatggaccaaaaaggcccaagcctaggtctcacagggcaacggtgcctgtgtgaggttgagcaaagctacattatgatcaaaccagatggtgttcagcgtggtctggttggagagattatttctcgctttgagaagaaagggtttttgttgaaaggcttaaaacttttccagtgccccaaggacttggcgcaggagcattacaaggatttgaaggataaacctttctttcctaagctgatcgattacataacttctggccctgttgtctgcatggcctgggagggtgatggtgttgttgcatcagctcggaaattaataggagctactaacccccttcaagctgaaccagggactataaggggtgatcttgcagttcaaactggaaggaacgttgtccatggaagtgatagtcctgataatggcaagcgtgaaattggtgatttcttgagtcaatga

SEQ ID NO: 27529 - DNA, 330 bp, Zea mays
  Peptide Sequence Number=SeqID_69308
atgaagccttacacttcacatgaactcccacctttgcgcacatatgatttgcacccagctttatcccataaatccgggaagggtggtggaattgatctaccccccaatcgacacagttcgaggatattcagacaacaacaacaacaacctgagatggatcctcccaatcctccaccagctggagttgatcccgcagttacagcccagatgcggataatgcaacaaatggcagataccatggtgaacatacacgctcagatgcgacaggaacgccaagagatgcgccaggagagagaggagatatgccaggaaaggagggtacaacagtag

SEQ ID NO: 27530 - DNA, 483 bp, Zea mays
  Peptide Sequence Number=SeqID_69309
atggtggggaagaagttcaacgaggccgtgtgcaagaatgagggcatcgccggtgacgtttggcagcatcgagatcacaatttaaagcttctgcgccaggactgctacataagtcatcagaataagttcatcaaccatcttgtcaatcaacttgctgctcacctatttctgaagatagcctgccagctcgaagaacagataaaaatatcgagtgcctactcatttctgaaagctgtagaattggaattgcagggctacttctcagcttttgatggccgcctgataacagagctgcacgatgagctccagtaccttcagcatgagaccgaaaatgtccttccacgtgagcaaggaagatgcaccgacgaactggaagaggtgctagaagcaaggatcagagtgcttgaagtgtgtgaaaaaatgattattcgcatgcatgctagacgttggcgtaacatcccccagctgatggagagattttag

SEQ ID NO: 27531 - DNA, 150 bp, Zea mays
  Peptide Sequence Number=SeqID_69310
atggagacgagcttggctagagcgctggagctgggcgccatggactgggcgtggcgacctggtgccaagcgccagggagcagctcggcgagcgcaggggcgcggctcgggagagcaccatgggagcagcctgcaggggagatatttctaa

SEQ ID NO: 27532 - DNA, 421 bp, Zea mays
  Peptide Sequence Number=SeqID_69311
atgctcctcttttggccgcgccgtggagcctgcgcgctcggtccttcccatctcgccgcactcggattcagcgcagctcgtgtcctgctcgcctcctgtcttcaaccatggatgtcggccgtcctggatggttcacaaactccgccgctcaatgccgcgtctccagcaccagcgtccctgctccctgtttcctccatggctgcgtcgcgcgcgttccgttgttcctgcccgtgctgtcgcgaagctcactgttcagttctccttcgtcgcgttgttgtgcgcgcgaaactgctcgtagtcgacatcgagtccgtgacgtgcgtgttggacacggtgaaacactgcgtgtgtttgtgtccgagcccgctcggccgcaacctcgctttgctctcctcgtcgctgctcgccgaatccttcccct

SEQ ID NO: 27533 - DNA, 783 bp, Zea mays
  Peptide Sequence Number=SeqID_69312
atgcgcaggtgggaacgtgggagcggggctggcgcgtgggcctggtggggcaccacctggtggctggctcgcagctgcaagctgctcacgcgtgggcgcgcagcgctgggtggcctacggagcatggtgtgtcgtggctgggctacacaacgctgggtgggggcgcgcgctgttgggctgcgcaaaggatcctcctggaagctgcacggcgaggatcacagggctaaccccgtgctaaggagagtgacatctgacacccttgcaaatccgccgaacgacacccttgcgcacatcattgagctggtgctgaagagcagcgaggacagaggccggcgcgagatgaagtctctggtcctgaagctgttcaaggagagcagcaacggcagcgctaatagttcttcagcagactcgtcctgtatcacgaccttgtacgaatgtttccagaactgccaggattccctgctagtgctacctcgcgaagctaccggtgcagacgagcttgcggtcgaagaagaattgtcgtcaggcagcaaagtgcaggcgttcagaaagatcggaaagatcgatctagaggcggacaaccttctctggctagcggagatcttgtcggaccggcacgcggtcgacgagctagcgtccatctgggcgaggcagacggagctggccgcggagctacacactaggataccggtgatgcatcggcacctggtgagctgcgtgaccgcgaggctgctggtggtggtcgggagaggcgcgacgctgccgtccagggagacgcggtag

SEQ ID NO: 27534 - DNA, 671 bp, Zea mays
  Peptide Sequence Number=SeqID_69313
ccgggtcaggcctgggcgatcagctagttgagctgctgatcccaagaatgcagcagcagcaggaggaggaggctgcgggaggagctggcctgcagctgcagacgagagggaaggaggaggacgaggaggagccagtgctggccacgtgggactgcggcagcccgctgtacgactcctttgaggtcgcgtcgctgcactacgtcctagagaagcacacaatgatcctgccgttccccgacgccgccgcggggtcccgatcgcggcggcgtacacagcagcgtcggcatcatcgtggtggccaccgcgccgccatggcgcccgacgtggccaagaccggcaaccgccgcgtgggtgcaggcgcggcgaggagaacatgggggtggtggggcagcaaggccgcggcagctatattcagggctgttactctcctgttcgcttgccccgtgctggcactcggcaaagcctggaaaacactcgacaaagcctcctttgccaagtgtatttctatgccgagtgttccgccctcggcaaatgaggcagactgccgcatcctcatgtggatctacgacaccatctccagcgacctgcagcagtcgttgatgatgcaccgcaacacatggtgctacctcgaggatgaattcctcggacaggagtcccgtgctctgacgtag

SEQ ID NO: 27535 - DNA, 333 bp, Zea mays
  Peptide Sequence Number=SeqID_69314
atgcgccggaacgctgctcaagaacccgtgtgcgggtctagcggggctcgcttaaccgccggggatccatacatcctctcgggttggggaattttgctccagagtagccggaatttctcgacggggcgcttgttgtaccgcaaattcaacctcatcgtggactgcgcgtcgtcaccgttccaaacgccgatttttattgtgtattttatttacatgtttggtgtgatgttaatttttgctatactatatcattatgttaatgggaacatggagcgaccacccgggaaaacagtgctaccacaagggtttaatgggacacccttggctgattaa

SEQ ID NO: 27536 - DNA, 180 bp, Zea mays
  Peptide Sequence Number=SeqID_69315
atggagccgccgcggtgggtgagcctggcgaccggagttggtgggcgtggccatggtcattggatcccgaggcgacaatggagattagaaattgcacacccgttcgaccggctattatttactgttcatgataagatcattatgttaattggaacattgagcgaccacccgggaaaatag

SEQ ID NO: 27537 - DNA, 1086 bp, Zea mays
  Peptide Sequence Number=SeqID_69316
atgtacttcgatgggtcactgatgaaaataggagcaggtgctagcctgctcttcatctcacccctcgggaaacatctccgctacgtgctgcacctccatttcccggcgtcaaacaacgtggccgagtacgaggctctggttaacaggttgcgcgtcgccatcgagctaggggttcggcgcctcgacgctcgtggcgactcacagcttgtcattgaccaagtcatgaagaactcccactaccgcgaccggaagatggaggcctactacgacgaagttcagcgcctggaagacaagttctacgggctcgagctcaaccatatcgctcgatggtacaacgagactgcggatgagctggctaaaatagcttcggggcagacaacggttcccccggacgtcttctccagagacatacatcaaccctccgtcaagatcgatgacacgcccgagcccgaggaggcctcggcccagcccgaggaggcctcggcccagcccgaggtgtcctcgtccgccgagggtgaggccctgtgcgtcgagggagagtggaatggggttgcgccaaaccgaaactgtgtggggtctggacctcgttggtcccttgcagaaggcacccgggggcttctcgcacctgctggtcaccatcgacaaattctccaagtggatcgaggtccgaccctaaccagcatcaggtccgagcaggcggtggcgttcttcaccaacatcatccatcgctttggggtcccgaactccatcatcatcgacaatggcacacagttcactgggaagaagttcctggacttctgcgaggaccaccacatccgtgtggactgggctgccgtagctcaccccatgacgaatgggcaggtggagcgtgccaacggtatgattctgcagggacttaaaccgaggatctacaatgacctcaacaagtttggcaagcgatggatgaaagagctaccctcggtagtctggagtctaaggacgacgccaagccgagccacgggtttctcgccgttctttctagtctatggggccgaggctatcttacccacagacttagaatacggttccccgaggacaaaggcgtaa

SEQ ID NO: 27538 - DNA, 489 bp, Zea mays
  Peptide Sequence Number=SeqID_69317
atgggcatgattcaggtcaaggcttcgtctacccatgggatgcgatctcgcctcgcccgagcccggcctcgggcaggaacagtagtcctagatgaattcacgtctcgcccgagggcctcctcaggaaaacagcgccgctcaccccgcttcgactgttgtgccagccacccgggcaaggctgacaacagccaagttcagcctcaggcgcaacaggaagatccgcctcgcccgaccttaggcctcggcctcgggaggaggtctccccctcgcccgaccccagggcttggcctcaacctcggcctcgaaaggtggtctccgcctcgcccgaccctagggcttggcctcaacctcggcctcggaaggtggtctccgcctcacccgaccccagggctcggcctcaacctcggcctcaggaggagtctccgcctcgcccgaccttgggctcggaccgaccgcgccacgggggatgcatcattaccctacccctag

SEQ ID NO: 27539 - DNA, 204 bp, Zea mays
  Peptide Sequence Number=SeqID_69318
atgagcacgttgcagctcatggcatggacggggaactgcggcgagcacaacaagcaaggctgcacggcgagcatcggcacgacgcagaagctgcaggacaacgtcggccctcaccagcgaggtcggcggacggcaaagcgtggagttggaagatggtaccaggtcggcgagctggaacgtgtgcgatggagcagcggcaaatga

SEQ ID NO: 27540 - DNA, 1143 bp, Zea mays
  Peptide Sequence Number=SeqID_69319
atgagatttattgatggcttgcgtgctgatatcaagtctgtcattcttgtacaacgtcctggcgacctcgatactgcctgctctttggccttgttgcaggaagctgcagagtcttctcgtcggccggaattggttcggggtgaccattctccgttttctcggccgctgctgagagccgctcccacgtcgtcctaccgtggggagcagtctcgtggcggcgggggcgattataccaagaccaacatgacggggcctacaactgttgattctaaggtggcctctcttcgtgtgtaccggcgtgctaagggtctatgtcaatactgcgcagagaaatggaacaagggtcataaatgtgcagatacagtgcagttgcatgctgtccaagaattgtgggagatgctgtctactgatcagcctgaatctgaaggagagtttgaggattctgctgagcaatttatgatattattgtctacagaagctgcctcggtccaccgcccatcaaaatcattcagaattcggggtgtcctgcaaggggttgacctgctcatgttgatcgactcaggtagttctcatagcttcctgaattctgcccatacttctaagttgtgtggcatcacttctatggatacaccattgtctgtacgagtagcaaatggtactgtgttgcagtgttctgtggaactccctcaggcttcttggtccgtgcaggatcttagcttctgtactacattcaagttgattcatctacccttctatgatgcaatattgggtatggattggctggaacagctgagcccaatgacagtggactggaaacacaaatggttgtccatcccatatgcaggcagcacagtaattttagaaggttgtaatcctttggttccggttggtacagtgttggaaattcaacgtttgcttcctgtttcgactgatcctgctcagttgcactcggtcgaagacttgcagttaccagaggcagtgatgcgactgcttcgcagctttcaggatgtgttccagccaccgtctgccctgcccccgactcaatcgtgtgatcatgctatccctttgattgaaggagcgcgaccagtcaacatccgaccatatcgattttcaccagcaatgaaagatgagatggagtcttag

SEQ ID NO: 27541 - DNA, 219 bp, Zea mays
  Peptide Sequence Number=SeqID_69320
atggagttgcgggaattgctcgccgtacttgaagttggccgccgaaccgcatggctgtgtgaccgggctccttcacaaatcctcggcagctctcgcactgggtgccgcttggggcgttggtcagccatggcgccaccgtgcggaccgcgcgccggcgcagttgggtcgtgggggatggaagatgggtcagtgtccgtcgatctcaagatgggtggctag

SEQ ID NO: 27542 - DNA, 99 bp, Zea mays
  Peptide Sequence Number=SeqID_69321
atggccttgctctccacagtggaaacatgctctacttccaccttgaactggtgctgcttgactgttctgctggtgctggaatgtggggaaggagcatag

SEQ ID NO: 27543 - DNA, 411 bp, Zea mays
  Peptide Sequence Number=SeqID_69322
atgggcaagaacaacaagcgcaagcgtgagccgactcctccatcagaggacttcggtgattcgaagtactcagaggaggagttctcctctaagttcgaggggtctccggcccccatccctctgcggcttacggcggaggtctggacttacatccgggccgtcgagcgctccgggctcgagggctcagatgagtcggagtgctcctcggacgaggaggactcgtccgagggcggcggcggcgatggcggcgacgatgacggaggcggtggcggcaatgacggtgacagcggcgatgacggtgacggcggtggcaggggcggcagcggcggcagcaaggatggcgacggcggcagcagcaggggcagcaacaggggcggcagcggcagagacagcaacagggccagtggctag

SEQ ID NO: 27544 - DNA, 171 bp, Zea mays
  Peptide Sequence Number=SeqID_69323
atgggagagctcctgcccaacgccaatgtgaaggagaggccgagctggggagatggcgtgagggagagggagaagggagagggatgggtgctgccatttatagagcagagctctgaacatgtcagacagcagttctataacttttattcaaggtcctaccccatatcttga

SEQ ID NO: 27545 - DNA, 987 bp, Zea mays
  Peptide Sequence Number=SeqID_69324
atggcctcctcctcctcctcacctgcgcccgccctggccggggaggcgctacgccagaaacgcatcctctccagcaagctctacctcgaggtcccgtcctccaaggcgccggtggtttactcgccggcatacgacatctccttcctcggccttgagaagctgcacccgtttgaatccgccaaatggggccgcatctgtaggtacctcaccagggaagggtacctcgacaagaaacagatggtggagccattggaagcctgcaaggaggatttgctagtggtgcacacggaggcgtatttgaacagtctcaaatgcagcttcagagtttcctccattgtagaggtccctcctgtgtcgcttgtccctaattggattgtgcacagaaagctactacaccccttccggaagcaggtgggtgggtccattttatcagccaaacttgcatttgagagaggttgggctattaatgttggtggaggatttcaccattgttcagcagatgaagggggtggattttgtgcatacgctgacatctctctctgcatccagtttgcttttgtccgtctaaatatctcaagtgtattgatcatagacctggatgcccaccaaggaaatggacacgaaaaagattttgctaatgatggaagggtttacattttagacatgtacaatgctggaatttatccctttgatttcactgctaagcaatacattgatcaaaaagttgaattagttagtgggtcaaaaacagatgaatacttggagcaacttgacaaagctctcgagatctgcaatagtagatttgagccccagttgattgtatacaatgctggaacagacatcctcgatggcgatccgttgggcagattgaaggtaagtcctgagggtgtggttaccagagacgagaaggtatttaggttcgcaaaagatcgaaacattcctttgctcatgctgacatcaggtgaaatacttctcacaagtttgtag

SEQ ID NO: 27546 - DNA, 534 bp, Zea mays
  Peptide Sequence Number=SeqID_69325
atgcccaaacttgggtgtacaataagcttcattcaagaaatactagcagtaattcttgttatggaaaagcactctgtactgatgaatgatattggccaagcttttgctacaaattgcaattacacaacgacgagctcgacacaagcagctcatgagcgcaccaacaacctgcctgatcaaaattaccaggcgcatggatgcagagagcagcaaggtgccaagccaaggtcaagggcacaggctacgcaggcttctgatcgcgcaagtagcgcacagcggctgcggctcgcgcgtcaccgacaacccgaattggttccaagcgtccaggtactccatcctccagtcctctctcagctccgcggagtcacggtaccattgcctggtgatccacagaacgatgagcaggaaaagggaatagaacagatcagggtttggtgcagtatttgtagagtgagactctgtttctgccaacagcagaaggttttaccaatactagacgaactcacgctgcagccagtaaattgtgagaaataa

SEQ ID NO: 27547 - DNA, 492 bp, Zea mays
  Peptide Sequence Number=SeqID_69326
atgaggacatcaagaccgctggaactcctacacatggatctcttcaagcctgttgcttatcttagcatcggggaagataaatctgaaacccaagtaactttaaagcgcttcctaaggagatctcaaaatgagtttgagctcaaggtgaagaaaataaggagcgataatgtatctgagttcaagaaccttcaagtagaagaatatcttgaggaggaaggcatcaagcatgagttctccgctccctacacaccacaacaaaatggtgtggtagagaggaagaacatgacgctcatcgacatggcaaaaacaatgtttggtgaatacaagacgcctaagcggttttggtctgaagctataaatacagcttgccacgccataaaccggctctatcttcatcgcctcctcaagaagacatcttacaagctcctaaccggtaaaaccaaaatgtttcctgcttttgtgtatttgggagcaaatgctacatcttggtaa

SEQ ID NO: 27548 - DNA, 231 bp, Zea mays
  Peptide Sequence Number=SeqID_69327
atggcacagctcctctctaataccctgtactacaagtgcttcttcccatattacgccttcaatgtgctcggtgggcttgacagcgaggatgctgtcacaccattgtcggagtcagaggccatcgatctaattaaggttgtgtttgcatctgcaactgagagagacatctacacttcaaagtacatgctatttgttcttcctggggcagtgagaggatacgagaacaattga

SEQ ID NO: 27549 - DNA, 237 bp, Zea mays
  Peptide Sequence Number=SeqID_69328
atgcggttcccacaggaccacctggtgtaccgtgagcggcactgcccggcgtcggagcgggagcgggagcggctgcagtgcctggtgcccgcgctggttggctaccagaccccattcccgtggcctgccagccacgacgtcgcctgtttcgccaacgtgccacacaaggagctcaccgtcgagaaggaggtgcaagaatttgatccatgtcgacgagaaaaagtggtttgcagttga

SEQ ID NO: 27550 - DNA, 300 bp, Zea mays
  Peptide Sequence Number=SeqID_69329
atggtggacggcgacgagcatgtcttcggcgaactcgtactggccgaaatatgcaacgactggtgtcctaacttgactaacaccaaatcctacccaggtgacactaatccctcaactaattgcacaaatccaggccgaaatctctctgcccacgacgacggcgaaaatcaaagacaatccgagagggctggccacagtgaagtgctcacggtggcgcagaaagcgaatttgggggaaatacgaaattgggaggctctggtggatgatcggaggcaaagggttggtgccttggatgcgtaa

SEQ ID NO: 27551 - DNA, 462 bp, Zea mays
  Peptide Sequence Number=SeqID_69330
atgtcattgctcaaaaaagctggttgtgaacatctgaaggctataattcaaccagaattcttagttttagcgaatgatattagagaaccttcaactgaagccaacgcccttagcgagaaattttactctaaagtgtggatgaacggtggaagagagatagcagatgaagctatcaaacgaagttggggcgatgtggaagctcctccgaagccgaggtcgagtctgtcttccgtggctgaggtcgagtccgagccccttgttcgggcgaggcggagaccgtcggctgaggccagggtggagtccgagccctgggtcgggcggagcggagttcgtcgtcttctgggacttagcccgagtctgaaccctgggtcgggcggagcggagttcgtcgtcttctgggacttagcccgagtccgagccctgggtcgggcggagcggagttcgtcgtcttctgggacttag

SEQ ID NO: 27552 - DNA, 1674 bp, Zea mays
  Peptide Sequence Number=SeqID_69331
atgccttccccgacactgggccactggcgccgccgctcactgcgggcgactaccgccctgctgcttcgtctccgcgacgccgctgggccgaccacgccgcgccgcctgctcctccaatccatggcagtggtcctcacctccgggctctccttctcccaccccgtgctcgcctcccgcctactcaattccctcctcccgcacgtccccgcccgccgcctcccggccctcctccgcctactcccacccgaccacctcacgctcctgctcctctcctccgccaagcaccaccacgcccagtccctccccgccgcctgcgcgctacatgccctcggtctgtcctatggccacctcccctctgacctccgcctggccaactccctcctctcgctctatctctcccacggctccacagcctccgcgcgccgcctcctcgccgacatcccccgccccgacaccgtgacctggaacaccctcctccgctcctttctccgcatgggcctcctgccggcggcgcggcgcctgttcgacgaaatgccggagcgggatctcgtcacgtataattcaatgttatctgggtacgcggcggagggggatatcgccaacgccagggagctgtttgatggaatgcccgagagggacgtggtcacatggaactcaatgcttgctgggtatgctcagcgtggggacatggagagcgccaagaggctgtttgatgtaatgcctgtgagggatgttgtgtcttggaactcgatgctggatggctacgcccagactggggacattgagatgacaagaatggtttttgatggcatgccaagaaggagcacggtgtcatggaatgttgttcttgcgctatacgcaaaggtgaaggactggcatgagtgtttgaatctgtttgatgcaatgatggctgtggggggaagcaaaccaaatgagaagacatttgtcagcgttttgacagcctgtgggcacctgggtgatcttgagaggggaaggtgggtgcatcacttggttcatgagagttgggagagacttcttcctgacgtactacttcttactgctatgatgacaatgtatgccaagtgtggggtgatggggacagcaaaggagatatttgatttgatgaccgaaaggagtgttgcatcctggaactcaatgatcatcggctatggattgcatgggtacagtgagaaggcccttgagttgttcatggagatggagaagaatgggcctcagccaaatgagacgacattcatctgcatcttgagctcctgtgcccatggaggcttggtgcttgaaggctggtggtgttttgataggatggtcaggttctacaatattgagcccaaggctgagcactttggctgtatgatggacctccttggtcgtgctggactgctcagagactcagagaatctcatcaataatttgcaggcaaaggtgtcacctgcattatggggtgcactaatatcagcctctcgaactcaggacagctccaaacttggagagtttattggaactaaactgatcgaaatgaagccaacagagttcagctcctacgtgcttctgtcaaacatttatgccacggaaggaagatgggatgatgtcgaaaaagtaaggaaggtgatgaaggagaaggtagtggagaaagatgtggggatgagccttgtatga

SEQ ID NO: 27553 - DNA, 240 bp, Zea mays
  Peptide Sequence Number=SeqID_69332
atgatcaaggggctccgaccaggacccacaacacaatattttgcaaggaagccaccacagaccttggagaagcttctccagaagatggacgaatacatccgagctgacaacgatttcctccagagaagggaggaagcgtacaggtattctgagatgactaggggcttcggaggaagacttcaccctaggcatgtcagaacgatccacaatcccaacacaaatgatgacagagctaattga

SEQ ID NO: 27554 - DNA, 204 bp, Zea mays
  Peptide Sequence Number=SeqID_69333
atgccgtcagggagaatagcagatggggttgcagacgagggtgcctctcggtcgtcgatgttccgcgcggccgctcgcccttctctatcttccgtcgccaacaaccgcgagatggaggcgaggcgtgtagatggcagaaccagggcagggcagaacacatccttggcagaacatgtcagaggcagactactattgcttacttaa

SEQ ID NO: 27555 - DNA, 2676 bp, Zea mays
  Peptide Sequence Number=SeqID_69334
atggcgtcgctcaagactgccaagaagcaccacgcgcgcctcaacaaccccttcccgcgcgccctcgcccacgcgcacgacttccccgtggggacccgtttccgcctccgctgggacccgtcccgcggcggcgaggtctcgctgtccagggttcctccgtcgtcgggcggcggcgcgatgtgggagaccgtccccggcgtggcgttcctctccgtggcctccgtggccaccgaggccgacgagtgccgcggctccttcgcgctccgcgacggcggcgcccgcctcgtccccgatcgccagcacgtcgacaagatcagggctttctaccgctgcgacgccgaggcaggcggctccgagcccgacctgctgcgcgccgccgcattccggccgtccgacgcgacgcggttcccggtgctggtggtgaccgggctcgtgtccgccgccaagaaggccggcgcgtcgccgtcgtgcacctgctgcgggttgcgcttgcgcgcggcaggtcgccgcgcccggagcgcggcggcggcggcgaggcccgtgctctcggcgcggtactggatccttctcgaggagaagagcgacacgcaggttaggttcagcgtcaagatcggcgactaccaatggacctgctcgcacgctgaccctgccaagtcgcccccggcgacggcgacgaccacgaccacgaccccgaggctccaccgggccagcctgcggcttcgtctgtcggcgcgcgtccagcgagccaccacgagcaagaggacgaggctggccccggccccgagccgtgagcgtgaggaggcgtcggcgctcctgccagcgcccgagcgggcggaggagcggcggccggaggagttcaaccgtgtgttcctgacgtatgcgagcagccgcgacgagcggttcttcgggttcggcgagcagttcagccacgtggagttcaagcggaagcgggtgccggtgctggtgcaggagcaggggatcggcaggggagaccagcccatcacttttgccgccaacctcgtcagctacaggtcaggaggaaactggagcacgacatatgccccctctccgttctacatgacctcaaagatgagatctttgtacctcgaaggatacgagtactccatcttcgacctgacgagacctgacagggtgcaaattcagatttacggcaattcagtccagggacggatacttgacggcgactcaccgacggagctgctcaccagctacacggagtcaaccggacggccgccggttcttcccaggtggatcacgtccggcgccgtcgtcggcatgcagggtggcacagacgccgtccgcagagtttggggccagctcaaggactacgacgtccctgtctctgcgttctggctacaggattgggttggccagaggaagacggcgatcgggtctcagctctggtggaactgggagctcgatgatgcccactacaatgggtggaacgatctagtagacgacctccgcagccacggcatccggacgatggcttactgcaacccttgcctcgtgccgatggacgagaagcccagcgcgaagaggcacctgttcgaggaagccaggaagctgggcatcctggtgagggacgacgccggcgagccgtacatgatgcccaacacggcgttcgacgtcgccatgctcgacctcaccaacccggcagcgcacgcgtggttcaagagcaccgtcctgcgggggatggtggaccgcggcgtcagcggctggatggccgacttcggcgagggcctgccgctggacgcgcggctgcactcgggcgaggactccgtcgccgcgcacaaccggtacccggagctgtgggcgcgcgtcaaccgcgagatcgccgacgagtggagagccagccgccgccgtgccgcggcggagagcgacgacatcgtcgacgacgacgacggcctggtgttcttcgtgcggtcggggttccgggagagctcccgctgggcgatgctgttctgggagggcgaccagatggtgagctggcaggcgaacgacggcatcaagagcagcgtggtgggcctcctcagcggcggcctctcggggttcccgctcaaccacagcgacgccggcggctactgcacggtggacctgccgccgttcctgcgctaccgccggagcgaggagctcctgatgcgctggatggaggtgaacgccttcacggtcgtgctccgcacccacgagggcaacaggccgggctccaactgccagttctactccagcggccgcacgctggcgcacttcgcgcgctgcgccaagatgtacaaggcctgggagttctaccgcgcgcgcctcgtcggggaggccgcgcggacggggctccccgtggcgcgccacctgttcctgcactacccggcggacgagcgcgtgcaggcgctcacgtaccagcagttccttgtcgggacggagatgctcgtcgtgccggtcctggacaaggggcggaccgcggtgaccgcctacttcccggccggcgccggtgcgtggaggcacgtgtggagcggcaacgagtacgggaccggggctggggtgcagggcgggttcgaggcccaggtcgaagcccggatcgggtacccggccgtattcgtcagggccgggtcgtccgtcggggaaagatttgtgagcaacttgagaaatctcacggtgttgtaa

SEQ ID NO: 27556 - DNA, 350 bp, Zea mays
  Peptide Sequence Number=SeqID_69335
atgtcgcggccacagctaggcgcgacgagctatccaaggcgtgcaaatggtattgcatctagctataaccgctcccctatacacgacagatatgacaacctcaaggagacgctgcagcggtccaaggactccgcgtcacgctttgtggagaggatgcagcacacgtggacggcagcacagatgctctggaagtcacttctgtccgtgctctcgtccgccaaccatggaggtataaaagggttacgtgatgaaattgctgcccatgatgggtttcatgcaagcgcagataacatcttcctaacagatggagcaagcccgacagtacacatgattctgcagttattgataag

SEQ ID NO: 27557 - DNA, 468 bp, Zea mays
  Peptide Sequence Number=SeqID_69336
atgccctgctacgacaagaagctagaggctgtctgggatgatttcactttatcagtagatggcaaagaaattacagaggtggattcagtactgacaactggtgaagtgtttcattctgcacctgtactcaagttaacaaatgtttatgaggaaggacatctatatggggtttctggagattctaggggctatgcagaaacaatctttctggtaataactgaagagctaggaatgaaccttgagaatgttgagcctcacatgctgggttcatgcaaaaaggttaacattaaggtgcaggcagaggaggagggggcgcaccttccatggatggtgggtagaggaggagggggcgcaccttccatggatgacggacctcccagtaatggggagaggagatccgcggtagatttggacggcgcgggcgcggtacagtgggccctggtggtggagcgcgacaatggcgggtag

SEQ ID NO: 27558 - DNA, 168 bp, Zea mays
  Peptide Sequence Number=SeqID_69337
atggaaggtgcaccatctaaaatgcgccacctcatcgaactcctcgacccgcggcaaaaaaggaaggtcgcgaacttgcagctgaaggtaatcaggtttggcgaactcgcgaacttgcatacgccgcggaagcatgtgaggctcaacattctcaaggttcattcctag

SEQ ID NO: 27559 - DNA, 528 bp, Zea mays
  Peptide Sequence Number=SeqID_69338
atggcggaggcgggggccgactcctccaacgcggccgtcgacggcggtggcggtagcgtccaaaacgactatcccaccattgacccgacctcgttcgacgtggtgctctgcggcacgggcctcccggagtctgtcctcgccgccgcctgcgccgccgctgggaagacggtcctccacgtcgatcccagcccgttctacggctccctctactcttccatccagctctcctccctcgcctccttcttatcccgtgaggccaccccgcccacctcgaccgtggcagcggccgcctccgattggcataccgtcgtcgatctccaccgacggatcgtgtactccgaggtcgagacctcgggggcggcgccagagccggcgaggcggttcaccattgacctggtggggccccgggtgctgtactgcgccgatgaggcagtggacctcctcctgcggtcggggggcagccaccatgtggagttcaagagcgtggaggggggcagcctcctctactgggaaggctgcctctacccg

SEQ ID NO: 27560 - DNA, 228 bp, Zea mays
  Peptide Sequence Number=SeqID_69339
atggcaaggggcacaatagtgaagtccgacagaacccctcggcttctcgtggacgcggccttggtcatgttgaaacctcgattacgcgaaaagcgttttcacgagaatccgcccaagaatccaaggtgtttggctacaagaatcagtttctcgtggttagaatcgcacgagaagctaatccaaccagaaatgcagttgagtcttgtttctaactttatcatgctatga

SEQ ID NO: 27561 - DNA, 372 bp, Zea mays
  Peptide Sequence Number=SeqID_69340
atggcgcaggcgccatttcccatggtcgagctcccccaactagccgtcgttctccctgctcctctgtccctagtgcacggcagcggccagggcaccatctccgagttaccctccatggctactccctctccgtggcaagcgcggcttccccaagcctcggtgctcggcgctctggccatggacgcccaggtcctcgcccctctgctccacgcacccggccgtgtccatcaaacttcatctcccctcggctgcccagcaggaagtccggcgcctccttctgcccatggcgctcggcacccaaccggcaggaacagcgccctccctgctctctgcgcaagaagccccatggctggacatttgatgttcacgtga

SEQ ID NO: 27562 - DNA, 1449 bp, Zea mays
  Peptide Sequence Number=SeqID_69341
atggccaaacggaccgcccgactcggcctggacccgctgaagcccgacacggtttgggtctggctcaccaggcacactgctatcggatgtcggaggccaaaacccagacgcaacgcaacccaccccctctctgtcctctccgtcctgaactcgcgcctcgcttcgtctctcccattcccacccgctgaagcttcaaggagcttctcgtctgagaccgagctaacgagctcaccggcgggcaggatgctggcggcgtccaccaaggtcggctctaggctggcctctccgcacgcctccttgtccgccggtgctgcggcggcggcactggcgagctcccccgtgctgggctctgggatgctcccaggcgccgggttcggcgagacggggagtcaccacgcggcagacgcgccgccggcgctgccttgcagttcctcgggcgattcaagggaatattatcagtggaagagactggtgaatcaaaggcagtcaacgctagatggaggcaaagtgcctgctgcattgggccaccatgttctacatgacctgccagggtatgtaaaaattgtggaagtagggccacgagatggtctacagaacgagaaggacatcgtgccaacacctgtaaaggttgagcttatacgaagattggccacatctggattacctgttgtggaggcaacgagttttgtatctccaaaatgggtacctcagttagctgatgcgaaggatgttatggaagcagttcggactatggggggtgtacgttttcctgtattgactccaaaccttaaggcagctattgcagcaggggcaaaagaaatcgcaatatttgcatcagcttctgaaggattttccaagtcaaacataaactgcaccattaaagagagcattgcccgttataatgacgttgctcttgctgcgaaagagaaagaaattcctgtccgagggtacgtttcttgtgtggttggatgcccagtagatggaccagtgccaccttcaaacgtagcttatgtagcgaaagaactttatgacatgggctgctatgaggtttcacttggtgataccattggagtcggtactccaggcaccgtggttccgatgcttgaggcagctatctccgtcgttcccgtggagaagctcgctgtccacttccacgacacctacggccagtccctctcgaacattctcatctctcttcagatgggagtaagcgtggtggactcctccgtcgccggcctcggtggctgcccgtacgcgaagggtgcgtcggggaatgtggcgacggaggacgtagtgtacatgctcaacgggctgggcgtcaagacgggcgtcgacctgggcaaggtgatggccgccggcgagttcatctgcaggcacctgggacgccagtctgggtccaaggcagcgaccgctctgagcaaagttaccgcgaacgcctccaaactctga

SEQ ID NO: 27563 - DNA, 772 bp, Zea mays
  Peptide Sequence Number=SeqID_69342
gttcgctaatgcagaaggcactttcatttatcctatgtatgggcatggtgagctgcctcaagctttctgtcgctgtgctgcggttaagggtgccatatatgtgttgcggatgccagtggttgcacttcttatggatgaggaaaagaaacattttgtaggcgctagattggtatctggtcaggatattttatgccaacaattgataattgatccgtcttataagactatcttggatgtcccatttgatggttcagattctcattttccaagaaaagttgtgagaggggtatgcataattagcaagtccgtgaaacagggatcatcaaatgttctggttattttccctccaaaatcactagaagagcagcaagttacagctgttcgacttcttcagttgagcagcaatctcgcagtatgccctcttgggatgtttatgtcatatctgtctactccctgtaccgatgtctcagtcggaaagcaatgcataaaaaaagcaatagatgctctttacagtcctcaggcttcagatggttcagaagaccatcttgagacagccagtgaaagcaccgaggatgtgaagccaacactaatctggagttgtgtgtatgttcaagagatcacacagggaacagctggtcctttattgtcatgccctatgcccgatgaatacctggactacagaaacatactgggatcaacaaaaaagttattcgcagtatctatgctgatgaagaggtcctgcctaaaagtcagctcctgtatatgccaatga

SEQ ID NO: 27564 - DNA, 210 bp, Zea mays
  Peptide Sequence Number=SeqID_69343
atgggacgagccaccacccgtctcatacgtgccaccgcagacatgaaagtgcccactggctggccatacattgcattggtagggaacagttggagggagacatgctcggtgcaaatggccttgtatggattggcaaacattgttgtacgcaagatcacagcaaatacgggatacaaaatgctgaacgctcgatttggtcccccaatttga

SEQ ID NO: 27565 - DNA, 240 bp, Zea mays
  Peptide Sequence Number=SeqID_69344
atgaagaagctggacgaggagatccagcgacaacaagagcaggtgctcaaggtggcggagaagtggtcaactctgagcacggccggaccatccagccctccgtcagatcatccgacaccctacgtcggacagtccggaggcacaaggactggcacacataccccatcacatgggtcgcagcgttgcctggtgcgactggacagtccgagaatagcaccggaccatccggtccgctcatag

SEQ ID NO: 27566 - DNA, 180 bp, Zea mays
  Peptide Sequence Number=SeqID_69345
atggtttgctttgcgggacagaccaatgggccacaatcagattgggcgaacttgatccaagaaaacgaagactgggcgtccgagttatgcgctgaccgaagcgctgatatctcggatcaggaaggcatcctgcaccgctgggtgcccatccgagaaaagatcttcttcgatggcgcttaa

SEQ ID NO: 27567 - DNA, 1556 bp, Zea mays
  Peptide Sequence Number=SeqID_69346
actccatggaggctgcagcagcgacgacggcggcggcgcttcttcctcccgctcggaaggtgttcatcctgcccctgcttctcctcctggctgcatcgtcgctggttccacgagcttcgtctgatggagcgcaatatgattatagagcttacactgagtgcaaacctcaccctgagccagctctgtacaacggtggcgtcctgcgctgggcgagcaaaataacggacttcagaacggaggacgaaggcaactactccccggcatttgtgctctacaacatgtcggcggcgactgcgtacagcttctcttgctgggtgaaaatcgacgggccagaaagcgcacacgtgaaggcgaagatactgaccgtggagaacgcagcgtcgcagtgcgtcggcaccgctatcgcgcgcaacgactgctggtcttttctcaaggactgcgagcccaaatgcttctacgatctcaatcagaagcccctccttgcagccattctcacccgatcagtggaatcagcacagggaggagccaagagcatcctcgggaacgggccgtaccaggacgggttcaacgcgcggttcaacgcggcggtgttcgagaacgagctcaagtggtacgcgacggagccgtcgccggggaaggaggagtacggggcggcggaccagctgctgcggttcgtgcagtccaacgacgtgacggcgcgcgggcacaacatcttctgggaggaccccaggtacacgccggcgtgggtgaagaacctgacgggcccggagctgcgcgccgcggtggcaggccgcgtccagagcctgctgtcgcggtacaagggcgacttcgtgcactgggacgtgagcaacgagatgctgcacttcgacttctacgaggaccggctgggcggcaacgccacggccgacttcttcagcacggccaggcgcgccgacccgctggccacgctcttcctcaacgacttcaacgtggtggaggcgtgcgacgacctcagctccagcgccgactcctacgtgtccaggctgcgccagctcgccgacgacgccggggtcaccttcgagggcatcgggctggagggccacttcgccaagcccaacgtcccctacgtgcgcgccgtgctcgacaagctgggcacgctccgcctgcccgtctggctcaccgaggtcgacgtcagcgccgccttcgaccacgccacgcaggccgcgtacctagaggacgtcctccgcgaaggcttcgcgcacccggccgtcgacggcatcgtgctgtggacggccatgggcgccaacgccacctgctaccagatgtgcctcacggacgccgacttcaccaacctcccggccggagacgtcgtcgacaggctgctgggggagtggcagaccaaggaggtgctgggcgccaccgatgaccgcggctccttcaacttcagcgccttctacggcgagtacagactctccgtcacctatctcaaccgcactgccgacgccaccttctcgctgcctcgcagcgacgacactaagcacatcaacatccgcctaccgcctggacctgcagcctga

SEQ ID NO: 27568 - DNA, 150 bp, Zea mays
  Peptide Sequence Number=SeqID_69347
atggcgtccgacgcggcccagcgacccacgcagccccctcccactcgcggtcgatccccggcgcagtgcgaattgtcgcgcgacgatgctctttaccaattaaaagtgctagcactaatgggactgtatcaagaaagcggcgataactag

SEQ ID NO: 27569 - DNA, 453 bp, Zea mays
  Peptide Sequence Number=SeqID_69348
atgagcccccgtgtggtcctcctcttcctcgccgccctccgcccctgcgccgccctcgtccgccttcactccaccactttttccttcactttcctcgacgccccagcgcgctttggcccccgagtgagcggcgatgggatctgcggctccctgcgtgccgctgacccggccgaggcgtgtgagaccatcaaagaccgcggcggccgccgcggcgcgggccggaaggctttcgtgctgatcgcgaggggcaactgcagctttgaggagaaggtgcgggcggcgcagcaagcggggttcgacgcctccatcgtgtacgacgatgaggagaaggccagcctttactccagggaaggcttgcctcggtttatcccttgcccagaacccgctcatatgggaaccaccatatgggagccaccggcactcggtctcccttattgggtctgccgttattag

SEQ ID NO: 27570 - DNA, 255 bp, Zea mays
  Peptide Sequence Number=SeqID_69349
atgaggtcggccaccctgcttacgatctgcaccttgtccgcgctgctgctggtggcgcgcggctcggagaagccatcggccgcgccgccgccggtggtggccgtgggcgtggcggcagccagcgacctcatccgctccggcggtcaccgctacctggacgtcagttttaccgaggaatgttctgagaagacaatttctctgtcagagaccaagcatactctgtttgtgcagactgattcccagttcttgcagtga

SEQ ID NO: 27571 - DNA, 246 bp, Zea mays
  Peptide Sequence Number=SeqID_69350
atggacaaagtggcacctaattacctcagacacgcccgggtaaagtttgacaccgaatcaagaccatttgacacgccttggcacgagatatcaccgacgagctccgccgcctggatccgtggccagaccagctccgggctccagggacgccaacctgtacctcgacgtgaccgccagaggctccccatcctcgctagacccttcgtcggaaccctaccaatgccggtggtggatcatggggattaa

SEQ ID NO: 27572 - DNA, 900 bp, Zea mays
  Peptide Sequence Number=SeqID_69351
atgcaggcggcatgcaaccgcaccaagggggcgcaccctttcgacttcgacgcgtccagcatggaggcccaggcccacacgtcatgtgaccggcgcgccggttactacgtgcgagaaactgcaccaccacacgcgccagtaccgcgccttctcgactgcggaaccgggaccgagaaaggggatactctgaaagggatccttctccgtgaaggaagcgggccccgagcccccctactgatcagaggttcgaaggctggcccctcggaagggttcaacagccgcctcagagcactcgggctccgtgcccactactggtcagaggttcgaaggctagcccctcagaagggttcaacggccgcctcaggccacccgggctccgcgcccactactgatcaggggttcgtaggctggccctcgaagggttctgacagctgcctcagagcacgcagagcgagggatgaccctgggtacgttcgatacataaccaaggctcgggctacgctcccgagactcagcctcggctctggaagacgacgaactccgcctcgcccgacccagggcttggactcaaccacgactcagaagacaacggactccgcctcgcccgaccccagggctcggacacaggctcggcttcggaagacggtctccgcctcgcccgaacccagggctcgggctcaacctcgacgctggatgacgaactccgcctcgcccgaccccagggctcggacacagcctcggcctcggaagatggtctccgtctcgcccgacccggggctcggactcgacctcgacttcggaagacagactcgacctcgacctcggaggagcctccgcctcgcccgacctagggctcggaccgaccacgtcacaggggggccatcattaccctacccctag

SEQ ID NO: 27573 - DNA, 489 bp, Zea mays
  Peptide Sequence Number=SeqID_69352
atggctggcgaaacactaaagaagtttgccaggggtgaagatgaagagtgctgtattaactcgtcgatggatgagactgcagggacagtgttggtaatgtcatttgtgtcacttgttgtcatcatgtcagttcttgcttcttttctgtttgctcgaaactgccgacttctacgccatggagttgataatcacccaccttacgtcaagaaacaagtggtggaaaagtttccctgctcagcgtacagtgctccctgttctagtgaagataatttccaggaagcttgtgcaatttgcttagaagactacaataatggtgatatgcttagacatctcccatgcaagcatgaatttcacaagatctgtattgattcttggctcacaaaatggggcatcttctgccctatatgcaagctagaagtaacgttgggcggttggctcaagacaatggttttgggtggtggttcacaggagtctatggtcctcaagtag

SEQ ID NO: 27574 - DNA, 246 bp, Zea mays
  Peptide Sequence Number=SeqID_69353
atgaaagggatttttgcttttggtaaaaagagtattccttggaagcagtattgtaactgctctattgcgatgacaaagaagagaggttatttgctgctgacaaaggccgctaaggttccactcgagaggatttctattcccctcaccgctgcgcgccttgaagatcatataagtgagtgctcaattgttatactgcgatgggaagaagcggaagatgattcggaacagcaggaagccgctacctag

SEQ ID NO: 27575 - DNA, 523 bp, Zea mays
  Peptide Sequence Number=SeqID_69354
gattatcatcttcgtcacccgcaaggttggttcaccgttggcacgcaggattggcatctcgtcggcgtgccctgctgcaacctgtcggcgtgtcctgctccagcgacctcgaactccaacccatggatcaaaggaagttggagttgctgaccgccctcaacttgcatctcggtcacagttcagcagtgacaattcatcttggaccgcgctcaatagtggttactacacgtcactactaagccaggatgttgcagatgattttgtctcagttgattatgtgcaagttgatattgaagttgtacaatcaccggggctgaatgaaatgagctcacattcaactaaaaggcatgagccaaagtggactttcaaagattcaaagctgaaagaccttcatgaggctaatagtaatggtcctgtcaatgttgacaaaccactagggaggaaagatgatgagcgagaaaacatgatggctgcgatatgggtccaggatgaggtggagatgcagaggaggcctaaacaacag

SEQ ID NO: 27576 - DNA, 1003 bp, Zea mays
  Peptide Sequence Number=SeqID_69355
atggacggcctccccgacgccgacacggcgccggttgcggccgcgccggcgcagaagcgcgacgagtggagcgagagcggcatcctgcgcctgctcgaggcctacgaggccaagtggctgctgcggaaccgcgccaagctcaagtggagcgattgggtcgacatcgcccgcgaggtgtccgtgcattgcgccgacgacgccgcagccgcggggaagccccccggccatggcggcggcagcagcgccaagacccccaaccagtgcaagaacaagatcgagtccatgaagaagcggtaccgggcggaggccgcggcggcggcgcgcgcgggccccgccgccgccggcccgacctggaggttctttgcccgcatggacgggctgctcaaagggccgcccgtctgctctgcccaggtgcagcagcccgagctgactagcagcatagacttgcgagctccggcgaaaccagaggccgaggtagaactagccgattttgccacgcagttgcgggaggcagttccagttccaggtgcattctctgatctgatgaacatcgacacgaatggcgctgtcccggataaagcggagaaggttgacaacagcatgcagaaggagagcaggcctgctgatagcgatgccaacgtgagctccccaaggagtaaggtggccgacgaggacgtggaggaggtggacaaggcctgggaccggcccagcaagagaaagagcacagaattcgatatagccaagagcatcgagctgctggctagctcgttcttgaagattgagcacgccaggatggagatgtacagggagacagaaaggatgagggttgaagctgagattaagaagggggagatggagctcaagagaactgagatcatggcgaaaacgcaccttcagatcgctaggctttttgcaaagaaattgaaacagagcagtggaaagaatggtgtcagttcgtcagtaacagctgaagtggacacccttaccaagaaaggcgagaatg

SEQ ID NO: 27577 - DNA, 330 bp, Zea mays
  Peptide Sequence Number=SeqID_69356
atgtctacctggaaagcgcacactggaggtgacgatccaggcagaacggaagacggcacacggtcacacagggtcactgaaatgacagaagaggaaggtggtgaatttggtggtacagaggctttgaaaactgagagcagggagaaagggggaagggaagagctgctcacggaggggaagagtgcggtcgaggtcgccggagtccagcagggatggtcgccgccggtgaagctcgccggcgggggagaaatcgcccctggacagagagcgcgtgtgctgggagaaagaaaggggcctctggcctggctcgggctggaggctgttttttaa

SEQ ID NO: 27578 - DNA, 1011 bp, Zea mays
  Peptide Sequence Number=SeqID_69357
atgctccggtgggccgcggcgctcgcggtcctgctcgccgtcgccgcgccggccgccgggttctacctccccggcgttgccccgagcgatttcgcgaagggtgatccgcttccagtgaaggtgaataagttgacatctatcaagactcaactcccgtatacatattattcccttccgttctgcaagccagataccatagtcgacagtgccgaaaatcttggggagttcaaaatgggagagcccaagatgtgtcagattgtctgcagagcaccgatcactgagaaagaagccaaggagctcaaggaaaagatagaggacgaataccgagtgaacatgatccttgacaacctcccgctagttgttcctgttacaaggcaagataagaacagtattgcttatcaaggtggatatcatgttggtgccaaaggcctgtattctggaacaaaggatgagaaatacttcatacacaaccatttgtcatttacggtgaagtatcacaaggacgataatttggaacattctagaatagtgggatttgaggtcaacccacacagtgtcaagcaccaggttgacgataaatggaatggtgtagacacccgcttgagcacttgtgatcctcatgcgagcaaatttgtaataaactctgattctcctcaggaagttgaagttggcaaggaaatcatattcacatatgatgttcgctttgaggagagtgagatcaagtgggcgtcacgctgggacacctacctgttgatgaccgatgatcagattcactggttttctattgtgaactctctcatgatcgtgcttttcctatcaggcatggttgccatgataatgcttcgcactctctacagagacatttctagatacaatcagcttgaaactcaagaagaagcacaagaggaaacaggctggaagcttgttcatggggatgtgttccgtcctccaacctactctgacttgctctgtgtttttgttggcactggcgtccaattctttggcatgctc

SEQ ID NO: 27579 - DNA, 1438 bp, Zea mays
  Peptide Sequence Number=SeqID_69358
attcgtgatcctgaaacttgtggtatttggtttcgcttctctggcctccgtcctgctcgcctgccccatccgccgcgccgcgagccgcctctccttcctcggcgtgttcctggcttgcctttgccgcggtaatggcatgagggcggggcggccgaagatcggcgaccaagcgaccagcgacgtggtagtgcggctacggacgccggagggccgcgacgagtggctctactgccactccgcggtcctcgccgccggcagcacctacttcgccgaccgcctctccgacgcctggccgacgtgccagatcctcggctcgcgctactgcgtcgaggtctactgccaggagctggacctgagctcctatgtcacagcgctccggctcctatacgccatcgagccctgctcgcatttcggcgtccgcggcgcgctgggcgtgctccaggcggccgtgcaccttggatgcgggcagatcgccgccgcctgcgccggctacattgagtccgccccctgggaggaggccgacgaggaggagattctgaggaccgtccccggcctcggcccgcagtacgagtgcatcctcgcgcgtctccggccaatcgatccggctccggtgacgagcatattcctttcggcgttccggcacgcgacgctctcgtcggcggctgggccagcgcgggagctcaagtccgccgctcaggagcagctggagtacatgctcaccgaagatgacgacgccccattggtagcccttgacaacgacactgtgaagtctcaagtgaaggattgtgccactgctttactaagccagttcagtgctttcatgagctctatcctgacgaaacaaaaggaggcgcctcctcttgatggtgagcacggccagcttcagcaggagttacagttttttctttgtgatatctcttgggtctctcaggtcctgagcaagctcgagatgatgaagtgcattgttgtctactgggtcggagtgtccactgatatggtagaaactgttgacgcggtatgcactggggatgactgtctgaagaccaggctgaaggtggtagaggtgtctgcaaaagtcctggaggctgttgcatttggcaatgtcatccttccagccgaaaaacgccgtcatatggtgaatttatggattcgattcgcaagggtgacaaaatctttggctgatcaggccgatcaggatggtgacggcgaagctgagacaccaaaggaaaacctggacaatgaggtctggcagggcctggagtctgcaattgtttcgattgtgctgacactgccgtcaaatagtcaagctgagattttgtcagagtggcttcagtcgaaacatgttagatatcctgacctgacagaggcatttgaagcctggtgttatagatcgaaggttgctaaaagaaggctctctttcttgagcgacattggccag

SEQ ID NO: 27580 - DNA, 152 bp, Zea mays
  Peptide Sequence Number=SeqID_69359
ccctaggcaggagcaaggaggatgagagagatctccagagttccacgcctccaccagaccaccacccatttgtccccgaccccgaccgctgctgcacatcatcctcccgccgctcggcgtcttcctccgattcggctgctgcagagagcaga

SEQ ID NO: 27581 - DNA, 315 bp, Zea mays
  Peptide Sequence Number=SeqID_69360
atggccacggcatcgcatcttacgctttcgtctcaggcaccaggcaggtcagacaccgcatacatccagtgctttggtgacgcacccagctactacccaagcgtagtgagtctcgttgctttgcaaggcaggcggtcaagggagcgggcgcgcggccaggccaggggaaggaacaaagaagaggaaagatgccgtgcctcgccgctgccacgcacgctcgacagcgccaccaaccgcgggcaagtggaaaccgaaagcgaggtgggggtggggcggcgcgtgccgtggatggaggtcgctaccaaccgcagctga

SEQ ID NO: 27582 - DNA, 792 bp, Zea mays
  Peptide Sequence Number=SeqID_69361
atggcgcaccggacagtccggtgcacaccggacagtccggtgcccccttccgaccgttggctcggccacgtgtctcgcgcagattgtgcggccgaccgttggcccggccggccattgactcaccggacagtccggtgcacaccggacagtccgagccgaagtgaccgccgtcactccgccgctccactgaccggtctgacagaaggacagcgccgcctgcgccactccgactgcagcgccactcgacagagtgagtctgacaggcagtcaggcctcgctagaggcgccataggaaactccgctccgcccgaccccagggctcggactcgggctaagacccggaagacggcgaactccgctccgcccgaccccagggctcggactcgggctaagacccggaagacggtgaactccgctccgcccgaccccagggctcggactcgggctaagacccggaagacggcaaactccgctccgcccgaccccagggctcggactcgggctaagacccggaagacggcgaactccgcttcgcccgaccccagggctcggactcgggctaagacccggaagacagcgaactccgctccgcccgaccccagggctcggactcgggctcacccccagaagacgacgaaactctacctcgcccgaccccagggctcggactccgcccctgacctcggccgaacgatctccgcctcgcccgacccaggggctcgggctcggcctcggccacggaagacagactcgacctcggcttcggaggaacccccacgtcgcccgacctag

SEQ ID NO: 27583 - DNA, 125 bp, Zea mays
  Peptide Sequence Number=SeqID_69362
atggcggccgcggcggggcggtggaatgtgaggagatgcgggtatgtacggagcgacacggaggacaggaacagcaacgcatttggcgaggctgacgtcatgctgaccgccggcgcaaggatgga

SEQ ID NO: 27584 - DNA, 921 bp, Zea mays
  Peptide Sequence Number=SeqID_69363
atgtcgtcggccgaggacgggtactgcagctcggattcgccgcgggcggaatcccccgacgagccgcaggcgggggcggacgcggagtcgccgcgcgccggggccgggctgaacaagcgcgagcgcgacctccccgcctcgccgtcgtcgccgctgccgccagctaagcgcagccggagatcggtggagaagcgggttgtgtcggtgccgctggccgagtgcggggaccggcccagaggggccagcggggaggggccgccgccgtcggactcgtgggcgtggcgcaagtatgggcagaagcccatcaagggctccccctacccacggggttactaccgctgcagcagctccaaggggtgcccagcgaggaagcaggtggagcgcagccacgcggaccccaccgcgctgctcgtcacctacaccttcgagcacaatcacgaggcgccgcagcccaagaccagcggcggcagctgctgccaccagcaaggcaagccgtccgcgcggccgccggcgccgaagcctgagccgtccgtggtcctggtccagcgggatgagctcggcccggagcacgagctggtagaaacagaggtgccggagcaggagcaggagacggagccagaagaggagcacgagccggcggaagagggcgtcccatgtctggccggtccggaagcggcagcaaccttaacggtggcgccggcggccgaggaggacgaaagcttcgactttgggtggttcgaccagtacccgacgtggcaccggtcggcgctgtacgcccctctgctgccgccggaggagtgggagcgggagctgcagggggaggacgccctgtttgcggggctcggcgagctgcccgagtgcgccgtcgtcttcggccgccgccgcgagctcagcctggccgccaccgcgccgtgctcctga

SEQ ID NO: 27585 - DNA, 345 bp, Zea mays
  Peptide Sequence Number=SeqID_69364
atggctgatgtcatggatgatgtaatagtgatgcaagatccggcaagtggaataaaaaataggaggaaaactcacgtggatgtgttcttaagtggccaaatagattcttatgccatggaaattcatcgattgatacgtccttttcatagtcgatcatggttcaaggagattgcatttgtggatgctctaatggagtcgaaaggtggcaagaagtctagtagtagtagtagtaatttcatgtacgaagctccccttggctacaagatcgaggacgttcgcccagccggaggaatcaagaagttccagactgctgcttattccaactgcgtccgccagccatcctga

SEQ ID NO: 27586 - DNA, 411 bp, Zea mays
  Peptide Sequence Number=SeqID_69365
atggcgcggcggggaggatggccggtgattggcgttgtcgagggcgggattggcggggagatggccgcaatagcggtggttggtggagatggcgcggcggggaggatggccggtgattggcgttgtcgagggcgggattggcggggagatggcgtggcggggcgggggcggcggcgcgcgggcggcggggtggcggcgcacgggcgatggagtggcggcgcgcgggcggcgcacaagttacgaccgatttcaggagcggaccggaagcttcgagcaccatactcactgaacatggccgtgaacttgccatccagctgtttaaaattgtataaaacacaaacaaagtcagaaaatcatgaaacttgtccacatgtcatgatatcatatgtagaggctgtgataaaaatttga

SEQ ID NO: 27587 - DNA, 741 bp, Zea mays
  Peptide Sequence Number=SeqID_69366
atggacggcgggttgattcctaaaaactttaagggcctctctgcaaaatcgttcggtcgaaggggtatctgcaaacctcagccattggatcaccagccgagggcacggattagatctggagtgcaccgaaaacggtatgcaatcctggctgtcagatcaaacatcgacgacgcagacacaattaaggcgtggtctgatctacactgcacatccaccgatctgtggacacgatccgatcccacgaaaagagagccatcttcctcgttacagcgctgggcgacggtgccatgcccccatgcggcaaagctcgccggagtgcaggcaacccgaggcaccggcgcacaaaatcgagtctgtttgggtgctacgcgtaatgagggcgaaatcgagtttagtggaaggcttcttaccgaggtttggcacacaggtgaagccggccgcgatgcccagtgggatcatggttgtgcactgtcgacggcgagcactcaggccggagcaggtggccatcatcgctcgaagacatcacgacgagcatcgatacgatctcgtactctcccccgtccggcagccgaactccgaacgtcaaggatagcgttcgtccacgacactaggcggtccgcggtggcgctgggtctccggcacgatattctagtgagccagatgtgtctccccatcagggaaggccacggcggctttataccccaagtgcccgaggggatcgcgcaggtggttgatagctga

SEQ ID NO: 27588 - DNA, 240 bp, Zea mays
  Peptide Sequence Number=SeqID_69367
atgggtggaaatgggagcctctgctcaccagaacagagagggaggagaactgagggagagatggatgggctgctcaccgagagggatgaagagaagcacaaggtcgccgtgggatcgccgccggtgaagagatggacgccggcgaggggaggaatcgccagggacagagagaaatcactggcagggagaagaagtattggcaccctcatatacttttcaaaatattttgccataggctag

SEQ ID NO: 27589 - DNA, 288 bp, Zea mays
  Peptide Sequence Number=SeqID_69368
atgaagggagtggggttaggtcatatcgccgacaaagagccaatgttcgctggttctttaagctcgtcggtcgttggagatgggtcacatcattgcaacgagcgagatcggacttgttgggcaggccggcgtcgccacgatgacgagcaggttacaggaagcttcgacattggagtagagaacttctcttatgacagaacgaagggaaataaagaatggacgacgaagctagaagccaaggaacttcggctggatatgttgacgaagctcaagtgtgataacgattga

SEQ ID NO: 27590 - DNA, 630 bp, Zea mays
  Peptide Sequence Number=SeqID_69369
atggccaagggcgggtgcaaggcgttatcgggcctgatcgcggcgtcccccgacgcgtcgtccacgtaccagtcggccgtggagggcggcatgacgtacaggaacctgagcgcggacggcaaggcggagctgctgctgttccacgccgtgcccgtgcactactcgctggggagcctcaagtccaacaacgggcccatgaacacgctggccaccgacggcgccgccaggaacttcaacttcacggtgcagaaccggggcgacgtcgtcaccatcgccacggccgcctccgcgcccgcgcgggtcaagtccacggcgctggacgaggacccgctcgccatctacgtcatcagcgccgtggtggagcccgtggagctcttcaagcccgcgccggcgccggtgccagcgcccgcccccgcccccgctagtgtcgcggacgcgcccaggcccggcaaggccgccgcgggccggcgccacccgccgcccgccgcggccgacgcgcccggccccgccgcagaggacaacgcggctcccgtggaccagaaggacgccaagaagagcgcggccgccggcgcgccgtgcgctctgtggtggctcgccgccgcgctggccgcggcctcagcattggcttag

SEQ ID NO: 27591 - DNA, 1035 bp, Zea mays
  Peptide Sequence Number=SeqID_69370
atggcgcccatcaacagcggcaacatggagcagcactcgcagcggctcctcgagcccgacctccctgtgcaagtccgactgcagcttgccatggaagttcgggacagcctggagatgacgcacactccagactacctcaactttcttcgctgctatttcagagccttctcagcaattctcaccgcttacaccaagccacaggccacagagaatgctgagcacaagctacggaatgttgtgatcgagatactcaaccgccttccacacagcgaggtgctcagaccatttgtgcaggatctgctcaagctttctctccgtgtgttgacacaggacaacgaggacaatgctctccttgccatccgaattgtgtttgacctcctccgtaacttccgccctactgtcgaggcggaggtgcagccatttcttgactttgtggttaacatataccataaatttcccacaaccgttagctacttcttcgataatcccaacacaagtgccagtatggctgcctccatgcccatgcagcatttggaccccactgccgatgcctcagtcatgatgcaagtgcctggtggtggtcaactcaacccaagcgcacgttccttcaagatagtcacagagagccctcttgttgtgatgtttctcttccagttgtatgcaaagcttgtgcagacaaatatcccgcacttgttgccactcatggtggcggccatctctatcaagggtcccgacaaggtgccgccacaccttaagacacccttcaacgatttaaagggtgcacaggtcaagaccttgtcatttctgacgtacctcctgaagagcaatgcagattacataaagtcatatgaggaaagcatatgcaagagcattgtgaacttgcttgttacgtgtcctcctgattctgtctccatcagaaaggcaagatacgacctggagctattggttggtctgaaacaagttctcaacaccgagtacaagcgagggctgttccccttgattgacacacttcttgatgaaagttacttttggtag

SEQ ID NO: 27592 - DNA, 573 bp, Zea mays
  Peptide Sequence Number=SeqID_69371
atgagcgtgcgtgtcacctgggagaggcgagggcaggcggtggtggcggtaccgattgcgtccgccgacccccaaatccctgacttccccaagccagcaatacgagccatcaaccgcagcaagatggtgattgacgtcgtactcctaggatacagaagctacactgggcagcggcaactggagcactgcgaattggctggtggctgcttcactgcgcactggctggttgctggcggctggctggagcactacgcactggctggtgtctggcggctggagcactgcgcactggctggggggcaagggcaacggctggagcattgctgcactgggcggcggcgcctagacctgaagcaatggcaccatggcgcctgtaggtggagggaagagggaggaccagaggagggaggagggggaccggccgcttacctgcagagcggcggtagaggacggccggcgtctggcatcccgcggctggctctggcggctggctggcggctgggcgtgatccttacaggcaaggcagctgggctggcgtctgagttggtggctggttgggtaaaggcccattaa

SEQ ID NO: 27593 - DNA, 186 bp, Zea mays
  Peptide Sequence Number=SeqID_69372
atggagcgggcggccccagtggcgtcgctgctaggtgggcgtctcgcaggcgacagtggagagcatggaggtggactctgcggaccaggcccaagcggcgcgggcttggaagatggagccaacaacccaacaccaccccttgctgcacagtcgtcgagggcctgggacaggggcggacccaagtag

SEQ ID NO: 27594 - DNA, 2529 bp, Zea mays
  Peptide Sequence Number=SeqID_69373
atgccgtcagcgtcgggtccggtggccgtggcgtcggcgccggcgccggtgaagtccgcaccgtccctggccgtcgggatctcgccggacttgtacccaacggaggacgacctgccgtacgaggaggagatcctgcgggagcccttcaagctcaaggggtggtggcgctacctcgtggcccgcgcgaccgcgccgtttgccaagcgcgccgtcatctacgagcgcgcgctcaaggcgctcccgggaagctacaagctctggcacgcctacctccgcgaccgcctcgaccacgcgcgcccgcaccccatcgaccacccggcctactcctccctcaacaacacattcgagcgggcgctggccaccatgcacaagatgccgcgcgtctgggtcctctacctcacctcgctgctcgaccagcgcctgctcacgcgcgcgcgccgcgccttcgaccgcgcgctccgggcgctccccgtcacgcagcatgaccgcatctggccgctgtaccttcgcctcgcttcgcttccggcctgccccgtcgagacgtcgctccgagtcttccgccgatacctccaatttgacccctcccacgctgaggacttcatcaatttcctcatatcagccaaccactggcaggaggccgccaaccgtctagcttctgtgctcaacgacgacgggttccgctcagttaaggggaaaacgaggcaccagctctggcttgagctctgtgagatcctcaccaagcacgctgatgaggttgctggcctcaaggtggacgccatcttgcgtggtgggatacgcaagttcactgatgaggtcggcaagctgtggacctcactggctgattactatgtcaggagaggcctttttgaaaaagctagggatgtgtttgaggagggtgtttcttcagtggttaccgtcaaggagttcagtgtggtgtttgaggcatatacacagtttgagcagagtatgcttgcggcaaagcttgaggctgctgaggaagaaggggctgaggatgagaacgagggagggggcaggaagagtgggatggataagttatcgaagaaattcctcaatgaattctggttgaacgatgaggatgatactgatttgaggatggcaaggtttgagcggctgttggatcgcagaccagagcttcttagcagtgtgctgctgcgacagaatccacacaatgtggaggaatggcacaggagggtgaaactctttgaaaaggatcctgcaaggcaaaacattcatgctaacaatatgattgatgcagctgctgctgagggggatgagcctgtccaaatgaaagtgcacaaatctttgaaactgtggagcttttatgttgatctggaggagagcctcggaaccttagactctacccgtgcggtttatgagagaatattggatttacgaattgccactccacagataattctcaattatgcatatctcctcgaggagcacaagtatttcgaagatgcatttaaagtgtatgaaaggggcgtgaaaatattcaagtatccccacgttaaggccatctgggtgacctaccttacaaagtttgtacatagatacaagcgaagcaagttagagcgagcaagagagcttttccatgaagctgtccaacaggctcctgcagaggaaaagaagcccctatatttacaatgggcaaaactggaggaagactatggtcttgcaaaacgtgctatgaatgtatatgatgaggctgtaagagctgttcctaactctgaaaaaatggccatgtacgaaatctatatagcacgcgctgccgaactctttggtgttccaaggacaagacaaatatatgagcaagcaattgaatctggcctcccagacagagatgtgctgacaatgtgcatgaaattcgctgagctagagagaagtcttggggaaatcgatcgttcgcgtgccatctatgtgcatgcatccaactatgctgatccaaacaatcctgacttttggaagaagtggaatgattttgagattcagcacggtaacgaagatacattcagggagatgcttcgtatcaaacgcacagtggctgctagccgcagtcagacacatttcatactgccagagtacttgatgcagagggatcagaagttaaacctggacgaagcagttgacactctgaagcgtgctggcgtccctgaggacgagatggcagctttggaaaggcaactggctaccggaccatctactgccccaccagcagcaccaagcactgccccagcctctgctaacaggatgatgaactttgtcagtgctggagtagaggcccaggtcgagagcagcaggcaacaggctgctaacaatgaggacattgagctgcccgatgagagtgacgatgaggaacccgatgtccaaattgcggagaagagcgttcctgctgcggtatttggtgagctcggcaagagagctgccgagaacaatgaggaaagctcaggtgcccaagggaatgagcagctgggcgccctcgagaggataaagagacgacgccaatag

SEQ ID NO: 27595 - DNA, 858 bp, Zea mays
  Peptide Sequence Number=SeqID_69374
atgcacccttattcacttaagagttccaagggagcaccaattctgccacggccagtcttcgttttcttcatcgcgacatttggtttctatgtatgctatctctccttcaatcagataacgctagagaacaacagagaggggaatagtcgagaagaacaaagggacgatatttgcagaaagccttatgtgccgtatgaggagctcagttatgtgcactttccaaaacctacaagttatagcaggggggagtgctcgtgtactcctgttcggttctttgtaatcgtgtctatgcaaagatcgggaagtggatggtttgagaccttgatgaatagtcaccctaacattagttccaatggcgaaatctttaacagaatggatagaagagaaaatatatcgtctatcttacaaacgcttgatacgctgtataatttggactggctcaccagcgccgctaagaatgagtgcacagctgcatttggactgaagtggatgcttaatcagggaattttggaaaaccctgaagatatagttagttatttgaacaagaagggtgtctccgtgatatttctgttcaggaggaacacattgcgcaggcttgtatctgtgctggccaacgactatgacaaagatgcaaagcagttgaatggaactcacaagtctcatgttcactcaaaagaagaggcattatcccgggtgcaagagttcctcagggtcccggtgaggaggctgatgagccggcaggtgaaaattcacacgaggcctcttccggaccttgtcaagaactgggaggaagttagcagcaaactgaacgggacagagtttgctcacttccttgatggttcagattatgccaagtga

SEQ ID NO: 27596 - DNA, 552 bp, Zea mays
  Peptide Sequence Number=SeqID_69375
atggggtcttctgctggcagccatatccgacaaggacagaggcctgaactggattcatcagttaactcacggtctaccatagattctactgtcatatctaacatgaagactgtcttaaaacttataagtgagagggtgatgtcctcttctgaccacagaaaatctatgggccaaatacttcaagctcttctttcagagaaaggcactgattccagcattcttctgtgcatgctagacatgataaaaacttggattgaggaagattgtaggcttgcttcatcaactggttctgttagttcacttaacccaaaggaaataataacttatcttcataagttatcattagttgacagaaaaagctttcctccagctgcacaagaagaatgggatgcaaaatacttgcagcttctttattcactgtgtgcagattcaaccaagtatccgttgtcttttcggcaagaatttttccataagattgagagacagtatatgcttggacttagagctaaagatccagaaatgaggaaagcgattcttcaagctttaccatga

SEQ ID NO: 27597 - DNA, 942 bp, Zea mays
  Peptide Sequence Number=SeqID_69376
atgggcttcgatgctgctgcgtatgggtgggacaagggttcggggggttttatcgacctggcacttcctgaagatcagttttacagtgagatcaacagtccataccgtgctccactggcaaaatttttgaatcgttatgttctggaggctgttgactattttcttgctcgattaagccatccaaagtatttcaggaggtttatgtacataatctgctcggatactggggacctaagggatgcacttgcaaggtcacctcagaaaatacttgcaagtgccttttctcagttttactctcaaagtgaagcatctgctgctcaattatcttctgtaaaggatgaagcccttactggggctgtatctgagagtattactgtacaatcttcatcaaacatggttactacttctgagagttactttaatggattagagcttgtctcagcccttgtgaaattgatgccagagtggctccgtaacaaccgggttgtctttgacaccttgctacttgcttggaaatcacctgcaagacttgcgaggttgcagaacgagcaggatttgagtttaccccaggtgatggaaagcaagaggctgatcaaatgcttcctgaattacttaagacacgatcgaactgaagttggtgcactctttgatatgttatcagtattcttgtaccgcagtcgtatagattatagctttcttaaggaattttatgtcatagaggttgctgaaggatactccccgaatttgaagaaaactatccttaatcattttctgaacattttccagtcaaaacaatatggacaagatcatttagttgttaccatgcagattcttatacttccaatgctagctcattcatttcaaaatggacaaagttgggaagttgttgatcctactataattaaaactattgttgagaagcttcttgatcctccagaagag

SEQ ID NO: 27598 - DNA, 429 bp, Zea mays
  Peptide Sequence Number=SeqID_69377
atggaattgcagattattgttctcgaggatacgcaggagtacatcagctatgcacccaagaaggacatcgaagcacaagaccgccgcccctttgatcttctcgtcggtacatcttgcctcgttcgcggccgcccattaagcatctggaacccttctcacgctctgtgcttttccttggacacacacagtgttgatggatacagggcggtcgtggagcggcatctggacgttgaagtttcaggtctggaccggaatgggagcaccatgaaggtacgggcttcaggatggcaagcgcgcatcctccagcatgaatgtgatcatcttgaaggcacgctgtatgttgacaagatggtagcaaggacattcagggtcgtcgagaacttggatttgccccttcccactggatgccctcaactaggtgcaagataa

SEQ ID NO: 27599 - DNA, 147 bp, Zea mays
  Peptide Sequence Number=SeqID_69378
atggcggtggttggtgacagcaacaggcggcgcttccgcctcggcctgtatctgtcgcccctgcctcaccccatcggcaaaagccctgccaaaggggcccttattgtggcggttgctcacgagtctgagccaaacctaatctcctag

SEQ ID NO: 27600 - DNA, 630 bp, Zea mays
  Peptide Sequence Number=SeqID_69379
gtttgtctacattctgcttcacatgctccagtgaagcatacgggtgtggttatgtacttggatactagtaattctttctctcctagtcgtattgccaccataattgatggaactaacgacctatctgatcaaaaaggttttgacttgctgtctaaggagaggctcaagactgtgatgcaaagcatcatctgcgagtctgtgtttgatatatttggtatgtttgaagtactacatcaacttgaagtttctctactgaatgaaaaggtaataggtgatggcaggagaatttgcttacttataattgactcaatatcatccttacttgctcccattattggaggcaagtatccacaagggcgatcgatgatgatatcactggcgatgatcctaaagaagttagcctatgagcataatctagctgttctggtgaccaatcatatggtttcagctggcaatggtgctgtcaagcctgctcttggtgagagctggaaatctgttccacatgtccgcctgatgatatctcgtgaacatagtagtaatatctgcacgggaactgtgctgaagcacacactactggtatttcctctggcgattcaattatacttctatctttcattgcagcagcagtaa

SEQ ID NO: 27601 - DNA, 915 bp, Zea mays
  Peptide Sequence Number=SeqID_69380
agcctgatttcaaaaggatatgaactcgtctctggtgggactgacaaccatttagttctggtgaatctcaagaataaggggatagatggttcaagggtggagaaggttttagaaagtgtgcatattgcagcaaacaagaacacagttcctggtgatgtttcagctatggtgccaggaggcatcaggatgggaaccccagcccttacgtcgagaggatttgttgaagaagatttcgctaaagttgctgacttcttcgatgcagcagtgaatctggccttgaagattaaggctgcaacgacagaagagaatgaggtcactcttcttgcatttctcttcgcctcccgctctacctcctacgatccgcagatacacaggcccgcgcttcccctcctctcgcagttctcgcgtccactgtaccggagctccaccacggcctccggaaagaaacagatgaaagacagcgacggcgagggcaccggcggtggcgtcgcccgctcgcacccctccaatctcccgcttccgactccacagtccgacccgaacctccagttctcgggtgggacggacgatgagtcctcgagccggaatagcagctcctctgccaccggcggcgcgagccccgggtactactcggactacccgtctagcttcagcggcgagtgttcgccgtacaacatgtccccctggaaccagaccatggcgtccccctggtcgcaccacaacgaggcgtccgccgccgggctcggggggccgcccacaatggcgccggggacgagtctcatcagctcgctggtgagggaggagggccatatctactcgctcgccgccaagggcgacacgctctacaccggctcggccagcaagaacatccgcgtctggcgcaagcagaaggactcaggcgggaacgaaatataa

SEQ ID NO: 27602 - DNA, 1193 bp, Zea mays
  Peptide Sequence Number=SeqID_69381
atgttttgaggagaatcaatatacttaaagatgaagctgtaagggttgctgcaaattctacactgagttcggcagaaaagaacaagattaatgctgcaaaatattctgctgttatgactccaatagttgtagccttggaacgtcgtctggtgtctacatctcgtgaaccaaaaacaccccatgaaatgtggttccataaagaatacaatgctaagctgaaatctgcagtcacaacccttaagatgccccctggatctccagcagcattaggagagatttggcaaccttttgattcaattgctgcttctttagccacacatcaaagaaggtcacacataatgttaagtgaaattgctccacagctagctgttttgtcaacctctgacattccaatgcctggttttgagaagatacttggttcctcagaatccttttctggaaaccatggcattgtaaccatatcttccttctgtaaagaggtaacaatactttcaacaaagacaaggcctaagaagctcatcttgcaaggatcggatggtcagaggtacacttaccttctcaagggccgggaagatttacgccttgattcacggataatgcaactgttggaggcaataaatagcctgttgtattcgtcttccgacactcgaagtcgaaatatcacactacggttctattccgttacaccggttagtggacgagctggactgatccagtgggtggaaaatgtaagcagcatatacaatgtgtacaaatcatggcaaaagcgttcacagttggcacatgcacatgcagaggcacaagtatcttcagttagcactggtaacattcacaaccctgttgcacctgttccccgtccaagtgacatgttctatggaaagattataccagcactgaaagaaaaagggataaaaagggtagtctcacgaagagattggccattagacgttaaaagaaaagttctattggagcttatgaatgagactccgaaacagattctgtggcaagaaatgtggtgtgcaagcgaagggttcagaaactttaactccaaagggttcggagattttctcgacctgcgtgagaaggtcctcttaataatccaggccatcttcagtattttcaatttaaaactcatgttaatcttaggaactctggttaagaactttgtgtatataaggccctgttggagctga

SEQ ID NO: 27603 - DNA, 186 bp, Zea mays
  Peptide Sequence Number=SeqID_69382
atggccacaggtaaaaatccttttgccctgtccatcctgaagcaagtggagcataagttacatggacagaatatagatggcaccaggtccttgaatatttctgagcaagttgactatcttcttaaacaagcaacaagcattgacaacttatgcaatatgtacgagggatggacaccttggatatga

SEQ ID NO: 27604 - DNA, 312 bp, Zea mays
  Peptide Sequence Number=SeqID_69383
atgtcctctccgacttctaagttggtcgtctacaccgacgctgattggaatggctgccccaacacgtgtcggtccacctctggatacatcgtgttcctgggcgccaaccacgtctcttggtcctcaaagcggcagcccgtcgtctcccgctccagcgctgaggccgagtatcgggctttgccaccgcgtggtcgaggtgtcatggctctatcagctggtataagagctccacaccccctcgcatgggccacactcatctactgcgacaacgtcagagtggtctacctctacaccgatctcgtgcagcattag

SEQ ID NO: 27605 - DNA, 651 bp, Zea mays
  Peptide Sequence Number=SeqID_69384
atggccatggcgacggccctccgcaagctctccgccaacgctctgcgccgccagccgctctcccgcatcacgccgctctactacatggcgtcccttccggcgacggaggagagatccggaatcacctggactaagcagttgaacgcgccgctggaagaggtcgaccccgagattgctgacatcatcgagcacgagaaggcccgccaatggaagggtctggagctcatcccgtcggagaatttcacgtcggtgtcagtgatgcaggcagtgggttccgtcatgaccaacaagtacagcgaggggtttattgatatggcagagtccttgtgtcagaaacgtgctttggaggctttccgtttggacccggcgaaatggggagtgaatgtgcaacctctatccggttcgcccgccaacttccatgtatacactgcactcttgaagccacatgaaaggatcatggctttggatcttcctcacggtggacatctttctcatggttaccagactgacactaagaagatatctgcaacttcaatattttttgagacaatgccttacagattggatgaaagcactggattgattgattacgatcagatatgcaacaagcagaaaggcaattactttctagcagactgggcaacatattag

SEQ ID NO: 27606 - DNA, 486 bp, Zea mays
  Peptide Sequence Number=SeqID_69385
atgggatgggcctgtgctgggccaaatacttccagtgcaggtggttcaacggcaaagggttcaggaatcccccctgaatttcatggtcatctattaaaaagaaggaaattgcttcgggtggttcaaaaagaggcatctgatcttgttaaagtttgcacctctgttttggagtttgaagcatccagagatggactttacttcgttcctgaggataaagcttccgaacaatcttcggacaaaggcagggcctggcatcaaactttcttgaatctcctggcacgtctagatgcggcatttcattcttttacatgtgcagaacaagaatggaaacttggccagctcagtctggaagctgctggaaaaggcctgttttcagctaataaccaggtttcagtagtctctgtgaaagcaaactctgctttagtgtcgggacttgtaagatatgcctgcatttatcgttgtataatagattgtgttagagattga

SEQ ID NO: 27607 - DNA, 2211 bp, Zea mays
  Peptide Sequence Number=SeqID_69386
atgttgcaggccaacactgattgggggaagatgaccgcaggcctcggcggtgggcgggcgacaactttactcgtcggcgcaggggaacgcattggcacgggcgagctgtggcttctggttcctctcccgctcactgttgtttccttttcccaggagcacaaggatcttttcttaactaatttgccagctacagtatcgtctctaaagaaattcttggatattttagatcagtatgaggttgcatcggctatattttatcatgctgagaaagagagatcaagtgttttgcagcatgaaatgtcggctaagttggtcctagctgatgctacatcgggtgctgagaaatctcgcacttcatttgaaattcatgctcacgagttagcagaagcaaaagcggcggcagttgatgaagctaacaagcttgcaatatgggtcgaaaaacatgcactggttcttgaggctatacgggagaactctgttgcgtgcattgagtcatgcatgcaattgaattgtaaggacaagacattgagccttatttcagccgtcctagaatcaggggtcccacttacagttgtaccagaaccaacaagagcgcaatgctcggaattggatagggagatttctcaattattatctgagttacagggtggactttcctctgctttagactcacttggtgaatattctttagtcttgaagcaagttcttccggttaactacatcacaaccagtccggttactagttgggcgcaagtcttgcagcgatctgtaaggagtacatcgcaagatatgctttccctggctaaaatacaggctgcagaagtcattgctaaggttcaaggtgaaggcattaatctggtgcaacaaagatatcaggatctcgtaaatcaaatggaaagttatgtttcatgtgtggagaaacttgcgagggagtgttctgaactgatgaattctattgggttgaataacgaagtgcaatcaaaagagcggatactttctgtattcatgaactctgttcagttgccttcacaaaagaaggatggtgatagtactcatttatcgcattcaggaagtcctcagcagggtgagatcaaaactccagccaagggcgatgtacaggagacaacaggtaaggtcctctctattcttgggattgctgtgagtcagctatatggtgatattagagccaaagtgtctgaactctcaattaaagctattggaaaagctaaatttaggacagatgattctggtcttcaagctgatgctggaatgagcttgcaagtatttgaacaacatatagaaaaatgtgcattaatttctggagttgttgatgaagtgcatgaagttattgggagaaccttagcagaaacaagtgctgcttatgcaaagcccagtcctaggcactgggcctctacttttcaggcagctttgcactcaagcatcaacttgattgaacaaatgactgaagcttttcttccagaatttatcagatcagttgttccacataattcagaggtaaaggaaaccgtcaggtcaatttctgaggtacgtggttctgttgataatgctctagagaagctgattgaggttgaacttgagagaacatctcttgctgaattggaacagaactactctgtgaaagttggcagaattactgagcagcaaatagctcttgaagaagctgctgcaagaggtagagaacatctatcatgggaagaagcagaggagctagcttcacaggaggaaatctgtagggctcaattggaacaattacatgaaacatggagacagaaagatatgcgtattttgtcacttatgaaagtagaagacaatatcatgaattcgctgctttcttctaaacagtatgtttcatctttggtggaccatgatcaggaaagtgagtttcattatggacaaattaaggccctcctttcaatcttcgcaaagccctttgctgacctggaatcgctggaccatatgctatcatcatctggcatgtttcctcacatagacaatcccatttccaatattaaagatgctttgtctttgggctcttcattgtctgacgtggtgtggcctttagctggcatattgaaggatcatgctttttttgtttgggaactcaatcttcttgattcggttcttgttttatgcatgcgtgagatttcatcttctcttgagcatggcataatgccaatcaactttacatga

SEQ ID NO: 27608 - DNA, 2111 bp, Zea mays
  Peptide Sequence Number=SeqID_69387
atgcaaacccctcgtccctcctacgcgcaccaccagctccagcagcacctctcctccctcctttccgccgccgccgccgatcccccgcacccctccgacgatgcctcccgcaccgccgccctctccaacctccgtctctccttcctccacccacctaaccgccccctgttacctgccctcgctcccttcctcgccccgcccctttcggtcctcctcgccgacgatgcgtcctatgccgtgcggcgggcggcggtatcggcgtacgcggcgctctgcgcggtgctgtgctcgcacgaagcgcccgggggcctgccggacgggttcgtcgcctgggcactgccgctcctgggtgacccctcctcagctgctctcgtcgccgaggggctccgggagctcctgtccactggggacgtgtccccagtcgagaggttcgtgccgcctctccttgcagcctgccgtgacgtgctagaggatgagcggatgtcgcccgctgtgctccggtgtctgctcagcctgcttatgttggttgccgccaagtttccccactgcttccgtccacagtttgttgatatcatggacctgcttcttgggtgggcgtttgtgcaggacctagctgatgcagatcgcagcatgatcattgatagttttccgcagtttcagtggcattggcttgggaatctgcagttttcacttggattactgcccaagttcttggccgatatggaggggcttgtgcatgatctcaacctgggaggcagccataatcctgggaggcttcgttcgctgtttgcttgtttctctacggtactgcagattatgtcttctggtgtggctgagcgaaataacctaagagaacttgtagctgggcctctggaaggtttagctcctcaacttttaaggtgtgcatcagtgatagcctctaaccttggctggtctgagaggatggaagacgcatccaaatgcttggtcttgcttgcagagattctgcaggaaaggtttgctgatttttatgtccattttgtggatgtgttggtccagagcttggaagttgcctcctcggcacagttggcggcagcacttaagactaacctgcaagttctatcactgcaaaatttggggctccatgcagcttctgttggagctttgcttgacttcagttcaattttatctaagtcacgtcttcatccaaaccacagcgtggttgcaaactcagcagctacctacattttttgcttacagcatggattggaagatgtagttgatcaagcaattgcatcagtgatgaatgagttggagctgataaaatctctgctagcggaagggcaagcaagttgccctgatatccatagtccccccttagaattgaacagtgaaaggaaaaacgagtcgaactcagttcagggccttaatgcatcatcatctttgacactgaaattagaggctctagattggataggttcatttgaaaaattgatccatggattggagaggggtgtggataatttcagtttctcttatgaggttctgctagacaagcttagtgatccagatagtaatgtaaaggatgcattcttaaggttattttcaatcaccttgcctatcacaacatatgcgtttggcttgtttgcagatgaacataattatcgtaattcctcagatattgttaacatgtccaaccattgcatgaactggaggcatgtgcttgctgtgaagcaacagcctaggaaactccactggcagcagcttgtttctgttttgagttacctttctctcagattgaagttacctctttcgtcttgggtgcaacggctggtctttagttaccgtgggaagaaagatacgcgttatggtcaaattgatatgtttggagatgctgatgggaatgaactccccaaaggccctggtgtggacagaaatactattgatataatatactcagtaaataatcatgctgctgtttggtggggaatccatgaagctgcccggcactgcattaaccttcggcttcgaactcatctaggtggtcccactcagacatttgcagctctagaacgcatgcttttggatgtaacaaatgtattaatggtggaagctaaggaagctgaaggaag

SEQ ID NO: 27609 - DNA, 1032 bp, Zea mays
  Peptide Sequence Number=SeqID_69388
atggagcaagcgaactcaagtcctttaaattcgatcattccaatggtagtaaaagatttcagcgattctgatggatttcaagatggggcagagaaacttctatctggtgatagtgtatctgtttcgactttggattatcatgcacttgctcaagaaatcataggcactgctcgaaagatatcctggcaactttgccccactatgggtaaggcttggcttgcttatgcatcctggtgctttgctcatggcagttattctctgtctggaactgattcaaatttgcagaattcactgtcccctgttcttcagtctgaactctccccgagtagatgtcatttaacagatgacgagaaatctgaggtgggtgaaataatcagaagtatctgtgctgatgaacatgcaaatcatgtgggttgtgaatacccaatgacaccagggtgttacaattctgcaccagagcaccccatatctttacttgttgaacaggcaattagtttgatagaaactgcagctggagcaccaggctttgagtcccgcgaaggtgatgatccctctgcagttctagcatcagagctggtggttctttgtaaatgtgattctggaaaggacactgcacctttgattggcaagcttactgaaatatggtggtctttaaggaaaaggagggaaacacttgaaagtgggctttcaacagttcctttattgccatggcaggagattatacctcatctttttgcacgcttgagttcccacccagagaagatagtgagggaacttttggagagtatattgctgaagctaggaaagttatctccttgctctattgtatatcctacattggttgatatcagtgcttgcgaaggagaaccctctgaggagcttcagcgcatatcggactttatggttaagctataccccaatttaattaaagatgttaagcttgcaattgaggagctaggtatgattactgttctctgggaggaacaatggctcagcacattacaagatctccattcagatgttagtggctag

SEQ ID NO: 27610 - DNA, 273 bp, Zea mays
  Peptide Sequence Number=SeqID_69389
atggataagcaagagcaccctaaatcctctcaagatccaccgctagagatgtttgagcccctcaccatgaagaagattctagcaccctcccttgaggtcaaggaagaagccgcaagcaccccaccagcaccaccgtcctctgaggttaccctggagctacaagagctagtcaagcttgaagaagagttcgaccacgtcctgccatctcagttaccggaagaagtcatcaacattagctccctcttaacctatccaggagatgtcttagaatga

SEQ ID NO: 27611 - DNA, 1362 bp, Zea mays
  Peptide Sequence Number=SeqID_69390
atgtgtgtagactacactggtctaaacaaagcatgtccgaaggttccctaccctctgcctcgcatcgatcaaatcgtggattccactgctgggtgcgaaaccctgtcattcctcgacgcctactcaaggtatcaccaaatcaagatgaaagagtccgaccagctcgcgacttctttcatcacaccttttggcatgtactgctatgttactatgccatttggtttgaggaatgcgggtgcgacataccaaaggtgcatgaaccacgtgtttggcaaacacattggtcggaccgtcgaggcttacatcgatgacatcctagtcaagacgaggaaagcctccgaccacctcttcgaccttgaagcgacattccggtgtatcaaggcgaagggcgtaaaactcaatcccgagaagtgcgtcttcggagtcccccgaggcatgctcttggggttcatcgtctccgagcggggcatcgaggccaacccggagaaaatcgcggccatcaccaacatggggcccatcaaggatttgaaaggcgtacagagggtcatgggatgccttgcggctctgagccgcttcatctcgcgcctcggcgaaagaggcctacctctataccgcctcttaagaaagaccgagtgcttcacttggacccccgaggccgaggaagccctcgggaacctgaaggctctccttacgaatgcacccatcctggtgcctcctgctgccggagaagccctcttgatctacgtcgccgctaccactcaggtggtcagcgccgtgatcgtggtcgaaagacgagaagaagggcatgcattgcctgtccagaggtcggtctacttcatcagtgaggtactgtccgagaccaagatccgctacccacaaattcagaagctgttgtacgcggtgattctgacgcggcggaatttgcgacactacttcgagtctcatccggtgactgtggtgtcatccttccccctggaggagatcatccagtgccgagaggcctcgagtaggattgcaaggtgggtggtggaaatcatgggtgagacaatctcgttcgcccctcggaaggccatcaagtcccaagtcttagcggactttgtggctgaatgggtcgacacccatctcccggcagctccgatccaatcggaactctggaccatgtttttcgacgggtcgctgatgaaaacaggggcaggtgcgggcctgctcttcatctcgcccctcgggaagcacctctgcaacgtgttgcgcctccatttcccggcgtccaacaacgtgactgagtacgaggctctggtcgacgggttgcacatcgccatcaagctaggggtccgatgcctcgacgctcgcggtgactcgtag

SEQ ID NO: 27612 - DNA, 1092 bp, Zea mays
  Peptide Sequence Number=SeqID_69391
atggcatcatcgagtgctgctctcgccgtcctgatgctcagctgggcggcggctctcgcggccgcgtcgtcgccggtgacgttgttcgaagccggctacatgccgctgttcggcggcggcaacctagtaccgtcgcccggcggccgctccgtccgcctcaaacttgaccgccacaccggctccgggttcgtgtcccgatcgtcttaccaccatggattcttcagcgcttccatcaagctgcccgaccatcacaccgccggtgtcgtcgtcgccttctacactacattatttatagagtggagtttgaaaaagaaagtgagatataagctgtcgaacgcggacgtgttccctggcaaccacgacgaggtggacttcgagctgctgggcaaccggcggggccacgagtggcgcgtccagaccaacatctacggcaacggcagcacctcccgcgggcgcgaggagcggtacctcctccccttcgaccccaccctccggccgcacgcctacgccgtggcctggacccccacggccatcctcttctacgtggatgggacgcccatccgcgaggtggtccgcgtgccggccatgggcggcgacttcccgtccaagcccatgtccgtgtacgccaccatctgggacggctccgcctgggccaccgagggcgggcggtacaaggtcgactacgccttcgcgcccttcgccgccgacttctcgtcgctcgtcctgagcggctgccccgtcgccggcggcggcgacgacctcgcggccgccgagtgccaggtggccacgatgacggcggactgcgccgtcatgacccccgccaagcgcgccgccatgcgccgcttccgccgccggtacctcctctacacggtgtgccacgacatgtaccgctacaacggcaccgtcttccccgagtgcgacgccgacggctcggaacgcgacgacttccacaagtggggcgagtccaagcgcgtgtctcccagcagccgcgggtacaagcagcagcagcagcgcgcggacaaggccgtcgccgttgccgcgcctggccggcccgacacgtggccgaccgtagggacattacgtgtcgactaa

SEQ ID NO: 27613 - DNA, 171 bp, Zea mays
  Peptide Sequence Number=SeqID_69392
atggaaatcactcctcaaatggtgtcacatatcctcttcgtcgattcaccggttggagctggattttccttctcgagagatcccaaaggctacgatgtcggagacatctcggcctcactgcagctacaggaattcctcatcaaggtgctgtccatcaatccaactagctag

SEQ ID NO: 27614 - DNA, 1311 bp, Zea mays
  Peptide Sequence Number=SeqID_69393
gaaaaattgaagaaccgcgtccgagcattcaccggagcattcgtagttatgatttcccccgtgctccttgccatcgtgctcaagaaagtcagcttgactggcaccggcgggaggtatcaggggaggatacgactacgagcgctggaagcattcgtcgacctcgtccaaagaaggttcgcccacctcgcagccgtgactctgcagatgggcataatgcccttcctgtgcgtgatggtcgcggaagcgtgcgccagcttgccgccgctcagctacgtcgccccaaggctggtggccgcgtgcagagtgctggtgttcctctccaacttgctgctcatggccctgggctgcgggatcctcctcctcttccacagcaacgccctgctagtgctcactatctgctccgccatggcgctcggtgtcgctgccgtgcaaattcggtacctctgccgcggcgtcgccgatgccggggccgccgacgacgcggaggcggaggagtaccacagcaagctggagcagttgcttgagctgtcggccgggatgaccgtcatgatgttcctggtgctggaattcgtggcactggagagcctgctgaggaacactcgtcaggggcaggctgtcaaaagagggcagacgttcctcggcgtcgccttgctcgtcagcttcatggccagcacgctgggcgtctcgctcatgaacgtatggaccacgccccacgtcatcagcggctgcgtcgtcttgaccgccgagttcatgagggtcctgaatttctccttccatgctctgccgatcgccgcggtggtggtcttgatcacgctggatgtgcttccgcacgcgtggaagctggcagtgtggctgccgttcttccctctggtcatagtgctcctggtgctgctggcgcggtacagccgtgaggcgatgaaacagcaggagccagcagcaagaggaagagggaagcaaggaccagaagcaacgggcagcagcacagcatcggatccatcgtcatcaggtgaaaagaagcctgatgatccaaagccggcctcgttggagttgaccaaggtggcattcacgggcttcttggccgtggcagtacccagcgtcaccagtgcttctttctgcgtcccgtctgcattctttgtgttattcagtgcagcgaccgttctcctgggcctcttgtggaggctcctcacgcacgaggcggaaccaccttcgtgtgtcctccaagctgccaatcatgcttccttctccgcgcacatgtccattttcttggccgggattgcattctgggtcatggctgcctttgctcttcattaa

SEQ ID NO: 27615 - DNA, 156 bp, Zea mays
  Peptide Sequence Number=SeqID_69394
atggatgctggcgtcgccacgctgctggccgaggatgaagtgaggaaaaggggggaaaaggttgttgatctaagggctaggtctggccgaaggcgtggaactccctcggccatcgatctcgtatccgagggcctcgagtgcgtgccaatacattaa

SEQ ID NO: 27616 - DNA, 171 bp, Zea mays
  Peptide Sequence Number=SeqID_69395
atgtcccatctaatggcactattggaggcgacaaagattactttggataacagggaggagctcatggttgatttgtccactgaaatggtggagaaggacttgcaggagatccaggacatggaggccaacgaggacgtcgacatcgagggaggagatgagccttgcctctag

SEQ ID NO: 27617 - DNA, 1020 bp, Zea mays
  Peptide Sequence Number=SeqID_69396
atgctattttgtcatagtgctgaaacactgtttgattggtccatgttagaaattgaggagcatgaaatacatgaggcaattgtccgtattgatgaggatgagatgtacatcacattgggtcttagagatgacgatggctcgcagcaaggcgcaacagcccaatttgcatcacaaccaagttttggttcacagagtaatggtgcatatttgaatgactatgatgatgacatggtggttgactatgatattccagaacgtttcaatatattgcatgatgtagatcatccagagatgcatttgggtactatctacccttcaatggtagaattcaagctagttgtgaggcaatatgctataaatgaagaatttcttcttgggacaataaaccgattgaatgggttgaatgttagccaaggatgggtagcacataaggcacttcctatacttcggattgagccatctataggtgccaagcatctacaaaagagacttcaagcaacatataagatgcatgtaagggatagtctgcatgtgagtgctcttgtcaaggggggcagcatacagataagtcacaatggcctcaaattgattcgtgaccatgaggttagggcacctttgggaaagaggggagttggtagacaaagaaaattgagaatcaaaagttgtcttgagggtggaagggaatcaaaatcagctagtaaagaaggagacaaacctgcaaaaacagtaaaaagagggcctacaaaatgcaagagatgtggtgaacttggacataggcaaactagctgcaagtgctctttaaatagaacacaaaagaggaaaagaaagccaagagctcgaagatacgttggagcaactgagccttctactgatgctacaaccaatgtgcctgcaaatgagtcaagccaactgatgattgtaggtttacaagctggaatgacacttcctagagatgccacatgtgcactagtaccagctccaatgcaagtgttgaaaatgaagcaacttcaagtgctctaa

SEQ ID NO: 27618 - DNA, 597 bp, Zea mays
  Peptide Sequence Number=SeqID_69397
atgggcggtgaagggatggttctggcagcagctgatgcgatggacggtggcggaatgatacgggcaacgatgggatggggtggtcgcggacacaaaggggccaaccgtggctgtgatggcgcggggcttaaaaggggcaattggatgagcgcaacgaatgacgaggctgtcgtcttcagcgccgtcaccccccagggtgtcgtcgagatctcgctgtcgtccgcttgggaggagggagcagacttgttggactcgtcggacccattacatcctctgcccgaagaacagcggcgtgctctgcaaccggttcattactgcttggacgaacatggtggactcgacggggttgttcgtgtggtcgcggtagcggacaccgcctgtggccgcttgaggggtcacgagaagaagccacggcacaatgtcgtcgtcatggatgggaagaccgccgaggacaagcctggcaatgacgtcgtgcatgcccagtgggacagaggtcatgaaagttgtcgcttatgtggcatctgtagagtggcgcttgagctcttgagacatgttgttgccaatggagctgcaggtgaagggctggaacgacgatga

SEQ ID NO: 27619 - DNA, 1842 bp, Zea mays
  Peptide Sequence Number=SeqID_69398
atggggagaaaaggcaagtggttcgacaccgggcagaggatcctgatcacctctgaacctgatcccgtggagacgcagaacgatgatgccgccaaggactggaagctcgatcatcacgagaaggctgcgaagctgagagacaataagtcggccatcaggaggatatggcagttcggcaaatcaaactcgtccggtgcttccgcctccgcgacggcgccggaggacgcggaggttcttcagtttccgaagtcgccaaggtcggacaacgagtaccatgtcgtccaggacctcaccgaggaggtgccgttcatggagacgagaggcgaggaagaagaagaagaagacggcgagcgcatgaaccctggggatgaggtggccgcgtcaccagattccaaggccgacgccgcgcccatgacagcgtggtccgcgcgttcaaaggaggacattgccgccaccaggatccaggcggcttgcaggggccatctggcgaggagagggcaacaggagagagggatggctaggctgatgtcgctggttgacgaggggttcgccgtcaggcgccagacccaggaagcgttgtactgcatgcagatgatgacgaggatccagactcagctgtacacgagacggctcaagaccgagaaggacaagaaggttctcaagagtcagaccaaggccgttaataaacatagcctggacaaagcaaaggtgcgattggtgaaaggctgggaccatagcctgcagtccaaggagcagatggaaacggtgcagaagatgaagcaggaagctgctacaaggcggcaaagggccttgtcatacgcattctctcaacagtggaggaacaggaacacctcttctgcgcgagctgcgcatgggcctgctcccatgtacatggaacctggcaacccgaactggggctggtgctgggcggagcgctggatggcggctacgaggccgtgggagaaccagaccatgccaccgccggacactggccgcgcagcatccaaaagcgctagcacccgactgcctcgagtcgccgtgtcggtccagatacccacggccaccactactccaaagggcaagccgttccgcccaccgaactggtcgtcgtcgtcgtcgctgtcgtccccgtcgacgcccccgccacggaggacggccacgctcgccagcccgaggagcggcccgctccacgccacgagcggcctccagcacagcaagagcctgcagccagaccaccgccgcccgcggagcagccaggaactctcggcaaacagcccgcgccgcgccgccgtgccggcgagtcccaggtgcgccagcgggagcagcagcccgctccacccttccagcggcgccggcgcgcagcacgcgacgacgacggcgaccatgcggctcgagcgccgcccgcggagcagccaggaccgcgggatgagcagcccacgcctgctgggcgccaaggacgccccgctgcggcgcaccgcgagcctacggtctgagctcccgataaggctgagcctaggaagcgccgtcgcggccgcggccgtgggagacgacgagggcgcgccggtgacgcccagctacattcatccagctaaaaagtccgtgagggccaaggttagatgccccagcccgtcggcggcagcggccactcctgacatgtttgacgctctcgagagcagcccagcacctcctctacaagtgcctccctcgccatcgtcagccaagaagcgtttgtcccaggcgttcgcggacaagccgagtgcctcatcgccgagcaaggtggcgttggagagggtaaggcggcactcgcagctaatttccagtcccaggatgtcgctgtcctga

SEQ ID NO: 27620 - DNA, 621 bp, Zea mays
  Peptide Sequence Number=SeqID_69399
atgcagattaaagataagtcagtgataattgctctgcagtatacttggactcatggaagttgcttgctggaagactggtcaagcattgtctcacgactagatattcaaggataccgaatactgcacagggagataaatcccaaatattctcatagtactgtttctgatttcaattgtgttgggtcatatgtgccatactatgcgtcagcaattcgataccaagatcattccgcaagtcttatctgccaattcataggcataattctggaggcagttctgttcttggtatgggattgcctttcaaacatttattatggaatcccattagttcaggtatgcgcaagtgatggtagaacaaagacaccactgagccctactgttgctgggtcagatcctcatccatttgcaggactaggaggcagcagtgtcgagcttatggagtcctcgaggcaatccttgggtgcctatcacagctattctgttgggagcttaggtcagatgcagttttctagcggggtgaggaaccctagccgaggtcagactacacttcaaagtcggaggtcgcaatcaagagaggatctcagttcttcacttgctgatattcattttccaaaagtgtag

SEQ ID NO: 27621 - DNA, 681 bp, Zea mays
  Peptide Sequence Number=SeqID_69400
atggggaagacacgcggtatgggagctgggcgcaagctcaagacccaccgcaggaaccagaggtgggctgacaaggcatacaagaaaagccacttgggcaatgagtggaagaaaccttttgctggatcatctcacgccaagggcatcgttctggagaagattggtattgaggccaagcagccgaactctgccatccgtaagtgtgcccgtgttcagctggtgaagaatgggaaaaagattgctgcctttgtgccaaatgatggttgcctaaactacatcgaggagaatgatgaggtgttgattgctgggtttggtcgtaagggccatgctgtgggagatatccctggtgtcaggttcaaggttgtgaaggtatctggtgtgtcgctgctcgcgctcttcaaggagaagaaggagaagccaaggactaatttgagagctattctgtttcgggcaatccgtcttcatatcactaatcaccttaccatcaacaacgccttcaaccgcactagcaataggtcaagacctaaatttagcatattgaataaaaagacatttatgctccaaatgcggagagagaatgtggttgaaagatcaccaaatgcagtggcggacctacagggtatgccagacctattagtaatcaagaattccagagttttgcccccttcagatgcagactga

SEQ ID NO: 27622 - DNA, 369 bp, Zea mays
  Peptide Sequence Number=SeqID_69401
atgcagcagatgactggcgggcacactgctgttatcattagcaagtccaaggtggtcgtcttcggtggattcgccaacaagcgcttcctcgctgatgtttccgtctacgacgtagagaataaactatggtacacacctgagtgcactggtaatgggtcgaatgggcaggccggcccaagcccaagggcttttcacatagctgttgtcattgactgcaacatgttcatctttggtggccgatctgggggcaagcgttatgtatcaaatgcagttttgatatttgataggagaatggtagaccattgcgagggcagtggaggagttgggcgacatggtcagacgaaggcagggcaaagccacctccagtag

SEQ ID NO: 27623 - DNA, 1017 bp, Zea mays
  Peptide Sequence Number=SeqID_69402
atgaagcccaaaagcctcccgttcatcgccttcgagcacaagcgggatgcgtacggctttgctgtgcggccacaacacctgcaacgttacaaggagtacgctggcatctacaaggaggaagaggaggagagatccgatagatggaagaattttctggagaggcagcctgagtcatctggacaggatgctggtgataatgctacgggtgatggttctgaatcactgcatgagaagaccgtagcagggccacagaagattcaaatatggacgccaattagatcgtccctgagcaacattgagcagataatgagcctgcgcatcgggaagaagcaatcttctgctggcaagcagcaagcaaaggacggaacccatcacgtgaaaggtgaagagagcaagttgtcggaggattcagatgacgaattctatgatgtagataaggttgatctgagccaagaagcgcaatcgagtgatactaggaatgctgatgttggaagcaggaaccaagaagaaaattacatttcaagggaagagttggagtgcctggtccatggtggactgccgatggttttgaggggagagctatggcaagcttttgttggtactggagctcgtaggatagaagggtattatgatagtcttgcagcagagggtgaattagataacaaaagttctccaacttctgaaggtgttcaagaaaagtggattgggcaaatagataaggacttgcccagaacttttcctggtcatcctgctttagatgaggatggaagaaatgctttgagacgcttgcttatagcttatgcgaaacacaatccatcagttggttactgccaggcaatgaacttctttgctggtctcttgcttctattgatgccagaggagaatgcattttggacattggttgggattatggaggactattttgatggctacttttctgaagaaatgattgagtcacaggtggatcaacttgttttagaggagttagttcgagagaagttccctaaattaggttag

SEQ ID NO: 27624 - DNA, 813 bp, Zea mays
  Peptide Sequence Number=SeqID_69403
atgaaacctgtttgtggtgatcccaaacatataatttcgacaaaactttacatcatgtttacttctgaattttacatttcagttctccgtgtctgggatgtgcttttgttcgatggaaacagagtaatgctgttccggaccgctcttgcgctactggagttctatggtcctgcacttgttactacaaaagatgccggtgatgcagttacccttttgcaatctttagctggttccacatttgacagcagccagcttgtcttgacagctcgtatgggatatcaatccgtaaatgaaacaatattgcaagagctaagtaataaacaccgcccatctgttatgtctgccatggaagaaagagcgaaaggtctaggcgtttggacagatactaatggtcttgcatcaaaactgtataactttaaacgtgatcctgaaccactggtttctttaagcaactcagcagaccagttgagtgatgtgggagatggggatgccaatcaagaaagtgatcctgtaaacatggatgacgagtatgttggtgtgacagtgaaatctgagattgattctttgcctgatccaaaggaccaggttgcctggctgaagttggagttgtgccaactcctagaggagagaagatcagcagttctcagagctgatgaactagaaacagcactcatggaaatggttaagcaagacaatagacgccaattaagtgcaaaggttgagcagtttgaacaagaaatatctgaattcagagaggctttgtcagataagcaggagcaggagcaagcaatgtttcagttgaaacagttttag

SEQ ID NO: 27625 - DNA, 183 bp, Zea mays
  Peptide Sequence Number=SeqID_69404
atggctgtgacgcagagcacgcagctcggcctcgccaccgcgttgttcggcgtcctctccttcgtcctcaccgacctcaagaaagaattacgaatgaaaacttttgataccacctacccctctgtaaactccttgagggctgatttggtgaccagcgatatcgggaggatcggagtggattga

SEQ ID NO: 27626 - DNA, 2583 bp, Zea mays
  Peptide Sequence Number=SeqID_69405
atggaggacagggtgaagtcaatgctcgagctcattggggccgacggcgattcgttcggcaagaaggccgaactctacttccaaagccggccagagctcatcaatcacgtggaggagatgtttagatcctaccaggcccttgccgacaggtttgatcgcatatccagtgagctgcacaaggccaaccacaccattgccactgtgtttccggaccatgtacagttctcaatgcaagagggggatggtgaggagttcccgaaggcaatcggtgggattgatctcagcaacttcaaattccctacgttggaaggcttgtccatgggctcgcagagcgcgagtaggggcaccagtccggtccccaagagggggaccaagccacaccgaagggtcaccacaaacatgaacgaggagaaggcgcaggaagagatagacaagctccagaaacaaatcctggcactacagaccgagaaagagttcttgaagactacttatgacagcgcactaggcaagtatctagacattgagaaacaggtggccgagttgcaggatgaggtctgcaatttgcaagatgctttcagcactggtgtagccattgaagacaatgaagctcgagcattgatggctgcacaagccattatatcatgtgaggatacgttggtgaacttgcaggaccagaaaaacagaatgactgaagaggcgaaggtggagctccgacgagccaatgaggcaattgaaaagctgaaaagcttcaagaatgaatgtgagctgcctcatgcaccaatgaatgtacatgatcactatgaaatagaactggtcaatgcactgcccctcgatgatgctgatgattctgctctgaacgagagcaggcttgacctccaggaaatatgtcaaacagtaaaagatataatcgaatcttatcctgaactatcagttgcagaattagcggaaaaggttgatcgacttgtggaaaaggtgatcaaccttgaacttgctactacttcacagaatgctcacatcaatagaatgaagattgagatagatggacttcatgagcgcctgcatgctttggagcaagacaatgtagctttggctgttgattctagtaacttggctgacaggttgaggatagttgaagaaatgctgcaagaagtacaacaaatttggaagtctatacgaaatgggtccgagaatatttgtaaacaaatgactgaagccacccatgaacttactgaattcattgaaacattacattctcctaagcaagaaatcagtgacttcgtggattcattgcgagactccaaaggcgatgcttctctggaagatgattcaggactaacaagtctgtatgtgcaaaatgagccatccaaatctttacgtgtcgctacaagtgaaattgagaaatatgaagaaacctcagaaggtcttgtagcccagaaacagctagttccaaaagaatccgaaggtgagggtaagattatattagaagattacgcatctgtacttcagagctacaaaaatacagagcaaaagctttcggaaattgagaagagaaatcaagattaccatcttgaggcaatgtcagaactgaaggaacttaagagtgtcaatgcaagaaaagatgaggagatccactcgcttaggcacatgctaagttctttgcagaaaaagatgagtgcctctattattgagagtttagagaagtcagaagaaacatccaagataagcgccattactactacagaagacaaagagattgctaagtcagaacaaacatccaagataagcaccagtcctactacagaagacaaagaaattgctgagatagaggaatacattaagcaatggcaagttgatgaaccgctagcttcttcggttgcagaggagaaatttagagtagaaattgacagggtgttgggggagaacttgaacttctggttgaggtttagcacattatatcatcaaatacggaatttccaaatctcttttgacatgttgaaaactgagatgcacagaatgactgatgaacaggaagatgagggcatttatggctttgctggtagttatcaggtagcaaagctagaatcagcagtactagaaaagaaattgagggacctaaatacagatcttcaagtttggattgaaaggaacgtgcgattgaaaggagagctagagaacagattttcatcactatgcagcatacaagaagacatatcaaagattacaactctagataaatgtgatgaagttcacttcaacccttttcaagctgcaaaatttcaaggagaggtgcttaatatgaaacaagagaataacaaagtcgctaaggagctagaagctgggctggaccatgtaagaggccttcaagtggagcttggaagggtgatcttgaagcttagagagaatctcaaggtatctattgcaagaagccaccgaactcaacaaaacttccggaccctgtcaacgaaaggtggtgttccccttagagcttttctgtttggctcaaagtcaaagagaccatcactcttttcgtgcatgcctggggtgcataagcaacacagtggttcaaaggctgggcgtggatga

SEQ ID NO: 27627 - DNA, 483 bp, Zea mays
  Peptide Sequence Number=SeqID_69406
atggcgggcgccccagttggatcccgaatccgccacgacagagtgggcgttcacagcgaggatttgaggatggccgagcagggaggagagcgcgctggatcgaggctgcggcgaggccgtaggtacccgcgacctgggcgagaaccagaggctggagggaggagagaggtcagcgaacggaggaagatccacaagcgcctgagaggagaggctgaccccggggcccgggctgtcggcgcacgcgggatggagtgggctgcgagaggaaaaacagcagatgggccgaattggcgacagaggcccagggacctagatgatttcacacaactaatcctgctaagaagcaccggagggttgttcggtgaatcttttgatatttgtaaggtggagtgttatttgtctgaccaaagatcacatgtttatgaaagtgaaggtgatgttaaggtatgggtcatttgtgaaggtgatgttaagacaaactaa

SEQ ID NO: 27628 - DNA, 610 bp, Zea mays
  Peptide Sequence Number=SeqID_69407
accaaagctgatcgcacaaaaggagcacaggaagacgctcacgagctccacgctggaaccagggacacgacacagagctcacagctcagcgcgcggcaaggaactcgacgtgtgcagagaaacagagaccgagctggagaacggcagattaaaggagatggagactgggcgagctggggctgggctcggccgacgaggttggctgctgagggagaagcacgaccaacgaccagaggagagcggagatgggagctcggttggggaaattggagaggaggccgagcagaggagcgcggtgtggactgtggaggcgagctgccatgggcgtgggtctggagacggtcaggagagctccacggcgatggccgatggggacgctccatggctaaatccggagcacgccggcgagctcgcgactgtgcgcagagaacagagaaccgcgcgacggggaagctccaggggcgagcttacggcggccatgggaactccgcgagctggagcaggagaggagtcggcctggcgcgcggcgagcttgagtagaggaaagctgcgcacgcaagaagatgaagcggctgggaaggatcacgagcacggctcgcgcaggagataa

SEQ ID NO: 27629 - DNA, 192 bp, Zea mays
  Peptide Sequence Number=SeqID_69408
atggccgcgcccagcttatctccctcagcgctcgcggctctctctctctctcccctggtccctgccatggctggtacgttaattaatcgcgtgatgcggaagacgagccaagtcgaccccaagcgtgggcttcttcgcaaggcgatgctgatggacaaacctgaagatggtcgtcaagtgctcattgactaa

SEQ ID NO: 27630 - DNA, 753 bp, Zea mays
  Peptide Sequence Number=SeqID_69409
atggcggcttcggttcttctcgccgcaccggctgcctcgcccccgctgacgtggcggagatggggtccccttctcgccgcgtcacatccacgggcgaacccgccgcctcccgcaccgcgcctgcgggcgcccgcttctcctctccgggcctcctctgttccccgtgattcctgcgctagagccgccgtccggaggacatcgtgtgtggcggcggcaataggtgcggctctactcgcccccctgaagattgctccctctccaaggagctggcggcggcgcggctgcgttagagaagggggccgcagaggacgctgcacgggggctgcggcaggagctcgactccgagcgggcctccccagagatggcagccagatccggccattgagccccctaaccgagcagatccaaggcaggctgtttgggttccagcattcctctggagaatgtgtctcaccatctgaacagtggttctcacttggagcatatccatgggatgctttgtatgggggagggaatatcctagcgttcgccttggctttgttcttctcttgcagcaggtgtgctcccagttctcaagctgtccaactcagctccttgtccttgaactatatgaatgatgttgggtgtgtgccaaatgtgctccatttcacaaatttgatagatggtcttggccatactggtaacttagaagcctacaggtatatctttgatgagatgttctggcgagtgcggatgtctattgacgtcttttag

SEQ ID NO: 27631 - DNA, 552 bp, Zea mays
  Peptide Sequence Number=SeqID_69410
atggcgtcagtgtgcccgctgccggctaggaagaaggagcccctactcccgcccgccgatcgatacggtgtggcctgtggtgtggcgtggccgcgtagggttgtgatccagcttggcgctcgagcatgcagggtgggtgtgcgcgggtattgcagctcgcgatcgcggcggctttggccatttgggtgggggtgtggggtgcctgtgttcgtgggatcgtgggagcaaatggcccgtttgatccgtttacacgaaagagatctcttttgtttgatgccaactggtggtggaaagtccatgtgctatcagatttcagctctgatccttgatttgaaaaatctgctaaccggcactgatggttgcctaggcattgtggatgatgatcatgttgaattgaataaccttcatcgacagctgaccacgacggtggcgacgatgtcgttctccatcccggatgcgcgggagatccctgcggcagtgggtcagaggggagggctgagctctgccacggtgatgggagggagtggtggaggtgctcaaagctctcactga

SEQ ID NO: 27632 - DNA, 213 bp, Zea mays
  Peptide Sequence Number=SeqID_69411
atggcgctgcaatttgggtttccccccacattgaaactccacgccgccgtgatagccctcccgtggccaggcgaacctgtagctctgggtacccgtggtgctcatcgtggcagcaaattgatcgattcggatgtgaccgactgggaacgtgagctcgacgccccggtttccgccctaagcgtgggcagaacacttttctggggtgccatttga

SEQ ID NO: 27633 - DNA, 285 bp, Zea mays
  Peptide Sequence Number=SeqID_69412
atggggtttctgtcagagcaggagaggtggatacacacgcgcttcaaggggctagacgtggggagggtaagccaggagcggctcaccggagcggcgcgatgcggggctgcagggagggtgcgtcgaggggagagaggatggggaaggggagagaagggagaggactcacctggaaccgccatgtgcagggagccagggacgcttgcttctgcacaatctggatctggggagggagacgagaggaaaaagaaaagaaaagcaaggaaaagagagggtaacacctga

SEQ ID NO: 27634 - DNA, 213 bp, Zea mays
  Peptide Sequence Number=SeqID_69413
atgactccctctccctccatccgcgcacgcgcccctcgcccagccaactgttcctttcggtggctttcttgcatcgtgcgagctcccgcggtaacagactcgcgtcgtctcccccgcaacggggaacaaatcaaacagactccagcacataaggatgtgcctacgcagctgaaagttccctatgccttggaacaggatctggatgtcgcctag

SEQ ID NO: 27635 - DNA, 291 bp, Zea mays
  Peptide Sequence Number=SeqID_69414
atgtccggtgcacaccggacagtccggtgcccccttctagccgttggctcggccacgtgtcccgcgcagatcgcgcggctgaccgttggcccggccgaccgttggctcaccggacagtccgagacaaccgatcaagccaaggatggaggcaagaagagcttcgaggtatcgagtgcacgggagaaggtcaaggagaccaggaacccaaagccaggggtgaagaagaagacttgcaaagtcaaggttgatcgagttaagaagacttatggtgcatcaaggatcactacataa

SEQ ID NO: 27636 - DNA, 492 bp, Zea mays
  Peptide Sequence Number=SeqID_69415
atgagctcgtcatccctgctcccctccttcccccttctctgcactctgcagttttgcattctgcgcagcaattttacttattgggatgattgggtgaggctaaaggagggatcaagcttgggacagttcttcgagcaatacttggagcccattaagttaaacgatgttcatattgattggaattctgaggatctgagctaccttggggaggataagttttcaaccaaatttggaaaagaggtggctagtgccactcctctccgtggatcagatgctgtgttgaaagcccacaatatggctgaggatgtaaggatccaatacgacgaccaagaaggtttcgagcagatagctcgtcaatttggaatattcgaagaatggaaggatggcatcccaagaacggcttacaaaggagtggtggtcttccggtacaacagtagtcaaaggcgaatatttctcgtcagcccagattctcttcgtcagctgggggtgtag

SEQ ID NO: 27637 - DNA, 303 bp, Zea mays
  Peptide Sequence Number=SeqID_69416
atggaggcgaaggggacaaggttgcgaaaaccaaagcagaaggcgagcagcagagtaaagaaccaccaccggcccctcttccggggcaagcgccacctttggcaggcgaagcaggcatcgtttcacctccgccatgatgaccgcgtcaaaaaagggaccgggaaaggggatatttcgaaagggatccttctccacgaaggaagcggaccccgagccctcctgctgatcaggggtttgaaggctagctcctcggaagggttcgacagccgccctagagcactcgggcttcaggctcattactga

SEQ ID NO: 27638 - DNA, 372 bp, Zea mays
  Peptide Sequence Number=SeqID_69417
atgccccaaaacccgatcaaaaggctcctacgcgatgcagggctgaaagcgagacatgggaagggaattataccaacggtggaggcacagggtcctctgtgcactacgatggcggctccgcggcagatatgggatgacgacaaggaattccacggtcaatgtttcggaaggtcggtcctacgacgccagcaacaacctccaggaatccgcgtcgaggatccgagctccgcgaagccgagcgagcatgggggaagagacggactagcaaggcgaggccaccagtcagcgacagcaagccagcacgagctgcaggaggtgtttgatgaacgggcccgcggcgccaacgagcacggatggggagcagccaactga

SEQ ID NO: 27639 - DNA, 231 bp, Zea mays
  Peptide Sequence Number=SeqID_69418
atggccaccactaccgtgcaaccactaatccctgcttgcaacgctgtgcccaagccactacatcgcgtccatcaacctgtgcacctgcatccacgccacagcccacccctccgtgtccccggcgaaactacctcttcctcggttgcctttggtgcaatctatgctcaggtaaagaaggtgtcgaggtggattctccaggagttccaggacttcgacaagttcaaggattag

SEQ ID NO: 27640 - DNA, 269 bp, Zea mays
  Peptide Sequence Number=SeqID_69419
atggctatccgcaagaacaagggagaggctggagaacagggaagggcgccatccacggaggtggaactcgtgcccatggagggggcaagcagagctgctgctcggccaagggagagaggggagctcgcagggggttgcttgcagggagatgtggcgtgcgcgaggagtaggaaggaggagggcgtcgcgccatggctggccgagggaggaagggagagctgctgcgcaagggacaagaaaatagggaagtcggctggagaagagagaag

SEQ ID NO: 27641 - DNA, 192 bp, Zea mays
  Peptide Sequence Number=SeqID_69420
atggcgcacgtttatgctgttcatgctaccttgcttcttggtgacaatgtgtcctcaaacctagatcctctctggtcccttccatttgccccactcaatatccctcttgggcagcttacaccttacagcagaattaccgcaaacccaaccagcactacaatatgtcaaccccttgggggcttgttcggttag

SEQ ID NO: 27642 - DNA, 489 bp, Zea mays
  Peptide Sequence Number=SeqID_69421
atggggatgtgggacttgacacagacggtggcacaaaggtggacaatcaccaccagctgctcctggttactggaggggatgtcctctgtcgtggacgtggtgctggagtcactagagttcggtggcgccatcagaagaagtgcgacaacgaccaggaagaggagcggcgataggtacccaaaagaagagatcggtggcttcgaccaaagatgtacagggaggggggagggagggggcagcggcgccctagggtttgggatggcaaacagagaggggaagggagccagtggcgccataagaggagtatggcttggtgtacaagtgaggaagctgccgtatgcggacagccagggccatcagagcctgcgcatccagacacaggatccaatcaggcgcttagtctcccattctctgtatgcagattgtacctttttccttcttgataaaatgacacgcagctctcctgtgctgttcgagaaattaaaatag

SEQ ID NO: 27643 - DNA, 363 bp, Zea mays
  Peptide Sequence Number=SeqID_69422
atgccctgcctgctcccgggttacgtcctgcgcgccaccttctggctgggccgttgcagagtgggcggtgacgacctgctagtgatggggggccaagggcctactctagtctgggcacctatttatccatattgtcaatgttgggaattgcgggcaagagaatcctatgctaacgtcactgacatccatgatggattggatttttcacagcatgaagatgttcaatattcatttggaatattttctgtaaaattttcctctgatggacgggaacttgttgctggcagcaatgatgactcaatatatgtctatgatcttcatgcaaacaaattgacattacgtttatctgctcatacagtatga

SEQ ID NO: 27644 - DNA, 357 bp, Zea mays
  Peptide Sequence Number=SeqID_69423
atgggtgaatttatggggctgattggttgcttgtgtgcgctcgcgcagggaccgttggatacaagttttagacacacagccgcctcgcctagagctcgcgctagggccagggtcgccctctcgctgctgctgctcgccgtcgaggtcgcggcctacctccggggctggcacctcgaggtggatgtgggcgcggggatcctcaccgtcgatgccctctttgtcgccgcctacgcggcctggatgcgcgcccccctcgactacctcgcgccgccgctgcagttcctcaccaacgtctgtgtcgtcctcttccttgtccacagcgtcgaccgcctcgtgatctgcctggtctgcttctag

SEQ ID NO: 27645 - DNA, 1674 bp, Zea mays
  Peptide Sequence Number=SeqID_69424
atggcagcgttagaagcccaagcagcggagcgggtgattgaggcctgcgtcaggacagagtccgtcaggaaatgcgtcttcacctcttccttgctggcgtgcgtgtggaggcaggactaccctcatgaccggcggtgccctaccaccatcgacgagagctgctggagcgacgagagcttctgccgcgacaacaagctgtggttcgcacttggcaaaacggcggcagagaaggctgcgtggagggcggcgcggggacgagacctgaagctggtcaccatctgccccgcgcttgtcactggtccggggttccgccgccgcaactccaccgcgtccatcgcgtatctcaaaggggctcgagccatgctcgccgacggcctgctcgccacggcaaacgtggagacggtggccgaggcgcacgtccacgcgtacgaggcgatgggcgacaacaccgccggcggcaggtacatctgctacgaccacgtggtcaagcggcccgaggagttcgccgagctggagcggcagctggggctgccgggaggggccgcgcccgcgcccgcgcacggctctgacgaccggccggccaggttcgagctttgcaagcggaagctgtccaggctcatgtcctccaggaggaggtgcgcgtacgacacctactactccgtcgcgtttgagggtgatgttatcagcacgctctaccgcatagtatctactctcgtgccttcatttcggtgcagcctacatgttcgggcggctcaaacttgcagccacgctacccgagcgcctcctgtcctgtcacgcggcgtcctcggctcgccgctcaccccaccctctcctccggtccggccacttctcaccgcctcttgccggacgcccaaaaaaatcgaagccgaaggagccgctcccatggccgctgccctctgcccgcgcctgcgcggcttcatggcctcctctcgcccgctcctggccttgcgccccgtagcgctgcgcctacccatgcgccgcgccgtcccggccatgcccctcgccgcccgcgcacgccgcggcttaggttcctccaccgccaacgcccagctcgacgaagacttcgccacggcttctgacctccggttcgaatcgccactcgaggtagtcaaataccccgatcccgtcctgcgcgcgcgcaacaaacgcatcaacacgttcgatgacaacctccgcgccctggccgatgagatgttcgacgttatgtacaagaccgatggcattggtctctcagcaccacaagttggagtcaatgtgcagcttatggtattcaatcctgctggggtgaagggggaaggagaggagattgttcttgtcaacccagtgatatacaagtccgccaaacgattgcttgtgtttgaagaagggtgcttatcgtttcctggaatatatggcaatgtggtgagaccagaaagtgtgaaaattgaagctcaagatgttacaggggcaaagatcaaagtaaaattatctggtatacatgcaagagttttccagcatgagtttgatcatttgctggggattcttttctttgatagaatgacaattgatgttcttgaaaccgtacgtgaggaactgaagactcgggaaattttgcgaatactggaacacattgtccagctgagcattacactgaagagtttctgggacagctga

SEQ ID NO: 27646 - DNA, 348 bp, Zea mays
  Peptide Sequence Number=SeqID_69425
atgtccggtgtacaccggactgtccggtgtaacggtggggcaacggctacttcaggcgccaacggctacctgcagcgcattaaatgcgcggcagcgcgcgcagaggtcagggacgcccatgctggcgcaccagacaccctacagttcatgtccgcgcgccggctctgcgaattcccgaaggtgaagagtttgaagtcggtcttccctggtgcaccggacactgtccggtggcacaccagacagtccggtgcgcccgaccagggtgccttcggttgtccctttgctcctttgtttgaaccctttttcttggtctttttattggcttatggtgaacctttgtacctgtag

SEQ ID NO: 27647 - DNA, 792 bp, Zea mays
  Peptide Sequence Number=SeqID_69426
atggtcacaggcacaggggaggtggtgacatgctcgcccacccagagcccggagcttttcttcgccgttcttggtgggctcggccagttcggtatcataaccagggcaaggatcccgctgcaacttgctccgcccaaggtgagatgggtgagggccttctacgacagcttcgagaccttcaccaaggaccaggagctgctggtctcaatgccggagctggtggactacgtggaggggttcgtggtcctgaacgagcagtccctccgcagctcctccgtcgccttccccgcccaggtcgacttcagcccggacttcgcctccggcgccggcagcaacaaggtccactactactgcatcgagttcgcagtgcatgaattccaacagcaagactccgccgctgatcacgtcagtctctcaacagctacataccactcctaccagcaacagcaaccagtcgcgttagcgtcgtcaacagttgtggacctggtctcggggcagctgagctatctgaggccccacgcgtacagcgtgcaggtggcctacctggatttcctcaacagggtgcggatggaggaggagagcctcaggagccggggcctctgggacgtgccgcacccctggctcaacctcttcgtgcccaggcatggcgtcgcgcgcttcaaggacctgctcatggacaccatcacgcagggagacttcgagttcgaggggcccgtcctcgtctaccccctcctcgctaacagtacagtagagtattcgttcatgaaagaagttgctcgtgctggtagataa

SEQ ID NO: 27648 - DNA, 378 bp, Zea mays
  Peptide Sequence Number=SeqID_69427
atggaattgaatgctcaaggcaaaggtggcggaccgtccgtagttgaaggattggtgtttggacagaactcgagtagttctgtgttggttttattttttgaactgcggaccgtccggggcctgagtgcggaccgtccacagtacaaatattttgtattacggaccgtccagggtccaggtgcggaccgtccacagtacaaagattttgtattgcggaccgtccggggtccgggtgcggaccgtccgcagtacaaatttcagcaaatgtgcagagtcagcaaaacttcgttttggctcagttttatgtatcgcggaccgtccgaccttgaggggcagaccgtccgcaagtcatttttgaatgctctgacatttttataa

SEQ ID NO: 27649 - DNA, 282 bp, Zea mays
  Peptide Sequence Number=SeqID_69428
atggggcccttgagaatgtggagagggacgcttcgttgcaagacagaggtcgagggagggggagggctggacagcgatgtcctacacgggggtggcacgtcgaagaggtcattagtagtgcgagacggaggcgggcgagccagacgacggtggcctacgtggggcgacactttgaggaggtcatcgacggtgtgggcactgggcaaaatctgcctccctgcgggtgtggcgcggcgggggccagaggcgtgcatcgagggcacggcgggggaaggggattag

SEQ ID NO: 27650 - DNA, 378 bp, Zea mays
  Peptide Sequence Number=SeqID_69429
atggaattgaatgctcaaggcaaaggtggcggaccgtccgtagttgaaggattggtgtttggacagaactcgagtagttctgtgttggttttattttttgaactgcggaccgtccggggcctgagtgcggaccgtccacagtacaaatattttgtattgcggaccgtccagggtccaggtgcggaccgtccacagtacaaagattttgtattgcggaccgtccggggtccaggtgcggaccgtccgcagtacaaatttcagcaaatgtgcagagtcagcaaaacttcgttttggctcagttttatgtatcgcggaccgtccgaccttgaggggcagaccgtccgcaagtcatttttgaatgctctgacatttttataa

SEQ ID NO: 27651 - DNA, 1122 bp, Zea mays
  Peptide Sequence Number=SeqID_69430
atggctaggaagtgctctagctgtgggaacaacggccacaactccaggacctgcggcgggcacagcaggaccgcggcggccttcgagaacaacggcggcggcgtgaggctgttcggggtgcagctgcacgtggggtcctcgtcgcccgtagccgtagccatgaagaggtgcttcagcatggagtgcctgtcgccgccgccgccgctgccgccgccgcccgccgcgccggcgtactacgcggccgctctcgccgccgccaacagcagctcgccgtcggcgtcggcgtcggcgtcctcgtcctcgtcgctcgtctcggtggaggaggcacaggcacccgagaagatggccagcgggtacctctccgacgggctcgtgggcagggcgcaggcggagaggaagaaggaagcttgtttgagctacgtaaataatctatctaaaaaaaaggtcttcttctctgggttttccgaccggccatcaccaggcgttccgtggacggaggacgagcaccggcggttcctggcgggcctggagaagctcggcaagggcgactggagaggcatctcccggcacttcgtcacgacgcggacgccgacgcaggtggccagccacgcccagaagtacttcctccggcagagcagcctggcgcacaagaagcgcaggtccagcctcttcgacgtggtggagaacgcagctgagagggcgacgacgacgagctccagggagcgcccgaggctcacggtcacggatgcgataatcgcgaccgcctctgctgcagcacccggaacaacgacggcagcactcccggccctgtcgctcggcatccgacggccagcgaggcctgagtaccacgccgcgctgcctccgaacagcctgtccctgcagctgccgcggtgctcggcggcaatgggtagcgcgtcgccgtcgccgagcctggcgctggcgctggcggggccgaaacacaagcacccttcgccttcgtccctgacggcggcaaaggctagtagtagtggccaggcaccggacctggagctgaagatctcgaccggccggcagagcgagcaccaggtccagacgggctcgccgccgaggacgccctttctgggcaccatcagggtcacgtaa

SEQ ID NO: 27652 - DNA, 420 bp, Zea mays
  Peptide Sequence Number=SeqID_69431
agaagcctccgcggctgccctgccattctcgccctcgcccaatactccatcgatgggaagggcaccattccagggattgcctccacggatctgggggccttcctcctcaagccatggtattgggcgagggtggctccgccgcgtgcgcttcagttcgccgagcgcccctcccccgtcgttgctgccatccactgcgggctcagccatcacgcccgcccctcccccgccgagacatcgccgtcaccctgcgcgcctgcccatccccgcatcacgcccaggaggtacgcagccccgtccactgttcctccgcccccgccgtcccaacaccccggcccaatccccgccttctccacgctgctcaaaaatccccctgtgcctcggattcccacgcgcccctgcatctgccgacaccacaacgag

SEQ ID NO: 27653 - DNA, 513 bp, Zea mays
  Peptide Sequence Number=SeqID_69432
atggaggtgccactagaagagcttgacatggacgaatcggttggatatgcctttgataccatccgacggctgtcaggccggccgtcggacataaccttatctccgacggctcgtctaacagccgtcggacataagcttatgtctgacggtctctcctggacaccgtcggaaataaggagttttaaccgacggcccccgagcgcgcatcgtttcattctaccgcgcgcagccaaccatatgcacgcaagccgccgccgtcgccgccgccgtgacgccatcgccgtgtctccgccgccgccaggctccaccgcccaagcacagcccgtgcccgtcgacctcccttcccgccccgacgcgcagcccgagcacgacgccaccgaagccaccccgacgccaccggagccgccccgacgcagcccgcggccgccggagccctctgcccccgtccccaacgccaccggcgcccgccccgaccccgccggagctcgcttcaccggttcatcgtccggcaaa

SEQ ID NO: 27654 - DNA, 183 bp, Zea mays
  Peptide Sequence Number=SeqID_69433
atggcaaaggcctgcgagcgcgccgtgctgccccgcgtcatcggctgctatgatgacgaggaggatggttatgattatgcttatggtaatggttgcccttggtgcaatctatgctcacgtaaagaagaaggtgtcgagatggatctccaggagttccaggacttcgacgagttcgaggattag

SEQ ID NO: 27655 - DNA, 312 bp, Zea mays
  Peptide Sequence Number=SeqID_69434
atggcggctcaccggacagtgaactggacctgtccgagtctagcaactcgaagtgatgtcggagatcacgccaagagggagatcgtgaccggtgacaagcccgcaagctcggggaggactctttcaagggagtccggcaacaagcacaaggaggaatcctcttcctccatcaagtcccatcggagaggcaacaaaaagaagaagatgaagaaagtggtctactatgagaccgactcatcgtcgccctccacatcaagctctgagtcatccatcgcttctaagcgccatgagcgcaagttgcttacaggggag

SEQ ID NO: 27656 - DNA, 426 bp, Zea mays
  Peptide Sequence Number=SeqID_69435
atggagaaccacctgggaaaacagtgctaccacaagggtggtcaagatcaggtaccacaggatgaggcgcatggaggatgttgtgatgagttcatgagtagggatggcaatgggtttaaaacccgcggtgtttgggctcgcttggcaacgtgtcaaccagttccaacatttggcacccattgttcgtgcttcgacaaagcaatcccacgatggctcccaagaaagcgacttccaaggccaccacctctagacgacgtagcgaagacaaccatcgcggagaagaaaggcaaggcagcccttgtcggcgaagctccccgagaagcacccggaaacgatggagcagtcaacagtaagcaccctcacacagagaacccacccacctctaaggcaccgttcgcacgtgcagctctgaagacctccctctaa

SEQ ID NO: 27657 - DNA, 942 bp, Zea mays
  Peptide Sequence Number=SeqID_69436
atggaagttgtgctcgctccggcccagcacgacggcctgcacgcggcgttttggcccaatcccttcgacatcggcgttggcggagatgggcggttctcctcgagcctctcctcgctcggcggcgatcgcttctgcggctactccaccaccgcctcccgcttcgtcaatagccccgggctatcctcgccgtcgccgcgtgccgactcgctgtcccgcggctcctccgactctggctccgtcgtcgaagacggggacgatgcggcggccaccgcctccagcgtcgcggagcgtcgactccgcctcgtgcgcctcgcgctccagtaccaggaggtggtcaaccgcttcgagctctgcctctcgtacctcgccgacgccatcaacgaggcggccgcgctccgccaggagaacgatgagctccgcgtcgccaacgagtacctcgcccgccgcatcaacgtggtcggcggcaggctcgccgatgagttcagcggtctccgcctcgccgaggagcacaccacgccacctcctccgtcaccgctgcccgctacaccagtgatgccgaagagcatctccgttcgctcgcccggctatctcaagatgatccagaacggcaagcatcgggcgtccaagccaacgaagggctcgcagcgcgtgttagtgggcatggaaggcggagtgaagggggaggaggaggagaagctcaacggcgggctgcagttcgaggtgtacaaccagggcatgctgaagacagagctctgcaacaagtgggaggagaccggcaccgtgctgagccttcggatgcttggtgagcactgccggctcacgggaggcagcatttgggtcgggtgggctgcgcgcgtctccgacgaaggacaagggcaagcgacgggagcgagcggcggcgactttgagcgtcagtttcttggtagcgagagcagagggtaa

SEQ ID NO: 27658 - DNA, 303 bp, Zea mays
  Peptide Sequence Number=SeqID_69437
atggcgttgtggtgtaactgctcatgtacccctgtcctccattcctcccccttcgtgggccaggtgcccaagctcgtgaccgaggtcgacctactcgccttgttccgcgaagtcgcaaccgtcgtcgagatcaccatcataaaggacaaggtctcccgaggtgcagatctgccttgccccatatctaggctcatcgtcttcccttcgccgcgcctgctcccgctcggtttgccgcaatgtcatgccatgacatccactgctcgctctgggtcggtgctcaagcacttgacagaggccgactag

SEQ ID NO: 27659 - DNA, 1272 bp, Zea mays
  Peptide Sequence Number=SeqID_69438
atggttaatgatgggtttcctttctcaattgcattgtcatggaaacaagactcgcagaacagtgcaccccaacagaccctttacattttgaaagttgatgttttgtatgtggacacatgcgactcgcaaattccacagaagataagcacttacacaattggacctttccaaccctccaaaggtgagagggccaaactgaaagttaaagtgcgtctcaacatccacgggattgtcacagttgattcagctatgatgctggaggaggatgtggcagttccagtctcatctgctaatgaagctccaaaggatactacaaagatggacacagatgatgcaccaagtgatcctgtctctggaactgatgtgaatgtgcatgagcctgatactactgaggctgctcctgcagctgaaaatggaacacaaaatcccgaggaaaaatctgttccaatggaaactgatgcaaaggttgagccatcaaaaaggaaagttaagagaacttctgttccggtccatgcgttggtctatggtgccttggctgcagctgacctgcagaaggctgtagagaaagagtatgagatggctcttcaggacagagtaatggaagaaaccaaagagaagaaaaatgctgtggaagcttatgtctatgacatgcgtaacaagctctacgacaggtacaacgattttgtgacacctgaggagaaggaagggttgattggaaaagctttcaggaggttgaagattggctatatgaagatgattggtgacccaattgaggcacggtacaaggagtcgacagaaaggggttcctctgtagatcaactggtctactgcatcaacagtttcagagaggctgctttgtccagtgaccaaaagtttggccatatcgacatatctgagaaacagaaggtcatcaatgagtgctctgaagtagagaactggttgagagagaggaagcagcagcaggacgccctacctaagcacaccgatcctgtgctgctcgtatcagatctgaagaagaaagctgaagcacttgacaggttctgcaaaccgatcatgactaaaccaaagccagctccgaagccacagactccgccaccacatactccacctccacagcctgaagcccaagcatctgaccctcaaacaccagaacaacaacaaagcgggactggtgcagctggtgagccgggtagtgagggaggtgtgcagcaggcctccggtgagcaaatggacatggacaggcccgatgattctgcggatgttgcggcataa

SEQ ID NO: 27660 - DNA, 1971 bp, Zea mays
  Peptide Sequence Number=SeqID_69439
atggcgtcttctccgatcgatcccgctctcaacctcaccctagaaacacaaactcgagctctgctgtccgaattggataagtgtctcacagccatcgactccaaatctggaggccccctagctacggtggtcgcagtcgcagagggtcagctccgccacgctgaagccaacaccagcacacgcatcgcagaacacgaatcgaccacccaggtgttcgagctttggcatccccgcatcgactccggaaccgaccatctccactcctccatggtccaggttcgagcggcggtcaacaccagggacctacggtggccgcctgatccacacggcggtggctccagccatccaggcgtattcggctctgtgagcgagtccgacctcgcctgcccggagccgctcgtcgttgatgctgcagtgggtgcgggcacgaccaccaatgctgctcgtgtcaccgacatccgccttgacaacctcaccaccgcgctcctggggcccaacctcaactccgctgctaccccgactcaccttcgcgagttgcgtgccgagctcagcttatcctccctggcgtcctctctcctgcagttggtgacccgtgaggaggagggtgcggttcttagcaccttgcccaccaagtgtttgatgcaaggcttcaacagcagctgtgactctgtgttgcatggcatcaccaaattcattaagcccacgagcgactggaggtcacctagccatgtccttgaggtcaccatacaccaggtctgttaccccatgactgagagtgtgattcatgcagtttttgctccttatggaagggtcgagcttgtccatataattggaggtttggatcctgtgttggctcatgtggtatttgaaacaaagcatgaggcagctgatgcctttggagagttgcatggaaggaacatatatgatggttgttgtcagttggacattcaatggtgttcatctccggatcctaggaacacgaacttggccttcagttgtggtgacaccatggtgactactgcaaccgccagacctgcaacctctgtccttggtcaagacgaattctccaacaccaacaattctgttgaggttgcaacaacatttgagatcgtatccggcgtcaccaacatcgctccaccagctcctgtgtttgccaaggctgctggagataattcaaaaaacattattgttgattctacatacacatttctaggccacaacgatgaaatcttcactgttgcatgttgtcctacagatgcatcagttgtggcttctagaacatactccaatgtcaatcttcatggaatttctgttggtgatgctacacttcagcttccaacaagtactgttgattcagatgatagtagtaaggagccatatgagttagttgaagcccctgtttcaaccccattagaagacttcaagcttatttatgcttgtgcattggaagccttccagcttatttctgggtgcagcaaaagtgtgtcaaactatctcacgtacaacggtctagaaggaactcacattaaagtaattgagtttgtcagcggcaacgattaccttttgcggaaggtgctggagcacatgacacggaaaaacctgagtgttcccatgtttgagctcctcaaagaggttccctacaccattgcttctgatcgttcatgcactcagttggagttcgacattgctggaactggtatcacgtatgaatctagcaactgtattggtgtatacaccgagaactgccctgaggttgtagaggaggcaaagaggtggttgggctattcactagactcatttgaggtggttgaccaaggtgtacaacatttctttgtcatgatttgggatccgagtggaattgatgtcatgtatcggtttgagggcaagccgatttttaagaaggggggaatgttagggacctgttactatgccatcacctgtttaatcactgaaagagccatcaacagatga

SEQ ID NO: 27661 - DNA, 1002 bp, Zea mays
  Peptide Sequence Number=SeqID_69440
atgggcgagacaatctcgttcgcccctcggaaggccatcgagtcccaagtcttggcggactttgtggctgaatgggtcgacacccagcttccagcggctccgatccaaccggaactctggaccatgtttttcgacggatcgttgatgaaaacaggggcaggcgtgggcctgctcttcatctcgcccctcgggaagaacctccgctacgtgctgcgcctccattctccggcgtccaacaacgtggccgagtacgaggctctggttaacgggttgcgcatcgccatcgagctaggggtccgacgcctcgacgctcgcggtgactcacagcttgtcatcgaccaagtcatgaagaactcccactaccgcgacccgaagatggaagcctactgcgatgagaaggcacccgggggctacacgcacctgctggtcgccatcgacaaattctccaagtggatcgaggtccgacccctaaacagcatcaggtccgaacaggcggtggcattcttcaccaacatcatccatcgctttggggtcccaaactccatcatcaccgacaacggcacccagttcactagcagaaagttcctggacttctgcgaggatcatcacatccgggtggactgggccgccgtggctcaccccatgacgaatgggcaagtagagcgtgccaacggcatgattctgcaaggactcaagccacggatctacaacgacctcaacaagttcggcaagcgatggatgaaggagctcccctcggtggtctggagtctgaggacaacgccgagccgagccatgggcttcacaccgttctttctagtctatggggccgaggccatcttgcccacagacttagaatacggttccccgagggcgagggcctacaacgaccaaagcaatcgaacaaaccgagaagactcactggaccagctggaggaggctcgggacatggccttactacactcggcgtggtatcagcagtccttgcgacgctaccacgcctga

SEQ ID NO: 27662 - DNA, 129 bp, Zea mays
  Peptide Sequence Number=SeqID_69441
atggcggcggcggatccgagcttgggcgaggctcaagattttctgtgcgcgtgcgatttcagaagattagcgaggccagaggacgggcgatgccaggtggggatagatatgctcattaagataagatga

SEQ ID NO: 27663 - DNA, 735 bp, Zea mays
  Peptide Sequence Number=SeqID_69442
accgaggcgcggctagcgcggttcgcgagcgggtgccccaacctacggttcgagttcgagggcatcgtggatggcgcagacgacagtgaacgcatcacggtcgacgacggcgcgaccgtggttgtcaacctggtgttcccggcggcggcagcagcagcagcacggagctcctcggcgacgagcagcacaagagaaggagcgtgcagcgcgctggctcgcatccgctcactggacccttccctggtgttcttggtagagaaaggcggcggcggcggcaatgccacgtcgagaggacgacgcccaagcttgctggcgccgttcgcggccagcctccggtacttcgccgcggtgttcgactcgctgcacgagcgcctccccgccgacagcgccgagaggctcgcgatcgagagggaccacctcggcgcggagatcagcgacgccgtggcctctttagcagactacagcagcagcagctacggcggcgatgatgagccgagcagcagtgccactgccggctgcagctggaggcagatgatggagcgcgcggggttcgagggcgtggagctgagctcgcgagcggtgagccaggcgaagttgctgctgaagatgaagagcgggtgcggcggcgggttccgggtcgtggaggagggggatggtggcagggccgtgtcgctggggtggagagacggtagagcgcagctgatcaccgcgaccgggtggcggcggtgccgttaa

SEQ ID NO: 27664 - DNA, 396 bp, Zea mays
  Peptide Sequence Number=SeqID_69443
atgaaatcaacggctggcggcttctcttctcctaccggccccaggacacggcggcgcccactccgtgcggcggcgactacgctggtgaactgcggtcccgcgcccaaggacactacccccgagcccgatagcatcaacgcgagggtggggaagtcgatcacagtgccggcacataaaggcccagagcacacgccgttgagatctgccacactggaatccccggattctgttgcaacggccgctccccgagctaggagccggaagctcgacttgatccagcgggcccactcgtcggcgataaagctaatgcaggtgcacgcggttgagagggttcgagaaccactaaaatcagagttacgattaaggagttatgattttctaaaggttatgtgttag

SEQ ID NO: 27665 - DNA, 183 bp, Zea mays
  Peptide Sequence Number=SeqID_69444
atggcgaagttgaagctttcgaagaagagattcttggtgatcgaggagatcttggagaaggctgtttgcgatcatgctaaggctgtagttcagccagactttgccttctcaactgatgctgagcttttcctcctcccgaaccatacaatcccgaagctgacccgtccgtcaaggaggcgctag

SEQ ID NO: 27666 - DNA, 219 bp, Zea mays
  Peptide Sequence Number=SeqID_69445
atgcggcggctcggcaaggtggtggtggctggagaacggggtgcctctgcaaacgatggcgaacgaaggccccgaaggcagcgatcacgttatatatccttggtcccaggcttcacgccagctggcggcaatggattccgtagccgggagaaagggaaggaggttgcagccgccacggttttcctgggcttcgagaagatctacacgggtgtttcctga

SEQ ID NO: 27667 - DNA, 381 bp, Zea mays
  Peptide Sequence Number=SeqID_69446
atgaaagaccatatcaaggaaaacaaatttgatgcaaagagttggttttctactgtggagaatttagagaaaaaacggggttgcgccgccgtagaccggagccgtggacagctccatcgtcgaccgaccaacttgcatcttccccaagcgattacgtgcacgcacagggtccccgcgagccgattaagcctgtacccaggtccgccgtggatcgagggtcacgagggtgtcgtcgccgtcgtctgtgtcgtcctgtcatggctggtctggtgccggtttaccggggttgagcacgacagtgtcgtggacgggagtttgcaaaagagacgaaaccgaggggccttaatgcagtggtcagtgacacaggataatagggcatag

SEQ ID NO: 27668 - DNA, 204 bp, Zea mays
  Peptide Sequence Number=SeqID_69447
atggcgaactcgattagagcacgtaccgcagatggaggtcaacgggacgaaggggccacggcgaatggcggctcgcaggctacggcgagcgatttgccgcgaaaccgcactgtcccgagccccgatgcccacggtatggtctcagcgacgcttgatgatgctcccaaacccgagagcgagatcccgacgagggtgtatgcgtga

SEQ ID NO: 27669 - DNA, 477 bp, Zea mays
  Peptide Sequence Number=SeqID_69448
atgcaggcagcatgcaaccgcgccatggggatgcaccctttcgacttcgacgcgcccagcatggagtcccaggcccacacgtcatgtaaccggcgcgccggttactacgtgcgaaaaactacagtgccactagcgccagcgccgcgccttctcgactgcggaaccggtgccgcaattcgaggcaaccctgcgcgtggaccagcagtgtcagccaaacacgccggtcacgggtcagtcagccgcgggagaagggatcgggaaagaggatactccgaaagggatccttctccgcgaaggaagcgggccccgagccctcctactgatcagaggttcgaaggctggcccctcggaagggttcgacagccgcctcagagcattcaggctccgcaaccactactggtcagaggttcgaaggctagcccctcggaagggttcaacagccgcctcaggccactcaggctccgcgcccactactga

SEQ ID NO: 27670 - DNA, 672 bp, Zea mays
  Peptide Sequence Number=SeqID_69449
atggaggcgaaacacgggctaagacagttgaagtcttgcacacttaggaaggtaaagttggctggaaacaagacattgtcgcaaacttctttgaggtttagtgccacagatgtagggacagtttcagtggaaaactacacatttgaccaggacatagctagaaaggaacttgctgccatgataattctccatgagtatcccttaagcatggttgatcatgctggatttcaaaggtttgtgcatgcccttcaaccgttgttcaagattgggactagaaacacactaaggaagcacattgttaagcaatatgatttagagaagaagaaagtcattcaatacatgaccgaaattaaatcccgggttgctatcactagtgatatgtggacctctgataaccaaaagagaggttacatggcaatcactgcacactttgttgatgaatcttggacaccaatgcctttaaaccgataccggtttatatatgtgccaagccctcacactcatgatgttattggtgatgtactttatgagtcactagtgtattggaatcttaatgagaaggtatcaaccatcacactagatgaagggatggtgaatgatgaagggcaacctggtaccttctggtctgttctccaagaggtgcagaaagggctacaggaactttcactttaa

SEQ ID NO: 27671 - DNA, 276 bp, Zea mays
  Peptide Sequence Number=SeqID_69450
atgaccggggtgccaacagtgctagcgggtggaactagcgacgcaggtttgccgccacaacggccgaccttcaactccccgtctgatgagctggaagacaaaagcgatatgacctcacctccgattcttgagccccaccaccctgtgaggaagcgacaagcgacagaaagggagaaaacaatgttcgacccaacaaatgctcgactcggtaccagcccccgaaaggagacactccccctcagtggctactgtcggggaaatgatcccagtccctag

SEQ ID NO: 27672 - DNA, 303 bp, Zea mays
  Peptide Sequence Number=SeqID_69451
atggttagggcgatgcccgctcgacctgccccgtctgagagccctaacgccatctcgatggccctcaatactctcagcctcgccccacagatgatgccctattgcgggggcatcgatgcctttccacctcgactgcgccatgccccaacggtaatcgccaccctcgggtccctcgaccacctctccatgatgaatgacctggagttcatggagatggccggtggtggtggggacctcatattcgacacactctatacagacttggactcggatctaggtccctctgcgagcgatgacgagtag

SEQ ID NO: 27673 - DNA, 153 bp, Zea mays
  Peptide Sequence Number=SeqID_69452
atggacttcatggtgtttgaggttgctgaattggatggagcaacaatgatttatcacactaataataaaatgaaaggttatttgttggttttaaactcagtcattgtgaactctcttttaatcgctcacttcattgaccatgttgtaccatga

SEQ ID NO: 27674 - DNA, 183 bp, Zea mays
  Peptide Sequence Number=SeqID_69453
atgtctaatgtaggcactaatagtgcatccgacattactgatgcccttaatttcaacccactgaagacagaatggagctttgtggaatcattgagtgtcttgttgattattcttggcttagagatgattttgagggcctctcgtgctaatttaccacttgagattcatgaatatcaagtttag

SEQ ID NO: 27675 - DNA, 267 bp, Zea mays
  Peptide Sequence Number=SeqID_69454
atggcgttcacgggcgcggtcgaccgatcagtgcggtggaattggtcgccgacgctggcactccaccgcgttgccgcacaccgtcgtggccagggacctccacactgtgaagtccgcgctagggaatcgacgcctgggtgcttgtgcgcggagatgacaaactccggccatgttgtccgctgcaaggtttgcgccgccatgcgcttctggtgccactcgggtcgcgtttgggtggaagattggttgatcgccataggtttcgtgtaa

SEQ ID NO: 27676 - DNA, 635 bp, Zea mays
  Peptide Sequence Number=SeqID_69455
gaatcgaatctgaatgcttcagagagaacgctacattcgagaatttggaagctaaaccctttctccaagtgtaccagagcgtcctcaactccaaggccactgaagactctttgtgcaacttcgccaagtgggagccatgccatggcaaattcaaattgcgacatccatggagccaataccagaagctcggcgctctttgtcgcgagtgcgcttcttcaatggaggctctctcctcctacgtcgtcaccctagcaagaaccgagtatcctgaagcgcatccggagctatgctcacagcaggttcgaacagcatgccgccagatgagcttgcactcggccaaggcgctccgagagctcacagcagcgatgcggacgatgacgactgtaccgtccccagccagcgtccacgtgtctgcagcgatcaaagcggcgaaaggcctcagagacgggttatcagagggtgcggatctggcgcgagcgatgcatgttgctgttatcgcatctcttctctctgagttggttaccaagaccaagcagatcactgagtccgttgatgtcctcgcgcgacttgcccgcttcagaaaccctgaaaccactcagactcacaagggtgtggctatcgatgtagtgagctga

SEQ ID NO: 27677 - DNA, 258 bp, Zea mays
  Peptide Sequence Number=SeqID_69456
atggcccaaaggaggagcgcagacgacttgtttatatacccagagatcgaggttggacgagcgcatggtgaggagaagatcacgcgatttgttggtgcccgcgacatttgcgcggattctgttctcagcggtgagtccgactcgagaaggatatcagataggatcacggggaaagaggggaggtcttacacttcacctgacggaagatcgggcacccccgttcctatcagatgcagagctaaaatgccacctaagtaa

SEQ ID NO: 27678 - DNA, 243 bp, Zea mays
  Peptide Sequence Number=SeqID_69457
atggcgcgccgtgtgcaataccgagggggggacctggtggttgagaaactcctcaccggaggaagacctctaccgcaggtccacggtggcgtgtgggcgatgtggtggctgcgcgcggaagcctcagttccggttgaattcctcaccggattcatgttggtcgtagatcccactttgactggaaacaacgatgtcgctgggcgttggacaagctccctccacggcttcaacggccggtgctaa

SEQ ID NO: 27679 - DNA, 726 bp, Zea mays
  Peptide Sequence Number=SeqID_69458
atgcaaatagtcgcaaaggccacggaccagacacacaagcatgatacgcctgaagggaacacggtttctgaagcaaatgcagatgttacctgctctttgaatgaatcgatgggtaatggcagcaatttgtcactgccaggatcctttcttcctaaatgcgacagcttgaacatggaaatctcatgtataaatccttggggatggatgaaaaaaaagacttgtgagcggaagccattgccctgtgatggctgttttgcatggcatcctctgagacatgctcccatggttgccattgaaaatgctgctgagagggatagaacgatgttcccttctttggcttcaataaccaagacagattcaaatggcaatctagagaagtattgtgataatgaacaagcaaaaaggctaaagacagatacaaaagtcaaatttaaacatcaggataatgagccgtcggcatctgaatcattctgtggtgacttgtctgaaaccagcagaccatatctctgcacaggatttgatatctaccttgtttgggaaccatgcacaatgtgtgcaatggcacttgtacaccatagattcaagcgcgtgttctatgctttccccaatcctgtcaccggagcgctcggtggagtctacatgttgcatggggagagaagtctaaatcatcactacaatgtatttagggtttcagtacctgaggcatactcgaatggtttgaattag

SEQ ID NO: 27680 - DNA, 512 bp, Zea mays
  Peptide Sequence Number=SeqID_69459
gtgaacacgccaagaatgagaaggtgacgtcgggaggaaaacccgagtcgtcggggtccaagctcgaagacaaggtgccatcaagagggatgaagccatctggagacaagcacaagcacaagcagcatgaggaagaatccaccggcaccactaagttgcacaagaagaaagacaacaagaagaaaaagaagaagataaagaaactggtctactacgacacttactcctccatgtcatcgacctcatacatcgagtcaacatccttcaagcgccaagagtgcaaaaagagtaaaatggggcatcacctaacctcactccacgaaattatttgggatattgttgagtttggtgcacagggtccacaagtgggcaatgaggactatgattcggatgaggccgcccaaattcaacatttcaactcccaagcgaccaccatactccttgtttccttgttttcacacctggttttggaagaggatcccaaggccgctcataaccgtgatcacagctga

SEQ ID NO: 27681 - DNA, 321 bp, Zea mays
  Peptide Sequence Number=SeqID_69460
atggcgagcgtagtagacttccggcgaacagcaaagactgggcatggcgatggccgacacctgccattgatggcgagcaacaatgggaaagacgagagggaaatacgcgcgagtggggagggtgacggacggtcgacttctctacggcgcaggcgccgggagtcgaggagcagagcagcagacacgaagtggcggtcggcgcttcagctttctcatggcgtcgtcgtcgtcatccgattcgtgcatgcgggcaaggggctggaagacaagcagggctgggagggcccacacatggccgacggcttagattcttttttctaa

SEQ ID NO: 27682 - DNA, 252 bp, Zea mays
  Peptide Sequence Number=SeqID_69461
atgaggagctcgggtccgggtcttatagttcacagcgaggagctcgggtcccggagggggtttacaatggccacggatttcatggaggggtctgcatcggcctggggatcaaggactaggcgcatggtcccaccaactagtgagccaaatgcgcaggtgaagttggcaacctgggtccatctattagcgccagcccaaacgcgcagtggtggctgtcctgcgggcaatgatgtcagtgaaaggacttggtga

SEQ ID NO: 27683 - DNA, 426 bp, Zea mays
  Peptide Sequence Number=SeqID_69462
atgctggtagactacacaacgatactcgatagaccaggtgtgtcggtcgaaggcccgacgcagcagggtatcaagagcgtcgtggaagtgacacctacgagcggcgtcatgagtgatgagtatagcgatccacccctccggctccggctcctccgaacgctccgtgtcatggctctaactgccaccggcgtcgtcgtcgtcgtcgtctccgtctccatcggggtctcctccagcagccgggatgccctgtggtggtgtagggggcatctctggctgaggtgcaggggaaggcggcctctcagactccacctcccgctaaggcgagggggaagagtcctgctgctcctgcttctactcctggcgtcggcgctcctgctcctcgtgcaggcgacgatgcagtctctccagctggctggactgacctga

SEQ ID NO: 27684 - DNA, 357 bp, Zea mays
  Peptide Sequence Number=SeqID_69463
atggctggaggaagcctcctccgtagagctggaggatggtttccacccccaggagctggaagaagagatggccagccgactcgtgcgggagccggcgcggaccgagtcttctccaacacactccaaggtcctccccctacgacacaggggctgggtcccacgcgtcatgcaagctggcccagggcagaagaagccaaaccgccgcgcgtggtgcgcgtaactacccagcggttacaagcgctcctccactttcgcccaaaccagcgggtgaaagggcggaccgccatgcaggcggcatgcaaccgcaccaagggggcgcaccctttcgacttcgacgcgtccagcatggaggcctag

SEQ ID NO: 27685 - DNA, 252 bp, Zea mays
  Peptide Sequence Number=SeqID_69464
atggctgatgggccaaaaagaggagtgcgcgtgcggaagcccaaattgaaggtccaaagccgcgccccttttgaaccccgcaccctgttcgcccacgtcccctcctccatttgcgccctctgcctagctctctcgctctctctctctcgctctgcccacgcgaaccgagaacctccgccaccgtccgccgacgtccactgcctgttctgtggccgccgttacgcctgtgccccgtctagagccacgatttag

SEQ ID NO: 27686 - DNA, 294 bp, Zea mays
  Peptide Sequence Number=SeqID_69465
atggcgctgcacgtcgtcgaaggcacctgcactggtggagccatcatcagccacctctctagtcctcctccttcctgctcctcctcctcttgtgttgttcttcttgatgccgctgaagagttagctaataatcagctgcctgctgctcaacgtccagccaagaacatgtcggcgtttggggtgctcgtcaccgcactggtcctgtcgtgcgtcgccggcgccagcatcgccggatacgtgttcagtgttctacaagttcaggctcagggtagggaccgggcaatcccttcctaa

SEQ ID NO: 27687 - DNA, 1527 bp, Zea mays
  Peptide Sequence Number=SeqID_69466
atggccgccgccgcagcagcagccccgccgtcggagtgcgcggacctgatgcctccaccgcctactgcgccccgtccccgccgccgcgcaagggaagtcagctcccgatacctctcgacgcccgtccccccgaccccgcgcctctccaccgtgtccgcggcctcctccacgcggtcgcgctccccgacaccttcccctcgtggtcggcagcggatggccacgccctttgccaacgagaaccacccgcctcctcctcccaagggcaccgtcgcgcgccggcgggccgtgcagaagcttttcgacgagacgggcgccggcaacccgcgcgcctcggtgggctccaactccgccgatgtcctcgaagctactccgcggcctctcctgcgctccaccagagggccggtcgcgcccaccgcgcggagggggtacccgcgccttccgacgcccgcgcgtgccggctcctgccctacttccgccgcggtggaatccgacgcctcctcgtgctgcttttcgtctgatacgtcgtccacgtccactgacttctctgaggccgatggggcgctcgggatggccccagccgcgccgtgcgagagcccgacgctgctgggcccagcgtcctgccgcgggggacgcctctcgtcagagctccgctcgtcggtgccggagtcgggcgggtcctcgcgggcgtccaacccactatgctaccgctcgctcaactcggcactgtcgatctcgatggcgatggccgggaaaccgactccggcagggaggccaccacaaccgcaagggccgaaggcaactgatctgaagaaggcggcgaccgtagggggcaggaaggccgtggggaagcaagaagacgtgcaccagctgcggctgatggacaattcgtacctccagtacaggttgctcaacgcccgggctgaggctgcaggcaaggccaaggcagctgctgctgagaaatccctctacgggctagaggagaagattgccagcctcagtgtgtctgttgctgagaagagggtagaggtgcaatggatgcgaagggagaatagattgagttcagtagtaaatgcgcagatatcatgtttgaaccaatggagcgatgttgaggggagttacgcaagctgccttagaggagcaacaagggcactgtataacggctcgctaaggctaccaatcattgggagtgtagatgtcaactgcgaggaacttacagaggtcctaaaatcagctacacaactgcttgaaccgcttacatcttgcatcgacaatttcctgccaaaggtcgaacaaatcgacgatgtggcatgtaatcttgcccaagttattgctacggaaaagaccttgatagaggagtgtggtaatcttctataccatgcgcagaacctgcagcctatgtcacttcccctcgctggcatttgctctgacttcgccacaaagtatccaactgatgcgatgacaaattccaattgcatagatgagggagagcagtttgtggagtcaagcgatgcaactgaaacaaaatga

SEQ ID NO: 27688 - DNA, 135 bp, Zea mays
  Peptide Sequence Number=SeqID_69467
atggcgcagaacattgccatcttgctgctcgtgctgaatgtgatcaagaagagacttattacatggaaggatcgggtgacaaaggctatagagaagataaaatctgccaggaataaatcatcgcaaggaagataa

SEQ ID NO: 27689 - DNA, 600 bp, Zea mays
  Peptide Sequence Number=SeqID_69468
gaccagggtgcggtcaaagaccagggtagagatcaaggacaggaggcggtggagatcaaagaccagggcgaaggtcaaagccaggtggagatcaaaggacaggcggagggggtggagatcaaggccagggcggaaggtcaaagccagggtggagatcaaagccagggcggaggtcaaggccagggaggtagtcaaggccagggtggaggtggtggagatcaaggccaggaaaggcccaccgacatccacgacgccgaaactcgccgccacagccgccgatcatatacccacctccgctggcgccgccgctgccgcccgggcgcggggcagacgttgtggtgcgtggccaagcccacggtgccggaccccatcatccaggaggccatggactacgcgtgcggcgccggcgccgggtgcgactccatcctgcccagcggctcgtgctaccgccccaacaccgtgctcgcgcacgcctccttcgcgttcaacagctactggcagcaggccaaggcgaccggcggcacctgcgactttggcggcaccgccaccatcgtcaccagagacccaagctacgaggagtgcaagtttgatcttatgtga

SEQ ID NO: 27690 - DNA, 444 bp, Zea mays
  Peptide Sequence Number=SeqID_69469
atggcgtccaacctcctatccgcggtggcaatcgagaaggagacgccggagagcgagctgcccccgacgttcctccgcgaggacgggcgcggcgccgggtccgtgcgggcgcggttcgagtccatgatacggcgggtgcagggggaggtctgcgccgcgctcgaggaggcagatggcggtggggcgcgcttcgtcgaggacgtctggtcgcgccccggcggcggcggcggcatcagccgggtcctgcaggacggccgcgtcttcgagaaggccggggtcaacgtctccgtcgtctacggggtcatgccacccgacgcctaccgcgccgccaagggggaggccggcaagaacgaggtcgccgcggatggccacaagcctggccccgtgccattcttcgctgcgggtattagctcgttgcatgcagaaatagcgcatggaagttag

SEQ ID NO: 27691 - DNA, 201 bp, Zea mays
  Peptide Sequence Number=SeqID_69470
atgacatggtactcctccccccgcgacgcgacaacaacgacggtctttgactcgcccggcggcggcgagctcagcgacagcatctccccgcagcaggagaggagcgctccggtcatccccgccaccctcctcgccggaggaggtggagacggggcaaccaaggccacgcaggaggcagcaccttgtcggctgtcgcactag

SEQ ID NO: 27692 - DNA, 519 bp, Zea mays
  Peptide Sequence Number=SeqID_69471
atggcgaagtctctgcgatccaaacgcgagaagcggcttcggacgttgcgccgggagatagcggagccgttctacgacaagaaggaggccgccaagctcgccgcgcaggccgccgccctagctgctgccccgctcccggtccgcgggcccccgccatcccaggatgccggcagctcccgcgcagctagctcggcctcggctatgggagggaatcgtaattcctctacgctttgtgtgctagttgttcattcacagctcactttgttatctgttaaaacactatggttaattggttatactagtaaggagaagcagatgcctactgggtatttgcagaaattatcaacaaggtgtggtggctcagcagatgtggagatgtctgatgcagggaacaacaggtctaagaccttcttgaggccacttggcagcattagcaagaagaaggtgcagcttcatttgaagatcaagaaagacaagagaaaagctaggaagaagggaaagttttcttttaagaagtag

SEQ ID NO: 27693 - DNA, 240 bp, Zea mays
  Peptide Sequence Number=SeqID_69472
atgccgttggccacggcgctggcggcggggagagcgttcctgggcgccatggaaggaggcgagcgtgtgacgttacggccaggcggtggtggtggtggttgtgctgatgggcagggcttgagtgcggggaggaaagggaggtgggtgcgcgtctccgtgaacggcacctgcaagtgcaacctggcgccggtcgttgcgtggcggcacatcaacgtcttggagcggcagccagaggagtga

SEQ ID NO: 27694 - DNA, 540 bp, Zea mays
  Peptide Sequence Number=SeqID_69473
atggagccgaggttccgcggcgtccggaagcgcccgtggggcaggttcgcggcggagatccgggacccggccaggaaggcgcgcgtgtggctcggcaccttcgacaccgccgaggccgcggcgcgcgcctacgacgccgccgcgctccacttccgcgggcccaaggccaagaccaacttccccgtcgcgttcgccgcgcttccgccgccgccgccgcccaagaagccggccgccgtgaccgcccgcgtctccgtcccagcaggccccgtcgctcgacctcagcctagcggcacaccggccatggtggccgcccagccgttcctcttcctggacccgaggctcgcggtgaccgtggccgtgccggcgcccgtgccctaccggccgaccgcggtcgccgccggtgccaacaagcatgctgcggcatcctgccgtgaagaggagcagagcgacaccgggtcgtcgtcatccgtggtggacgcctccccagcggtcggcgtggggttcgacctcaacatgccgccgccggccgaggtggcgtag

SEQ ID NO: 27695 - DNA, 1532 bp, Zea mays
  Peptide Sequence Number=SeqID_69474
gcaagggaggaagcagcaatggcggcggcggggggcgggagtccaagaagccggcgctcctgctggggcggtacgaggtggggaagctgctggggcagggcaacttcgccaaggtgtaccacgcgcgcagcgtgcgcactggcgaggaggtggccatcaaggtgatggagaaggagaagatcctcaagtccggcctgatggcgcacatcaagcgcgagatcgccgtgctccggcgggtgcggcacccgcacatcgtgcagctgtacgaggtgatggccacgaagctgcgcatctacttcgtgatggagtacgtgcgcgggggcgagctgttcgcgcgcgtggcgcgggggcggctgagggaggacgacgcgcggcgctacttccagcagctggtgtcgtccgtggccttctgccacgcgcgcggggtgtaccaccgggacatcaagcccgagaacctgctcctggacgacgccggcgaactcaaggtcaccgacttcgggctgtccgcggtggccgaacagatgcggcacgacgggctgttccacaccttctgcggcacccccgcgtacgtggcgccggaggtgctctcccgccgcggctacgacgcggccaaggccgacctctggtcctgcggcgtcgtgctcttcgtgctcgcggccggatacctcccgttccgggaccgcaacctcgtggccatgtaccgcaagatccacaggggcgagttccgctgccccaggtggttctcgccggggctcacccgcctgctgcgccgcgtcctcgacaccagcccgccgcgccgcgccaccgccgccgagatcatgggcgacgagtggttcaaggtcggcttccgccgcttctccttccgcgtcgaggacgatcgctccttcacccgcttcgacctggacgacgacgcgtccacctcgccgcccgagccggacacaccacgggcggacgccgccgccgctggccgcgagaagccgagaagggtcgccgccgggctgacgtcgtgcgcgtcggcgccgtcgctgctgcagctggaagcgcgcggcgggagcagcagcagcagcagcagcagcagcagcagccggcggcggtcgagcctgaacgcgttcgacatcatctccttctcgagggggttcgacctgtcgggcctgttcgagggcggcggcgccccggagcagccgccgcacccggcggctgcgcggttcgtgtcggcggcccccgcggagcgggtcctggcggcgctggaggcggccgcgtcggcggccggcatggcggtgcgcgggagggacgacagctcggtcagcattgaggggacgcgggagggcgagcacggcgcgctggccgtggccgcggagatctacgagctcacgccggagctgctggtcgtggaggtccggcgcacgtccggcggcgccgccgactacgaggagttcttccgcgcgcggctgaggcccagcctgcgcgacctcgtgtgcgacgaggacgagcccacgctgcttcagtccgacgagcgctctcggagcctatga

SEQ ID NO: 27696 - DNA, 330 bp, Zea mays
  Peptide Sequence Number=SeqID_69475
atggccgacgggcttcaaagtgccatcaatggcttcggttacctccgaaggcgtcaatgggaagagcaatggggagggagaaacggacatgcgagattcggggtcttcaagacgcaggtggcacaaacgtcgggccttggggcgcgctcggactgctcggttgctcggcgcgcgggcatcgtggcgtcggggtcgggtccggggctgggcttagaggcggctcggcgcggcaaggagctcgcaaggcgcggcataccagggcagcgcgcgcggtcgggctcggacgtcgcggctggagagcggcggggctcggccgctgtggcgcggtag

SEQ ID NO: 27697 - DNA, 216 bp, Zea mays
  Peptide Sequence Number=SeqID_69476
atggtggactccggctgcacggggaagactccggtgaaagcggaccgggcgaaccaaagggactgggggcaatccgagaagtgtcctgagttgctgacggtgaggcagaactcaccgaggcaacgggcgtggcacgggctcgacggcggtcgtagaacgggcggcggacttcgggttttcaattcaaattcaaacctagtttcaaaattaaactaa

SEQ ID NO: 27698 - DNA, 843 bp, Zea mays
  Peptide Sequence Number=SeqID_69477
atgccccctcctcgcttccgggagcatgacgagactgaggtgcgacctcttgctgatgatcctcaacttcttgatcttcaaagggccacaactgctagggtaagtcggttcaaacacgtgcccttggactcatggctgccagctcagagggacccaacagctgcgccacctttcagcaccaggacccaggagtccttcttcatggcacatttgtatgctcaggttgctctgagggctcaccagcgattggatctcactgccttccgttcagtgtccggtgcagagtcaaagggtcacatcacctatctaccaggtttatactctctattgaccttcggtggtagatatgttgaggagtggctcagagtcttttatgccacagtttgggtcgacccatacaatcagttgatgaggtttaagtttgagtatcagagagctttttgtatccctgagtcatcgatgaggcttcacagcatgtgttgtggtacctcagaccctcctcgttgccctcacaacggagtagctcctggtactgctcacgtcgctgctctcttcagacctccattctcagacggctctcgacgctcccctacagacttcaccctagcggcaaagttcttatatgagcttatgagatgcaccctgttaccgaggatgggctatagagaggctaccactcatatccagctctggctccttggtgctttgatctctcactcagattttgacgtggttgacttcctgatttgggagatagaagatacagtgttggatgatcttcgggctcggcgtcagctgccttatgcacactaccttcgtcacatatttgatcagctgatctag

SEQ ID NO: 27699 - DNA, 459 bp, Zea mays
  Peptide Sequence Number=SeqID_69478
atggagcatcacaggtggtcttccaagggttgggaaccggcgcaggcgtacaccggcgtatgcgcacagattccctccccaaagctcgacggtgggcgcgcctgggtcgaggatgcgacgaggccaagcaagggcagcggcgacaggactcgggtgcgctgctggagagcatcaatcgcgaggacgccgacaccaacgaccttagcgagaaccaatggcccgtccgctagtcacagggccagagggaggaggacgaagggtgggcgccgttcaccggagagcgagatccacggccatggtgtttgggagggttctccagcgcatgtgagggtgaggaggctggtgattgggccgcgatgtcagcaggcgcgaaagcgtaaagggatgggccacgcgagcgatggggaagtgttctggttggccacattggcccacgcgtccgtgagaatagattcctga

SEQ ID NO: 27700 - DNA, 243 bp, Zea mays
  Peptide Sequence Number=SeqID_69479
atgagagtgccaagtagaggccagaaagagggcccggctcttgtgactacaaaagatgctggtgatgcagttacccttttgcagattttatctggttgcacttttgacagcagccagcttgtcttgacatctcgcatgggataccaatccgtaaatgaaacaatattgcaagaacttagtaatgaacactacccacctgttatatctgcgatagaagaaagagcaaaatgtctaggtgtttag

SEQ ID NO: 27701 - DNA, 1767 bp, Zea mays
  Peptide Sequence Number=SeqID_69480
atgtctcccgaagcctgcgagctcacgctcgcgccgcggatgcccgcatcgcaggccggtgccggtgccggcgccgagcccgagaccaagggatccgtgcacccgcaactgtggtacgcgtgcgcgggccccacgtgcaccgtgccgcccgtcggcaccgcggtgtactacttccctcagggccacgccgagcatgccggcgccgccgccgacgccaacctgcacgccccgcctttcgtgccgtgccgcgtcgcgggcgtcaggttcatggctgagctcgacaccgacgaaatcttcgtcaaaatacgcctcgacccgctccgctccggggagccgctgacggacgtgggcgaggcccaggtggtgaacgacgaggccggccagcggcagcccaccaggccggtgatttcttccgccaagacgctgaccaagtccgactcctacagcggcggcagcctctccgtgcggcgcacctgcgcggaaaccatcttccccaagctggacaagagcatcaaacggccccagcagttggtctccgccagggacgtgcacggcgtcgagtggacgttccgccacgtctaccggggcaccccggagcggaacctgctcaccacagggtggagcgacttcgtcaacagcaagaagatcgtcatcggcgattccgtcgtgttcctgcgcgaagaggacggcaccatccacatcggcctgcggcgcgccgagcgcgcgtcccggcggaacgcctacgggcgccagctggtgcggggcaacgcgagcggcacgggcgccgccgcggacggcgtcctccgagcggaggacgtggtcgcggcggcggtgacgctggccgccgccgggaacccgttcgaggtggtgcactacccgcgggccacagcgccggcgttctgcgtgcgcgtggccacggtcattgaggccttgcaggtctcctggtgccccggcttgcggttcaagatggcgttcgaggcaaaggacctgtcccggatcagctggttcatgggcaccgtcgccggtgtcgggccggccgatcccgcccggtggccgctgtcgccctggcgattccttcaggtgacctgggacgagcctgagctcgtgcggaacatgaaccgcctgagcccgtggcaggtcgagctggtggcgaccatgcccaacctgccgcacttcgcggcgccgcctacgccgacgccgccgcgcaagaagccgcgcatgccgacgtacaaggagtaccaatcgcagggccggcaacttttcgatcccgttttcccgctcaacaacccactcccactgccacacccacaccaccaccctgcaccaacccacgactggaactgccacggtttcgtccattgttcctccttccccttcccggacagcatcgctcctgctgctgccgcaggcatacagggagccaggcatgcgaacttcgctcagttcttattttcggatcacctcctcagcaacctgcggcgaagcctggtgttgggtggcatccgccagtacccaggcgatcaccatgccgctcccgcgccacggatccccatccccaccgacgacgtgaagactggcagcgaaacgccccgctctccatcacatgcgaccaagaagcgcgacggagtcaagccgccggggataaggctcttcgggcaggagatactgaccgaggagcagatgaaaggcagccacgatgggaaagcgaccaacaacacctctggtcgctctggagcgcccgagttcgggctggagcccgggcagtga

SEQ ID NO: 27702 - DNA, 285 bp, Zea mays
  Peptide Sequence Number=SeqID_69481
atggagccgaaggcgcccgagctctacttctctgtctgtccgcctctggtgtcattccgctggcgtggctcgtctcttgcttatgagcaggtcgtcctggtcaacttcaggaaggaggtcatgtcgttcatcctgaaggacccgaggaggaggccaatagtgactgctcccacggtgatcgccgcgcacaatgaggatagggagaaggtggacagggtccaacacactacaacgactgacatgtggtctcaatccagccaccataatccgttaggacctaagtga

SEQ ID NO: 27703 - DNA, 186 bp, Zea mays
  Peptide Sequence Number=SeqID_69482
atgtgcgagctcaagttcaccaaggagcgggtggggtgctacctgctggtggtcctggtcatcgtcctcctcgtcggcgtcctcttcggcctcggcgtcttcaggcacggctacgacaggttcaaggacctcggccgcaaccacacctgcttcgactgcaacaccacagttcaaacaattctatga

SEQ ID NO: 27704 - DNA, 1249 bp, Zea mays
  Peptide Sequence Number=SeqID_69483
atgtcgtacgcctacctgttcaagtacatcatcatcggcgacacaggtccgtgccgccacgttggccctcttccttcctccgtgctccgattggatcctcgcgcctcccaacctgagtccgccgcggcaagatggagatccaatctagtccgcttgcccgcttgcgacgacggtgacgtccttggctttcctattgctgcaggcgtcggcaagtcgtgcctgctgctgcagttcaccgacaagcgattccagcccgtccacgacctcaccatcggcgtcgagttcggggcccggatgatcaccatcgacaacaagcccatcaagctccagatttgggacacggtcctcagtcgcttgcttgtccatgggaacttgagctacccgagtccggttgcaaactggaatttaggatgtccagttggtgtggctggtcaagagtcattcagatccataactagatcatactacagaggcgctgctggtgctcttttggtttatgacataactaggagggagactttcaaccaccttgcaagctggctggaggatgcgagacagcacgccaatgctaacatgacaataatgcttgttgggaacaagtgcgatctgtctcacaggcgtgcggtgagctatgaggaaggcgagcagtttgcaaaagaacatggtcttatcttcatggaagcctctgcgaagaccgcacagaatgtcgaggaggcatttgttaagactgctggagcaatctacaagaagattcaagatggtgttttcgatgtatctaatgagggtttcagcggcggcggcagctgccgagccccatcccccgatccaaagcacctcaaaccaccgctctgcccagatccacccagctactgcggtgagcccgtggggacggtggcggtggcgacggagcggttccctcgggaggtgagctcggaggcgttattccactgcgtccgcctaggcccggtccacgagactggcaccgaggtggcgtaccagaccagcgtcaaaatcgccggccacgtcttcaagggcatcctgcacgacgtcggcccggacccatcatcgtcggtcgctgcgagcgacgactacttccgccacgccaccgacgggtcctccccgggcacggtgggcgaaggcagcgtcgcgggggcgggcccgtctcgtcattggctgtggtcatggacccgtacccgacgccaacgcccgaaccgtacgacggctcacatttcttccacggccatccgag

SEQ ID NO: 27705 - DNA, 900 bp, Zea mays
  Peptide Sequence Number=SeqID_69484
atgcctaaattggagttcacaatcagggcagaaaatttaggccagtatcctcgagagcctcctcgcgattctgatatgcattggggcgaggtacctcaatttggagatgcaaataagttagccgatttgcgcctcaaggacattacaatagccgactttgatattggcgttaggacagagaatcctgtgcgatcccctccaaagttgcctttcgataagaaggcagtggtggtgcccaagttggccctcccctggctaggaccactagataagttgtttgtagagacgtcaccaaggaagctgtgcagattaaggaggtggagaagagtaaggaggcagtcgcctgacaatccgttgcagctcaacatcaattatttggtgctagcgacgggctattcactaggcataattgggatgaagactgttggagattgtaataggaaaagagtttgggtgaaggattttggttttgcaggaaaagggtgcaaggcacaaagaagggctgttagggacaggagacatgcttcctttgccgaatcttacttgatagcatctgatgcaggtgatgcttttagcaactacaagcatagaacaatgttgatgcactatgatgtggatagaagtgaggaccggcaaagtgaggaggttcagtcagcatacagaagggacagtgacattggtgaggaaatgataataagtagcgaagagcaaaatgatgaaaatgaatggagctgggtgaatcaagatagagatggtggtcctcttgctgaatcggtttcttcacttcatatgacacagcaagtccttgaaaatggcactgtatttttccggtacttcgaaagttggaatttcatggtgttccagtgccgcattatgcagcacttggcaaagtatgcctaa

SEQ ID NO: 27706 - DNA, 228 bp, Zea mays
  Peptide Sequence Number=SeqID_69485
atgcctctgccgatgaggcaccaacaagtcctcaagctcgtgctcgagctgccagacgttgttgcggccacccgcacgatgtcgctccgttgtaggtcaccattttgttgcctccacacgatgtaccatgttgttacgcctcattgtatagagcttctacaaccacatgttcctgtgttgccctgcaagaaggaccaagattttacatatttgcgcaatgggaactag

SEQ ID NO: 27707 - DNA, 264 bp, Zea mays
  Peptide Sequence Number=SeqID_69486
atggctatgagaagaacaatacaatgggaaactcacactagacatgagtggggtttatcaaaagagagcttaagtgaggaggatgagatagttgctatcattgtcattcataagtcatccaccacaccaaggctcttcaacatgttcgatgatgatgattgcccctcacatttgtatcatggcaaatggcgagatgttaaacccaaccaaaatccaaacctcctcctagtgatatatctagtgatgaagaaattaatcaaataa

SEQ ID NO: 27708 - DNA, 1191 bp, Zea mays
  Peptide Sequence Number=SeqID_69487
atggttcaagtgacaaaggagacgactccgaccttctcggcgttgagttccggaatctgtttcttcgacaggaagttctacctcctggctgctgaggcggcggcggcggaggatgcagcacatggcgcagaaggcaacgagccgccgaaggctctgctgctgaagatccaagcccaaggcacggctgtcgagcccgcgttgcgccaaggcagtggccttgctccgaccatggggacccagtgcctcgagtgcgagtgcgacaaggtgttcgcgtccaagaaggccatgttcgtgcacctacagagggactacaatggggccaccagtccgactatcaacatggcggccgctgctgcgacgacggccgtcgaaaagaagctgtgggatttgtgggaggaagccgggctccgtggacgcccgcccgtggcgccgctgcaggcgagccgctgctgcagcagccaggaggatcaggaggaggtggaggctgcgatgaccctattggagatggcctcacacggacgcacatcgtcggaaacccagcagcagtctgtggaaccagtgcgtgccccgaacgccgcctctggccaacacatcgtcaagacatcggccgtcgagcaggtcgtggctgtccaagtcgtgctcccgacgatcccgcccatcttccctagcctcgactctagcgccggcgacaagaaggccaagaagcgccgggtcatgaaccatcccgaggaggcggcagcatcgacgtcgccgctgccgctgcctccaaaaggcgccgcccgcacgccggcgccggtgtcgggcaagacacacacctgccgcacctgcggcaagtcattctccactcaccaagccctaggcggccacgtatcctccagccacgtcaagggtaagaccaccagcgtgaggcacgacggccagagcgccggcaacggcaacataaccatccccgacagcgctggcgcgttccaggagcgccaggacgcccagccgtcaccggcgcaggcgccgacaccgcagacgacccaggcttcgcacgtgtgcgacgtgtgctcccttaccttcacctccggccaggcgctcggcggccacatggggatgcaccggaagccggcggcgcctgtgcttgagcctgagtacttcgacctgaatgagctgcccgggcagggcgagaacgacaatcagccctag

SEQ ID NO: 27709 - DNA, 1974 bp, Zea mays
  Peptide Sequence Number=SeqID_69488
atggcgctcggcgagggcggggatcacggcgccgccctgcccctcatcgcggaccaggcgaaacatgccgccgccggtggcatcgtccgaagcgggagcatgtggacggcagcggcacacgtgatcacggcggtgatcgggtccggcgtgctgtcgctggcgtggagcatcgcgcagctggggtgggtggccgggccggccgccatgctcgtcttcgcggccgtgacggcgctccagtccacgctcttcgccgactgctaccggtcgccggaccccgagcacggccctcaccgcaaccgcacctacgccaaagccgtggaccgcaacctaggtagcaacagctcgtgggtgtgcatgcttctgcagcacacggccctgttcggctatggcatcgcctacaccatcacggcctccatcagctgcaggtacgccgcttgcatcctcctctacacggacatggtagttggcacacgtgcccccaagccagcatctcgcctctcggacgtaccaattgtgtggtggaacacccgcgcgcggagttctcggacgggagcaactgcgaaggcggcgcaccactcggtcgaggtgctcgacggccacccgctccgtagtctatggccaggtggagatagcctaatacgcccttcgcgagttcgcgtgcccacctttggaccttgcctctcctacgtgtctccgccaattactgcgcgggacggcgtgcgtcgtgcacgcgcagggaccgcgtggaccgtggacgtgcgcggcgcacatcagcacggcggtgatcggctccggggtgctgtccttggcatggagcgtgccagcgtggcgcagctaggctgggtggtcggcccgtcgggcatgttctgcttcgcgctcgtcatcacccacgtctccgcggcgctgctcgcctcgccaacggctaccggcgcggagaccccgagaagggcaacggaaccgctcctaaatggacgccatctacgtgtacctcgggcgatcctgaaggcgaactgctaccacgagcatgggcatgacgcgcactgcgactacgatggcaactactacatgctcatcttcggcggcgtccagctcctcctctccttcatacctgacttccacgacatggcgtggctctccgtcgtcgccgcggccatgtcgttctcgtacgccttcatcggcctcggcctcggcctcgcaagaaccattgctaacgggacgatcaaaggaagcataacaggtgttcggatgaggacgcctatgcagaaggtttggcgcgtctcgcaggccatcggcgacattgccttcgcgtacccctactccttgatcctcctggaaatacaggacaccctgaagtcaccgccggccgagaacaagacgatgaagagggcgtcgatgatctcgatcctcgtcacgacattcttctacctctgctgcggctgcttgggctacgccgccttcggcagcgacgcgccgggcaacctccttaccggcttcggcttgtacggtccgtactggctcatcgacttcgccaacgcgtgcatcatcctccacctgctgggcgggtaccaggtgtacagccagccgatattccagttcgcggagcggctcttggcggagcggttcccggacagcgggttcgtgaacggcggctcctacaccgtccggttcgcgtgcctgcgggcgtgccgggtgaacccgctgcgcgtgtgcctccggacgctgtacgtggcctccacgacggcggtggccgtggcgttaccctacttcaacgaggtgctggcgctgctgggcgcgctcagcttctggccgctggccatctacttccccgtggagatgtacttcatccagcggaacgtgcgccggtggtccgcccgctgggtcgtcctgcagaccttcagcgtcgtctgcctgctcgtcagcgccttcgcgctcgtcggctccatcgaggggctaatcagcaagaagctaggctag

SEQ ID NO: 27710 - DNA, 741 bp, Zea mays
  Peptide Sequence Number=SeqID_69489
atgtggaaatcctcaagcgaggggggcatgttcgtctttgccccaacatttgccctccgaggggccagttcgaccaagttagctggtgtcgaagactgccgtgagatgcggctaggttattttgggaatggtgtcaggcgggctccaggggcagaagaggtccctgagcaggaggaggaattggttgtttttgaagcctttttcgctgctgatcttcgcctgccgacgcatcgatttgtagtagaggttttgcggaagttcaagaagagaaaaataggtgataagatagctcaatttggatcgtgcactttcatgccgaggactgggaagacctcggctaaagttgttgagattgttccatgtgctaggaataagtggggcaattggtgggacttttggttttatgtggcttccgaggatatcgaagggttgccgagtttgccccctgccatcttgtgttcacattgctatgtggcgtttccacaatttgaggtggccgaagaagatgaagacgagggggtccttcgatatgcggcccgcctgagtagcggatgcgacttggtcgaggagtttattgcctacggggcgctgttatgctccgcccattgcgcccgccagtgggtgaaggccccctcgccaccacgcgttgctgagacagcagtggtgggggccggaggcgcctccatggagttgtccgtggacgattacctggtgggcggggtcgctatgtttaacgcctag

SEQ ID NO: 27711 - DNA, 766 bp, Zea mays
  Peptide Sequence Number=SeqID_69490
atggtgtccgcgtccaccgccgtctcaacggtgtccgcgatctccacccacattgctgcggggcacctcttcacggccatcgacgcccttccctcgtgctccgcctcctcggatgaaaacggttggcaaggggtcggtctcgccgacgcgcgggagatgttcgacgcaatgccacgccgggacggcggttcctggaacgccatcatctccgcctcgtcccgcgccgggcaccctgcagaggcgttctccctcttcgctgacatgaactctcttggcattcgccccaaggatttcacgctggcatcagtgcttgcctgctgtgctgctgagtgccttgacctgcgtggtgcacaggcagcacagcagctacatggtcatatcgtgtacgggaagtgcctctcgcttacggacgcaaggcgggcgtttgatgacatcctgcaacccaatgacgttttcatggaacataatcatccggaggtatcgtcttgctgcacaaaggctcttcaacctggccccaaagaaggatgtggtgatgtccacttcggttgtgtcagggtagagttggctgtttgtgggaggatcgctgatgcaaaactggtgtttgatggcatggaacaacacaatttggtgtcctggaatgctatgttgactggttatgtcaagcccatggatctggccgatgaggcagaggagacgaaggagcttgatgtagttacactggcttctgtactcaatgcctgtacagggctgcttgaccttgggaaag

SEQ ID NO: 27712 - DNA, 369 bp, Zea mays
  Peptide Sequence Number=SeqID_69491
atgcccgcgtggtggcccccgcagcaagctgaggcttcgtccccgcgcaagtccgcggacctcgagtcgccctccccgtccccgtcgccgacgccgacgccgcgggacaggaaggcgcacagcctcgacttccccggcgcggccgccgcgcgcggccggccagccggcgccgcgccggggcatgggtcggtagggtacaagctcccgacgccggtggaggcggtggagcctgtcgggactctgtacgaggtggtgctggcggcggcggcggccgccgctgccggtgacggctgctcgtccgcggaggagtctagcgtgtgctcggccgcgtcgttggacgagccgcactaccaacatgggtttaggtga

SEQ ID NO: 27713 - DNA, 939 bp, Zea mays
  Peptide Sequence Number=SeqID_69492
atggtcgtctccctggtgctcccgttcaccctcctcgcgggcattctcctcctctccggatatgccttggctgggccggagaccgctgcggagccgggcgagatggtcctgacgctggacgctggtaacttctcggaggtggtggccaagcaccagttcatcgtcgtcgagttctacgctccatggtacgtgtggccattgcaagcaactcgctccagaggtaacaactcgctgcccctttcatacacgtcgctgtgccagactgctggttgcccacccaggaggatgcaactcgctccatgtatgcagtacgagaaggcagccgccgttctgagggatcacgacccgccgttggtgctcgccaaagtggacgcgtacgacgagaggaacaaggatatcaaggacaagtaccaggtgcacgcgtaccccaccctcaagatcatagagaacggagggaaggacgtgcgtggctatggtggtccgagggatgccgatggcatcgtggagtacctcaagaagcaggtcggcccggcttccatcgagctcagttcggcggaggctgctcaggcgtccatcggcgacaaaggagtgattcttgttggagttttccccgagtttgctggtgtggagtacgagaatttcatggccgtggcagagagaaaacggtcagactacgatttctttcacacgtcggacgcgagcattctgccgcgtggtgatgtagccatcaagggccctgctgttcgtctctttaaaccatttgatgagctctttgttgattcacaggattttgatacggatgctcttgaaaaattcattgaagtgtctggtttccctgcagtggttaccttcgatgctgacccaaccaaccataagtttcttgagagatactacagcactcctagcgccaaagttgctatttgtggtttctctgagtaa

SEQ ID NO: 27714 - DNA, 804 bp, Zea mays
  Peptide Sequence Number=SeqID_69493
atggcgcggcacctgcaccatcaccgtggccaagaactcgtcgcgcacctccgcgcgtcgtcgccgctggcggacctcctgcgctccgcgccgagcctccccggcgcccgagctgcgcacgggtgcgttctaaagtctcccgtagccggcgagaccttcctccttaacacgctcgtgtccacgtacgcgcggctcggccgactccgcgaagcccgcagggtgttcgacggcatccccctccgcaacaccttctcgtacaacgcgctcctctccgcgtacgcgcgcctgggccgccccgacgaggcgcgggctctcttcgaggccatcccagaccccgaccagtgctcatacaacgcggtcgtcgcggcgctcgcgcggcacgggcgcgggcacgccggggacgcgctccggttcctggccgcgatgcacgccgacgacttcgtgctcaatgcctactccttcgccagcgccctgagcgcgtgcgccgctgagaaggacttgaggaccggggagcaggttcacggcctcgtcgcccggtcgccgcacgcggacgacgtgcacatcgggaccgcgctcgtggacatgtacgccaagtgcgagcgcccggtggatgcgcgcagggtgttcgacgcaatgcccgagcggaatgtcgtttcctggaacagcctgatcacttgctacgagcagaacggtcccgtgggcgaggcgctcgtgctgttcgtggagatgatggctactggtttctttccggatgagggcttgctgcggagagggaaggacggcaggtccatgctcatatggtga

SEQ ID NO: 27715 - DNA, 354 bp, Zea mays
  Peptide Sequence Number=SeqID_69494
atgacgccgtcgcagcgatcaagatctcaagattacacgccggccaccgtgaactacacgccctgggctccttcaggctgcagattgccagactacttccacgacatggagcaccactgcgcctcgccgtctacgtgctactcacagcgtgccgcgtcgccggagtacaaacctgtgactcccgtcagccgtccccggtgcgcttcttcgcccgagtacatcccgagctcgcctgtggtgtcaaatgccgtctcacgcacgtctccgccgagccgccaccgctaccacccttaccagaggagcaagactagctgctgccagcgtcgccgttcctcctcccagcatggaaactaa

SEQ ID NO: 27716 - DNA, 642 bp, Zea mays
  Peptide Sequence Number=SeqID_69495
atgttgcaacgaccaggccagcagcgagcaggcgccgtccggctcggagcggcgcggcgagcggtcagcggggctgtccgggctagcagcagcaggcatctgggccccgtgcgggcgctcgtctccgaggaggccgccgcgggcgagcgggcggcggagggcgagggagaggacgtccaggtgaggctgttcgtgggcctccccgcggacgcggtggtctccgacggccgcggcgtgggccgccccagggccgtctcggcggcgctgcgcgagctcaagctgctcggcgtcgacggcgtggagctgccggtgtcctgggccgtcgcgcagcctgggcccgggggatggttcgagtgggtcgggtaccgcggcgtcgctgccatggtccgcgacgcgggcctcgaccttcgcgtctcgctccgcacagacggcgacgcgctcccaggatgggtggccgacgcggcggccgccgaccccgacgtcctcttcaccgaccgctccggccaccgccgcgtgggttgcctctcctttgccgtcgacgagctagccgtgttcgtcggcaagtcgctgctccaggcctacgaggccttcttccgcagccggccaagcgtttcaaagaagaggaaagaaaatagaaaataa

SEQ ID NO: 27717 - DNA, 264 bp, Zea mays
  Peptide Sequence Number=SeqID_69496
atgagcgatgccaagagaagtaaaaaattgattatgaagtttctggtattccccaccccaatcggactgaacacatcgaattttgatgtcaagaaggcgctcaacatgtttagtggaattggagaaaaatacgctgagcctcgggttctatcgtgcattaagataaatccatgtaaatttggtaaaatcgtcaataaaactgatattatacttataaccaccaatagaaattgggagcaggaccccaaacatcaaaatgaataa

SEQ ID NO: 27718 - DNA, 105 bp, Zea mays
  Peptide Sequence Number=SeqID_69497
atgcccctgcaactcgataatgctggagtgattgtgaatcccaagggtgatatgaaaggtttcgctatcactggacctatcgacaaggagtgtgctaatctttag

SEQ ID NO: 27719 - DNA, 204 bp, Zea mays
  Peptide Sequence Number=SeqID_69498
atgggatctgggagcatgaaggccaccactacagacgacctcgaccacccacgcgttcttctccgggccaaggatgacgacagggaggagggcgagatcatcgacaacgcctgcgctcctgccccgctcgccacacacccgctcgagcactcctggaccttctggttcgaccacccgcaaagaaagtccaagcatgccgcctag

SEQ ID NO: 27720 - DNA, 957 bp, Zea mays
  Peptide Sequence Number=SeqID_69499
atggccggcagcgacgaggtcaaccgcaacgagtgcaagggggcggtgccgatccacacatgggtcctcatctccaacttcaagctggcgtacaacatgctccggcgggcggacggcaccttcgaccgcgacctgtccgatttcctggaccggcgggtggcgcccgacgcgcgggcccaggagggggtctcctccttcgaccacgtgttcgacacgtcgaccggcctggaggtccgcatctaccgcgcctccgccttctacaacggcggcggcggcgccaccctgcccatcctggacttcctcggcggcacgccggcggcgtcgacgccgttcccgggcgtggtggtgtcggtgaactaccggcgcgccccggagcaccggtacccgtgcgcgtacgacgacgggtgggcggcgctcaagtgggcgacgtcgcagccttccctcggcagcggctcgagcgggggcgcccgcgtgttcctgtcgggggacagctccggcggcaacatcgcccaccacgtggccgtccgcgcggccgtggccgggatccgcgtgcgcggcaacgtgctgctgaacgccatgttcggcggcgccgagcgcacggagtcggagcggcggctggacggcaagtacttcgtgacgctccaggacagggactggtactggaaggcgtacctgcccgaggacgccgaccgggaccacccggcgtgcaacccgttcgggcccaacggacggcgcctcgcggggctgcccttccccaggagcctgatcatcgtgtcgggcctggacctcacctgcgaccggcagctggcctacgccgacggcctccgggaggacggacaccatgtgaagctcgtgtaccgcgagaaggccaccgtgggcttctacctgctgcccaacacgaaccactaccacgaggtcatggaggagatagccgacttcctcagggctaacctctag

SEQ ID NO: 27721 - DNA, 381 bp, Zea mays
  Peptide Sequence Number=SeqID_69500
atggcggagaacatatgcgagcaaaaattgttgataccctatgttgattatgagaatcctctcaagctgatatatgccctaaatcagatggtttgggaggtgcaagttgaggtgcttggtgacaacgagcttgccatggtcactagcaagttcatgaggtttcacaacaacctcaaaatcaaaattagggtgggaaaaagaaggggtgctttcaactatagagatcccaacgacttcatcgccagttataccaagatgaatgtggataacaagatgacaagcgggaatggctatgactatgagagcgaggatgactctgaccccaagatatcacttttcactgatgagattgccactttgaattccacttttcttagctag

SEQ ID NO: 27722 - DNA, 2589 bp, Zea mays
  Peptide Sequence Number=SeqID_69501
atgagggccggggggtgcacggtgcagcagtcgctgacggcggaggccgcggcggtggtgaagcaggcggtgagccttgcgcggcggcgcgggaacgcgcaggtgacgccgctacacgtggcgagcgcgatgctagcggcgcccacggggttgctgcgcgcggcgtgcctccgctcgcactcccacccgctgcagtgcaaggcgctggagctgtgcttcaacgtggcgctgaaccgcctccccgcgtcggccgcggtcgcctcgtcgccgctgctcggcgggcacggccaccaccaccaccaccactactacccgccgtccctgtccaacgcgctcgtggcggcgttcaagcgcgcgcaggcgcaccagcggcgcgggtccgtggagagccagcagcagccggtgctcgccgtcaagatcgagctggagcagctcgtggtgtccatcctcgacgaccccagcgtcagccgcgtgatgcgcgaggctggcttctccagcacccaggtgaaggccaacgtggagcaggccgtgtgcagcagcaccaccacaacaagcaccgcggccgcggccaccgctcccagcaaaaaccctaatcctagcagctctgctgccaccgcaagcccacctcaggaagccgccaaaggcaacaagctgccgctccaccaagcgcgcgacgaggacgtcgccgccgtcctggactgcctggcctcgcggagcaagaggagggtggtcgtcatcgcggagagcgcggcggcggccgaggccacggcgcatgcggccatggacaagatcaagagcgccgaggcgaagcacgacgcgctgcgaggcgcgcaggtcgtcagcgtccgcgtgtcgtcgttccgcgagatggcgagggaggagaccgagcggcggcttggcgagctgcggtgcctcgtcaggggcaggagggggcaggtcgtcgtgctcgtcgtggaggacctcaagtgggcggccgagttctgggcgggtcacgtcgtccagagcgggaggagagggtactactactgctccgtcgagcacgtcgtcaccgagctgcgcgccctggcgagcggcggcggcggcagcctgtgctggctcctcgggttcgggacgtaccaggcctacacgaggtgtcgggtggggcagccgtcgctggagagcctgtgggagctccagacgctcaccgtgcccgccggcagcctcgcgctgagcctcaactgcgccttcgacgacagtgctctaggtctaggcacggtcaatcagtccatgaaagcgggctcatctgacacggatgggaacggaccagcgtcttgctggccgcttttggccggcagcaagctgatctccagatgctgcggcggcgactgctccgccgcgaggatcgagacgacgaaggcggcgctgcctcggacgccgttcgtctcgtcgtccagcctcccttcctggctccagcattgccgtgatcatcaggagcccgctacccatcttacggatgatctcggcaagacatggagctccatctgcagcagcagcaggccgtcacagcgaacgacgacgctgcatttctcggcgccggtgtctccggcctcctccatctcttcctacgagcacggcggcggccagtcgcagcagcctcgccactcgtggctcctcgccggcctcgacgccgcgcaccacccgtggagacccaagcgcgaggccagcatcaggtcccacgactccggcgcctccaacggctccgtggaggtggagtgccgcgccaggttcaaggagctcaacgccgagaacctcaagctgctctgcggcgcgctggagaaggaggtgccgtggcagaaggagatcgtccccgaggtcgcgagcgccgtcctgcagtgccggtcggggatcgccaagaggcgcgacaagtccaggtcggcggacgccaaggaggagacgtggatgctcttcctcggaggcgacgccgacggcaaggagagggttgcgagggagctcgccaggctcgtgttcgggttacgcagcagctttttgtccatcaggcctggcggtgtcgtctccgcctcgtcgccaccgccggcctcgtcaggctcctccgaggggcacaggagtagtaagcgcccacggatgccggaggaggagccggcggcctactacctagagcggttgcacgaggctgtctccgaaaacccacaccgggtcatattcatggaggacgtcgagcgggctgaccgggactgccagctccgcatcaaggaggcgatcgagagcggggtggtgcggaaccatgctggtcaagaggtcggcgtgggcgacgccatcgtcatcctcagctgcgagagctttggcgacagcaggtctagtagagcttgctcgccgccgagcaagaaggtgaaggtagagatggaggaggccaaggaggagcgcgcaggtgaccatgaacacaaccaagatggtgtttccaagccgtctccatcttgcatagatttgaacgtggacatggagagtgatcaggcggacgagccaagtctcggtgatcagtgtctgctcacggccgtcgacagggccctattcttcagaagacaggacaactag

SEQ ID NO: 27723 - DNA, 636 bp, Zea mays
  Peptide Sequence Number=SeqID_69502
atgtcgtgcgcccgcgcccttcgccccgccccgccccgccccgccccggccaggcgaggcgagcgagcgcgcgcgcgcgtgtggctctccacactctctcctctcatccatgacttgatagtcgcgcccccgcaaggcgaggggccggatttcgacggaccattcacgtgcatgtcgtgcgcccgcgcccttcgccccgcccagcagctccaactccagtgcggcaccctcgcctgttgctctcggtccctccggcggacgcggcggccggtctgcgtcgtgcaagagacgaaggagagggaggccaagacggctgaggagattacagaaaaatacgggctcgagttcggcctctggaaagtgttcaactccaaggaagaggaggagggagccgaggggaagaagtcacggacagcgaaggagctcctggccaagtacggcagcgcgtacctagccatctccatctcgctctccctcgtctccttcgccctctgctacctcctcatcagcgccggcgccgacgtgcaggagctgctcgccaaggtttcaatttttagcatgaacactttcttgacttccttcgtcaactattatgcttcaatcgaggccaagtgtttcgatcttacgtctgcttga

SEQ ID NO: 27724 - DNA, 210 bp, Zea mays
  Peptide Sequence Number=SeqID_69503
atgcgcagttgcacttcctatgttgccagcggcacggccgcctccattcagtcctctatcgctctccacgccttcaggctctacgaatccggcaaggggcgcaaggcagcaacctccaagctacagcagtctgaacagctgccgaagaggtgggaacagtgctggcctcaagacatcaccgacaagctcctgaaaacagggctcagttga

SEQ ID NO: 27725 - DNA, 249 bp, Zea mays
  Peptide Sequence Number=SeqID_69504
atggagggagccccgctcggccgccaaggaagaggagctggggcactgggttccgagcgtcatggatggcagaaggagaggaggtcgtgcgtccaggatatatggtcccgagttctagggatccgcaaaatcggagtccgcgcgaatccagcaatccacgccagcgtgaggaagacgaaggcaggcctgacagatgagccccacgagtcggtggcgtcaagaggagtaggcccgcacgccagtgactag

SEQ ID NO: 27726 - DNA, 678 bp, Zea mays
  Peptide Sequence Number=SeqID_69505
atggcacgcttttttgtgttggttctgatcggatctggtgctgtcaccccagcttcgtgggggtggatctcgcgggttgctggtggtggaaccgcgatgagctctggtaaatcctctgtgttggagagcgtggttgggaaggatttcttaccgaggggttcaggcattgtaacccggcggccgctggtactgcagctccacagaattgatggtgacagggaatacgccgagtttatgcaccttccaagaaagagatttacagattttgctgccgtgaggaaggagatagctgatgaaaccgacagagaaacaggccgttcaaagcaaatatcacctgtccctatccatttaagcatattttctccatatgttgtgaatcttactcttattgatcttcctgggcttactaaagtagccgttgagggccaaccggagaatattgttcaggacattgaaaacatggttcgctcatatattgaaaagccaaattgtataattctggctgtttccccagccaatcaggaccttgctacttctgatgcaatcaagatatcacgggaagttgatcccaaaggtgaaaggacctttggtgttctcacaaaaattgatctgatggacaagggtaccgatgctgttgatggccaaaggaggcccacggaggggctgcggcagcagtaa

SEQ ID NO: 27727 - DNA, 393 bp, Zea mays
  Peptide Sequence Number=SeqID_69506
atggcgaggtcccctgaccccctcacctctgcggcagctgggagagagggaaaagcggcagagggaaaagcggggggagagagcgctgagagagggaagatgggtgcggctgggagagggtgggatctttaccacatgcaatatgcaagaccccactcatgtgaaggaatgccctgcaagcaccggaagacatcaattcccttgttgaaggaatgccttatgaggctccattcatatcttataattctaccattttgcatgcagatgaagcaactttccaagcttctcgacgaagatccagcagtcatggaacgcagaactaaccttgcaaagaggctggagctgtaccggagtgcccaatcggaaatcgatgcagtcgcatggtccaaatag

SEQ ID NO: 27728 - DNA, 308 bp, Zea mays
  Peptide Sequence Number=SeqID_69507
gtgagcttgctgagaatgttgctgagatgattaaccctcagtttgctaacaaggtagacatgtctgaagttcatgtgactgatcttatttttgtccccaacttatgtgaatattttattgatattactattggggaggaggactcaacctcaatacgtcaatacttgcaggatgaattcttagccatgattacaaaatcattaatgactcttgttcacggacttgaaaccaaatttgatgctgaaatggttgcaatggctcatgttccatgggctacccttgaaagtgttggtgatcaatcagactaa

SEQ ID NO: 27729 - DNA, 207 bp, Zea mays
  Peptide Sequence Number=SeqID_69508
atggcccaagggcacatttccctttcagtatgtattgtgttgatgcgagtagacgagcaagctgcagaggatttcgaggttcagctggtagagactgatgagcaggagctcgttgaagatcattatgttaatgggaacatggagaaccacccaggaaaacagtgctaccacaagggtttaatgggacgcccttggctgattaactag

SEQ ID NO: 27730 - DNA, 1107 bp, Zea mays
  Peptide Sequence Number=SeqID_69509
atggcacggcgacaacagtggagcaggggcggcctcgcggccgtggcggtgctcgccgtgctgtgcgtgctctgctcgggccacccggtgccgggcgggcatggcagcggcggcggcgggttcgtcaacacgctgcagccgcacttctacgaccacgcgtgcccgcagatgcaggccatcgtgggctccgtcgttgcgaaggcgcacgcggaggacccgcgcatggcggcgtcgctgctgcggatgcacttccacgactgcttcgtgcaggggtgcgacgcctccgtgctgctggacgccgacggcagcggcaggttcgtcaccgagaagcgctccaaccccaacaaggactcgctccgcgggttcgaggtcatcgacgagatcaaggccgcgctggagcacgcctgcccgcgcaccgtctcctgcgccgacatcgtcgccgtcgccgcgagggactccgtcgtcctgctaattgcatgcgctgcaccacagaccggcggacccggctgggaggtgccactggggaggagggactcgctgacggccagcctgagcggctcgaacaacctcatccctgctcccaacgactctctccccaccatcatcggcaagttcgccaaccaaggcctcgacatcgtcgacctcgtcgcactttcagttgcagttccttcaacgatcgaacaactgagtgcaggagggcacaccatcggcgactcgcgctgcgtgagcttccggcagcggctgtacgggcagaacaacaacgggcaggtggaccggacgctgaacccggcgtacgcggcggagctgcgggggcggtgcccgcggtcgggcggcgaccagaacctgttcgcgctggacccggcgagccagttccggttcgacaaccagtactaccacaacatcctggccatggacgggctgctcagctccgacgagatcctgctcacgcagagccgccagaccatgggcctcgtccaccgctacgccgccgaccaggggctcttcttcgaccacttcgccaagtccatggtcaagatgggcaacatctcgccgctcaccgggagcgccggcgagatcaggcacaactgcaggagggtcaaccactag

SEQ ID NO: 27731 - DNA, 294 bp, Zea mays
  Peptide Sequence Number=SeqID_69510
atgtctggtgaattatggcggagcggattcccgaagctggcaagttcagagttgctctcccctggggcaccggacagtccggtgaattatagcgaagcgcctctgagaattcccgaaggtgaagagttcagcttggagtcccctggtgcaccggacactgtccggtggcacaccggacagtccgggttgtccaaggtccgtaggacaaggacaactgtatgtgggcctaataccttgggaggttccgtcacaactggtattggagcgaaacccatctcctcagatattacctag

SEQ ID NO: 27732 - DNA, 1389 bp, Zea mays
  Peptide Sequence Number=SeqID_69511
atggatttggttgaacggaccggtacggaggaatcgaccggaatcacgcgcgagctgttaggatgcagtcgggttcttcggatggtggaagaagaaggcgcgcgcgcgaagataggggagatgatccggggcgaccctgccgtgtggatatatagcggcgcggacgttccccagctggccgaacaccacggaatggttgttgtaacaacccccaccgagatcgacgcggggtggaagaagcacatagccgtggtcgagggcccacctgccagtcagtgcgaaacgagtgcggctgtagattcaggcgcggagaccccacacgcagggaagctggcgcccatgggtcatgcggctgagaaagggatttgggctggccagattttgggccttacaacggtcgagggcaggggcggtcgagggcgcggcgtggagggcgttggtggcatggagggcggcggcggcgcttgcggcgtggcgagagagaagaggcggaatcctcgtgtcgacgagaaccttttctactccatacagttgtttcccccttcttcaactggtcggggtgataagctcgtggatgggaccagtgatgttgggaagcctctaactagttcacaagtgcatttggctgacagcaaggtggcatctcttggtgcttatcgcaaagcccgtgccatggtctatgtcagttctttgtggagaaatggtctaaaggccacaaatgacgagctcactacaaactttcactcctacgcagcagcctcttcttccccgatcccgatcccgactccaactctccctctctccttcgcctggcacatcctcagcagcgcggcagcctgcttcttcaccggtgtggtggcctacttcttcaccggtgcgatggtctacttcttcgacgacgcggaggcctaccgggcggatggatccgtggacgaatggatctccggcatctggcagatcttcagacgcagcgcgacagcctaccgagcggatggatccacggacgaatggatctccggcgcctggcagatcttccgcgtccggcctaccgggtggatggatctccggtgcctagtatatcctcggcatcgcggcttgcttcaccagggaagaagaggctctgggacggatctccagtgctgggagggagggaggaagccgctgggagggacctacttcgtgggggcgccccgccgtgagggaggaagccagccgccgtcgggagggaggaatccaccgctgggagggagtaatctgcgaacagttggtccgcgccccgtgcctctaggaatccacgagcagctgctccgtgcctccaggaatccgcgagcagctgctccgtgtctcgagtccgcgaatccggtcacctccactgctccgtgcctctag

SEQ ID NO: 27733 - DNA, 384 bp, Zea mays
  Peptide Sequence Number=SeqID_69512
atggcgccctatagctcacgcccagagaagcaaagagagaagctaagaatctgcggttctcatgtgctgacgatgagtgcccgtgtagtcctcttcctccacaggccatccacccgctctacgctctcccgctggactcgccactgctcttccccatcgtcgtccctacgccgttccactccccaactcctcaacccttgtgggacagccctgacccttccgcaaccacgaaccccctctgcgccgccttcatgctcttcgacgcgaccaccgcacccatgggagatcgccatgcaagcctggctgactcagagacagatgaggcatcaagtctgtgttagaatatttggtaatgctatcgggttctgcgtctttgagagttag

SEQ ID NO: 27734 - DNA, 126 bp, Zea mays
  Peptide Sequence Number=SeqID_69513
atgacggagatcgccatcgtgacagacggtaggtatgtgcctagtgcattggcttggtcagaaaggcttgcggcaatggcgactgtgacatattgggaggtctactgcttggggtctgacccctag

SEQ ID NO: 27735 - DNA, 264 bp, Zea mays
  Peptide Sequence Number=SeqID_69514
atggcctttgcgcactccaagctttcctctggggacgttagcctcggcatggtcgtcgtcgacgcgaaccactcctcctgggccgccgcggcgctccccttcaccgactccttcacgtgcttgaactccctcctactgttgggccacctcaaccgtgtggttgtcatcgtggctggagtccattgcttgggatgcgcgcaccagcttggggctatcggggtaccaacgacaaaggggcggctgtggccacaacagactctgtga

SEQ ID NO: 27736 - DNA, 234 bp, Zea mays
  Peptide Sequence Number=SeqID_69515
atggaagggtggggtttttctagaattgttttttggtctggtagaaaaagaaaaggaaaaggattgaacagcgttggaccgaatctggcccagaccatggtccacgacgaggaaccgcgctggtcgaactccggcaagcctacgccagcaggataccgcaacggctggggctcccgtgtggcagagaccagattagaccccttccgcacctttccccccaatcaatttcactaa

SEQ ID NO: 27737 - DNA, 252 bp, Zea mays
  Peptide Sequence Number=SeqID_69516
atggcgtgtagaatgctgccgacgtgggttcatatttatatgcctagtgctttgcaacttgctggaccccatctgtcattggctattgctattctagcaaagggaaggaacattcggatttggaacgaagccgtccacaatatggaaagcacgatcgggacgaaggtcgaatcaattccgaagctacgcgcaaggaagctttggctaagtagcagaaaaaggaaccgacttaaagaggaaaaggctatttag

SEQ ID NO: 27738 - DNA, 492 bp, Zea mays
  Peptide Sequence Number=SeqID_69517
atggttgcactgttatcccgggtggtcactccacgaacaggtccttacggagagccgagggcacgcgcgcgcgggcgggcgagtgctgacaggcgggccaggggcgtcaacgacagaggggaagggcgcactgaccgggcgggcccaacactagggaacacgggcgctgatagacgggccaaggggcagggcgcgagtgcgggaagcggtatacgcgatctgggccatgcgatcaagattggacagggggatcagaccggggagggtgaaccgctgcgggcggcgctgctcctctccgcggtggtgaagtcgctggagttggggcaggcgcgagccagggtggctccggggtcgccgggattgggcagagagggagaggatgtcatggcgaactcagtggcggggaaaaggccacgaatccgtggacagagggggaagaacgtcggggagaaagcctcgggcggaccggaggaactccggcgaggcatttag

SEQ ID NO: 27739 - DNA, 1071 bp, Zea mays
  Peptide Sequence Number=SeqID_69518
atgcctggcggcgcggggggaggcaaggcgagcagggcgggctcgtcggggcacggccacggtcatgcggcggcggcgcagcagcagaagaagggcaagtggaagtcggtgtcgcacgccatgatggacaagggcttcgtggtgtcgccgcagcagtgcgaggacaagttcaacgacctcaacaagcgctacaagcgcgtggtcgacctgctcggccgcggccgcgcctgccgagtggtcgagaaccacgcgctgctcgacgccatcgacgagctcacgcccaaggccaaggacgaggcgcgcaagctactcagctccaagcacctcttcttccgcgagatgtgcgcctaccacaacagcggcgttgccgggggctcgcacctgccgccgcacgccggcggcggcgcggcgggcgacgccgcctgcctccaccaccctgccgccgacgacagcgacgccgtgagcgacaacggcgaggaggacgaggacgactacgacgaggaggacgacggtcacatgtaccacagccacctcaccagtcgtcagcacagcggcggcggccgccggcgcggcaagcgcgagcatggcgaggatagcgccgcggccgaggacctcgaggacgaggcggccggcggtgggaaacgcgcgaggacgggggcggcacccgacccatcggcaatgctgcagcagttgaagagcgagctcgcggccgcggctgccgcggcgatggacccgcagcaggccaggtgctgggtgcgacgccgcgcggtggaggtggaggagcagcagatcctcctcgaatcccacgcgtacgacctggagcggcagcggctgaaatgggatcggttccgcgccaacaaagagcgcgacatggaacgcgcgcgcctgcagaatgaccgcctccggatccagagccgacgcttgctgctcatgctccggcacaaggaggtcgagctcgacatggccgaggccaactcttcctcggtcgaccaccaccccggcgcgtcgccgctcgcagcacaccagcagacaattgggtccagcccgtccaccgccggccacccaaattag

SEQ ID NO: 27740 - DNA, 309 bp, Zea mays
  Peptide Sequence Number=SeqID_69519
atgcataatgattgcaacctcaatgacggagagtacatcctcgtgccggagcaaggagttgctcaggagatagccccggatccagcaccagagccttccatcgaggatctgcctgccccagctttggaaggcaagccccgcaatccatggggattagttgtctacgagatggaaattggaataaggattaaggtgtggtaccgtacgcttcaggatatggttgatggtgtgacttggcctaccaccctgccaccgggttggacggtcgagtgggatgctgctccgacaggagaggagcaggaggagtag

SEQ ID NO: 27741 - DNA, 1122 bp, Zea mays
  Peptide Sequence Number=SeqID_69520
atggtgtactgtgagatgtgtggtgttttccgtgagacctttgtcaaatctgccaaggatggtctgttaaaagatacagccgttgcagtgtcaagtgagcctaggacatctgctgcgtcaaaaaacgattctgccaaggcgccagtgaagactcgtgctgtaaattctgatggtgattctatgagaaagcatgctagcatgtcttatgataaagccaattccacgcagttaccatctgctggtagctcactaggtgctgaaaaaaagaagaaaacccctgtactttctgaagaagtacctgtggagaggatagctctgttggcttccgatggttttcagtcaaagggtaaccagaatagcggggctagcagttcttcgcagaatgacaatgtgatccagaaactctcttctgacgtaggccagctaaatgtaaacaagaacaatgtgaatgttacgaaatcttgtttgcctgatgagtataagcctgagaagtggatgttagctgatctggagtcaagggcgttgagccaactgaaccttgcaatagtcggtcatgttgattccggcaagtcgacactatctgggagattactgcatctcttaggaaggatatcaaaaaaatatatgcacaagaatgaaaaggagtcgaaagaaaaggggaaggggtcatttgcttttgcatgggccatggatgagagcagtgaagaaagggaacggggtgtgacaatgactgtggctgtggcttatttggagaccaagaaattccgtgtggttttgcttgactcacctggtcacaaagattttgtgccaaatatgatatctggtgcaacacaagctgatgcagctattcttgtcgttgatgcttcaactggttcttttgaagctggcatggatggcgaaggaggaaaaagtgttggccagactaaagagcatgctcagcttgttagaagctttggtgttgaacagcttgttgtcgcagtcaacaagatggatgctgttgattatgcaaaagaaaggtttgatttcatcaagctacaacttggtagtttcctgcggtcatgcaacttcaaggactctgctattacctggattcctcttagtgctgtagaaaaccaaaattga

SEQ ID NO: 27742 - DNA, 615 bp, Zea mays
  Peptide Sequence Number=SeqID_69521
atggatcgatttcctcggtcgcgatccgggtcgcagctcgccaccaagcaatgtatgcgaggaggcccaacactgcctgaatttttctttctcgtcaaaagttactgcattcattttacagtaatggctatggggttgattaatgctaatcctataatccatgagaaaaaagagaggcgtgccagacaggcaccagagaccacagatgaaaatgcagcagagcccatagatcagctggaaatatttgatatccttcttaatgatttcttcaaatatataaaggatccagagcacccgtactcactggaacagctgaatgtggtgactgaagattcaattgaactcaatgatgaaagtaattatgtcagggttacattcaccccaacagtggagcactgcagtatggcaactattattggcctttgcatacgcgtgaaacttgtacggagtctccctcctcgttacaaggtggacataagggttgcccctggatcacatgcaactgaagctgctgtgaataagcaactgaacgacaaagaacgtgttgcggctgcattggagaacccaaacctactggacatggtcgaagagtgcttatcaccaacatttgattga

SEQ ID NO: 27743 - DNA, 770 bp, Zea mays
  Peptide Sequence Number=SeqID_69522
atggccctacccctgcccccgcgatgcgctatgcccgcctccacagagcagccgacgctaaagcttgaccctcactgccgcgactgcccctcccttgccctcctcgccgtgcccacgcccttcccctccaccgtcgtgggagatctccctgctaggaggtcctcaccccaccccaccccacccctagatgcccgcatgcacgccatcggtttcgcctgcctcacctccccgctgcccccatttcttctccgtcaggtctcattctcaaccctggcctcatacccgcagtcgacctcgaaatcaaggcagcctggacaatgcaggtgccgaggtggaggcagggctgggtctggaggtgatgcgctcgcaggatggacacatggagatggtggtggttgggaggcgcatgaagaagggtggtgtcgtcttgagtgcgagcagctctgcggggactgctcctttgagaagcgtagattcttgcgtgcggacgcgccctcgtcctcatcgctcgcgcgagacaaggactgctcgccgccagcctgcgctgcggcggccttggcgtgggcctatgggccacctaggtccagcgagaaggaccacacattgtcgttgggcgacgttgacaaggctgccgcgtcggatcctcctcgtcatcctctagcgccagggcgctccctgcgacctacgacgcctggattcaccaagggacagggacagggcaccagcaccgagctagacagggtttcgatctacaggataggaggtctaag

SEQ ID NO: 27744 - DNA, 207 bp, Zea mays
  Peptide Sequence Number=SeqID_69523
atggcactcggctctgctcgtgcactcaagaagttcgttggatcagccagaagagttatcattgagttgacatgcgcagaggaggaagagggcaagtcgccacgcgcaagcagttcctcatcggttatgcagacaggaccaactactgttgcatcagggtttgcctatgcaaaatttgggaagacaaaggtcattgtatctgtgtaa

SEQ ID NO: 27745 - DNA, 2097 bp, Zea mays
  Peptide Sequence Number=SeqID_69524
atgaaccatgtgttcggcgaacacattggtcgcacggtcgaggcctacgtcgatgacatcgtattcaagactaggaaagccttcgacctcctttccgaccttgaagtgacattccgatgtctcaaggcgaaaggcgtcaagctcaatcccgagaagtgtgtcttcggggtgccccgaggcatgctcttggggttcatcgtctccgagcggggcatcgaagccaacccggagaagatcacagccatcaccagcatggggcccatcaaggacatgaaaggcgtacagagggtcatgggatgtctcgcggctctgagccgcttcatctcacgcctcggcgaaagaggtttacctctgtaccgcctcttaaggaaggccgagtgcttcgcttggacccctgaggctgaggaagccctcgggaacctgaaggcgctcctcacgaaggcgcctatcttggtgcccccagctgccggagaagccctcttggtatacgtcatcgcgaccactcaggtggttagcgccgtgattgtggtcaagaggcaagaagaggggcatgcattgcccgttcagaggcctgtctacttcgtcagcgaggtactgtccgaaaccaagatccgctacccacaagttcagaagctgctgtacgtggtgatcctgacacggcggaagttgcgacactacttcgagtctcatctggtaactgtggtgtcatccttccccctgggggagatcatccagtgccgggaggcctcgggtaggatcgcaaagtgggcggtggaaatcatgggcgaaacaatctcgttcgcccctcggaaggccatcaagtcccaggtcctagcggacttcgtggccgaatgggtcgacacccagctcccaacagcttcgatccaaccggagctctggaccatgttcttcgacaggtcgctgatgaagacaggagccgacgcaggcctactcttcgtctcgcccctcgggaagcacctacgctacgtgctacgtctccatttcccggcatccaacaatgtggctaagtacgaggctctggtcaacggattgcggatcgccatcgagctaggggtccgatgcctcgacgctcgcggtgactcgcagctcgtcatcgaccaagtcatgaagaagtcccactgtcgcgacccaaagatggaggcctattgcgatgaggttcggcgcctggaagacaagttctacgggctcgagctcaaccacatcgctcggcgctacaacgagactgcggacgagctggctaaaatagccttggggcgaacaacggttcccccggacgtcttctcccgagatctgcatcagccctccgtcaagatcgacggcacgcccgagcctgaggcaccctcggcccagcccgagaaggcacccgggggctacacgcacctgttggtcgccatcgacaaattctccaagtggatcgaggtccgacccctaaacagcatcaggaagttcctggacttctgcgaggatcaccacatccgagtggactgggccgccgtggctcaccccatgtcaaatgggcaagtagagcgtgccaatggcatgattctgcaaggactcaagcctcagatctacaacgacctcaacaagttcggcaagcgatggatgaaggacctcccctcggtggtctggagcctgaggacaacgccgagccgagccacgggcttcacgccgttctttctggtctatggggccgaggccatcttgcccacagacttagaatacggttccccgaggataaaggcctacaccgaccaaagcaaccaagctagtcgagaggactcgttggaccagctggaggaggctcgggacaaagccttactacactcggcgcggtaccagcagtccctgcgacgctaccacgcccgaggggtccggtcccgagacctccaggtgggcgacctggtgcttcggctgcgacaagacgcccgagggcggcacaagctcatgcccccctgggaggggccgttcgtcatcgccaaagttctgaagcccggaacgtacaagctggccaacagtcaaggcgaggtctacaacaacgcttggaacatccaacagctacgtcgcttctacccttaa

SEQ ID NO: 27746 - DNA, 2214 bp, Zea mays
  Peptide Sequence Number=SeqID_69525
atggagatcgagcggcagctcagccgcagggatgcggatgtgggcgcggacgacgacgacgacgacgtggcgctggtggagcaggtccggctgaccgtgccgacgaccgacgacccgacgctgcccgtgtggacgttccgcatgtggaccatcggcatcgtctcctgcgcgctcctctccttcttcaaccaattcttcgcctaccgcaccgagcccatcatcatcagccagatcacagtccaggtggcggcgctgccggtcgggcacttcatggcgcgggtgctgccgaagacgaagctctcggcgttcggcagggagtggacgatgaacccggggcccttcaacgtgaaggagcacgtgctgatctgcatcttcgccaacgccggcaccgcgttcggcaacggcggcgcttacgccatcagcatcatcaccatcatcaaggcgttctacaagaggaacatctcgttcgtcgtcagcctgctcctcatcatgacgacgcaggtgttgggttacgggtgggcagggctgatgaggaagcatgtggtggaaccggcgcagatgtggtggccgcagagcctggtgcaggtgtctctcctcagggcgttgcacgagaaggaggaacaacggcggatgacgcggagcaagttcttcctgatcgcgctcatctgcagctgcgcatggtacatcgtcccaggctacctggtcccgacggtgagcgcggtgtcgtgggtgtgctgggcgttccccaggtccgtgaccatgcaccagatcggctctggcatgaatggcatcggcctcggcgccttcacgctggactggtccgtggtggccgccttcctgggcagcccgctcgtgtcccccttcttcgccatcgtcaacgtctacgtcggcttcgtgggcttcatctacgtcgtgctgcccgtgtgctactgggcgttcaacctctacaacgccagcacgttccccatcttctccaccgacctcttcacgggcgccgggcagctgtacaacatctccgccatcgtcaacgacaggttcgagatcgacatggacgcctacgccaagcaagggaggatccacctcagcttgctgttcgccgtatcgtatggcctcggcttcgcctccatagcagccacgctgtcgcatgtctcgcttttctacgggaaggagatataccagaggatgcgagagtcatacaagggcaaggcggacgtgcacacgaggatgatgaagaggtacgatgacatacccaactggtggttctacttgctgctcgtggtgaccatggccgtggcgctggtgctctgcaccgcgttcaagcacgaggtgcagctgccgtggtgggggctcctcttcgcctgtgcaatcgccttcttcttcacgctccccatcagcgtcatcaccgccaccacaaacacaacaccggggctgaacgtcatcaccgagtactgcatggggctgatcatgccggggaaacccatagccaacgtctgcttcaaggtcttcggctacatgagcatgaaccagtccgtctccttcctcactgacttcaagctcggccactacatgaagatcccaccgagatccatgttcctagttcagttgatcgggacgcttgtggcgggcacggtgaacaccatagtggcgtggtggctgctgaccacggtgccgcacatctgcgagaaggagctcctcccgcagggcagcccgtggacgtgccccggcgaccacgtcttcttcgacgcgtccgtgatctggggcctggtcgggccgcgccgcatcttcggcccgctgggctactacaacgcgctcaactggttcttcctgggcggcctcgtctgcccggtgttcgtgtggctgctggccagggcgctgccgcggcacgcctggtggatccgcctcgtcaacctgcccgtcatcctgggcgccacggcctccatgccgcccgcgtcgcccatcaacttcacggcctggtgcttcgtgggcgccgtgttcaacttcttcgtgttccgctaccgcaagcagtggtggaagcgctacaactacgtgctgtcggcggccatggacgccggcgtggccatcatgggggtgatcatctacttcgcgctgtcgggacacccgatcgactggtgggggtcgaggggcgagcactgcgacctcgccacctgccccacggccagaggtgtgatggtggacggctgccccgtcttctga

SEQ ID NO: 27747 - DNA, 591 bp, Zea mays
  Peptide Sequence Number=SeqID_69526
atgaggacgacggccagcggcagaatgctgctgtccgtcctggtggcgctcgccgtcactgctgctcaccacgccgcggccgtcggcccgccgaagccgagaggccaggagacgcacctgttcgaggccacggtccgcgtcccggacaacggcgcggccggcgacctcgaggagtacaactaccgcctgctcgccaacgtgctcggcagcgtcgaagcagcacggagcgcgatgtatgagagcgagctcgggctgttcagcgccttcatcaccaacaaccaggcccgtagactgtcaaaaaagaaaaaaaaatcttcagaagcggcaagcctgcggcagtccgtgcaactgcaacatatgaggacgacggccagcggcagaatgctgcccgtcctggtggcgctcgccgtcactgctgcccaccacgccgcggccgtcggcccgccgaagccgagaggccagcagacgcacctgttcgagaccacggtccgcatcccggacaacggcgaagtcgaggagtacaactaccgcctgctagccaacgtgctcggcaggtcggcatctcgccagaccaccaccgctccaatctag

SEQ ID NO: 27748 - DNA, 150 bp, Zea mays
  Peptide Sequence Number=SeqID_69527
atgggcgggggcctcctggcagtagcacccgccctgaggtcagtgctgccgctgttcgaccccccggagcagaagtcgtcgtcgtcgccgctgctggagcagggatgtttgcgtgggcgcgagttgcttctcgcggaaggtgacgagtga

SEQ ID NO: 27749 - DNA, 489 bp, Zea mays
  Peptide Sequence Number=SeqID_69528
aggcgctccgctataattcatcggactgtccggtgtacaccggacagtatccggtgctccaaggaagagcggctctggaactcgccagcttcgggaattcgcaacggctagtccgctataattcaccggacatgtctggtgtacaccggactgtccggtgtgacatcgaagcaacggatacttcggcgccaacggctacctgcagcgcattgaatgcgcgccaacgcgcgcagaagtcaggcacgcccatgctggcgcaccggacactctacagtacatgtccggtgcgccaccggacatccaggcgggcccagaagacagagctccaacggtcggaacccaacggttttggtgacgtggctggcgcaccggacatgtccggtgtgcaggggaggtcggtgaacggatgcgttacgatcgccggagctctggtcttctgggtcagcctggatgacggtggcgcaccggacatgatcggtacagtggccg

SEQ ID NO: 27750 - DNA, 459 bp, Zea mays
  Peptide Sequence Number=SeqID_69529
atgggcaagagcaagaaaggcggaagctccttgcaccattctggcgacaagcggaagcgcgagctgactcctcccttgaaggacttcggcgattccgagtactcagaggagttctcctccgagtccgaggggtcgccaatccacgcctctcccccgacgtcatctgacgactcagatgattcccaggggatttcggtagaggtgtggacatacatccgggccgttgagcacgctgggctcgagggctcggatgactcggaggtctccttggacgaggggaactcctctgactcgtccgaggaggggagcgacagtgacaatgacggtgagggcgacggtgacgacgggggcgacggtgatggtgacgacgacggcagcaagggcgacggcaatggcgatggtgacggtagcaagggcgacggcaaggacggcggcggcagcgacaaggccagtggctag

SEQ ID NO: 27751 - DNA, 219 bp, Zea mays
  Peptide Sequence Number=SeqID_69530
atggagaaagttggaaaggaaagagatccatacattcaaggaaacagagcagaggaaaatatagggagggacccacctcggctaaaattacgaagccagctcttgctttgtcaagatggccactccaaaaggccgcttttttcgtacctacaaatttcacatcgtgtagtgacctatgctggaaaaaatagtagcatcctatgtactgccaggaattga

SEQ ID NO: 27752 - DNA, 114 bp, Zea mays
  Peptide Sequence Number=SeqID_69531
atggccgatgtacctaatgttaagaacgccggccaagggatggttgacattcttaaattgctaaacctacatgtaccattttgggacaattataacagtgttttctatagctag

SEQ ID NO: 27753 - DNA, 327 bp, Zea mays
  Peptide Sequence Number=SeqID_69532
atgaagtcgcccactgccaagcaggcacttgctgcagccctctcagctctgctgatccttctcttctttgtcctgctctgtggcccttcttcttcttcttcatcgccgtcgtcccagccgttgcagctgcaaccgtctgttgtgagagtgaggagcagaaggcttctgtcgacgcaatgccgtgactcctgctcgacgcctgtgggcgggttcagccaagccttcaaggcaccggccacggtgttgttcgagagcttgaagacgacgcccaagagcagtggatcacttctgctggtcaggatgtacacattgcgggggcaaagctag

SEQ ID NO: 27754 - DNA, 315 bp, Zea mays
  Peptide Sequence Number=SeqID_69533
atggtgccaacgtcaagtccggaggcatgggggaacgcggggacctccccccccgggtggcacaacgggagggggcgctacaagatctgcatagccgtttgctcttccaccaccctgtgtcccttcaacctcactggcagcagggagggatgttgtaaacccctgttggcagtagaaccaaacgaggtggatgtaatagtaatgagagttagagattacctgtcgagggcaacaccttcaaccgacaatgacgctgcagcagacttattttcttccaattacatggcatatctgaacccaagcatttacaagtga

SEQ ID NO: 27755 - DNA, 637 bp, Zea mays
  Peptide Sequence Number=SeqID_69534
atggacgacgccgcgaatcccacccctccaccatccacctccgccgcatccgcggcggccgcggcggcgcaacaccagcagctccagcgccaactcttcctaatgcagcaggcgcagtcccatccgcagcagctgtcgcagcaggccatgtcccgcttcccctccaacatcgacgctcacctccgccctctagggccgcttcgcttccaacagccccagccccagccccagccgtcccactcccagggtccatctcagtcgccgtcgcaggccacgcagcaggcgtcaccccagcagcagcagcagcaggcggcggcggcggcggcagcggcgcaggcacaagcacaggcccaggcccaggcggcacgggtacgaagccccgagatggagatggcgctgcaggacgccatgcgggtctgcaatccggacgtcaagacgcccttccagtccatcgaggacgctgtcaacaggtgcgctaccgtcggattcatgccaaatcttgctactttcctgttcagatgtttatctaaatctcgatctcgagtcttatctttgtcagtagatttcaagttttgttcatcttttccaatgttgtatagcattgtgaaaccagatggtggcattgtggaagtatttg

SEQ ID NO: 27756 - DNA, 198 bp, Zea mays
  Peptide Sequence Number=SeqID_69535
atggacatgatacgaagggaggaaaggggcatcttgcagttacttgtggtggtggggtggctgccgatgacagcgatggaggcccgaggcgcggaacgagaaggacgacgccgaccgcagttatatcttaggtctaaacatattctgatctcatcatacagcttagaactagcatggcatatagaccccacatattag

SEQ ID NO: 27757 - DNA, 579 bp, Zea mays
  Peptide Sequence Number=SeqID_69536
atgggcgactccggcggaccccaccaccaccgcccttcgccgccgcctctgctggacgccggcaagcgacggcgcatccccaacgtccgcctcgctggctccgtcccgctcccttcccacctgccccacccgcgccgcgtccccattgcccccgccaccaggtcccgcaaacccctccaacttcagcataacagcaaccagcatgaccacccctccgcggagccacccaataccctcctaaaacccttcgtcgacagcggcgacgacgtcgtcttggccgccgcttttccccgcaaggtcagggccccgaagtccacagcatgggaggattcggagatggagacggagacggaaatggaggagcaggaggaagtggtggacgtgccgagctggctatgggggatgggtatggggcgctacgcggcggcgttcgaggcgcacgaggtggatgctgaggtgctcccctggctcactatggacgacctccgggacatgggcattggtgctgtcggagcacgccgcaagctcttctgcgccatccagaggctcaatttgcagccgcctccatcacggaggtga

SEQ ID NO: 27758 - DNA, 528 bp, Zea mays
  Peptide Sequence Number=SeqID_69537
atggacgcgcccagcgccccctccctgcacctcccctccaggccgacgggcggccaacccaacctcccggtactcctcgacgctggcgcgccgtcgcccctggcacgcgcccctctcctctgcttggtcgggacaccgcccctcccctgcatcgtcgtcctcggtccgacccaggcgaccgcgccctcggcgttcgcgcccccgccctcgcgctggcacgcgtcctggggtcgccccaccgcccctgcagtcgcagtcgcccgcttctccggcggtctcccctccccgctgctcctacagccagatccgaccccaactgagctacctcatatcttccctcgcccgaccatgtccgccgggcacgttcctcggccctgtcgccgatgcagcaggacagacgtcggctcgttctgtcatctaggggcggcgcgggtctctgcccgcccccgctgctacgctaagatggcccgccggatgcccaccgtcgcacttctccctgtcacccaggtcgacaatcgccctgactga

SEQ ID NO: 27759 - DNA, 297 bp, Zea mays
  Peptide Sequence Number=SeqID_69538
atggggaacgatcctggggattccattgaagacaagctggatcgcctgctcgcccaagtctccatgctcatcacgcatatgatgttgcacgatcagcggctcgcacgtatggagaagatagtgctgcctggtgcagacgccacggaaggccttgacggcaccaagtcgggcgcaggcggcgggcgcaccggaaaagggggcgccgccgacaacaatgaagaccctctgcaggaatccgatggctctccattaggcctgggcattcggttttacccgacatttcggttcggtttttaa

SEQ ID NO: 27760 - DNA, 717 bp, Zea mays
  Peptide Sequence Number=SeqID_69539
atgaccgaggtagtcccgcccaactacagggagactttattcctctatggatccctaatacaaactatggtctgcctttgtagtatgaggcaaccacaaaaaaggaagttattaccttaccatgttgttgccgactatgaggctgaagaagatgacaggatccttgatagcgacacaacaggccagatcccttctcgcctgcagcaatgggaccataatattctggtgaagattgctgagttcacgacaacttttgacaagcaagtattggcatataacataatgaccaagaaaagggccatcggtgagttcaggtcggaggagcggctcatgctggagcaagccttattgcaggaggaaaagcaagctatgctgggactgagggcagagatggagtcgagagagaaagctggtcgcgaggctgccgaagtgaagatgcgtttggcaatggagcatgctcgtgctgaggcacaagctcactctgagatgatgaatcatggtcctataagggccagtgctgttgcttcgcaaggggaggatggtccgagtcatgacatggtgcaagaacatggcgaagatgggtggggaaattctcagagggatgatgaagatccatcggaggatttcctcaacgatgagaacgaacctgagaatgggaactcagatgggcaggaggactggcgcagatctggggagtttgatctcaactctaggtaa

SEQ ID NO: 27761 - DNA, 225 bp, Zea mays
  Peptide Sequence Number=SeqID_69540
atggccgcgtcatgccgggccgggaagggggacgaggggggcatgccgcgagcttcggccatggcggccacgcgcaacaagggggaaacggtgatgggggagaaggataaggggaggggcttacctcgacgacgaacagcggtgcccacgggagctccgagcgagcaccactccggacgacggcgcgggcgtttatatgcgagaaaaagggttccaaagaaataa

SEQ ID NO: 27762 - DNA, 1056 bp, Zea mays
  Peptide Sequence Number=SeqID_69541
atggggttcgcggcccagcgcttgtggcccccctcgtcccccttcccagctcggcatggtgcgaccatggcgctcgtggcccggcgcggcttggtaaagcgtcccggcgcggccaacgcctcagcctacacggtggcctacgtcacgcagccggcgtggctcgtagcctcggttgtccgcattgcaaccattgctcaggagaagatgaagtcgtggtggaggatttccagggactacgatgagttctgggcatggatggctcatcttagacacacagcatggaactcagtcattcctttctctcgtcttacggagcatccgcttcgtcgcctagtgactggccagtccagccacttggagaggttgcaccaccgcctgcacgaggagctggagcgttggcgccaggagatggagcagcagggctcttcctcctcgcctcagcaggaggtagagtctgtgaggcgtccctcccctatgcccccgatggaggcatcccctgcaccaccactgggcaccccggccactggagtagctgctggaggagaccctaacgacggagacggcaacgacggcagctcaagccacaacactgacctctcagagaagttggaccggagggatggatcacccgacccattactcgtgacgtcgctcgcgggtgtcacttccatgatgcgctcgataccttgctgcgccgggcccttgaccggcaaacttggtccatcgagtatcactgtgtggtctaccagcacagtcgtgacttgcttggtgcgccgtccggaggatggtctctggggtgcagaggacaatcctaggttgagaagcacagtcaacctagccactatgctaaacacaaagctggaccacgctttagacgagctgagtagggctcgtgctaagatcgtccagttgcgggctgagcgcgcagagcgccatcacctggaggatggctctccctcccctatcgagacccagcacccttaccgctcgcctcagcatggacaccatgtctacgacacccctggctgcaggacccggataaacttggaaccatag

SEQ ID NO: 27763 - DNA, 816 bp, Zea mays
  Peptide Sequence Number=SeqID_69542
atgaagtcgtggtggaggatttccagggactatgatgagttctgggcatggcatccgcttcgtcgcctagtgactggccagtccagccacttggagaggttgcaccaccgcctgcacgaggagctggagcgttggcgccaggagctggagcagcagggctcttcctcctcacctcagcaggaggtagagtctgtgaggcatcactcccctatgcccccgatggaggcatcccctgcaccaccactgggcaccccgaccattggagtagctgctggaggagaccctaacgacggagacggcaacgacagcagctcgagccacaacaccgacctctcagagaagcaggaccagagggatggatcacccgacccattactcgtgacgtcgctcgcgggtgtcacttccatgatgcgctcgataccttgctacgccgggcccttgactggcaaacttggtccatcgagtatcactgtgtggtctaccagcacagtcgtgacttgcttggtgcgccgtccggaggatggtctctggggtgcagaggtatgttcggaacattattctttctttgagcggtactcagcagaggcggccatgcaggatgctgcacggcgtgagctttctcagtactgctcggtattcagtggggtggccctatggcctttacatgagttgcgggctgagcacgcagagcgccgtcacctggaggatggctctccctcccctgtcgggacccagcacccttaccgctcgcctcagcatggacactatgtctatgacatccctggctacaggacccggataaacttggaaccataa

SEQ ID NO: 27764 - DNA, 111 bp, Zea mays
  Peptide Sequence Number=SeqID_69543
atggagtctgacatcagattcgtcgggcgggatttagtggcggccggcgccaccgtcgtgtccgtcattctcgtcaacccctcaaagtcgctaagaagcaccttcacatag

SEQ ID NO: 27765 - DNA, 471 bp, Zea mays
  Peptide Sequence Number=SeqID_69544
ggccggaaacgcgcgcccaagaagagcggggacgaagacgaagacccgagcacggccatcgccagcggaagcggccccacgagctgctgcactacctccgacagcgactcaaacgcgtctcctctggagtccgcggacgccggcgctcgtcgccccaagggcaacgagaatgcccgggcagctggccgcggcgcggcggcggcgacgacgacgacagcggagccccagagcatctacgcaaggaagcggagggagcggatcaacgagaggctcaaggtgctgcagagcctggtgcccaacggcaccaaggtggacatgagcaccatgctcgaggaggccgtccactacgtcaagttcctgcagcttcagatcaggctcctgagctccgacgacacgtggatgtacgcgcccatcgcgtacaacgggatgggcatcgggatcgacctccgcatgcatggacaggacagatga

SEQ ID NO: 27766 - DNA, 183 bp, Zea mays
  Peptide Sequence Number=SeqID_69545
atgtcgaggagggagcagaggacggcggcagcggcggccacgagcttttgggccaagctgctgcgcgcgacgcggggaggcgggaagaaggaccaccgagggtgctcgctggccgcgcgcggcaacacgctccaggagagggccgccgcgcccaagtgtccaaggggcgtgcagctaggctag

SEQ ID NO: 27767 - DNA, 480 bp, Zea mays
  Peptide Sequence Number=SeqID_69546
atgaacaaaatgcaccaaaagaaccaatcaaatgttcgcagaacactagaaatcgaagtgccaggagcggggctgcctggactaggacgcatgcatgcatgggtgagatggcgtgatcagaagagaacccacttgggcgcggcggccctctcctggagcgtgttgccgcgcgcggccagcgagcaccctcggtggtccttcttcccgcctccccgcgtcgcgcgcagcagcttggcccaaaagctcgtggccgccgctgccgccgtcctctgctccctcctcgacattacgaacgccgccacggctgcggcgatcccgacgaaccgcccacggcgtatctcgttcgacccactgggcgagcggcgccgcctcttctggggctgctggatgttccacgctaactgcaccgcgctgggcccctccaaggaatgccccgataacgcctatcactctgagctcgataacacgctgggctgttga

SEQ ID NO: 27768 - DNA, 717 bp, Zea mays
  Peptide Sequence Number=SeqID_69547
atggcttcctccttggtttctcgattgcctgtcgcagtgttgctgctgctcgtggcctgctcctccacggcagccgccaccagctacaccgtcggcgacgggtccggctggacgtccggtgtcgactacacatcttgggccgcctccaaagacttcaaagtcggggacaatctcgtgttcaactacgcgaaggggctgcacacggtggtggaggtgagcgcgggagagtacatggcgtgcacggccgccaacccgctgggctccgagtccgacagcagcggcgcgaccaccgtggccctcaaggcgccaggcacccactactacgtgtgtagtatcgccgggcactgcggcgccgggatgaagctcgccgtggccgtgaccgtcggcggctccaactccaactcccctggcgccacgccggacgacccaacgaccccgcggacgtccccgacccctaccgcgccctacacgacgccgaccaccaccacaccgtacacgacgaccccgaccaccacaccaccgtacacgacgccgacgacgaccccgaccaccacaacaccgtacacgacgccgacgtgctctggcggtggtggcgccacggcaaccccgggcatgactccgttcatgtcatttcccagcgcggccggcctcggatcggcggcgttggctggctttgggctggtttggtgtgtcatcgtccagctagcgctgctgtag

SEQ ID NO: 27769 - DNA, 501 bp, Zea mays
  Peptide Sequence Number=SeqID_69548
atggcggcatctgatgtggttcgtagctgctggtccactgatatcacctgggtggtgcgtaagtatgacatgctgttaatagtagtttatggtatcctctggggctttagtgctccaggtccaggagctgatcctaaggtggattatgcttgcaccccagaagaagtgcaacagcatttccaagcttgtggaactgtcaacagggtgacaatcttgactgacaagtttggacagccaaaaggttttgcttatgttgaatttctggaacaggaaggtgttcaggaagctcttaacttgaatgaatctgaattgcatggtcgccagattaaggtcgccccaaagaggactaatgttcctgggatgaagcagcgtccaccacgtgggtataatccataccatggctacccttatagatcatacggggcaccgtatttccccccatatggttatgggagggctcctagattccgccgccctatgcgctacagaccttacttctga

SEQ ID NO: 27770 - DNA, 394 bp, Zea mays
  Peptide Sequence Number=SeqID_69549
atgcgcccgagccaggacgccagcgcctgtccatgggactgcgcaccggcccgcagtcgccttggccggatcccgcgccaagaccgcacccgcgctcaggggcggctgctcgcccgccgggtttgcgcgctagggccgcgccgccatgggaaaccgcgtcggggctgccgccagagggccgtggccgcagccgcgccccgcgacgccgtgcggggccgcgcccgagccgtcgtgcgaggccgtgcctgcgcaccgtgggggggccttgcccccgacccgccggagggccgcgcccgcgcaacgaccgccgaggccgcgagcagcctagggctccgcgggtcccacgtcgagcagctcggaccgccgctgggggtgtcgcgcacccgccccgagg

SEQ ID NO: 27771 - DNA, 171 bp, Zea mays
  Peptide Sequence Number=SeqID_69550
atgcagcagaccggtaggtggcggcagtgctacacgggcggtggaggcggcggcgctgtgcaagcggtggcacgccggcgcggctacggctacgaacctgagaacaacgaggaaatcttcctattgttgaggaaagcaactgaaacagttgtgaaacaaatgatgaactaa

SEQ ID NO: 27772 - DNA, 1173 bp, Zea mays
  Peptide Sequence Number=SeqID_69551
atggctgtaaagcttgataatgcccatcaagagtattcaaatgcaattgttgttgctcaagctacatcaaatcaaatgtcaaaacgtgacattttgaggccttacatggatattattgataacatgttgtctcaaatgctgcgggaggatccagcctttaaaccttctggtggtagattaggtgaaaatgatatggactatgataccgatgataaatcgatggccacacttcgtcgccaactcaggagggctcatgaggagtactataggtgcaaaagaatggttgcaagatatgcacctcctatttcttataactttctgaatctcatccgccttggtggcaatgctaaaactacatttgagaagagaatggggaacattgatgatgcagttcctttctttggcagaggcttcaacaagatctatccactgattatggttgtttatacactattggttgctagtaatttctttgttcgtgtgattgactttttgggaagatggaaaaggttcaagttccaacgtgaagaagagaatatagatggtttagatccatctggaatgattattctacaaaaagagagatcttggatcgaacaagggtgcaaagtgggcgagcaggttattccattggcaaggaatttcaatggtgtgaacgctgatattgaatcacaaaatgtgccattggttgaaaacactgtggagatgaaagtaggggcaacttcttccagaaatgacgggagagctggccagttgaagtatgcaaacaacagggagactatcgccagcaaatacacttctattagagaacagaaccggcagtcagggaaggtagtgagaaaggaaatttcaccgaactctatatctttgctcgaagaaagaaattcagagcaggggtccaatgctggtgtaccaccaactggtgtgtctgcaacatgggcctcgatgaagattggttttcaaaatttcaaagcaaatatgggttctaagaagtttcttcctttgcgccaagatccaggatttgttccaaatttgaatgtctcttcaccagaatctcttgatgacatattccaaaggttgaaacggcggcctgcaaatgtgcctgtggattaccttgacgatgacgatgatgacaacataggagatacagatcttcatttccaagatcaatga

SEQ ID NO: 27773 - DNA, 175 bp, Zea mays
  Peptide Sequence Number=SeqID_69552
atggcggtgaaggtggtgttgcccacgacgatgagcggcgcggcacaccgtcctgaccccgatgagaaattcgtcgtgcctagcctagcttcgggcacgagaacggcattgcacaggtcccagacgtcctggcgattctccccgtttgctccttggtctccaagcggggtcgaag

SEQ ID NO: 27774 - DNA, 1527 bp, Zea mays
  Peptide Sequence Number=SeqID_69553
atgcagcggcagcggcgaccacgagcatcgcaccagcaccgtagtggtcccttcctcctagtcctcttcctcagcgccgtggtcgccgccgatgacgcggcgccggcgggcacgccggcgatcgtggacacggtgtgcgcggcgacgcaggccgcggacccggaggccttcgacgtgagcttcgtcaccacgctggagatgatctaccagaacgtgacgcggtggagcttcggcgccgcgggctccggcgagggcaacgacaccgtgttcggcctcgggcagtgcatgggctacttgtccccgaccgactgccagctctgctacgcgcagagccgcgtgaagctgccgcactgcctccccgccgacggcggccgcatctacctcgacggctgcttcctccgctacggcgccgacaacttcacagccgccgccaccgacgccagcgacaccgccgtgtgctccaacgccaccgccgccgccagtgcaccgccggtggtcgggaccgggttcgcggccgccgccgccgcgctcgtgcggaacgtcacggccgccgcgccggccgccaaggactactactacgcggcgtcggcgtccggccgcgcgccgccggcgtacgcggcggcgcagtgctggaggtcgctcaacgccagcgcgtgcgccacgtgcgtggccagcgcccgcgaccggctcctccgcaactgcctcccggccgcgcccgaggggtacggcctcaacgccggctgcgtcgtcaggtactccacgcggcccttctacctgccggccagcgccggcggcggcgggggatcgtccgcgcgtcgcattgctgtcatcgtggtggcatcggtcttgtcggcaatggcggtcatgggcatagcgttcatctggacaaggatgaggtccagatcaagggacgatctcctccgtgcagacatgggcgacgacgggtcgtccggcgagatgatccgcgccatcgcggcgtcgcagctgagcttcaagtaccaggagctgcgcgcggcgacggacgagttcagccagacgaacaagctcgggcagggaggctacggctccgtgtacaggggcgtgctggcggacgggcgggaggtggcggtgaagcggctcttcttcaacacgcggcagtgggcggagcagttcttcaacgaggtgaagctggtgagccaggtgcagcacaagaacctggtcaagctgctgggctgcagcgtggaggggcccgagagcctgctcgtctacgagtacctctgcaacaccagcctcgaccactacctcttcgacgcgttcaagaagaacgcgctggactgggagcggaggttcgagatcgtgctgggcacggcggagggcctctcctacctgcacagcgcctcggaggtccggatcatacaccgcgacatcaaggccagcaacgtcctgctggacgacaggttcaggccgaagatcgccgacttcggcctcgccaggaacttcatggacgaccagagccacctcagcaccggcctcgccggaactttgtga

SEQ ID NO: 27775 - DNA, 555 bp, Zea mays
  Peptide Sequence Number=SeqID_69554
atgccccccctgcgacgtggtcggtccgagccggaggtcgggcgaggcggaggctcctccgaggtcgaggctgagtccaagctcaggggttgggcgaggcggagaccgccttccgaggtcgaggttgagtccgagccctggggtcgggcgaggcggagtccgtcgtccgaggtcgaggttgagtccgagcccaggggtcaggcgaggcggagtctgtcgtccgaggtcgaggtcgaggttgagtccgagccctggggtcgggcgaggcggagcttcctatggcgcctgaggccggtcttggcggctgtcaacctcaccctaacgggtggcacagcagtcggagcagcacaggcggtgctgttttcctgtcaggcgatccttgcattgaatgctcctgcgatgcggtcggttggcgtagcgatccggccaaggttgcttctccgcgaagcctgcccgagctgggcctcgggcgagtccaagctttgtgctgatgggggttaccagctgagattaggagtcttgggggtacccctaattatggtccccgacaagtaa

SEQ ID NO: 27776 - DNA, 315 bp, Zea mays
  Peptide Sequence Number=SeqID_69555
atgaaattaatgacgaacttgcgccttaagatggtgttgactatgaaattattgatagtgatgatgagagttatgatgcggctaaccctgacacatatgaagattatttttaatcgatgttgttggacaaagatggtgggcggtgggatgaggacgaggagggggagggggaggaggagtacccgcaggacggcgaaggaggcacagcaggacgacgacgtccagcagcaggtggagcagcaggccgctgtcgatgcggcacagcaggacgatggcgacgctcagcaggacgcctcaggtttgaggaacgtctag

SEQ ID NO: 27777 - DNA, 516 bp, Zea mays
  Peptide Sequence Number=SeqID_69556
atggcgcgccgtactagcgacggcaccattgccggcgaacgtcaacccctcgttctactacactatttcgaacgtctccgcgtaggcgtagaacaccagggggccgatgatctatctctccttcgacacatcgttcacacttgcagggggctcaagaacctcaccaaggcctatactcggtggaccaaggggacgaggttccacttttatgcaccggggtgggcaaagcctaatcatgaggggaagggtttggttgatccgatcaccccgtcggcgaacacagaggattcacgtgcatggggactggggagtggcttggcgagcgacgcttatgggccagagggtgtccgagtcagggcgtgtgagaatgccactgacgcagcggacccacacgtcggtagatgcacgaggctaggcacgcgcgtagggataaaacaagtgtctgacccacggggatgggacccactagtcggcaagcctgcaagtttggatggcgggtgtggcctgggtttctaa

SEQ ID NO: 27778 - DNA, 1024 bp, Zea mays
  Peptide Sequence Number=SeqID_69557
gcagccgccttccaggtggcacaacgtcaggacggcagtatccggcgccctatttctcttcctcagcgacctcaagacaggcgccagccgcgccacgccagcccggatgtttcggaggtacgatccaccgatatcacaatttgacgtctcccgcggcctctgggcacgcgtgttctgccccacggcgatcgctgacgatgctccagccccgctccccgtctttgtctacttccatggcggcgggttcatgctcttctccgcgtcgttcggcccctatgacaccttctgccgccgtctctgccggaagctccgggccgtcgtcgtgtccgtgaactaccgcctcgcccccgagcatcgtttcccggcagcatacgacgacggcgtcgccacactccgctacctggacgagaccccgaccccactgccggccgacctcgtaccggcccccgtcgacttcggtagctgcttcctgatcggcgatagctcggggggcaacatggtccaccacgtcgcccagcgttgggcgtccatgtcgtcggcgacgtcgtcacagtcacagtcacagcctccactgcgcatgcgccgcctccgcctggccggcgccgtcctcatacagccgttcttcggcggggaggagcgcactgaggccgaggtaaggcacgacaaggcgtgccgcatattgtcggtggctcgtgcggatctctactggagggagttcttgcccgagggagcaagtcgagaccacccggcggcgcgcgtgtgcggggagggcgttgagctggcagacacgttcccgccggcgatggtggtgaccggcaggatcgatctgctcaaggactggcacgcaaggtacgtggagacgttgcgtgggaaggggaagcgggtcagggtggtcgaatacccggacgccttccatggcttctacgcgttcccggagctcgctgattccagcaagctcgtcgaggacatcaagctgttcgtcgacgatcataggtctggttcccgactagatgcatgtggttag

SEQ ID NO: 27779 - DNA, 441 bp, Zea mays
  Peptide Sequence Number=SeqID_69558
atgagcagcataggcacaggttatgatttgtctgtcacgaccttctccccagatggtcgtgtcttccaggtcgagtatgccaccaaggccgtcgacaacagcgggactattgttgggatcaagtgcaaagatggcattgtcctggctgttgctggtttagcagcagatggcaggcaaattgtttcaaggaccaaatcagaagctgccagttatgaaaaggtctatggagaacccatttctgtgaaggaattggctgatcgtgtggcaagttatgttcatctttgcacgctgtactggtggctcaggccttttggttgtggtgttattcttggaggttatgatagggatgggccacagctctacatgatagaaccctcaggagtttcctacaaatacttcggtgctgcattggggaagggaagacaggctgcaaagacgtaa

SEQ ID NO: 27780 - DNA, 816 bp, Zea mays
  Peptide Sequence Number=SeqID_69559
atggcgcagcacaagactttccagaacgacagggccaacctgtatgcgaggtacattaacaccttcacacatgagtttaactatctttctagaaatctgtattatttgaagactggaacttgtaaatttggttccaattgcaaatatcaccatcctaagcaagatggatctgtgcagtctgttatattaaacaacaatggattccctctacgcctgggtgagaaagaatgctcctactatatgaagactgggcaatgcaagtttggttctacatgtaaatttcatcatccagaatttggtggtattccggtgacccctggaatatatccaccattacaatcaccttctgtgccctcccctcatacatatgctccaaattggcaaatgggaagatcacctgcagttcctggatcatatataccaggctcatacactccaatgatgatctcatctggaatggttccattgcaaggatggagcccttatccggcatcggtaaatcctgtggcatcaggtggagcacaacaaactgttcaagctggaccattatatggtataggacaccatggatcttccaccgcaattgcttatggtggtacatacttgccatattcttcctcagctggacaatcgagcaataatcatcaagaacatggatttcctgagcgaccagggcagcctgagtgtcaatattatatgaggactggcgattgcaaatttggaactacgtgtaaatataaccatcctcgagattggagcactcctaagtccaattacatgttcagccatctatgccttccacttcgtccggtctaa

SEQ ID NO: 27781 - DNA, 216 bp, Zea mays
  Peptide Sequence Number=SeqID_69560
atgacgaaggtggttgctcgagctgttgtcgaaggtgatcgtttgagttcaccggaggatttgtattacattggtacattcggcttgtttgaaggtgttgatgcaagagcaattacaatccaacgtgaacagtatggagatagtatctttgtcttaagagccctcgacgaagaagaagacccccaacattgcttacaaacgatgtcttcgtcttga

SEQ ID NO: 27782 - DNA, 489 bp, Zea mays
  Peptide Sequence Number=SeqID_69561
atgatttatcctggttcgggctatgaagggccctactttcagcagaggagggatgtggattatattactcgcaccaaaagtgctcacagtaggggttacaagcacgacgggagagggaaaaaggcttttgcgggaggtgtcagttccactgtttgtgatcacgttgggaagtcctctgtcacagatatcgagggaagaatcgagctcgggcgaggcggaggttcgtccgaggttacgaccgagcctgtcctgagacttgatgacgcgtgtcacagtcgacggagtggccggagcgggagagcaagtagcagaggcctggttcgggcgaggcggagcttacgcccgaggttgagtttagcttcgggcgaggcggaacttgcgcccgaggtcttggtccgtgtcctgtcgtattatgcgtcacgaccgccaggtggcgtgcgcacgcttaatgatgttggtgaatctttgacaagactgttgtcctattga

SEQ ID NO: 27783 - DNA, 483 bp, Zea mays
  Peptide Sequence Number=SeqID_69562
atggagccgccgcacgccgagcaggccgtcgccgctgtagcagcaggaggagagggcggcaccgcaagcccgggcaccggcctcgaagatctccggccgggcgtacggccgcgcggatctctggtggcttcccgatgtaaccgcgtggtacgagaacgcgtggcttttgcagggccggtgcttaggcgggggctggacggcggtggggaaggggaggacggggagctgggggcggggcaggaggcgaacgcacggctaccagagcggcctggcgaggcggactgtggctactacctccgcacgggcgcctgcggcttcggggagcgttgccgctacaaccatccccgcgatcgtggcggcactgaggtgcgcgcgggcggacgattttctccagcctctgcttcccgctctcttgctttctcaatcttccccgatctgatccgtgtccgcgtccgacacgctgctgccggtgaattgagatag

SEQ ID NO: 27784 - DNA, 1329 bp, Zea mays
  Peptide Sequence Number=SeqID_69563
atgcggaagctgggcttcggcgaggacgacgaagcggggggaaggagaagcttccggagcggcccgggcgaagccggactgcactactacctccgcactgggcgcctgcgggctacggggagcgctgccgctacaaccacccccgggatcggccggctccggttaatggcgttgggaagaccacagtactatgcaaagaatggcacatgcaaatttggttccaattgcaagtttgatcatcccagggaaagtggttttgtacctgtcgctttaaacaacagtggattccctctacgtctgggtgaaaaggaatgttcgtattacatgaaaactggacattgcaaatttggaggtacatgtaaattccatcacccagaacttggttttcttacagagacgcctggcatgtacccaccagttcaaccatcacctatttcctccccacatccatatccacatcattccaactggcaaatggggaggcctgctgttgtgccagggtcatttttaccaggcccatatccaccaatgatgcttccacctacagttatgccaatgcagggatggaacccttatgtttcacctatgaaccaaactacaccagctgggggccagcaagctgttccagcagggccatcttatggcttgtcgcaccaggagccaacctctgcagtgacttatggcagtcattatgcgcaattgtattcttcttctgggacttcaagcagcaacatacaagaatatgtgtttccagagcggcctgggcagcctgaatgtgaacattacatgaagacaggaacctgtaaatatggagcagcctgcaaatatcatcatcctcaatacttcagtggaccaaagtctaactgtatactgagccctctgggtcttcccctgcgtcctcatgatagaattgtagccccagttcctttggaaatgttttcagtacatcttcatctgaagctttacattggtgtgcagggttctcagcgatgtgctttactacgcacaccatggctttttgcaagtttgggccgacatgccaagtttgatcacccgatgggtactccaaactacagtcttccagcaccatcacttactgatgtgccagtcgctccatatcctcacactttctctgttactcctattgctccatatctgctgccccgtgatccgcggccgcaatacactctagccaaggatccctctgcttatccaccacaagcgcccggaactacgtacggacctgttggggcgatatcaaaggtttatgcccgccacacgcttatccgatccccgacttctggagctgctggcatgcaagcgtcgtaa

SEQ ID NO: 27785 - DNA, 127 bp, Zea mays
  Peptide Sequence Number=SeqID_69564
cttcgcgcaggtgctggcacagacattcgcgcaggttcggccctcttatcgctttttgctttcgattcgagcagggattcagagccagggattccagtctgtgccgtctgctgatgctattagttga

SEQ ID NO: 27786 - DNA, 336 bp, Zea mays
  Peptide Sequence Number=SeqID_69565
atgtggtctggggatgaatgcatgcgtttattatattgctttcatttcatccctttcttattgcttgaacatgcttgcaatcatggcatttccgagggaggcctggttgcacttgcacgggaggatggctggaggttctccagcagcagcgagcacaagaacaagaaccgttacattcttgctctcaagggacaaatgcagctgcaggccggagctgtcgatgtcagcagtagcgagtacattatactccacaggaacaacaatttagcaacagctgcactctaccactcctacacacttgccttctctgacttgtactccatggaatgggattaa

SEQ ID NO: 27787 - DNA, 1352 bp, Zea mays
  Peptide Sequence Number=SeqID_69566
cacgatcgatcaacgacgacaaggatcttgttcagcatgacttccctgaccaaaccagtagttttctggagatgccagaacttggccagttcgtcgctgccctgccatatcaaagcaagtcaaaacggcccgaccccgacgacgagctactcctatactcccaccccaccaacgtccaaattcacgagccggcgtgctgtccgcgcggcaaacctggagcacgggctagagttcgcgcggtggtgatgatggcgacccaccacgacgcgctgtgggtgaagctgcacgagctggagctgcagctcgcggcgtacaagctcctgcgcgccgcgcgcggggacgaccacgcgggtgccgtgggcttcgcttccgcggacggggccgacacgccggggggcagcgcctgccgcggcaggcagtacgacgcctacatgcgccagcgcgacgccaggcgcgtggccgcgctcgcgcagcagcagcagcagccgccgcacccggcgaacaataaggctcagcgacctcggggcgtgcgcgccacgccgatgagcccgcgtgcgctcaggtgcgcgacccggaacgtgcaagaggcgggcgccacgccgcggctggccgtcaccccggtgaagaggacgccggccgcgtccatcccaagcaccccgagaagggacggcgccgcgctgccgaggagcaggacggcgagcggcgggcggcggcacggcggggagcccccgcgcggtcgtcgcaccaccagaggcggagcagcctcggcgtgctcgcggagtttcggtgagtgcgccacgccgaggccgttcctgaaacgcggcacgggcacgggcggcgcggcggcgcccgtcaggctgcggacgacgcgggtttacgacctgccgtcgatcgacgtggccgtcaccccgaggccgctgcctcacgtgcatgcgcacacccatgcccatgcgccgcgccacgtccggtccctgtctgagctgccgttcgacaccgcggcgctggcctcgccgcagtcgcgggcgaggaggcggtggggcagcccggagaggccagcggcgatgttctcggctgctgctgcagcggcggccgactcgcacagggacctgtccaagggcctcaagaagttgctgagctacgtgaggaaaggcggccggagcggaggaggcggcggcggcgaccagcctttcccggcacccagcccgcgcgggagtgggaagcccgtgagcaaggggtggtctggttgctcccgcgtcgacgtcccgttcgaccgcgcaagcctggacgtcatgtggttcgacgagccagagcatcaccgctcactgcacttccctgtgcctccctgcttgctg

SEQ ID NO: 27788 - DNA, 156 bp, Zea mays
  Peptide Sequence Number=SeqID_69567
atgggcgtctctgacttctgcgcgcgctgcgcgcacattaaatgccgtcgcagaagtgcagacacactgggaactgaaacagtaatgaaagttactaagagtcaacatcgtactttcaatgaagacttgaaggctaactactctattgcagcgtag

SEQ ID NO: 27789 - DNA, 723 bp, Zea mays
  Peptide Sequence Number=SeqID_69568
atgaattcagtcgagtggcagatgaatccatactatgatgcttttgttaagtggcagatgaggaagatgaagaagttggatatgaattcagtcgagtggcagatgaatccatactatgatgcttttgttaagtggcagatgaggaagctgaagaagttgggcaaggttgttaaagacatgaggtacacaatctactctccgttggatggccaaccttgtgctgatcatgataggacaacatgtgaaggtgtgcagccacaagaatacatcttgattaaaatggaggtgatatcaccttttcctcccaagctgaagtcattggaagggaggaaggtatatttggcagctgctatactaaggcccgagacaatgtatggacagacaaattgttgggtccttcctgatggaatgtacagtgcttttgagattaatgacactgatgtcttcaaccttacaacaaggtctgcttttaatcttgcataccaacacctatccaacgtccctggaaaaccaacctgcttatgtgaactatctggcagtgatttgtttggtttgccactgaaatctcctcttgccttcaatgaaacaatgaatgggaaccggaatggggtagaggagggcggcggaggaataagcagaactacagaaaaaaggatatggcaactgagagcagcggcatcaaatcgcgtcgtttcgcagggcactctggggagcctactgtag

SEQ ID NO: 27790 - DNA, 267 bp, Zea mays
  Peptide Sequence Number=SeqID_69569
atggggtgggcggactacatgaggcccgggaccgtctgtggttcgactgggccaactgagcccgtcatgctcaggctagaccaggcaaccaaacacatccatagtgctgcgcaccaatgcaaggagatcaagaacggccgcctcgccattctcgccttcgtcggcttctggttccaggccgtgtacaccggccagggccccgtcgacaacctgctcgcgcacctcgccgaccgaattttttgtattttagcccctaaaccgaagtaa

SEQ ID NO: 27791 - DNA, 2154 bp, Zea mays
  Peptide Sequence Number=SeqID_69570
ccccaccaactcgagcgtcctgcggacgtaccagcccaacagcacgttcgcgggcaacctccagaagctcgtgtccgagctcccgtcgaacgcgtcggcggcgtcgggcttcgcggcggggaggttcggcgccggcgcgggccccggcgcggcgtacgggaccgcgctgtgccggggcgacttcctcggcggccagtgcgccgactgcctcgccgaggggttctcgcaggcggccagccggtgccccggcagcgtggacgccaccatgtactacgaccagtgccagctccgcttctccgaccaggacttcctcctcgccgccgcctccgccaacaacatgccggagagcaccgcctggaacatgaacagggtgtccgcggggaacgtggccgcgttcgacgccctggtcaaggggctcgtggccgcggcgtccgacgccgccagcgacaggagcagccggtacgccacgggccaggccgggttcccgccggagagcatcaacgtgtacgcgctggtgcagtgcgcgcaggacctcacggcgcggcggtgccgggagtgcctggccggcctcatgggccagatgggcaattttttcgccgggagagtgggcgggaggattctcggcgtgcgctgcgtcatcaggtacgagaaggatgtcttcttcgcgcaaaccccagatatgctcacggtcgcgccgctgctgggttcgacttcgaccaaaggcggccgcgcgctggcacgagtagctaccagcaccagctacgtacgtgtacgtagctttgctagagctgcccgtaacgtaacgccccctgttgacatgcggccttttgttttcaagaagatcggctggaccagtgtgagagccttagcacactgcacgtaccaggatgggtcagatcacttggcggtcacaaagtccgcgccagacgccgaaatggttaagctgctcaccacgctgtgggtcgtcgccgtcgccgtccccgtgtccgtgctcctggcctgcttcctggcgtgcgtcctgtggatcagaaagcggaggaggagagtgaccaatgtgtcaggcacggtgagcgtgcccacaatgtccatggagatggagcaggtgctcaagctgtggcgggtcgaggagagcgactccgagttctccctcttcgacttcgaccagatcgccgacgccaccgacaacttctccgacgaccacaagctaggccagggcggctttgggcccgtgtacaagggtgagctgcccggcggcctggaggtcgcgatcaagcggctgtcgtccgtgtcggtgcagggcctgatggagttcaagacggagatccagctgatcgccaagctgcagcacaccaacctggtgcgcctgctgggctgctgcgtgcaggccgacgagaagatgctggtgtacgagtacatgcacaacaagagcctcgacttcttcatcttcgacggcggcgacagagggagggcgctgacctggggccgccggttccgcgtcgtcgacggcgtcgcgcagggcctgctctacctgcacaagcactcgcgcctgcgggtcgtccaccgcgacctcaaggccagcaacatcctcctggaccgcgacatgaaccccaagatctccgacttcggcatggccaggatcttctgctccaacgtcaccgaggccaacaccacgagggtcgtcggcacgcatggctacatcgctccggaatacgcgtcggagggtctcttctccgtcaaatccgacgtcttcagcttcggcgtcctgctcctggagatcgtgagcgggaagaggaccgccgggttctaccagtacggcaagttcttcaatctcacaggatatgcgtaccagctgtggcaggacgggaaatggcacgagctggtggacccggcgctgggcgacgacctccccgtgggcgaggtgatgaagtgcgtgcaggtggcgctgctgtgcgtgcaggacagcgccgacgaccggcccagcatgtcggaggtggtggccatgctggggagcgagggggtcaccatgccggagccccgccagccggcctactacaacgtccggatcagcagcctcgccgtgtcttcggactcgttcgccgagtcgtcctgcaggatgatcagcaacatcaccctcacggaccacgaggaaggcag

SEQ ID NO: 27792 - DNA, 2085 bp, Zea mays
  Peptide Sequence Number=SeqID_69571
atgggcactctcccctacctcttacttgtcgtgctgtcctctctgtcgctcgtcccccgcgccgccgcgtactcggagtactcgtgcaacggtaccacgggcaacttcacggcggccagcgcgttcggcgccaacctggcccgcctcgtcgcggcgctgcccgccaacgcctcctcctctccgtcgctcttcgcctcggcggccgtcggcgcggctccggacacggcctacggcctcgcgctgtgccgcggcgacgtcacggacgccggggtctgctcggcgtgcctagccgacgcgttcggcaggctgcggcggctctgcggcgcggacagggacgccacgttctacgccgacctgtgcacggcgcggtactccggcggggacttcctggcgcggcccgacgacaactcccccgtgatcaacgcgctggacgtgaacgggtcgacgtactacgggtgggacgcccggaacgcgacgagccggaccctgttcctgtcgctggtgggcacgctgttcggggagatggccatgtacgccgcctacaactcctcggccgcgcgcatgttcgcgagcgccgccatgtacgtcaacccgcagctgcccacggtgtacgggttcgtgcagtgcacgccggacctgtcgcgggcgcagtgctgggactgcttccaggtgctccaggaccagaaccggcggtggtacgacggccgcgagggcggccgcatcctcggcgtccgctgcagcttccggtacgaggcgtaccatttcttcggcggcatgccggaggtcagaatcggcctcaagggcgacccatcttcaccagctgcggaaacggaaatccatggtagcaatcacagggtggtcttaattgtcgctgtcatcgtatcaatcacggcgttctccgctatgatggctgccggccttgtgataatcagagcacgacgacgaaaaggagccgagaagaagagaaagctgcagctggaggcgcaatcccggaacagctctaccacagaggatgcgctgaagctgtggcggatcgaggagagcagctcggagttcacgctgtacgacttcgccgagctggcggccgccacgggcggtttctccgacgagaatctgctcggcagaggcggcttcggccccgggaagctgccggacggcgccgagatcgcggtgaagcggctggcggcgcattctggacagggcctggaggagttcaagaacgagatccagctgatcgccaagctgcagcacaccaacctggtgcggctcgtcggctgctgcgtccaggaggaggagaagctgctggtgtacgagtacatgcccaaccgcagcctcaactgcttcatcttcgaccagcagcgggggccgttgctggactgggagaaacggcgccgtatcatcgagggcgtcgcgcaggggctgctctacctgcacaagcactcgcgggtgcgcatcatccaccgcgacctcaaggctagcaacatcctgctggacaaggacctcaaccccaagatctccgacttcggcatggccaggatctttggatccaacatgacggaggccaacaccaacagggtcgtcgggacatatggctacatggctcctgagtatgcttcggagggcatcttctcggtgaagtcggacgtgtacagcttcggcgtgctgctgctagagatcgtcagcggcaagaggaacactggccaccacaactacggcgacttcgtcaacctgctcggatatgcatggcagctgtggagagacgggagggtgttcgagctgattgacccgacgctgggcgagcgcggcgacgtggcgaccatcgtgcggtgcgtcaaggtggcgctgctgtgcgtgcaggaaagcgccaccgaccggccgaccatggcggacgtcacggcgatgctggccaccgccggcgacgccgcgtccgccgggccgctcccggacccgaagcggccgccgcacttctccctcagggtggcgacgaccagcggcagcgacgacgactgtgggtcgcggacgcggttcaccacgtcgtgcagcaccaacgacctcaccatcacctccatccacgagggcaggtga

SEQ ID NO: 27793 - DNA, 2019 bp, Zea mays
  Peptide Sequence Number=SeqID_69572
atgaccacggttgcgcaccatcaccacctcgccgctgccaccgtgctcttcttcgtcgcattcaccatggcgcctctcgccgccggggaccccgtgggccagctctgcggtaccagcggcaactacacgctcaacagcacctaccagggcaacatccgccgcctcgccgccacgctgccgaagaacgcctccacctccgcgacgctcttcgccacggacaccttcggcgccgtcccggacatcgtctacgcgctcgcgctctgccgcggcgacacccaacgcctccgcctgcagcggctgcgtcgccgccgcgttcctggacgcgcagcagctaacttcctcgccgaccccagcagcgatggccgcgggaccgcgctcatcctcatgaacacgcagaacgtcaccgcgcggttcaaggtgttcgacgccgccgtcgccgcgctcctcaacgccaccgccgcctacgcggccgccaattcgtccaaaaggttcggcaccggggtcgaggcgttccagaacttcgacagcaaccgcccgaggatctacgggctggcgcagtgcacgccggacatgacgccggccgactgccagagctgcctctcgggtattatccagacggggcccaagtatttcagcgggaagcagggtggcaggattcttagtgtgcggtgcaactacaggtatgagcagtacccgttctttacaagcaccccactgcttcagctggcggagcctaccgtgggggccccggcgcccgcgcccgcggtggtcaacggaactccaacgccaccgacgaccggaggagcacgacgaggaacaacaggaaataaaactggtagagttttagccattacactgcctatagttgctgcagtgctagctactgtagtactttgttcatgcctctggaggaggaagaggaaaacacaagggaagtcgtcactaccagatacaactaaccctgaggacatacaaagtattgattccctcattattgatgtgtcaactctacgagctgcaacagaaaactttgctgaagccaataagctcggtgaaggaggttttggttcagtatataagggaatcctccccgatgaccaggaaatagcagtgaaaaggctctcgcagacttctagacaagggatggaggagctgaaaaacgagcttgtgttggttgctaaactgcaacacaagaatttagtgaggcttgtcggggtttgcttggaggaccatgaaaaattgcttgtctatgaatacatgcccaacaaaagccttgacaccattctatttaatcacgagagatgtggagagctggattgggggaagaggtttaagatagttaacgggatcgcccgtggcttgcagtaccttcatgaagattctcaggtgaagataatccacagggatcttaaagcgagcaatgttctgttagacaatgacttcaaccctaagatctcggattttggcttagcaaggctattcggaagtgagcaatcacgagatgtcaccaaccgcgtcgtcggaacctatggatacatggcccctgagtacgccatgcgtgggcactactctgtcaagtccgacgtgttcagcttcggcgttttaatcctagaaatcgtcaccggaaggcgaaatggtggctcctatagctctgaggaatcggccgatctccttagtctggtgtgggagcactggacgacggggacattggtggagatcatggatccatccttgagcagccttgctccacgagacctgatgttgaagtgcatccacatcggcctcctctgcgttcaagatgaccatgaggacaggccgatgatgtcgacagtgaatgtcatgcttagtagcagcacggtgaccctccaagctccatcgaggccggcgttttgcttcccgaagagtggcttcaactcagagatcaactcagaagtgtacccgccaggagcttatcagtccgcgagcaggtcgcccatgtcgctcaacgacgtctcaatcactgagctcgagcccagatga

SEQ ID NO: 27794 - DNA, 2568 bp, Zea mays
  Peptide Sequence Number=SeqID_69573
atggctgcgcggtgcagcggcggctgcgacgggcgcgaggacagcgccgtggaggcgctggtgcagtggcagaaggtgagcgacttcctgatcggggcgtcctacatgtccatcccgctggagctgctgcacttcgccacctgcgccgacctcgcgccgctgcggtgggtgctcctccagttcggcgccttcatcgtgctctgcggcctcgtccacctcgtcgccatcttcacctacgcccgcccggactcgcgccgcctcctgctggccatcaccgccgccaaggcgctggccgccgtcgccgcgtccgtcgccgccgtctccctccccaccttcgtcccgcagctgctccgcctcaagacccgcgaggcgctgctccgggacaaggcgcgccagctggaccgcgacgtcgccctcgtcaggcgccgcgaggagaccgccacgcgcatcgtccgcgccatcacgaagcacgtctgctgcggctgccacggcggagcctctctcgcgcccgacgtgctgcgcaccgctgtcttccacctctctgacgccctcggcctccacagctgcgccgtctggatgcccgcggctgcggcggcggccagtgatggtggccccagcttgctgcacctggtacatcggctgcctgaagatgaccaccaggacccgacgacgaggctggccatttgcagcactgaccctgacgtggccgccgtcatggctagcaagaacgccaaggtgctgaggccgggctcggcgctcaggaggacgacgtcgacgtctggtcatgggcacgcgggtgcggctgccatacggatgccgatgctcagagtgtccaacttcgtcgacgcatcatcctcattatccgatgggcagggagctggtgtcagctacgcgatcatggtcttggtccttccggctccagctccgaccactaagaatcacaggactagaggacccagaggagaaggaggaggaggagcacgagagtggagcaggcaggagctggagatcgtggaggttgcggcggaccagttagccgtggcgctgtcgcacgcggcagtgctgaaggagtggcagctgactcggcacaagctggccgagcggcagagggtcctggtgcatgcccggcatgacgcagcggtggccaccagggccagggacgcctcgcagagcgccatgcgcgacggcgtgctgaggccgatgcactccgtcgcggggctgctctccctgatgcaggcgcagcagcacgaggacgaggccttccgttgcaccgagcagagggtcgcggtgggtgccatggccaggatcagcgccctctccaccacgctgaccgacgacgtcatggcggcgctgctgacgccgacggctgccggcgtgagcttggcgcggaggccgttcgacccccgcgcgctggttaaggacgcggccggcgtggcggggtgcctcgcccgctgcagggggctcggcttctcgcatcgggcggagatgagctctctgcccgccggatgctgggtggtcggcgacgacaggcgagtgttccacctcctgctgcacatggttggcgttctgctggaccagtgcgaatgccattgccatgacctctgctttgccgtggacactgttccggtgggtgaccaagagaccatgtcaggctcaggccttcctgattggatcacccccaacttctctggctgcaacacggtgtgcgtcaggttccgatttgggatcacaagacacttcagaaacggcttactgctctcgtccagcccacgacctcaagaaagaatcacaagacgcaccagcgtcagcatcagttcagccagctccaagacgcggctaagcatcgctacgtgcaacaagatcgtgcagatgatgaacggcaagatgtggtgggaatccacgccagcgtccggaggccagcatgaagagcacatgagcctcatcctgcacttccagctcgtctatggagtggcatcaccctctgcctcctccccggcaggcggcggcggattctaccacatcggtggcagattcggagtgccctcgccgtccaccagtgctcctcctcagcacaacttcaacggcctgcgcgtcctgctcttgaacactgatgacaccagccgggaggtgacgcggaagctcctggagaggctcggctgccaggtgcttccagttccatcggccgcccgctgcctcagccttctactggggagcgccaccgccaccggcggcggcgatcagccgtcattccagtccccgtacttggtactgcaggcggtgcttgtagacctccacacacctgccgcagctatcgctgacgccgccactgcaatggatgatgggtttgaggttgccctcaggatccgggaggtcaccggcgacaggttcagctggctgctcatacttgtcgcgctgccactgccgccgagagcgagccgcatcgacgttcgcgacgtgtgcaagcggacgggagtgaatggcgtgatctacaaacccatcagtccatcacgctgccagcgctggcagctgagctttacagggttctccaaaacgacaactgaccggtga

SEQ ID NO: 27795 - DNA, 1194 bp, Zea mays
  Peptide Sequence Number=SeqID_69574
atgggcctctactcctctagtgggccgcaactgccgaccggggctgcagccccgggtggagatccgcccctggccgctacagtaacggcgccaaacacacagtctaggtcacaaaaggaagggtcagaaacggaccagttttggagcttactgggaggcaaatctgagtactcaggccaaaaaatggtgcaagaacttgaaagtgatccccatcttttctcatgcatcctgtcgaaaggcaatttgaaggtcaaagaaatgcaccactttactcaagatgatttaatgacagaagatgtttttgttctggactgtcacacgagcatattcgtttgggttggtcagcaggtggatgttaaactcaggttacaagctctggatgttggggagaaatttattgtgcttgatttccttatggaaaaccttgcccgtgaaacaccaattttcaccattatggagggaagcgagcctctcttcttcactagattcttcacctgggacttggcaaaatcactgatgcatggaaattcataccagaggaaactcgcaattgtaaaaggtggaggtgctccagcgttggataaaccgaaacgacgaacatccatctattcaggaaggagtactgcacaagataaatcccaacgccccagaagcatgtccttcagccctgagcgtgtccgtgttaggggaagatctccagcattcactgcattggcagctacttttgaaagttcaagcaacagaaatctttcgactccacctgtagttaagaaactttacccgagatctgttacacctgattcatcgaatacttccaagtcatctgtaattgccgctctggctggttctttggatcgcccttctcaaactcctgctccagcattcatgaaagatggttctgagtcagagaagccaaaacaggagggagatggtaaaggtgttcatactgtggccactagtgttgaatctctgactataaatgaagatgtaaaagaaaacgagccagaagatgaagacggccttcctatttacctgtatgaacgtctgaagaccacagctgttgatcctgtcactgaaattgatgtcacgaggcgagagacctacttatcttcgactgaatttcagagagaagtttgggatgacaaaaggaagcatttaagcaagcttccgaagtggaaagcgggacaagcttaa

SEQ ID NO: 27796 - DNA, 1839 bp, Zea mays
  Peptide Sequence Number=SeqID_69575
atggccgtcctcctcctccccccttgcctcgtctttctcctcctccagctattttccgcgccgtcagacggcgccaccgccgagtacgcggagtacacgtgcaatgggaccacgggcaacttcacctccggcagcgcgttcgccgccaacctggaccgcctcgtcgccgagctgccgggcaacgcctccgcctccccgttgctcttcgcgtcggcatccgcccccggctccgccgacgccgacaccgcgtacggcctcgcgctgtgccgcggggacgtgacggacgcgcgggcctgctcggcctgcctggcggacgccttctcccgcctgcgccgcctgtgcggcggggacccgggacgccacgttctacgccgacctgtgcacggcgcgatgtccatgtacggcgcgtacaactcgtcgcgccgcctcgccaccgccgtcatgttcatcaacgcgggcctgcccaccgtgtacggcctcgcgcagtgcaccccggacctcgcgcccgcgcagtgctggcactgcttccagggcctcggcgacctcaaccgccagtggtacgacggacgcgagggcgggcgcgtctccggcgtccgctgcagcttccgctacgagggctaccagttctaccagggcacgccggacgtcaggatcggcctgcaaggtggcccgtcctcctcgccggacgatgatggaaccagtgcaagcaaccacaaaaaggtcttaatcatcgctcttgtcgtaccaatcgctcttgtctgtggcgtgctggtcgccggccttctcctcaccagagcacaaaggaaacgagccgcgggaaacctgcgcgcgcgcaatgatccaggaaagacgaggctgccgacgcagatgcattctagaaacagctccaagacggaggaggcgctgaagctgtggcggatcgaggagaggagctcggagttcacgctctacgacttcgccgagctggcggccgcgacggctgacttctccgacgacaacctgctcggcaaaggcggcttcggccccgaggaagagaagatgctggtgtacgagtacatgcccaaccgcagcctggactgcttcatcttcgaccagcagcgggggccattgctggactgggagaagcggcgccgtatcatcgaggggatcgcgcaggggctgctctacctgcacaggcactcgcgggtgcgcatcatccaccgggacatgaaggctagcaacatcctgctggacaaggacatcaaccccaagatctccgacttcggcatggccaggatcttcgggtccaacatgacggaagccaacaccaacagggtcgtcggaacatatggctacatggctcccgagtacgcttccgagggcatcttctcggtcaagtcggacgtgtacagcttcggcgtgttgctgctggagattgtcagtggcaagaggaacagcggccaccaccagcaccagtacggcgacttcatcaacctcctcggatacgcctggcagctatggagggaagggagggcgttcgagctgatcgacccgacgctgggagagtgcaccgaggtggccgacatcgttcggtgcgtcaaggtggcgctgctgtgcgtgcaggacagcgccacggaccggcccaccatgaccgacgtgacggcgatgctggcaagcagggatggtggtgcggcggcgtcgctgccggacccgagacgcccgccgcacttctcgctcagggtcagcagcagcgacgacgggtcgtcggaggtgcggacgcggtcgcacggcaccgcgtcgttcagcaccaacgacctcaccatcaccaccgtccacccatggcagatgatgcatgcatga

SEQ ID NO: 27797 - DNA, 284 bp, Zea mays
  Peptide Sequence Number=SeqID_69576
atgggtatgaaaattgacccaaacccgtaccctaattgggtaaaaacccatcgggttacgggtttcggattgaggccgacgcgctaccgctacctcctcccagccgagccaccaccgtcactcctgatcatcctcctccccgccaccgtgccctctccactggccgtcgcctacctccaaatttcccagaccgaggcggcgcgacaggcgtccagcggcaccattcggcttttgaagatggagcgggtgctgctcgaggaggatgaagaggaccggttgttgag

SEQ ID NO: 27798 - DNA, 408 bp, Zea mays
  Peptide Sequence Number=SeqID_69577
atggcgtcgtcctgcgcgacaacgtcggcgagcgcgaagtcgacaaggtggaagcagtggccctatccgttcacctcgaccgcctccacctccttggctgcccatcggctgtccaccctaagatccgcggtgtacgtgtgtggcgtgcctccggtcgtaggccatgtacttctcagcgaggcacacgaggacacgtgtgcatgggtggaccgtccggaccaggagcgcggaccatccgtggttggcagaaaggatgcaacggctaggaagtggttggtggctataaatacaatcccaaccacctccattcatatgatccaagcatcacattcattcgcattcaattcaagagcaagcacttcatcccaagacacattcaaagcttccaaacttctccaagtgtcataa

SEQ ID NO: 27799 - DNA, 945 bp, Zea mays
  Peptide Sequence Number=SeqID_69578
atggcccatgtggcccacatccgagcggccgcgtcgagcgcttttctgccggtcgacttcgccccgccctccactgacgccgcccccggcgtctcttcaaaggacgtcgccatcctcccagacgcctgcctattggttcgcatttacctcccattgccccccctctccggaagttacagcggcaaactccccgtcctggtgttcttccacggcggcgggttctgcctcggttcggcgtttgatgcggcggtgcactcccacgccaaaccggttagccgcggctgccggcgcaatcatcgtgtcggactgtcggtggaataccgcctcgcgccagagcatccggtccccgctctctacggggacgcgtggacggcgctccagtgggtggccgcgcactccgtgggccgggggcaggaaccctggctgactgcccacgcggacctcgggcgcgtccacgtcggcggagagagcgcgggcgcgaacattgcccaccacgccgcgatgcgcgctggcagagaggagctgggccacggcgtgaagctcagctcgctcgtgatgatccatccctacttcctgggaggcgagagctccgagacagacgacatgggcgtagcgttgctccgcgagctcgtccggctgtggccggtggtgtgcccgggcacgagcgggtgcgatgacgacccgttgatcaatccgatggcagagggtgcccccaatctcgctagcttggggtgccgacgcgtactggtgtgcgtcgggggaaaggacccgatgagaggcagaggaaggctgtattgtgagaagctgaagagaagtgggtggcgcggggaggtggatgactgggaggcggacggccagggacacggtttccatctctcgtgccccatgagcgcagaggcggaggcgcaagtccgggtcatcgctgagtttctgacctacggatga

SEQ ID NO: 27800 - DNA, 114 bp, Zea mays
  Peptide Sequence Number=SeqID_69579
atggcggtcagacgggggattcttgcattgctcttcctagaaactgcagcgggttttctaaagctagtggaactttggtacaacctctacaatgaagcatacaagttgatctag

SEQ ID NO: 27801 - DNA, 1797 bp, Zea mays
  Peptide Sequence Number=SeqID_69580
atggggctctgccatggcaagccgacgcaaatcccggaggccgaggctgaggaggatccccacgtagcctccggcgcgggcgacggcggggacggggcgacctcgccgtcggcggcggcgcccgcggcgaagccaggcacgccgaaacagcccaagttcccgttctacctgccgagcccgctcccgccgtccagctacaagggctcgccggcaaactcgagcgtctcgtccaccccggcgcgcggcgggctcaagcgcccgttcccgccgccgtcgcctgccaagcacatccgcgctctcctcgcgcggcggcacggctcggtcaagcccaacgaggtgtccattcccgagggcggcgagccggagctcggcctggacaagagcttcggcttctccaagcacttcttcgctaagtacgacctcggcgaggagatcggccgcggccacttcggctacacgtgctccgccaaggccaagaagggcgagcacaagggccaggacgtcgccgtcaaagtcatccccaaggccaagggtgacctcgtcgcgctgatgacaacagctatcgccattgaagatgtgagaagagaagtgagaatactgagttctctgacaggtcacagtaacctagtgcagttctacgatgcttttgaggatgaagataacgtgtatatagttatggaattatgtaaaggaggtgaactgctggacaggatattggctaggggtggaaagtactctgaagaggatgcaaaggttgttatggtacaaattttgggtgtcgtatcattttgccatcttcaaggtgttgttcatcgtgatctgaagccggagaatttccttttctcttcaaaggacgaaaactctcccttgaaggtcatagattttggcctgtctgactttgtgaagccagacgaaagactaaatgatattgttggaagtgcatactacgttgctccagaggtgctccaccgatcttacggcactgaggcagatatgtggagcatcggagtaatcgcctacatcttgctatgcgggagccgacctttctgggcgcgcacggagtcaggaatcttccgggctgtcttgaaggcggaaccgagtttcgatgaggccccatggcccactctcacagctgaagctaaagatttcgtaaaaaggcttcttaacaaggattaccgcaagaggatgacagccgcgcaagctctgagccatccgtggatccgtaatgctcaacaagtgaaagttcctttggatatgatcatctataagctaatgagagcttacatcagctcgtcttcgctgcggaagtccgctttgagggccctagccaagacgctgacgacgaaccaactcttttatgtaagggagcagtttgaactgctgggcccaaacaagaacggctatatctcattgcaaaatctgaaatcggctttagtgaagaactccactgacgcgatgaaggactctagggttgttgactttgttaacacggtgtgcactcttcagtacaggaagctggacttcgaagagttcgccgcttccgccatcagcgtttaccagatggaagccttggagacgtgggagcagcacgcgcggcgtgcgtacgagctgttcgacaaggaaggaaaccggcccatcgtgatcgaagagcttgcatcggaactcgggcttggcccgtcggtgcctctccacgttgtcctccaggactggatccggcacgccgacgggaagctgagcttcctggggttcataaagctcttgcacggggtgtcgtcgcgctcgatccccaaggcctag

SEQ ID NO: 27802 - DNA, 1092 bp, Zea mays
  Peptide Sequence Number=SeqID_69581
atggcgaagaggctgctcccatctctgaaccgggtgctggttgagaagctggtgcagcccaagaagaccgccggcggcatcctcctcccggaaacatccaagcagctgaatgctgctaaagtggtggctgttggccctggtgagcgcgacaaggcaggcaatctgatcccagttgctctgaaggaaggtgacactgttctcctgccagagtatggtggaactgaagttaagcttgcagctgataaagaggctcggactcgggctaagtcccggaagacggcgaactccgctccgcctaacccagggctcggactcgggctaagtcccggaagacggcgaactccgcttcgcctgacccagggctcggactcgggctcagccccagaagacgacgaactccgctctgcccgacccagggctcggactcgggctcagccccggaagacgacgaactccgcttcgctcgaccccagggctcggactccgccctggcctctgctgaatgacctccgcctcgctcgacccaggggctcgggctcggcctcggccatggaagacagactcgacctcggcttcggaggagcctccacgtcgcccaacctagggcgcaggccagccacgtcaacaggaagcgccatcatcaccctaccccgagctgactcgggccgcagagaacaagaccgggctcggactcgggctaagcccaggaagacggcgaactccgctccgcccgacccagggctcggactcgggctaagccccggaagacagcgaactccgctccgcccgacccagggctcggactcgggctcagccccagaagacgacgaactccgcttcgcccgaccccagggctcggactccgccctggcctctaccgaacaacctccgcctcgcccgacccaggggctcgggctcggcctcggccatggaagacagactcgacctcggcttcggaggagcctccacgtcacccgacctagggcacaggccagccacgtcaacaggaagcgccatcatcaccctaccccgagccgactcgggccgcagagaacaagaccggtgtcccatctggctagctccgccagatag
